United States Patent Application Publication US 2017/0114356 A1 - sequence listing, part 103

SEQ ID NO: 197891 - protein, 626 aa, Zea Mays
MYFGLTSIILPSYFDGDLLTGRFNHAIQAMLTVMEHGEKLSGMAHLRELQNTLIQHGSSTHFSPQSKTQGTGALWNLIQLVGEKARRNMVLLMDRDNAEVFYSRVSDIEDLFYCLSHELQYIISREEHPSVQMQRALELANACITIVQAASHYKKDHKEWYPSPEGLITWNSQPVLRSGIWNLASLIMELLGESGAADMSMKSSLWSQLEGLTDILLEAYMCLLTAQFERGQEHGVLVQEYCERRDELLRSLYNLAKQIVEAKYQESRNGADKPDLKESILREVISPILATAKRHEGYQTLWQICYDLDDSGLLRSLMHDSVGPHGGFSFFVFKELVNRGDYSNLLRLGEEFQEELASFLKERSDLLWVHEICLNQFSSASDTLHTYALRRSPDGDASFTTSRKPLSFAERRRLLYLSKIAATAGKDIDYEVKVARIEADIRILKLQEEIVQHDPEYAQVKSTNTLLGPSELIEMCLRRDRELSLKAFEVFALTSSSFRSSNRGLLEACWMNATDQDDWVKLSEASMSEGWSDEVIEESLQATVLFKASRLCYSPDAVVYDGTFEDVLPVKKEDVHLRGLESKCLSVEEVLMQHEDFPDAGKLMMTAVIRGKEPIFTATEPVEMDS

SEQ ID NO: 197892 - protein, 628 aa, Zea Mays
MYFGLTSIILPSYFDGDLLTGRFNHAIQGAAMLTVMEHGEKLSGMAHLRELQNTLIQHGSSTHFSPQSKTQGTGALWNLIQLVGEKARRNMVLLMDRDNAEVFYSRVSDIEDLFYCLSHELQYIISREEHPSVQMQRALELANACITIVQAASHYKKDHKEWYPSPEGLITWNSQPVLRSGIWNLASLIMELLGESGAADMSMKSSLWSQLEGLTDILLEAYMCLLTAQFERGQEHGVLVQEYCERRDELLRSLYNLAKQIVEAKYQESRNGADKPDLKESILREVISPILATAKRHEGYQTLWQICYDLDDSGLLRSLMHDSVGPHGGFSFFVFKELVNRGDYSNLLRLGEEFQEELASFLKERSDLLWVHEICLNQFSSASDTLHTYALRRSPDGDASFTTSRKPLSFAERRRLLYLSKIAATAGKDIDYEVKVARIEADIRILKLQEEIVQHDPEYAQVKSTNTLLGPSELIEMCLRRDRELSLKAFEVFALTSSSFRSSNRGLLEACWMNATDQDDWVKLSEASMSEGWSDEVIEESLQATVLFKASRLCYSPDAVVYDGTFEDVLPVKKEDVHLRGLESKCLSVEEVLMQHEDFPDAGKLMMTAVIRGKEPIFTATEPVEMDS

SEQ ID NO: 197893 - protein, 602 aa, Zea Mays
MGRAAMLTVMEHGEKLSGMAHLRELQNTLIQHGSSTHFSPQSKTQGTGALWNLIQLVGEKARRNMVLLMDRDNAEVFYSRVSDIEDLFYCLSHELQYIISREEHPSVQMQRALELANACITIVQAASHYKKDHKEWYPSPEGLITWNSQPVLRSGIWNLASLIMELLGESGAADMSMKSSLWSQLEGLTDILLEAYMCLLTAQFERGQEHGVLVQEYCERRDELLRSLYNLAKQIVEAKYQESRNGADKPDLKESILREVISPILATAKRHEGYQTLWQICYDLDDSGLLRSLMHDSVGPHGGFSFFVFKELVNRGDYSNLLRLGEEFQEELASFLKERSDLLWVHEICLNQFSSASDTLHTYALRRSPDGDASFTTSRKPLSFAERRRLLYLSKIAATAGKDIDYEVKVARIEADIRILKLQEEIVQHDPEYAQVKSTNTLLGPSELIEMCLRRDRELSLKAFEVFALTSSSFRSSNRGLLEACWMNATDQDDWVKLSEASMSEGWSDEVIEESLQATVLFKASRLCYSPDAVVYDGTFEDVLPVKKEDVHLRGLESKCLSVEEVLMQHEDFPDAGKLMMTAVIRGKEPIFTATEPVEMDS

SEQ ID NO: 197894 - protein, 698 aa, Zea Mays
MFSPAIRRPHLPNRRDMAEEFQSPPPAAPAHSLSPRGFAVPDRPATGTPAPWNSSLLTRISTSKRADRTGDSDQIQPVHVADFPRVVRNAQASLKNFSGAAMLTVMEHGEKLSGMAHLRELQNTLIQHGSSTHFSPQSKTQGTGALWNLIQLVGEKARRNMVLLMDRDNAEVFYSRVSDIEDLFYCLSHELQYIISREEHPSVQMQRALELANACITIVQAASHYKKDHKEWYPSPEGLITWNSQPVLRSGIWNLASLIMELLGESGAADMSMKSSLWSQLEGLTDILLEAYMCLLTAQFERGQEHGVLVQEYCERRDELLRSLYNLAKQIVEAKYQESRNGADKPDLKESILREVISPILATAKRHEGYQTLWQICYDLDDSGLLRSLMHDSVGPHGGFSFFVFKELVNRGDYSNLLRLGEEFQEELASFLKERSDLLWVHEICLNQFSSASDTLHTYALRRSPDGDASFTTSRKPLSFAERRRLLYLSKIAATAGKDIDYEVKVARIEADIRILKLQEEIVQHDPEYAQVKSTNTLLGPSELIEMCLRRDRELSLKAFEVFALTSSSFRSSNRGLLEACWMNATDQDDWVKLSEASMSEGWSDEVIEESLQATVLFKASRLCYSPDAVVYDGTFEDVLPVKKEDVHLRGLESKCLSVEEVLMQHEDFPDAGKLMMTAVIRGKEPIFTATEPVEMDS

SEQ ID NO: 197895 - protein, 244 aa, Zea Mays
MLTVMEHGEKLSGMAHLRELQNTLIQHGSSTHFSPQSKTQGTGALWNLIQLVGEKARRNMVLLMDRDNAEVFYSRVSDIEDLFYCLSHELQYIISREEHPSVQMQRALELANACITIVQAASHYKKDHKEWYPSPEGLITWNSQPVLRSGIWNLASLIMELLGESGAADMSMKSSLWSQLEGLTDILLEAYMCLLTAQFERGQEHGVLVQEYCERRDELLRSLYNLAKQIVEAKYQESCVSFHK

SEQ ID NO: 197896 - protein, 81 aa, Zea Mays
MMWCLIINLYRQLYRLSSGTHTGSDFGDYCRKKKHSSKSSSCASLWRMWPWSSLRVTGGGSMQELKRLSARVLFYSISLFG

SEQ ID NO: 197897 - protein, 78 aa, Zea Mays
MFSTGLSFQVPVIQLLLGQLGLVSSDQMLSIWRYVVVGAVVAAAVLTPSTDPLTQMLLAGPLLGLYLGGAWMVKLTGR

SEQ ID NO: 197898 - protein, 113 aa, Zea Mays
MSIFDHLEELRERIFISVLAVGAAILGCFAFSKDLVLFLEAPVTVQGVRFLQLSPGEFFFTTLKVRLQKSGANILAFKIWLTIFLSFLFSTTLHPFLYSIQNNPCQIANLISN

SEQ ID NO: 197899 - protein, 187 aa, Zea Mays
MGSTGALLWHPSPQVHSGGVLFRQSRRIVRQRNLPLLSLADAALEPERRRGQRLRCAAGDGDGGPREAQKESPSGIGAALEDPSPGPPVENGSFRSPSQEEQSALYNFLYPSKDLLPDDKEMSIFDHLEELRERIFISVLAVGAAILGCFAFSKDLVLFLEAPVTVQGVRFLQLSPGEFFFTTLKVL

SEQ ID NO: 197900 - protein, 234 aa, Zea Mays
MGSTGALLWHPSPQVHSGGVLFRQSRRIVRQRNLPLLSLADAALEPERRRGQRLRCAAGDGDGGPREAQKESPSGIGAALEDPSPGPPVENGSFRSPSQEEQSALYNFLYPSKDLLPDDKEMSIFDHLEELRERIFISVLAVGAAILGCFAFSKDLVLFLEAPVTVQGVRFLQLSPGEFFFTTLKVRLQKSGANILAFKIWLTIFLSFLFSTTLHPFLYSIQNNPCQIANLISN

SEQ ID NO: 197901 - protein, 186 aa, Zea Mays
MSIFDHLEELRERIFISVLAVGAAILGCFAFSKDLVLFLEAPVTVQGVRFLQLSPGEFFFTTLKVSGYCGLLLGSPIILYEIIAFVIPDGAVESLWSIDQYFEFILVLMFSTGLSFQVPVIQLLLGQLGLVSSDQMLSIWRYVVVGAVVAAAVLTPSTDPLTQMLLAGPLLGLYLGGAWMVKLTGR

SEQ ID NO: 197902 - protein, 65 aa, Zea Mays
MGVNPPWQGCTYCKGEVQGTTATRAIAEATSGGERHDWLGLGANGFCCCLHTSMSWPFRLIPAGS

SEQ ID NO: 197903 - protein, 55 aa, Zea Mays
MKAKMQHTSTILPNNPTPQISKTTQFRFCFVIVISDRHKVEALDFIVAIPLLYSP

SEQ ID NO: 197904 - protein, 111 aa, Zea Mays
MEGGGWEVARTFHPRGAHLHPPRPPADLQSSTAHVLRAWGGGARPPSTLSYPSGPRSSLTFHRRRRIDLGNLCPPTRTTDSTTAPYNSPHCCRFNHCSPTSAPSIGLVGAR

SEQ ID NO: 197905 - protein, 897 aa, Zea Mays
MRRFFFFGSSAANAGDENGTPGSDSGTTHKKTLVADVGNESSGSCSTRLSRSRSRGQKRNKEEPANPKQLRRSMSFSSPATNTCLDERCFSFSGDVPCTLYDGFDAPQNVKDVAPNIWSPEGNPVLREYAINIPKDHSSMENDSPRSRCCSCSAGHSPVSSPIALRCRSTRLSNLLSKNEVLDRYIDRGHEDAMVNEKQRQYPSAASMVSTLGRPPRPQSTVPSIPKSMKGNTECYPDVDIKEDCLWQVAQEGTRDNCKITTMCDAGRNHVSMPDAFERDSATSVVDICEDLQEVRPPNVICPSAWEQETNDMLLQRAKEVESRFIVHCGDEYEFNIIRDKRMSSNDMFQLIQQLTEDRKQLTHELSSHIRAHVAERSAAKQQYKQSKKELDTRTRRLEKEKSERQTTLEREMDRRSHDWSVKLSRFQSEEERLHERVRELAEQNVSFQREVAFLEANKAEASTKVASLELQNNKLNDDLEKLRNEHEKLHNSSVDKDARFAEVVEERDHTREYLKDKEGENKALHKVIARLQTTCNEQERAITSLRQGCKAQLDKKFVECDSDKMRKLRMELIRLTGVEQKLRCEIRSCHLEVGSLRQENIALLNRLQVVGNGAPFSIRLDQELQARVDNLQVQGLSLLNKTSQLCTKLLDLMKHKKLENESFSGNDVLIVSNYTFEYQSIKGGIESLKRSLKTINSVLNEKQSVKEKSGETAARGSSSREQTDDFGLKLKEEAMLSRVLKEALLSKELDNGQLESDLSSSLRIQDVMRNETQRVQDELSCITHKAKQLELQVSKKDEAINELQQDLQESAKELASLRGTLKTVTEERDLSWQESKQLRRNINIMQNEVVSLKKKIEALDEDILLKEGQITILQDSIDKPFDIICSPRSMREFDME

SEQ ID NO: 197906 - protein, 841 aa, Zea Mays
MRRFFFFGSSAANAGDENGTPGSDSGTTHKKTLVADVGNESSGSCSTRLSRSRSRGQKRNKEEPANPKQLRRSMSFSSPATNTCLDERCFSFSGDVPCTLYDGFDAPQNVKDVASTRLSNLLSKNEVLDRYIDRGHEDAMVNEKQRQYPSAASMVSTLGRPPRPQSTVPSIPKSMKGNTECYPDVDIKEDCLWQVAQEGTRDNCKITTMCDAGRNHVSMPDAFERDSATSVVDICEDLQEVRPPNVICPSACPISGEQETNDMLLQRAKEVESRFIVHCGDEYEFNIIRDKRMSSNDMFQLIQQLTEDRKQLTHELSSHIRAHVAERSAAKQQYKQSKKELDTRTRRLEKEKSERQTTLEREMDRRSHDWSVKLSRFQSEEERLHERVRELAEQNVSFQREVAFLEANKAEASTKVASLELQNNKLNDDLEKLRNEHEKLHNSSVDKDARFAEVVEERDHTREYLKDKEGENKALHKVIARLQTTCNEQERAITSLRQGCKAQLDKKFVECDSDKMRKLRMELIRLTGVEQKLRCEIRSCHLEVGSLRQENIALLNRLQVVGNGAPFSIRLDQELQARVDNLQVQGLSLLNKTSQLCTKLLDLMKHKKLENESFSGNDVLIVSNYTFEYQSIKGGIESLKRSLKTINSVLNEKQSVKEKSGETAARGSSSREQTLKEEAMLSRVLKEALLSKELDNGQLESDLSSSLRIQDVMRNETQRVQDELSCITHKAKQLELQVSKKDEAINELQQDLQESAKELASLRGTLKTVTEERDLSWQESKQLRRNINIMQNEVVSLKKKIEALDEDILLKEGQITILQDSIDKPFDIICSPRSMREFDME

SEQ ID NO: 197907 - protein, 847 aa, Zea Mays
MRRFFFFGSSAANAGDENGTPGSDSGTTHKKTLVADVGNESSGSCSTRLSRSRSRGQKRNKEEPANPKQLRRSMSFSSPATNTCLDERCFSFSGDVPCTLYDGFDAPQNVKDVASTRLSNLLSKNEVLDRYIDRGHEDAMVNEKQRQYPSAASMVSTLGRPPRPQSTVPSIPKSMKGNTECYPDVDIKEDCLWQVAQEGTRDNCKITTMCDAGRNHVSMPDAFERDSATSVVDICEDLQEVRPPNVICPSACPISGEQETNDMLLQRAKEVESRFIVHCGDEYEFNIIRDKRMSSNDMFQLIQQLTEDRKQLTHELSSHIRAHVAERSAAKQQYKQSKKELDTRTRRLEKEKSERQTTLEREMDRRSHDWSVKLSRFQSEEERLHERVRELAEQNVSFQREVAFLEANKAEASTKVASLELQNNKLNDDLEKLRNEHEKLHNSSVDKDARFAEVVEERDHTREYLKDKEGENKALHKVIARLQTTCNEQERAITSLRQGCKAQLDKKFVECDSDKMRKLRMELIRLTGVEQKLRCEIRSCHLEVGSLRQENIALLNRLQVVGNGAPFSIRLDQELQARVDNLQVQGLSLLNKTSQLCTKLLDLMKHKKLENESFSGNDVLIVSNYTFEYQSIKGGIESLKRSLKTINSVLNEKQSVKEKSGETAARGSSSREQTDDFGLKLKEEAMLSRVLKEALLSKELDNGQLESDLSSSLRIQDVMRNETQRVQDELSCITHKAKQLELQVSKKDEAINELQQDLQESAKELASLRGTLKTVTEERDLSWQESKQLRRNINIMQNEVVSLKKKIEALDEDILLKEGQITILQDSIDKPFDIICSPRSMREFDME

SEQ ID NO: 197908 - protein, 855 aa, Zea Mays
MRRFFFFGSSAANAGDENGTPGSDSGTTHKKTLVADVGNESSGSCSTRLSRSRSRGQKRNKEEPANPKQLRSPNIWSPEGNPVLREYAINIPKDHSSMENDSPRSRCCSCSAGHSPVSSPIALRCRSTRLSNLLSKNEVLDRYIDRGHEDAMVNEKQRQYPSAASMVSTLGRPPRPQSTVPSIPKSMKGNTECYPDVDIKEDCLWQVAQEGTRDNCKITTMCDAGRNHVSMPDAFERDSATSVVDICEDLQEVRPPNVICPSAWEQETNDMLLQRAKEVESRFIVHCGDEYEFNIIRDKRMSSNDMFQLIQQLTEDRKQLTHELSSHIRAHVAERSAAKQQYKQSKKELDTRTRRLEKEKSERQTTLEREMDRRSHDWSVKLSRFQSEEERLHERVRELAEQNVSFQREVAFLEANKAEASTKVASLELQNNKLNDDLEKLRNEHEKLHNSSVDKDARFAEVVEERDHTREYLKDKEGENKALHKVIARLQTTCNEQERAITSLRQGCKAQLDKKFVECDSDKMRKLRMELIRLTGVEQKLRCEIRSCHLEVGSLRQENIALLNRLQVVGNGAPFSIRLDQELQARVDNLQVQGLSLLNKTSQLCTKLLDLMKHKKLENESFSGNDVLIVSNYTFEYQSIKGGIESLKRSLKTINSVLNEKQSVKEKSGETAARGSSSREQTDDFGLKLKEEAMLSRVLKEALLSKELDNGQLESDLSSSLRIQDVMRNETQRVQDELSCITHKAKQLELQVSKKDEAINELQQDLQESAKELASLRGTLKTVTEERDLSWQESKQLRRNINIMQNEVVSLKKKIEALDEDILLKEGQITILQDSIDKPFDIICSPRSMREFDME

SEQ ID NO: 197909 - protein, 735 aa, Zea Mays
MRRFFFFGSSAANAGDENGTPGSDSGTTHKKTLVADVGNESSGSCSTRLSRSRSRGQKRNKEEPANPKQLRRSMSFSSPATNTCLDERCFSFSGDVPCTLYDGFDAPQNVKDVAPNIWSPEGNPVLREYAINIPKDHSSMENDSPRSRCCSCSAGHSPVSSPIALRCRSTRLSNLLSKNEVLDRYIDRGHEDAMVNEKQRQYPSAASMVSTLGRPPRPQSTVPSIPKSMKGNTECYPDVDIKEDCLWQVAQEGTRDNCKITTMCDAGRNHVSMPDAFERDSATSVVDICEDLQEVRPPNVICPSACPISGEQETNDMLLQRAKEVESRFIVHCGDEYEFNIIRDKRMSSNDMFQLIQQLTEDRKQLTHELSSHIRAHVAERSAAKQQYKQSKKELDTRTRRLEKEKSERQTTLEREMDRRSHDWSVKLSRFQSEEERLHERVRELAEQNVSFQREVAFLEANKAEASTKVASLELQNNKLNDDLEKLRNEHEKLHNSSVDKDARFAEVVEERDHTREYLKDKEGENKALHKVIARLQTTCNEQERAITSLRQGCKAQLDKKFVECDSDKMRKLRMELIRLTGVEQKLRCEIRSCHLEVGSLRQENIALLNRLQVVGNGAPFSIRLDQELQARVDNLQVQGLSLLNKTSQLCTKLLDLMKHKKLENESFSGNDVLIVSNYTFEYQSIKGGIESLKRSLKTINSVLNEKQSVKEKSGETAARGSSSREQTYLSSVEE

SEQ ID NO: 197910 - protein, 212 aa, Zea Mays
MLSFANYSGDADSKILREIWARLLDEALTKGGVAEACSVVKRVGSKLDPADGACLPLDIICLHLEKAALDRLSSGEELVGDDDVARALLGACKGLPEPVLAVYDQLLLNGAIIPSLNLKLRLLRSVLAILREWGISVIAHRLGTTSTGASIFLDGTFSLNQTGTANQGARDKIISLANRYMTEVRRLNLPQNQTENVYRGFRELEEKLLSPY

SEQ ID NO: 197911 - protein, 1428 aa, Zea Mays
MKWPPLVEVAEIRQLPPMLIERYNTAAGEGTALCGIFSDIHRAWATVDNSFFVWHFDKWDGQCQEHNVDEQAICAVGLARAKSGIFIEAIQYLLVLATPVELILVGACCSASADGTDPYAELSLQPLPEYMIATDGVTMTCITCTEKGQIFLAGRDGHIYELQYTTGSGWRKRCRKVCLTTGIGSLLSRWVVPNTFKFSTVDPIVDMVMDEERNTIYTRTEGMKMQLFDLGANGDGPLTKITEEKNIVDPLDAPYGGRRTNAPPPRTARSPKPSIVCISPLSAMESKWLHAVVVLSDGKRLFLTTSGGIGSSVGLNSGLRRPTCLKIVATRPSPPLGVGGGLTFGAVSAAGRVHPEDLALKVESAFYSAGALIMSDSSATAMSSLLAVQKGSAAQLSLPSTFGTASRASRALRETVSALPVEGRMLCASDVLPLPDAAYMLQSLYADVECFTGFRKPFEKACIKLWAKGDLPTQHILPRRRVVVFNTMGLMEVIFNRPVDILRKLFDGNTLRSQIEEFFNRFGAGEAAAMCLMIAAKLLYAEDSLISNSVSEKAAEAFEDPGLVGMPQIAGTTALSNTRTQAGGFSMGQVVQEAEPLFSGAYEGLCLCSSRLLYPIWEFPIMVIRRPAGTNKCEDGVIVCRLSAGAMEILESKIHSLETFLRSRRNKRRGLYGYVAGLGDSGSILYKTGPIIGPGGHSNGRSPYNSQIQDMDPADKSASNKKPRLLYTSAELAAMEVRAMECLRRLLRRSGEALFLLQLICQHNVARLAQTLGNDLHKKLVQLTFHQLVCSEDGDQLAMCLISALMEYYIGPEGRGTVEEISTKLKEGCPSYFNESDYKYYLAVECLERAASMANNPDERDILARDAFNLLTKIPESADLSAICKRFENLRFYEAVVRLPLQKAQALDSNADITNGQIDPRHHDTIMLQREQCYEIVMNALRTLKGVGHSRMQSADKSSGVATAVDPASRTKYIKQILQLSVQWPDTVFHEHLYKTLIELGLENELLEYGGSDLASFLQSAGRKHQEEVRAVSSVTSGAAKLHDLSAPILTSQTKYLELLARYYVRKGERIAAARMFLILAERQCSNSEEVPTLDKRYEYLRDAVLQAKSAGIEADSSRKPIDSSTVDLLEGKLTVLRFQMQIKQELELMTARVENISSSSESPSGLFPRDNILADAEAAKAAKDKAKELSLNLKSITQLYNDYAVPFELWEVCLEMLSFANYSGDADSKILREIWARLLDEALTKGGVAEACSVVKRVGSKLDPADGACLPLDIICLHLEKAALDRLSSGEELVGDDDVARALLGACKGLPEPVLAVYDQLLLNGAIIPSLNLKLRLLRSVLAILREWGISVIAHRLGTTSTGASIFLDGTFSLNQTGTANQGARDKIISLANRYMTEVRRLNLPQNQTENVYRGFRELEEKLLSPY

SEQ ID NO: 197912 - protein, 1407 aa, Zea Mays
MAWGEDEAIGPDVASAGLHVSERIGRDAAAQPDLEEALEASRYASHPYSSHPKEWPPLVEVAEIRQLPPMLIERYNTAAGEGTALCGIFSDIHRAWATVDNSFFVWHFDKWDGQCQEHNVDEQAICAVGLARAKSGIFIEAIQYLLVLATPVELILVGACCSASADGTDPYAELSLQPLPEYMIATDGVTMTCITCTEKGQIFLAGRDGHIYELQYTTGSGWRKRCRKVCLTTGIGSLLSRWVVPNTFKFSTVDPIVDMVMDEERNTIYTRTEGMKMQLFDLGANGDGPLTKITEEKNIVDPLDAPYGGRRTNAPPPRTARSPKPSIVCISPLSAMESKWLHAVVVLSDGKRLFLTTSGGIGSSVGLNSGLRRPTCLKIVATRPSPPLGVGGGLTFGAVSAAGRVHPEDLALKVESAFYSAGALIMSDSSATAMSSLLAVQKGSAAQLSLPSTFGTASRASRALRETVSALPVEGRMLCASDVLPLPDAAYMLQSLYADVECFTGFRKPFEKACIKLWAKGDLPTQHILPRRRVVVFNTMGLMEVIFNRPVDILRKLFDGNTLRSQIEEFFNRFGAGEAAAMCLMIAAKLLYAEDSLISNSVSEKAAEAFEDPGLVGMPQIAGTTALSNTRTQAGGFSMGQVVQEAEPLFSGAYEGLCLCSSRLLYPIWEFPIMVIRRPAGTNKCEDGVIVCRLSAGAMEILESKIHSLETFLRSRRNKRRGLYGYVAGLGDSGSILYKTGPIIGPGGHSNGRSPYNSQIQDMDPADKSASNKKPRLLYTSAELAAMEVRAMECLRRLLRRSGEALFLLQLICQHNVARLAQTLGNDLHKKLVQLTFHQLVCSEDGDQLAMCLISALMEYYIGPEGRGTVEEISTKLKEGCPSYFNESDYKYYLAVECLERAASMANNPDERDILARDAFNLLTKIPESADLSAICKRFENLRFYEAVVRLPLQKAQALDSNADITNGQIDPRHHDTIMLQREQCYEIVMNALRTLKGVGHSRMQSADKSSGVATAVDPASRTKYIKQILQLSVQWPDTVFHEHLYKTLIELGLENELLEYGGSDLASFLQSAGRKHQEEVRAVSSVTSGAAKLHDLSAPILTSQTKYLELLARYYVRKGERIAAARMFLILAERQCSNSEEVPTLDKRYEYLRDAVLQAKSAGIEADSSRKPIDSSTVDLLEGKLTVLRFQMQIKQELELMTARVENISSSSESPSGLFPRDNILADAEAAKAAKDKAKELSLNLKSITQLYNDYAVPFELWEDRLSSGEELVGDDDVARALLGACKGLPEPVLAVYDQLLLNGAIIPSLNLKLRLLRSVLAILREWGISVIAHRLGTTSTGASIFLDGTFSLNQTGTANQGARDKIISLANRYMTEVRRLNLPQNQTENVYRGFRELEEKLLSPY

SEQ ID NO: 197913 - protein, 966 aa, Zea Mays
MAWGEDEAIGPDVASAGLHVSERIGRDAAAQPDLEEALEASRYASHPYSSHPKEWPPLVEVAEIRQLPPMLIERYNTAAGEGTALCGIFSDIHRAWATVDNSFFVWHFDKWDGQCQEHNVDEQAICAVGLARAKSGIFIEAIQYLLVLATPVELILVGACCSASADGTDPYAELSLQPLPEYMIATDGVTMTCITCTEKGQIFLAGRDGHIYELQYTTGSGWRKRCRKVCLTTGIGSLLSRWVVPNTFKFSTVDPIVDMVMDEERNTIYTRTEGMKMQLFDLGANGDGPLTKITEEKNIVDPLDAPYGGRRTNAPPPRTARSPKPSIVCISPLSAMESKWLHAVVVLSDGKRLFLTTSGGIGSSVGLNSGLRRPTCLKIVATRPSPPLGVGGGLTFGAVSAAGRVHPEDLALKVESAFYSAGALIMSDSSATAMSSLLAVQKGSAAQLSLPSTFGTASRASRALRETVSALPVEGRMLCASDVLPLPDAAYMLQSLYADVECFTGFRKPFEKACIKLWAKGDLPTQHILPRRRVVVFNTMGLMEVIFNRPVDILRKLFDGNTLRSQIEEFFNRFGAGEAAAMCLMIAAKLLYAEDSLISNSVSEKAAEAFEDPGLVGMPQIAGTTALSNTRTQAGGFSMGQVVQEAEPLFSGAYEGLCLCSSRLLYPIWEFPIMVIRRPAGTNKCEDGVIVCRLSAGAMEILESKIHSLETFLRSRRNKRRGLYGYVAGLGDSGSILYKTGPIIGPGGHSNGRSPYNSQIQDMDPADKSASNKKPRLLYTSAELAAMEVRAMECLRRLLRRSGEALFLLQLICQHNVARLAQTLGNDLHKKLVQLTFHQLVCSEDGDQLAMCLISALMEYYIGPEGRGTVEEISTKLKEGCPSYFNESDYKYYLAVECLERAASMANNPDERDILARDAFNLLTKIPESADLSAICKRFENLRKLKHLTPMLILPMVKLIQGIMIP

SEQ ID NO: 197914 - protein, 1049 aa, Zea Mays
MAWGEDEAIGPDVASAGLHVSERIGRDAAAQPDLEEALEASRYASHPYSSHPKEWPPLVEVAEIRQLPPMLIERYNTAAGEGTALCGIFSDIHRAWATVDNSFFVWHFDKWDGQCQEHNVDEQAICAVGLARAKSGIFIEAIQYLLVLATPVELILVGACCSASADGTDPYAELSLQPLPEYMIATDGVTMTCITCTEKGQIFLAGRDGHIYELQYTTGSGWRKRCRKVCLTTGIGSLLSRWVVPNTFKFSTVDPIVDMVMDEERNTIYTRTEGMKMQLFDLGANGDGPLTKITEEKNIVDPLDAPYGGRRTNAPPPRTARSPKPSIVCISPLSAMESKWLHAVVVLSDGKRLFLTTSGGIGSSVGLNSGLRRPTCLKIVATRPSPPLGVGGGLTFGAVSAAGRVHPEDLALKVESAFYSAGALIMSDSSATAMSSLLAVQKGSAAQLSLPSTFGTASRASRALRETVSALPVEGRMLCASDVLPLPDAAYMLQSLYADVECFTGFRKPFEKACIKLWAKGDLPTQHILPRRRVVVFNTMGLMEVIFNRPVDILRKLFDGNTLRSQIEEFFNRFGAGEAAAMCLMIAAKLLYAEDSLISNSVSEKAAEAFEDPGLVGMPQIAGTTALSNTRTQAGGFSMGQVVQEAEPLFSGAYEGLCLCSSRLLYPIWEFPIMVIRRPAGTNKCEDGVIVCRLSAGAMEILESKIHSLETFLRSRRNKRRGLYGYVAGLGDSGSILYKTGPIIGPGGHSNGRSPYNSQIQDMDPADKSASNKKPRLLYTSAELAAMEVRAMECLRRLLRRSGEALFLLQLICQHNVARLAQTLGNDLHKKLVQLTFHQLVCSEDGDQLAMCLISALMEYYIGPEGRGTVEEISTKLKEGCPSYFNESDYKYYLAVECLERAASMANNPDERDILARDAFNLLTKIPESADLSAICKRFENLRFYEAVVRLPLQKAQALDSNADITNGQIDPRHHDTIMLQREQCYEIVMNALRTLKGVGHSRMQSADKSSGVATAVDPASRTKVLVVSIKKRFGQFLQLHLELLSCMI

SEQ ID NO: 197915 - protein, 1071 aa, Zea Mays
MAWGEDEAIGPDVASAGLHVSERIGRDAAAQPDLEEALEASRYASHPYSSHPKEWPPLVEVAEIRQLPPMLIERYNTAAGEGTALCGIFSDIHRAWATVDNSFFVWHFDKWDGQCQEHNVDEQAICAVGLARAKSGIFIEAIQYLLVLATPVELILVGACCSASADGTDPYAELSLQPLPEYMIATDGVTMTCITCTEKGQIFLAGRDGHIYELQYTTGSGWRKRCRKVCLTTGIGSLLSRWVVPNTFKFSTVDPIVDMVMDEERNTIYTRTEGMKMQLFDLGANGDGPLTKITEEKNIVDPLDAPYGGRRTNAPPPRTARSPKPSIVCISPLSAMESKWLHAVVVLSDGKRLFLTTSAGRVHPEDLALKVESAFYSAGALIMSDSSATAMSSLLAVQKGSAAQLSLPSTFGTASRASRALRETVSALPVEGRMLCASDVLPLPDAAYMLQSLYADVECFTGFRKPFEKACIKLWAKGDLPTQHILPRRRVVVFNTMGLMEVIFNRPVDILRKLFDGNTLRSQIEEFFNRFGAGEAAAMCLMIAAKLLYAEDSLISNSVSEKAAEAFEDPGLVGMPQIAGTTALSNTRTQAGGFSMGQVVQEAEPLFSGAYEGLCLCSSRLLYPIWEFPIMVIRRPAGTNKCEDGVIVCRLSAGAMEILESKIHSLETFLRSRRNKRRGLYGYVAGLGDSGSILYKTGPIIGPGGHSNGRSPYNSQIQDMDPADKSASNKKPRLLYTSAELAAMEVRAMECLRRLLRRSGEALFLLQLICQHNVARLAQTLGNDLHKKLVQLTFHQLVCSEDGDQLAMCLISALMEYYIGPEGRGTVEEISTKLKEGCPSYFNESDYKYYLAVECLERAASMANNPDERDILARDAFNLLTKIPESADLSAICKRFENLRFYEAVVRLPLQKAQALDSNADITNGQIDPRHHDTIMLQREQCYEIVMNALRTLKGVGHSRMQSADKSSGVATAVDPASRTKYIKQILQLSVQWPDTVFHEHLYKTLIELGLENELLEYGGSDLASFLQSAGRKHQEEVCRNPCFPIKIRNHGYMISTSIKLETLSGLSTCW

SEQ ID NO: 197916 - protein, 952 aa, Zea Mays
MAWGEDEAIGPDVASAGLHVSERIGRDAAAQPDLEEALEASRYASHPYSSHPKEWPPLVEVAEIRQLPPMLIERYNTAAGEGTALCGIFSDIHRAWATVDNSFFVWHFDKWDGQCQEHNVDEQAICAVGLARAKSGIFIEAIQYLLVLATPVELILVGACCSASADGTDPYAELSLQPLPEYMIATDGVTMTCITCTEKGQIFLAGRDGHIYELQYTTGSGWRKRCRKVCLTTGIGSLLSRWVVPNTFKFSTVDPIVDMVMDEERNTIYTRTEGMKMQLFDLGANGDGPLTKITEEKNIVDPLDAPYGGRRTNAPPPRTARSPKPSIVCISPLSAMESKWLHAVVVLSDGKRLFLTTSGGIGSSVGLNSGLRRPTCLKIVATRPSPPLGVGGGLTFGAVSAAGRVHPEDLALKVESAFYSAGALIMSDSSATAMSSLLAVQKGSAAQLSLPSTFGTASRASRALRETVSALPVEGRMLCASDVLPLPDAAYMLQSLYADVECFTGFRKPFEKACIKLWAKGDLPTQHILPRRRVVVFNTMGLMEVIFNRPVDILRKLFDGNTLRSQIEEFFNRFGAGEAAAMCLMIAAKLLYAEDSLISNSVSEKAAEAFEDPGLVGMPQIAGTTALSNTRTQAGGFSMGQVVQEAEPLFSGAYEGLCLCSSRLLYPIWEFPIMVIRRPAGTNKCEDGVIVCRLSAGAMEILESKIHSLETFLRSRRNKRRGLYGYVAGLGDSGSILYKTGPIIGPGGHSNGRSPYNSQIQDMDPADKSASNKKPRLLYTSAELAAMEVRAMECLRRLLRRSGEALFLLQLICQHNVARLAQTLGNDLHKKLVQLTFHQLVCSEDGDQLAMCLISALMEYYIGPEGRGTVEEISTKLKEGCPSYFNESDYKYYLAVECLERAASMANNPDERDILARDAFNLLTKIPESADLSAICKRFENLRNASSAARWH

SEQ ID NO: 197917 - protein, 361 aa, Zea Mays
MADEFSAELADGVAFVSGHDDDGRPVFRIKQEYPKFRSPKSFVRLLVLTLEVAVACMSRSVDQLVLLFDASFFRSASAFLNLLMGTLKIVADYYPGRLHRAFVIDAPSLFSVLWKGVRPFVELAPATAVVCSLDFEDSLEDASFTAYPRTASLRFEPPPAAVTGKAGVGSASSRFSVTPTDNPVKPWYLCTIPASVGSRSVVPTSSSSPSLVGASPLSARSFSFASPAALRSTPFPRGGGAPPTPSSAVTGHKIPPPPQFPRTPRPSFLQSPSTLFAFRKDGQQTSRVERERGSFLPYLRFYRRPYDEISYRAMMRPPLGGLIPIVEKFKHKPVQQTLRRHAGLHQHQQQQHHHYQQQQRI

SEQ ID NO: 197918 - protein, 553 aa, Zea Mays
MEGHNGLLQLGYNQLTGSIPTQLGHLNKLTVLALQSNQLSGAIPASLGDLPALARLDLSSNQLFGSIPSKLAEIPRLATLDLRNNTLSGSVPSGLKKLNEGFLYENNPELCGAQFDSLKACPNDGNDDGRTPRKPESTSVKPQQIQKTADLNRNCGDGGCSKPSTLSTGAVVAGTVVIVAGAAACGLSAFSWHRRQKQKVGSSSVEHLEGRPSLDRSKEAYQRSAVSSLMNVEYSSGGWDTSSEGSQSQHGVARLSSSTEGGSPSVRSFNLEEVECATQYFSDANLIGKSGFAATYKGVLRDGTAVAVKSISKNSCKSEEADFLRGLRTLTSLRHENLVGLRGFCRSRASGGCFLVYEFMANGSLSRYLDAKEGDAADAAAVLDWPTRVSIIKGVAKGIEYLHSSKLAHQSISADKVLLDHLYAPRLSGAGLHRLLADDVVFAALKDSAAMGYLAPEYATTGRSTDKQGDVYAFGVVVLQVLAGRRAVSPPHLQQGGGGGGRLDDLVDPRLRGRFSRAEAAKLAGVALLCTAEAPAQRPTMTAVLQQLGTSSQ

SEQ ID NO: 197919 - protein, 314 aa, Zea Mays
MDPPPRRLAAPLLLLLLAAASPAARAWKKDEFRNCNQTPFCKRARTRAPHSLEAPLSLAAGSLAVSPDGSISAELSHPSRPRPLVLRLSVLPPHALRLQIDEDYSTATPCWPGSSSYPDMLNPEIREWWADKFSYENYKGSTPTLYIWNDMNEPSVFNGPEVTMPRDAMHYGDVEHRELHNAYGYYFHMATADGLLKRDKGKHRPFVLSRAFFAGSQRYGAVWTGDNSADWDHLKSSIPMVLILGLTGLPFSGADVGGFFGNPEPDLLVRWYQVGAFYPFFRGHAHHDTKRREPWLFGERRTAIIREAIHMRIP

SEQ ID NO: 197920 - protein, 175 aa, Zea Mays
MDTVTVKCGHCNNLSYLSPRPPMVQPLSPTDHPLGPFQCQGPCSECRRNQPLPLASPTSTDLTPRMPFVVKPPEKKHRLPSAYNRFMREEIQRIKAAKPDIPHREAFSMAAKNWAKCDPRCSTTASTATSNSAPEPARVVVPTPHVTEPRFDLEDRAKEHVIESFDIFKQIERNI

SEQ ID NO: 197921 - protein, 192 aa, Zea Mays
MCHTCFLGEVGVPCKRLMDTVTVKCGHCNNLSYLSPRPPMVQPLSPTDHPLGPFQCQGPCSECRRNQPLPLASPTSTDLTPRMPFVVKPPEKKHRLPSAYNRFMREEIQRIKAAKPDIPHREAFSMAAKNWAKCDPRCSTTASTATSNSAPEPARVVVPTPHVTEPRFDLEDRAKEHVIESFDIFKQIERNI

SEQ ID NO: 197922 - protein, 428 aa, Zea Mays
MTWTSGYGTNEATPFVRWGIEGQIQTLSPAGTLTFSRDTMCGPPARTVGWRDPGFIHTSFLKDLWPNLLYTYQVGHRIFNGSIVWGHQYSFKAPPYPGEDSLQRVVILGDMGKAEVDGSNEFNDFEPGSLNTTNQLIKDLKNIDVVFHIGDITYANGYLSQWDQFTAQVEPIASTVPYMVGSGNHERDWPGSGSFYGNLDSGGECGVPAQNMFYVPAENREQFWYSTDYGMFRFCVANTELDWRPGTEQYRFIEHCLSSVDRQKQPWLIFLAHRVLGYSSATFYADEGTTEEPMGRESLQPLWQKYKVDIAMYGHVHGYERTCPVYENACVAKGSDLYAGAFTATTHVVVGGGGASLADYTAARARWSHVRDRDFGFVKLTAFNHTRLLLEYKKSRDGSVHDHFTISRDYRDVLACGVDNCPSTTLAS

SEQ ID NO: 197923 - protein, 289 aa, Zea Mays
MAPLGARSISTQIVRNRMKSVRNIQKITKAMKMVAASKLRAVQTRTENSRGLWQPFTALLGDAPSVDVKKNVIVAITSDKGLCGGINSTSVKVSRALHKLTSGPEKETKYVILGEKGKVQLLRDSKDSIEMTATELQKNPINYTQVAVLADDILKNVEYDALRVIFNKFQSVISFKPTMVTILSPEVAEKESEAGGKMGDLDSYEIEGGETKSEILQNLAEFQFSCVLYNGALENACSELGARMSAMDSSSRNAGDMLDRLTLTYNRTRQASITTELTEIISGASALEG

SEQ ID NO: 197924 - protein, 1553 aa, Zea Mays
MSHFHPTQHASDNDFQMWQQQMMFKHLQEFQRQQQLQQSDHGARMQLSFGQFHAPAKPLPGDQLSTMSNEMVNNETMNSGWPHNFTGGDLSLTSNSQMLNNGSTNWDQIVGSPVVGNFMNGSMFVNAHNQSMRPMGLATHQVDQTFYPMHATSSRGPGNQYSQFLGIPADPQSEAARVGPVQSEKTSRPFNSSMNELGLHMQGTTSLMHNFRGKGGFLNNSLMQSQGDNIRAGSPVTMNQLQHGFQTQDFHGRPNQVDLQAGMQEKSAMQVGQASRGASLDPTEEKILFGSDEDSNWGALLRGDNDNVNSLDNDNYGGGYSSLQSGSWSALMQEALQSTTSESPKEEWSGLSFHKTEQVMASNANLSGRNGSKFTGLSGANLENARPSPASSYADGTMNNPNLASFQHVIRPPSERRDHMSHESSNAPVNNHQSTSEVNKGYFQQGIKQIHSDARQGQAHLVNGTWPHQKTELLRSNLQSTGVHATPPGGHGFGMSQQIATDHNINRESSNNQNDWKANNALGQDMCNSQNIFNSNENSWKSTGGNANSVQRFQQRRSDVSATNESSDGKNISMMSSSMPMMTQDHYQMVTSQSGEQIGMNRNLTHRAPETSESPGKSAEQRPGDFNQEYLNAIPNERETHISNHGRHITSDSAPRRHSVSAGKESENLGQSSQQAMGSYILQNRAMGSSGMNIGLSPGNPMSNSLFPPQTRNSLQHHFGTNSHVSNSMPSASEKMMMAQEQLQSRHGLPNSSSASTLGGADTGLSQNRAVQNSQHMLQLLHKVDNSRNSNVVADIPNNSLGVVSAQQQLNHSSLQGFGLRLAPPSQLQSISGNLWSSQTNADGKQFYQDGDRTQLPSTPSQSLTPQHQNSLSSPFHSSETENTGQPIACFPQLGSGQQYPMADDRSGPAPMLQQQPQQSNSATVFKNVWTNISAQRLTGMQPNKITPNIIQSMMFPNNAAASNLWSSQKADDQGQRASTPSDIATSSANSQNQSPKQAADSDAKLASSQKGNLELTGTTVTGGNESLQKPSSDENSINAVSSFAQLRQQGILGAKHGENPGANFQAMNVSHNNANHSGGIVLHGSPAPTNIQQQNYSLLHQMQTSRHMDVDPGSLSGKTTKPDIGSDAAQIDWNSGQRFAHVTNNSTKSSADNIGSPGVPGSFTSDLKMLSFASRNEERNPNIPSRFPSGECPSPGMITTQDDNQNQVQHMGTGAMSNSDERSERPRINPQMAPSWFGHYGNYRNGQSVATLNAATLNAQKPMALPFNFPKASRNNENNSHAENRVEPSQSVRPGHHLPSARMEALVPSNVKVSSMMRRPKKRKTMDSTLVSWHKIIESPRKLRGISTPEMDWAWAANRLIEKDEAETPDDAPLNYLPRKRLILTSQLIQQLLPAIPATILRAQAVSAYGSATYTLSMLTLRDACSMASSSYNSCSPVEDENNPSEQPSAKKMEDRVSKVVEVFVGRIRKMENDFISLNKRASMLDVQLECQDLERISIVNRLGRFHGRSHAAAVESSSAPEMTPRRIFPERHVMSFAVPGNLPEGVCCLSL

SEQ ID NO: 197925 - protein, 1197 aa, Zea Mays
MSHFHPTQHASDNDFQMWQQQMMFKHLQEFQRQQQLQQSDHGARMQLSFGQFHAPAKPLPGDQLSTMSNEMVNNETMNSGWPHNFTGGDLSLTSNSQMLNNGSTNWDQIVGSPVVGNFMNGSMFVNAHNQSMRPMGLATHQVDQTFYPMHATSSRGPGNQYSQFLGIPADPQSEAARVGPVQSEKTSRPFNSSMNELGLHMQGTTSLMHNFRGKGGFLNNSLMQSQGDNIRAGSPVTMNQLQHGFQTQDFHGRPNQVDLQAGMQEKSAMQVGQASRGASLDPTEEKILFGSDEDSNWGALLRGDNDNVNSLDNDNYGGGYSSLQSGSWSALMQEALQSTTSESPKEEWSGLSFHKTEQVMASNANLSGRNGSKFTGLSGANLENARPSPASSYADGTMNNPNLASFQHVIRPPSERRDHMSHESSNAPVNNHQSTSEVNKGYFQQGIKQIHSDARQGQAHLVNGTWPHQKTELLRSNLQSTGVHATPPGGHGFGMSQQIATDHNINRESSNNQNDWKANNALGQDMCNSQNIFNSNENSWKSTGGNANSVQRFQQRRSDVSATNESSDGKNISMMSSSMPMMTQDHYQMVTSQSGEQIGMNRNLTHRAPETSESPGKSAEQRPGDFNQEYLNAIPNERETHISNHGRHITSDSAPRRHSVSAGKESENLGQSSQQAMGSYILQNRAMGSSGMNIGLSPGNPMSNSLFPPQTRNSLQHHFGTNSHVSNSMPSASEKMMMAQEQLQSRHGLPNSSSASTLGGADTGLSQNRAVQNSQHMLQLLHKVDNSRNSNVVADIPNNSLGVVSAQQQLNHSSLQGFGLRLAPPSQLQSISGNLWSSQTNADGKQFYQDGDRTQLPSTPSQSLTPQHQNSLSSPFHSSETENTGQPIACFPQLGSGQQYPMADDRSGPAPMLQQQPQQSNSATVFKNVWTNISAQRLTGMQPNKITPNIIQSMMFPNNAAASNLWSSQKADDQGQRASTPSDIATSSANSQNQSPKQAADSDAKLASSQKGNLELTGTTVTGGNESLQKPSSDENSINAVSSFAQLRQQGILGAKHGENPGANFQAMNVSHNNANHSGGIVLHGSPAPTNIQQQNYSLLHQMQTSRHMDVDPGSLSGKTTKPDIGSDAAQIDWNSGQRFAHVTNNSTKSSADNIGSPGVPGSFTSDLKMLSFASRNEERNPNIPSRFPSGECPSPG

SEQ ID NO: 197926 - protein, 115 aa, Zea Mays
MFVSEQKLKRLLLLEFLSIALKEGVELQTSLNWGDELYDGESNELQSIGLQSGDAYSPPENWCAERLGSQRPGNLPLHEVLQVYLTTWHANMNINRSRIGEIFELVEEEMKIKLS

SEQ ID NO: 197927 - protein, 390 aa, Zea Mays
MEPTRLLLLLLVLGVSLQGCIAQGGGGAGGLTRGSFPKGFVFGTASSAYQYEGAVKEDGRGKTIWDKFAHTFGKVADLSNADVAVDQYHRFEEDIQLMADMGMDAYRFSIAWSRILPNGTGQVNQAGVDHYNRFIDALLSKGIEPYVTLYHWDLPQALEDRYNGWLDRQIVYDFAEYAETCFEAFGDRVRHWVTLNEPHTVAVQGYDAGLQAPGRCSLLLHLYCRSGDSATEPYVVAHNFILAHAKVSDVYRKKYKAAQNGELGIAFDVMWFEPMTNTTADIEAAKRGQEFQLGWFADPFFFGDYPASMRSRVGDRLPRFTAAEAALVKGALDFVGINHYTTYYTKHNSTDLVGRLLHNTLADTGTISLRTGKPSVTGPTRSGCTSCPAG

SEQ ID NO: 197928 - protein, 453 aa, Zea Mays
MEPTRLLLLLLVLGVSLQGCIAQGGGGAGGLTRGSFPKGFVFGTASSAYQYEGAVKEDGRGKTIWDKFAHTFGKVADLSNADVAVDQYHRFEEDIQLMADMGMDAYRFSIAWSRILPNGTGQVNQAGVDHYNRFIDALLSKGIEPYVTLYHWDLPQALEDRYNGWLDRQIVYDFAEYAETCFEAFGDRVRHWVTLNEPHTVAVQGYDAGLQAPGRCSLLLHLYCRSGDSATEPYVVAHNFILAHAKVSDVYRKKYKAAQNGELGIAFDVMWFEPMTNTTADIEAAKRGQEFQLGWFADPFFFGDYPASMRSRVGDRLPRFTAAEAALVKGALDFVGINHYTTYYTKHNSTDLVGRLLHNTLADTGTISLPFRNGKAIGDRANSIWLYIVPSGMRSLMNYVKERYNSPPIYVTENGMDDGNSPFTSIKDALKDSKRVKYHNDYLTNLAASIKQG

SEQ ID NO: 197929 - protein, 487 aa, Zea Mays
MNTSRLLEKEVKMAGGFRVLHLVRPFLAFLPEVQSADRKIPFREKVIYTVISLFIFLVCSQLPLYGIHSTTGADPFYWMRVILASNRGTVMELGITPIVTSGMVMQLLVGSKIIEVDNSVREDRALLNGAQKLLGILIAIGEAVAYVLSGMYGSVSQLGTGNAILIILQLFFAGIIVICLDELLQKGYGLGSGISLFIATNICENIIWKAFSPTTINSGRGAEFEGAVIALFHLLITRTDKVRALREAFYRQNLPNVTNLLATVLVFLIVIYFQGFRVVLPVRSKNARGQQGSYPIKLFYTSNMPIILHSALITNLYFISQLLYRKYSGNFLVNLLGMWKESEYSGHSVPVGGLAYYVTAPSSLADVLANPFHALFYVVFMLSACALFSKTWIEVSGSSAKDVAKQLKEQQMVMPGHRESNLQKELNRYIPTAAAFGGVCIGALTVLADFMGAIGSGTGILLAVTIIYQYFETFEKERATELGFFGF

SEQ ID NO: 197930 - protein, 216 aa, Zea Mays
METSAATPTRPPHQAATSPSPSPSSSLRLWRPAAQRNMRNQWSHLSAAKEQWLAAVADGRAHASALVNVHLSCRNMPAMDLGVLKDMPGIRDKANSKLALREEQYSGMLLSAYKEMFSDRQDNLNDSGDGGGAPVFKWFSVLEFGGLIISCFYGLSHHYDLSSVGCDNDLLTHLYLRLLRALYILTFEDADQYLRQYTHSCLHVLNPHDKNILCFL

SEQ ID NO: 197931 - protein, 268 aa, Zea Mays
METSAATPTRPPHQAATSPSPSPSSSLRLWRPAAQRNMRNQWSHLSAAKEQWLAAVADGRAHASALVNVHLSCRNMPAMDLGVLKDMPGIRDKANSKLALREEQYSGMLLSAYKEMFSDRQDNLNDSGDGGGAPVFKWFSVLEFESLAQELVQMFVSEQKLKRLLLLEFLSIALKEGVELQTSLNWGDELYDGESNKLQSIGLQSGDAYSPPENWCAERLGSQRPGNLPLHEVLQVYLTTWHANMNINRSRIGEIFELVEEEMKIKLS

SEQ ID NO: 197932 - protein, 547 aa, Zea Mays
METSRRPKPIHPQGGIHDPVRSSPRALLQTLAMSTAAAAKTPIKALGSAAAGAMTPTKSQAPAAAKTPCTSRARSSHASENSNPNIPGTPPPPQSTPSKPSLKSPAGAGARSATAKKKPSTPAPAAPPLERERERRFLVAKKGARRRRNVGTMGGGGGGRGGEIDFDKCREAAREALRASQGEFFRKEVAASTATGEDQLGQEEEGKPLADEDVKGGAFEERQEEETDAELEGSSKVRAMRTKAMAKAMSSVPNPGSGRVKHMVQAFESLLNISGATSDAERAGEGSWALPGLQLWKEDDKGDLGFPPVSVFSSADFQNAGSNRLCSSLDGNTVRSSWDSRTSTGECSRRNSSESLRSRTSAGGRRSRRNSSESLRSSWNKKLKVTSQHPFKLRTEQRGKFKEQQFVQKVQEMLAEEEKKRIHIAQGLPWTTDEPEPAVKERTEPIDLVLHSDVRALERAEFDQHVLDRNKFAEQQRLEWERQQELDEEERIRQLRRTELIPKAQPMPYFDRPFIPKRSTKPPTVPMEPKFYLRPEKLSCNVWNLES

SEQ ID NO: 197933 - protein, 552 aa, Zea Mays
METSRRPKPIHPQGGIHDPVRSSPRALLQTLAMSTAAAAKTPIKALGSAAAGAMTPTKSQAPAAAKTPCTSRARSSHASENSNPNIPGTPPPPQSTPSKPSLKSPAGAGARSATAKKKPSTPAPAAPPLERERERRFLVAKKGARRRRNVGTMGGGGGGRGGEIDFDKCREAAREALRASQGEFFRKEVAASTATGEDQLGQEEEGKPLADEDVKGGAFEERQEEETDAELEGSSKVRAMRTKAMAKAMSSVPNPGSGRVKHMVQAFESLLNISGATSDAERAGEGSWALPGLQLWKEDDKGDLGFPPVSVFSSADFQNAGSNRLCSSLDGNTVRSSWDSRTSTGECSRRNSSESLRSRTSAGGRRSRRNQSSESLRSSWNKKLKVTSQHPFKLRTEQRGKFKEQQFVQKVQEMLAEEEKKRIHIAQGLPWTTDEPECLIKPAVKERTEPIDLVLHSDVRALERAEFDQHVLDRNKFAEQQRLEWERQQELDEEERIRQLRRTELIPKAQPMPYFDRPFIPKRSTKPPTVPMEPKFYLRPEKLSCNVWNLES

SEQ ID NO: 197934 - protein, 81 aa, Zea Mays
MDQQAKIDADFLEPTVLLDETHYQEGYRNGYNDGLASGKEEGRQVGLKMGFQLGSGRISSNWLHWWAVIRCPIRRMNKFKT

SEQ ID NO: 197935 - protein, 193 aa, Zea Mays
MCKNCILGLHWAVVKFPSLPIQLPLFISCPWCNLLSFRLVYKGNLRFPRKNYFLLWMVESMNGGRAKFHSTNHDEHHSTWHSSAGTSSSHQQRRNAAVGSESSSGRETGVGRNIFHTDNISASLQKLMVCFMQLTAKFPLVIIFLLIVLYAVPASAAVLVLYALVTFLFALPSFLILYFAYPSLDWLVREIFA

SEQ ID NO: 197936 - protein, 62 aa, Zea Mays
MVAFIAPSLMPLATMLSTSATGFSESSSLQTCIVVQLCRYLELVPCRLHTSLHKTQQQWACH

SEQ ID NO: 197937 - protein, 94 aa, Zea Mays
MRAVVVDWLVVLAEEFELHAETLHLAVSYVDRFLTMNVVARDKLQLLAVTALLVAAKYEEIESAEMKVVKMEADLLKSLNFQIGGPTVTTFLRT

SEQ ID NO: 197938 - protein, 242 aa, Zea Mays
MKRKENSAHSAPPLNRPRGKRKALAELPKSNGLNMNHDSAPRPSKPRTRSAARAEAEAEAAMKRRKAGDAARWPMDTRQPDAEAAVAPYVGDIDRYLRSLEVEPLRRPSHSYFQDIQKNICPKMRAILVDWLVEVAEEFKLHAETLHLAVSYVDRFLTMNVVARNKLQLLGVTALLVAAKYEEIESSKMKVKRYTDITDNTYTKQQVVKMETDLLKSLSFQIGGPTVTTFLRYVFSIIVSCA

SEQ ID NO: 197939 - protein, 474 aa, Zea Mays
MPPATVTLLPACAVLLLCCRLSPAAAASPADVGGGGARRVLHQPLFPIEWTPPPSPPPPPAPDFTSDPATPDGPPGDFFPPAPPTAPAGGGGTSTTTTTTSSSPTTVAADVPSASSGSGDAGHHGGPAKGTIVAAGAAAAAAIALLAFACAFLVAGRARRHGDSQKLLSPDRGSARHRSAPSAADFLYVGTVEPATPGRHRGPTAADLVGSPYRKLRSERERARRGLGRARDEPTDHPSPELRPLPPLRRAATVGSDDDDAYYTPRQRSAGGGVGGETWSEASASSPPTTTTASRRSLPSLTSDCFPPVAAIAAPTPSPAWSRRTPPRTRFSAGSTPDIKQVISPSPRSVQPSKPAPTPPPRPPPTPPPPPPLPKSTTAPKPPPPPPPPPRMVPSNTGLKPAQPLSEPTSRRRLLKPLPPEGPRIAMPMPITEATAQDSIGSASMPKQDDVADGIVGNGEPRPKLKPLHWDKVE

SEQ ID NO: 197940 - protein, 869 aa, Zea Mays
MPPATVTLLPACAVLLLCCRLSPAAAASPADVGGGGARRVLHQPLFPIEWTPPPSPPPPPAPDFTSDPATPDGPPGDFFPPAPPTAPAGGGGTSTTTTTTSSSPTTVAADVPSASSGSGDAGHHGGPAKGTIVAAGAAAAAAIALLAFACAFLVAGRARRHGDSQKLLSPDRGSARHRSAPSAADFLYVGTVEPATPGRHRGPTAADLVGSPYRKLRSERERARRGLGRARDEPTDHPSPELRPLPPLRRAATVGSDDDDAYYTPRQRSAGGGVGGETWSEASASSPPTTTTASRRSLPSLTSDCFPPVAAIAAPTPSPAWSRRTPPRTRFSAGSTPDIKQVISPSPRSVQPSKPAPTPPPRPPPTPPPPPPLPKSTTAPKPPPPPPPPPRMVPSNTGLKPAQPLSEPTSRRRLLKPLPPEGPRIAMPMPITEATAQDSIGSASMPKQDDVADGIVGNGEPRPKLKPLHWDKVRATSDRAMVWDQLKSSSFQLNEDMIEALFMNNSTPSALPRDAGRKTTVPPFRQEERVLDPKKAQNIAILLRALNVTRDEVSDALLDGNAECLGTELLETLVKMAPTKEEELRLRDYNGDASKLGSAERFLKAVLDIPFAFKRVDAMLYRANFEAEINYLMKSFETLEAACEDLRGSRLFLKLLEAVLRTGNRMNVGTNREIIRSEDAKSEKESAMIIHSSKDEQLRKQGLKLVSGLSSELGNVKKAAMMDFDVLHGYVSKLETGIEKIKSVLQLERQCTQGQKFFTTMQSFLKKAETEIDKVRGEEKKALVRVKDITEYFHGDTAKEEAHPLRIFMVVRDFLSTLDHVCKEVGRLQQDRTVIGSARSFRISATSMPVLSVYGQRRENNSDDDSASS

SEQ ID NO: 197941 - protein, 665 aa, Zea Mays
MPPATVTLLPACAVLLLCCRLSPAAAASPADVGGGGARRVLHQPLFPIEWTPPPSPPPPPAPDFTSDPATPDGPPGDFFPPAPPTAPAGGGGTSTTTTTTSSSPTTVAADVPSASSGSGDAGHHGGPAKGTIVAAGAAAAAAIALLAFACAFLVAGRARRHGDSQKLLSPDRGSARHRSAPSAADFLYVGTVEPATPGRHRGPTAADLVGSPYRKLRSERERARRGLGRARDEPTDHPSPELRPLPPLRRAATVGSDDDDAYYTPRQRSAGGGVGGETWSEASASSPPTTTTASRRSLPSLTSDCFPPVAAIAAPTPSPAWSRRTPPRTRFSAGSTPDIKQVISPSPRSVQPSKPAPTPPPRPPPTPPPPPPLPKSTTAPKPPPPPPPPPRMVPSNTGLKPAQPLSEPTSRRRLLKPLPPEGPRIAMPMPITEATAQDSIGSASMPKQDDVADGIVGNGEPRPKLKPLHWDKVRATSDRAMVWDQLKSSSFQLRSCFVLHALLMAGLNEDMIEALFMNNSTPSALPRDAGRKTTVPPFRQEERVLDPKKAQNIAILLRALNVTRDEVSDALLDGNAECLGTELLETLVKMAPTKEEELRLRDYNGDASKLGSAERFLKAVLDIPFAFKRVDAMLYRANFEAEINYLMKSFETLEPAKISEAAGCS

SEQ ID NO: 197942 - protein, 394 aa, Zea Mays
MTWIYILKHKNEVLKCFQDFHKLVANQFDARIRVIRTDNGTEYVNNEFRSYLSSQGIIHQTTCPGTPPQNGVAERKNRHLLEVARSLMFQMNVPKYLWSEAVMTATYLINRMPSRILNMKSPAELLLGKCDFRVPPKVFGCVCFVKDHRPMVNKLDPQAIKCIFVGYSSTQKGYKCWDPIDKRLLVSMDVTFREEDPYYRKKVDPYQILEDFSPVNGGDRREGEDDSGRGGDEASGDEASGASGGVIVGGMIPREVEKGITTQVLSDDESSGDHDDPTIDIQEETEDDEAVIVGSIPCPMAGKLNEKQGEQHDCSIGAKVNDKQGEQPIVYYRKRTKKQGEQPQPGCVEAPVPYLSSDSSPDPADEHILLCLKQFAPSGGRASVELSNITGNQM

SEQ ID NO: 197943 - protein, 1083 aa, Zea Mays
MSTEEAAKKTEIDGSGSGGITKSEMMSEMRSMIQELMGLGLIGARANTGTSELKLELVPNDVKLEGSKNYLSWFRRVRVLLGGKGVEHYLEETCVEPIDKLGAEWRIWHATNSVIVAWLLASMSPTVSKRVEAMRTASQIWKTLSNIYSRKGNVMVMMEIQNKADAVKQMGRPVEQYASELQQLWGELDHYAPLQMVCPQDAQMVHKWVEDRRVTHFLKNLDSEFESRRAVFCHQESLPTMDEVVSAMIDEESRLRVMSSGNHVKPAYVAIEDRECYNCGERGHLSYNCPNPRGNGGKGGSRGGRGGTRGRGSYGRGRGGRGRGRGGSRANIATTEESLSVTLSGEQAKQWEQWQKGKSSECLTSPDGQATNSFGNFANYAHMGEGGVIVGGMIPREVEKGITTQVLSDDESSGDHDDPTIDIQEETEDDEAVIVGSIPCPMAGKLNEKQGEQHDCSIGAKVNDKQGEQPIVYYRKRTKKQGEQPQPGCVEAPVPYLSSDSSPDPAGNVSRIHISPIPEHEELPLAQRRVPRLNAGKPPSRYCYEHDIAKYVSYSSVSPAYRTFIASLQTISIPKDWRCAKQDPKWKDAMKEELLALQKNKTWELVHLPEGKKAVGCKWVFTVKQTPEGKIDRYKARLVAKGYSQTYGIDYDETFAPVAKMGTVRTLISCAANFGWPLHQLDVKNAFLHGDLKEEVYMEIPPGFANKQTIGKVCRLKKSLYGLKQSPRAWFDRFRRVVCDMGYHQCNGDHTVFYKHQGSCITILAVYVDDIVITGDDAKEIKKLKERLSRAFEVKDLGPLRYFLGIEIARSSQGIILSQRKYVLDLLSETGMLGCRPCGSPIDRNHQTCAESGDPIDRERYQRVVGRLIYLCHTRPDIAYAVSVVSRYMHDPRTGHMKIVYQIMRYLKGTPGKGLCFRPNQHMNLDGYCDADWASSRDDRRSTSGYCVFVGGNLVSWRSKKQAVVSRSTAEAEHRAMALAVCEMIWLKSLLKELQVLKNETMLLHCDNVAAINIASNPVQFDRMKHVEIDKFFIKEKIDSGALKLKYVKSRNQVADSLTKGLGPKDNELACNKMRMLNIFGPS

SEQ ID NO: 197944 - protein, 226 aa, Zea Mays
MWMHVDDANYTKASVGVAISDSPTGPFTYLYSKRPHDCESRDMTIFKDDDGKAYLIYSSEDNSELHIGPLTDDYLDVTDAMRRLLIAQHREAPALFKHEGTYYMVTSGCTSWAPNTALAHAATSVMGPWETLGNPCVGGNEVFRSTTFFSQSTFVLPVPGLPGSFIFMADRWNPSDLRDSRYVWLPLTIGGVPDEAADYSFMFPLWSRVSIYWHRRWRLPEEWRDY

SEQ ID NO: 197945 - protein, 313 aa, Zea Mays
MPRSTHMGHTASCASIRSCVPADRMIEPGNPRIVYSSPLCLRSAFSRRAADNSLPSETPSTSAAAAAAAAATMAVGKNKRISKGKKGGKKKTVDPFSKKDWYDIKAPSVFSVRNIGKTLVSRTQGTRGDEDQAYRKIRLRAEDVQGRNVLTNFWGMNFTTDKLRSLVKKWQTLIEAHVDVKTTDNYMLRLFCIGFTKRRPNQVKRTCYAQASQIRQIRRKMVEIMINQASTCDLKELVSKFIPEVIGKEIEKSTSSIFPLQNVFIRKVKILKAPKFDLGKLMEVHGDYKEDVGVKLERPVEGDEAVQEVAAAE

SEQ ID NO: 197946 - protein, 127 aa, Zea Mays
MLRLFCIGFTKRRPNQVKRTCYAQASQIRQIRRKMVEIMINQASTCDLKELVSKFIPEVIGKEIEKSTSSIFPLQNVFIRKVKILKAPKFDLGKLMEVHGDYKEDVGVKLERPVEGDEAVQEVAAAE

SEQ ID NO: 197947 - protein, 93 aa, Zea Mays
MVEIMINQASTCDLKELVSKFIPEVIGKEIEKSTSSIFPLQNVFIRKVKILKAPKFDLGKLMEVHGDYKEDVGVKLERPVEGDEAVQEVAAAE

SEQ ID NO: 197948 - protein, 182 aa, Zea Mays
MLKKLQQRQHRLDKKVKTIQAWRRVSSIIFATTFAAVLICSIVAAVIAAPPVAAALAAAAAVPLGSMGKWFDSLLKGCQDAVNRQEGVVSEMQFGTLIAIKDLENIKVLIKRVEEEISSMIDCVEFAERDEEAVKFGVEEIKKKLESFMKSVEDLGEQADRCTRHIHRARTLVLGRIIRHPN

SEQ ID NO: 197949 - protein, 78 aa, Zea Mays
MAFNISVLNLVKMSTAVVASLTSTLAVPLSIYILSLPLPYLPEGTNLSASFLIGVATLVLGLLLYNLPQESTNQVKED

SEQ ID NO: 197950 - protein, 243 aa, Zea Mays
MSDTLRAKRELAQQTTPACSAAIQRSEATNPRNLQRRHRHCVMPVPPLLSPLRLPSPAPPLHRNGAPWRRPTQLRAALRVPPPLHLGLAAARGDGVRRFVGTLGSKRARAVGAIRVSAISGDGGGGAGGTGIAAAAAATVVFAVMNRVLYKLALVPMKNYPFFLAQFATFGYVLVYFSILFIRFRAGIVTREMLALPKPQFMLIGLLEALGAASGMAAAAMLPGPSIPVLSQVIHLHMPLGHF

SEQ ID NO: 197951 - protein, 423 aa, Zea Mays
MSDTLRAKRELAQQTTPACSAAIQRSEATNPRNLQRRHRHCVMPVPPLLSPLRLPSPAPPLHRNGAPWRRPTQLRAALRVPPPLHLGLAAARGDGVRRFVGTLGSKRARAVGAIRVSAISGDGGGGAGGTGIAAAAAATVVFAVMNRVLYKLALVPMKNYPFFLAQFATFGYVLVYFSILFIRFRAGIVTREMLALPKPQFMLIGLLEALGAASGMAAAAMLPGPSIPVLSQSFLVWQLILSALILGRKYRANQILGCLLVTAGVILAVAGGASNGPILFEVKFFWPAVMMISAAFQAAASIIKEFVFIDGAKRLEGKKPDIFVVNSFGSGFQALFIFLLLPFLSNLKGIPFAELPAYLTRGAACFLNVGGNLKDCHGAPLLPLLYITLNMAFNISVLNLVKMSTAVVASLTSTLAVVLEQIS

SEQ ID NO: 197952 - protein, 429 aa, Zea Mays
MPVPPLLSPLRLPSPAPPLHRNGAPWRRPTQLRAALRVPPPLHLGLAAARGDGVRRFVGTLGSKRARAVGAIRVSAISGDGGGGAGGTGIAAAAAATVVFAVMNRVLYKLALVPMKNYPFFLAQFATFGYVLVYFSILFIRFRAGIVTREMLALPKPQFMLIGLLEALGAASGMAAAAMLPGPSIPVLSQSFLVWQLILSALILGRKYRANQILGCLLVTAGVILAVAGGASNGPILFEVKFFWPAVMMISAAFQAAASIIKEFVFIDGAKRLEGKKPDIFVVNSFGSGFQALFIFLLLPFLSNLKGIPFAELPAYLTRGAACFLNVGGNLKDFSDCHGAPLLPLLYITLNMAFNISVLNLVKMSTAVVASLTSTLAVPLSIYILSLPLPYLPEGTNLSASFLIGVATLVLGLLLYNLPQESTNQVKED

SEQ ID NO: 197953 - protein, 294 aa, Zea Mays
MPVPPLLSPLRLPSPAPPLHRNGAPWRRPTQLRAALRVPPPLHLGLAAARGDGVRRFVGTLGSKRARAVGAIRVSAISGDGGGGAGGTGIAAAAAATVVFAVMNRVLYKLALVPMKNYPFFLAQFATFGYVLVYFSILFIRFRAGIVTREMLALPKPQFMLIGLLEALGAASGMAAAAMLPGPSIPVLSQSFLVWQLILSALILGRKYRANQILGCLLVTAGVILAVAGGASNGPILFEVKFFWPAVMMISAAFQAAASIIKEFVFIDGAKRLEGKKPDIFVVNSFGSGFQVRQ

SEQ ID NO: 197954 - protein, 425 aa, Zea Mays
MSDTLRAKRELAQQTTPACSAAIQRSEATNPRNLQRRHRHCVMPVPPLLSPLRLPSPAPPLHRNGAPWRRPTQLRAALRVPPPLHLGLAAARGDGVRRFVGTLGSKRARAVGAIRVSAISGDGGGGAGGTGIAAAAAATVVFAVMNRVLYKLALVPMKNYPFFLAQFATFGYVLVYFSILFIRFRAGIVTREMLALPKPQFMLIGLLEALGAASGMAAAAMLPGPSIPVLSQSFLVWQLILSALILGRKYRANQILGCLLVTAGVILAVAGGASNGPILFEVKFFWPAVMMISAAFQAAASIIKEFVFIDGAKRLEGKKPDIFVVNSFGSGFQALFIFLLLPFLSNLKGIPFAELPAYLTRGAACFLNVGGNLKGEYCFSYHIHVVNKWSFSYYIISNLWLIREKVMFSYYMISNIWLIGEKGSS

SEQ ID NO: 197955 - protein, 510 aa, Zea Mays
MAGAPLRRSDLDFADVFGGPPRRVSGNEHRSQRGSQDTSSFESATRAGSGGPDTPVFGDRGSSDRRRQLGEEFYKDIFPGSEAASPRRSGAGDWGNVFGAQASPVSTARPRSRFRSQSGEKKSTSNHVSSMDNEFEGTPVNLESIMANNKFHFSFYKWAGKGALLVLPATAQEKSVDIIGLRSFPQVVIQGIDLIDCEDSMSTATGTAKNQTDYEDSKSGKHSANSATKDGAIPLLFEDYMQGTKQSNDHTKNDVSSTTLSSKISRSPSGERSRSSRVKEKMKGFIKLFSPESSPKRKRAPETQRQTSVGKNGTKTELHDKFSMSSLEASEDVETMTEVQERLDKPVLTANSKMDTATGSNEAASNEPIHDDTKDKAANTIEHEDIEDLDGCVVEHFSEDHVLHNDQEKELIKISEAKIREWSRGKEGNIRSLLSTLQYVLWPESGWKPVPLVDIIEGAAVKKAYQKALLCLHPDKLQQRGAAMHQKCIAEKVFDILQEAWKEFNSVTFG

SEQ ID NO: 197956 - protein, 407 aa, Zea Mays
MAGAPLRRSDLDFADVFGGPPRRVSGNEHRSQRGSQDTSSFESATRAGSGGPDTPVFGDRGSSDRRRQLGEEFYKDIFPGSEAASPRRSGAGDWGNVFGAQASPVSTARPRSSFSIRFNRGMDSSMPTSPSQQMSNRNDDGTSYAYSVPTSPNASMNNYLAQGAARQDSKKNPFSWHRYPFLSRFRSQSGEKKSTSNHVSSMDNEFEGTPVNLESIMANNKFHFSFYKWAGKGALLVLPATAQEKSVDIIGLRSFPQVVIQGIDLIDCEDSMSTATGTAKNQTDYEDSKSGKHSANSATKDGAIPLLFEDYMQGTKQSNDHTKNDVSSTTLSSKISRSPSGERSRSSRVKEKMKGFIKLFSPESSPKRKRAPETQRQTSVGKNGTKTELHDKFSMSSLEASEDVETV

SEQ ID NO: 197957 - protein, 593 aa, Zea Mays
MAGAPLRRSDLDFADVFGGPPRRVSGNEHRSQRGSQDTSSFESATRAGSGGPDTPVFGDRGSSDRRRQLGEEFYKDIFPGSEAASPRRSGAGDWGNVFGAQASPVSTARPRSSFSIRFNRGMDSSMPTSPSQQMSNRNDDGTSYAYSVPTSPNASMNNYLAQGAARQDSKKNPFSWHRYPFLSRFRSQSGEKKSTSNHVSSMDNEFEGTPVNLESIMANNKFHFSFYKWAGKGALLVLPATAQEKSVDIIGLRSFPQVVIQGIDLIDCEDSMSTATGTAKNQTDYEDSKSGKHSANSATKDGAIPLLFEDYMQGTKQSNDHTKNDVSSTTLSSKISRSPSGERSRSSRVKEKMKGFIKLFSPESSPKRKRAPETQRQTSVGKNGTKTELHDKFSMSSLEASEDVETVQMNSQNAFTAEPFPMTEVQERLDKPVLTANSKMDTATGSNEAASNEPIHDDTKDKAANTIEHEDIEDLDGCVVEHFSEDHVLHNDQEKELIKISEAKIREWSRGKEGNIRSLLSTLQYVLWPESGWKPVPLVDIIEGAAVKKAYQKALLCLHPDKLQQRGAAMHQKCIAEKVFDILQVLLITAFPC

SEQ ID NO: 197958 - protein, 581 aa, Zea Mays
MAGAPLRRSDLDFADVFGGPPRRVSGNEHRSQRGSQDTSSFESATRAGSGGPDTPVFGDRGSSDRRRQLGEEFYKDIFPGSEAASPRRSGAGDWGNVFGAQASPVSTARPRSSFSIRFNRGMDSSMPTSPSQQMSNRNDDGTSYAYSVPTSPNASMNNYLAQGAARQDSKKNPFSWHRYPFLSRFRSQSGEKKSTSNHVSSMDNEFEGTPVNLESIMANNKFHFSFYKWAGKGALLVLPATAQEKSVDIIGLRSFPQVVIQGIDLIDCEDSMSTATGTAKNQTDYEDSKSGKHSANSATKDGAIPLLFEDYMQGTKQSNDHTKNDVSSTTLSSKISRSPSGERSRSSRVKEKMKGFIKLFSPESSPKRKRAPETQRQTSVGKNGTKTELHDKFSMSSLEASEDVETMTEVQERLDKPVLTANSKMDTATGSNEAASNEPIHDDTKDKAANTIEHEDIEDLDGCVVEHFSEDHVLHNDQEKELIKISEAKIREWSRGKEGNIRSLLSTLQYVLWPESGWKPVPLVDIIEGAAVKKAYQKALLCLHPDKLQQRGAAMHQKCIAEKVFDILQEAWKEFNSVTFG

SEQ ID NO: 197959 - protein, 537 aa, Zea Mays
MVFYVHSEEESSEQSSLEVERGDVYNFEQGSILYIQSYPNASRQRLRIYAIFTSEGINADDPSKPKVEAYSSVSNLVKGFETDVLRLGFGVKPEVVEAIKSAKTPPPIIAYNPEEEKGDKKPGWTENIIDALLGVRDPEEFLNKKKKKKDKHKDKKSKSKAFNFYSGKPDVQNCYGWSRMMTSKDLDALHGSSIGMFMVNLTTGSMMGPHWNPKATEIAIVTEGSGIVQTVCPSSSSSSSSPSGGSSGDHHHGHKRRGGPGGRGDEGEGEGGRARWQCRNSVFRVKEGDVFVVPRFHPMAQMSFNDDSFVFVGFSTHMGQNHPQFLAGKGSVLQAIGKKVLALALGQRDPTAVDKLLSAQRESTILPCVSCAEELAEKAEEERKRREEEGGGKGKGPGEREKEKERREREEKEKEEEREREREEKERKEREREEKERKEREREEEERREEEEERARKEQEKQRRREKEEEERARRREEEEREREEEEERRREEEEGGGGRGDEPEREEEGGDKPPYRLSKKLKKRYHARAGVFSRSG

SEQ ID NO: 197960 - protein, 547 aa, Zea Mays
MVFYVHSGTGRGKVTSIEEESSEQSSLEVERGDVYNFEQGSILYIQSYPNASRQRLRIYAIFTSEGINADDPSKPKVEAYSSVSNLVKGFETDVLRLGFGVKPEVVEAIKSAKTPPPIIAYNPEEEKGDKKPGWTENIIDALLGVRDPEEFLNKKKKKKDKHKDKKSKSKAFNFYSGKPDVQNCYGWSRMMTSKDLDALHGSSIGMFMVNLTTGSMMGPHWNPKATEIAIVTEGSGIVQTVCPSSSSSSSSPSGGSSGDHHHGHKRRGGPGGRGDEGEGEGGRARWQCRNSVFRVKEGDVFVVPRFHPMAQMSFNDDSFVFVGFSTHMGQNHPQFLAGKGSVLQAIGKKVLALALGQRDPTAVDKLLSAQRESTILPCVSCAEELAEKAEEERKRREEEGGGKGKGPGEREKEKERREREEKEKEEEREREREEKERKEREREEKERKEREREEEERREEEEERARKEQEKQRRREKEEEERARRREEEEREREEEEERRREEEEGGGGRGDEPEREEEGGDKPPYRLSKKLKKRYHARAGVFSRSG

SEQ ID NO: 197961 - protein, 501 aa, Zea Mays
MAVATTARWLLLLAVVSAAAASGKHERWRVGGQVVEKERRRVVAESEAGSVSAVDVADAAGTAYRLHFITMDPGALFLPVQLHADMVFYVHSGRGKVTSIEEESSEQSSLEVERGDVYNFEQGSILYIQSYPNASRQRLRIYAIFTSEGINADDPSKPKVEAYSSVSNLVKGFETDVLRLGFGVKPEVVEAIKSAKTPPPIIAYNPEEEKGDKKPGWTENIIDALLGVRDPEEFLNKKKKKKDKHKDKKSKSKAFNFYSGKPDVQNCYGWSRMMTSKDLDALHGSSIGMFMVNLTTGSMMGPHWNPKATEIAIVTEGSGIVQTVCPSSSSSSSSPSGGSSGDHHHGHKRRGGPGGRGDEGEGEGGRARWQCRNSVFRVKEGDVFVVPRFHPMAQMSFNDDSFVFVGFSTHMGQNHPQFLAGKGSVLQAIGKKSGPGRSKRSSGGERKRRRSVHGDARRKKERGRRKKNGGGRRKKVEADVVTSQRGRKKAVTSRHTGCPRN

SEQ ID NO: 197962 - protein, 596 aa, Zea Mays
MAVATTARWLLLLAVVSAAAASGKHERWRVGGQVVEKERRRVVAESEAGSVSAVDVADAAGTAYRLHFITMDPGALFLPVQLHADMVFYVHSGRGKVTSIEEESSEQSSLEVERGDVYNFEQGSILYIQSYPNASRQRLRIYAIFTSEGINADDPSKPKVEAYSSVSNLVKGFETDVLRLGFGVKPEVVEAIKSAKTPPPIIAYNPEEEKGDKKPGWTENIIDALLGVRDPEEFLNKKKKKKDKHKDKKSKSKAFNFYSGKPDVQNCYGWSRMMTSKDLDALHGSSIGMFMVNLTTGSMMGPHWNPKATEIAIVTEGSGIVQTVCPSSSSSSSSPSGGSSGDHHHGHKRRGGPGGRGDEGEGEGGRARWQCRNSVFRVKEGDVFVVPRFHPMAQMSFNDDSFVFVGFSTHMGQNHPQFLAGKGSVLQAIGKKVLALALGQRDPTAVDKLLSAQRESTILPCVSCAEELAEKEKEEEREREREEKERKEREREEKERKEREREEEERREEEEERARKEQEKQRRREKEEEERARRREEEEREREEEEERRREEEEGGGGRGDEPEREEEGGDKPPYRLSKKLKKRYHARAGVFSRSG

SEQ ID NO: 197963 - protein, 508 aa, Zea Mays
MAVATTARWLLLLAVVSAAAASGKHERWRVGGQVVEKERRRVVAESEAGSVSAVDVADAAGTAYRLHFITMDPGALFLPVQLHADMVFYVHSGRGKVTSIEEESSEQSSLEVERGDVYNFEQGSILYIQSYPNASRQRLRIYAIFTSEGINADDPSKPKVEAYSSVSNLVKGFETDVLRLGFGVKPEVVEAIKSAKTPPPIIAYNPEEEKGDKKPGWTENIIDALLGVRDPEEFLNKKKKKKDKHKDKKSKSKAFNFYSGKPDVQNCYGWSRMMTSKDLDALHGSSIGMFMVNLTTGSMMGPHWNPKATEIAIVTEGSGIVQTVCPSSSSSSSSPSGGSSGDHHHGHKRRGGPGGRGDEGEGEGGRARWQCRNSVFRVKEGDVFVVPRFHPMAQMSFNDDSFVFVGFSTHMGQNHPQFLAGKGSVLQAIGKKRGGKRKKSGPGRSKRSSGGERKRRRSVHGDARRKKERGRRKKNGGGRRKKVEADVVTSQRGRKKAVTSRHTGCPRN

SEQ ID NO: 197964 - protein, 50 aa, Zea Mays
MQGPLPRLLQFSLAFRVWFCACCEGYVARMTVRIPCYPVIYLLTYLNLYV

SEQ ID NO: 197965 - protein, 107 aa, Zea Mays
MVGDVNIYMNDSDDVQIAEIEIMIAEHKSRGKGIGQEAILLMMAIAVEKYGIHTFRAKISESNMASLKLFRKLGFKDASYSVVFKEVTLEAPADSLPLRFPLTIGDW

SEQ ID NO: 197966 - protein, 54 aa, Zea Mays
MGLLFLERLEGEGVFRCRRCRVDAASKDAIISRDFYGRSGRAYLFDHCEHMPRP

SEQ ID NO: 197967 - protein, 440 aa, Zea Mays
MDEVPATAAVLDFRPGSSVPRVSAVPRRAVQCPPDTGGAEAATGGRPGIGNTAAVSAKLTGSSSAGPDIQSVDCDTSGGLAGGDAGDVGVLCLENAAETESVEPGVSDVRLGAPVEERHGRTLDSTGLGSGKAGETNEISLVEVSQSGATSSLDATASIGGGYSLVEGSLPEASGARRCKPEVHEVPTGTPATVGFPIEDGGYGFGIGPNDDVDGRNDPAGGEWEPPTDGNDAEDVTDMGGILCDERVERMETNSVEREASNGSTVSSEEGVDRMGTSLDDSEASDGSTTQDSDTDVETESSVSSIEEQEAGYGAHIPQPDPAVCKVAKENNTAGVKISDRMTSVSELTLVLASGASMLPHPSKVRTGGEDAYFIACDGWFGVADGVGQWSFEVFDGNCYLRDQCRTLCQRTNGWLQKDRGRDPRSSRDENRGSSCQGCR

SEQ ID NO: 197968 - protein, 191 aa, Zea Mays
MKLYPCPRDMMAFSACNRPLPNLRAELTSSRGHPFPRVVHALADLPPWNVFHDPRLLLKTLLPLFDKSFILFCLEHRQYSTASSNFLFFERPRTLFPWPTWYMPYAKAPKVVRKMAVALGPEVGIRRAKRTGAKPPGGGPSCTTGISLMLAIPGLFRTRDSVIFGPGSGRRYARLAELELPAGIKRAEAVA

SEQ ID NO: 197969 - protein, 235 aa, Zea Mays
MEDFCAVCADTLEWVAYGSCGHRDVCSTCIVRLRFVMGDNKCCICKTVCPFVFVTKAMGKYTRVITDFSVLPAGVNEGKAGDFWYHEDTKAYFDDADHYRMIRTMCQLSCNVDNAEDQVAQAKRKSKFRSIEQLKGHLYCVHRLHMCNLCLEGRKVFICEQKLYLKSQLAQHMKTGDSEVDGSEVERNGFAGHPMCRTLVVLNISRTMRTLSCILEKIISYVKMKHVWKRSLLSS

SEQ ID NO: 197970 - protein, 589 aa, Zea Mays
MEDFCAVCADTLEWVAYGSCGHRDVCSTCIVRLRFVMGDNKCCICKTVCPFVFVTKAMGKYTRVITDFSVLPAGVNEGKAGDFWYHEDTKAYFDDADHYRMIRTMCQLSCNVDNAEDQVAQAKRKSKFRSIEQLKGHLYCVHRLHMCNLCLEGRKVFICEQKLYLKSQLAQHMKTGDSEVDGSEVERNGFAGHPMCEFCRSSFYGDSELYMHMSREHYSCHICKRQNPGRVEYFANYEDIELHFREDHFLCEDEACLEKKFVVFLSKAQLKKHNAMEHGGRMSRSQRNAALETPSSFIYRRNEQEQRRGRGRNAFHDGSDCHISSSANAFHDRSDCHISSSANAFHDKSDCHIPSTAQKDRAAADGHAGRLDNVSESFQSLSIGSSSREAEVGEGSRTGRVLEQLSFRPLSDPDIPDNSVETSFPSLSEQQSSLNQSARDAPRLGDESLFPPLTGSSNKMKQPVFTPKRPRTFPAAEDIHAAKMRYALGMNEDMYSAFKEIAGEYRRGTIDAFEYLSYVEQFGLSHLVPEMVRLLPDSRKQRELADAHYTNTRLKNLQENGNNRKGGFFLSKKKSLQENGGGTSEWRWN

SEQ ID NO: 197971 - protein, 312 aa, Zea Mays
MLWSTVGGCLVLRGMLHLSFIYRRNEQEQRRGRGRNAFHDGSDCHISSSANAFHDRSDCHISSSANAFHDKSDCHIPSTAQKDRAAADGHAGRLDNVSESFQSLSIGSSSREAEVGEGSRTGRVLEQLSFRPLSDPDIPDNSVETSFPSLSEQQSSLNQSARDAPRLGDESLFPPLTGSSNKMKQPVFTPKRPRTFPAAEDIHAAKMRYALGMNEDMYSAFKEIAGEYRRGTIDAFEYLSYVEQFGLSHLVPEMVRLLPDSRKQRELADAHYTNTRLKNLQENGNNRKGGFFLSKKKSLQENGGGTSEWRWN

SEQ ID NO: 197972 - protein, 589 aa, Zea Mays
MEDFCAVCADTLEWVAYGSCGHRDVCSTCIVRLRFVMGDNKCCICKTVCPFVFVTKAMGKYTRVITDFSVLPDGVNEGKAGDFWYHEDTKAYFDDADHYRMIRTMCQLSCNVDNAEDQVAQAKRKSKFRSIEQLKGHLYCVHRLHMCNLCLEGRKVFICEQKLYLKSQLAQHMKTGDSEVDGSEVERNGFAGHPMCEFCRSSFYGDSELYMHMSREHYSCHICKRQNPGRVEYFANYEDIELHFREDHFLCEDEACLEKKFVVFLSKAQLKKHNAMEHGGRMSRSQRNAALETPSSFIYRRNEQEQRRGRGRNAFHDGSDCHISSSANAFHDRSDCHISSSANAFHDKSDCHIPSTAQKDRAAADGHAGRLDNVSESFQSLSIGSSSREAEVGEGSRTGRVLEQLSFRPLSDPDIPDNSVETSFPSLSEQQSSLNQSARDAPRLGDESLFPPLTGSSNKMKQPVFTPKRPRTFPAAEDIHAAKMRYALGMNEDMYSAFKEIAGEYRRGTIDAFEYLSYVEQFGLSHLVPEMVRLLPDSRKQRELADAHYTNTRLKNLQENGNNRKGGFFLSKKKSLQENGGGTSEWRWN

SEQ ID NO: 197973 - protein, 450 aa, Zea Mays
MFVTTQKIRLLKQSAKVFICEQKLYSKSQLAQHMKTGDSEVDGSEVERNGFAGHPMCEFCRSSFYGDSELYMHMSREHYSCHICKRQNPGRVEYFANYEDIELHFREDHFLCEDEACLEKKFVVFLSKAQLKKHNAMEHGGRMSRSQRNAALETPSSFIYRRNEQEQRRGRGRNAFHDGSDCHISSSANAFHDRSDCHISSSANAFHDKSDCHIPSTAQKDRAAADGHAGRLDNVSESFQSLSIGSSSREAEVGEGSRTGRVLEQLSFRPLSDPDIPDNSVETSFPSLSEQQSSLNQSARDAPRLGDESLFPPLTGSSNKMKQPVFTPKRPRTFPAAEDIHAAKMRYALGMNEDMYSAFKEIAGEYRRGTIDAFEYLSYVEQFGLSHLVPEMVRLLPDSRKQRELADAHYTNTRLKNLQENGNNRNGGFFLSKKKSLQENGGGTSRKFMI

SEQ ID NO: 197974 - protein, 366 aa, Zea Mays
MQENPGRVEYFANYEDIELHFREDHFLCEDEACLEKKFVVFLSKAQLKKHNAMEHGGRMSRSQRNAALETPSSFIYRRNEQEQRRGRGRNAFHDGSDCHISSSANAFHDRSDCHISSSANAFHDKSDCHIPSTAQKDRAAADGHAGRLDNVSESFQSLSIGSSSREAEVGEGSRTGRVLEQLSFRPLSDPDIPDNSVETSFPSLSEQQSSLNQSARDAPRLGDESLFPPLTGSSNKMKQPVFTPKRPRTFPAAEDIHAAKMRYALGMNEDMYSAFKEIAGEYRRGTIDAFEYLSYVEQFGLSHLVPEMVRLLPDSRKQRELADAHYTNTRLKNLQENGNNRNGGFFLSKKKSLQENGGGTSRKFMI

SEQ ID NO: 197975 - protein, 552 aa, Zea Mays
MEDFCAVCADTLEWVAYGSCGHRDVCSTCIVRLRFVMGDNKCCICKTVCPFVFVTKAMGKYTRVITDFSVLPDGVNEGKAGDFWYHEDTKAYFDDADHYRMIRTMCQLSCNVDNAEDQVFICEQKLYSKSQLAQHMKTGDSEVDGSEVERNGFAGHPMCEFCRSSFYGDSELYMHMSREHYSCHICKRQNPGRVEYFANYEDIELHFREDHFLCEDEACLEKKFVVFLSKAQLKKHNAMEHGGRMSRSQRNAALETPSSFIYRRNEQEQRRGRGRNAFHDGSDCHISSSANAFHDRSDCHISSSANAFHDKSDCHIPSTAQKDRAAADGHAGRLDNVSESFQSLSIGSSSREAEVGEGSRTGRVLEQLSFRPLSDPDIPDNSVETSFPSLSEQQSSLNQSARDAPRLGDESLFPPLTGSSNKMKQPVFTPKRPRTFPAAEDIHAAKMRYALGMNEDMYSAFKEIAGEYRRGTIDAFEYLSYVEQFGLSHLVPEMVRLLPDSRKQRELADAHYTNTRLKNLQENGNNRNGGFFLSKKKSLQENGGGTSRKFMI

SEQ ID NO: 197976 - protein, 588 aa, Zea Mays
MEDFCAVCADTLEWVAYGSCGHRDVCSTCIVRLRFVMGDNKCCICKTVCPFVFVTKAMGKYTRVITDFSVLPDGVNEGKAGDFWYHEDTKAYFDDADHYRMIRTMCQLSCNVDNAEDQVAQAKRKSKFRSIEQLKGHLYCVHRLFIEMVSCVLKVFICEQKLYSKSQLAQHMKTGDSEVDGSEVERNGFAGHPMCEFCRSSFYGDSELYMHMSREHYSCHICKRQNPGRVEYFANYEDIELHFREDHFLCEDEACLEKKFVVFLSKAQLKKHNAMEHGGRMSRSQRNAALETPSSFIYRRNEQEQRRGRGRNAFHDGSDCHISSSANAFHDRSDCHISSSANAFHDKSDCHIPSTAQKDRAAADGHAGRLDNVSESFQSLSIGSSSREAEVGEGSRTGRVLEQLSFRPLSDPDIPDNSVETSFPSLSEQQSSLNQSARDAPRLGDESLFPPLTGSSNKMKQPVFTPKRPRTFPAAEDIHAAKMRYALGMNEDMYSAFKEIAGEYRRGTIDAFEYLSYVEQFGLSHLVPEMVRLLPDSRKQRELADAHYTNTRLKNLQENGNNRNGGFFLSKKKSLQENGGGTSRKFMI

SEQ ID NO: 197977 - protein, 427 aa, Zea Mays
MVSCVLKVFICEQKLYSKSQLAQHMKTGDSEVDGSEVERNGFAGHPMCEFCRSSFYGDSELYMHMSREHYSCHICKRQNPGRVEYFANYEDIELHFREDHFLCEDEACLKHNAMEHGGRMSRSQRNAALETPSSFIYRRNEQEQRRGRGRNAFHDGSDCHISSSANAFHDRSDCHISSSANAFHDKSDCHIPSTAQKDRAAADGHAGRLDNVSESFQSLSIGSSSREAEVGEGSRTGRVLEQLSFRPLSDPDIPDNSVETSFPSLSEQQSSLNQSARDAPRLGDESLFPPLTGSSNKMKQPVFTPKRPRTFPAAEDIHAAKMRYALGMNEDMYSAFKEIAGEYRRGTIDAFEYLSYVEQFGLSHLVPEMVRLLPDSRKQRELADAHYTNTRLKNLQENGNNRNGGFFLSKKKSLQENGGGTSRKFMI

SEQ ID NO: 197978 - protein, 66 aa, Zea Mays
MAEDRAAMQTFPCNQMSSAIRNSRPKKERSIETNYLGVVMMENHSMPDASAILDTTWKRGTMKRKP

SEQ ID NO: 197979 - protein, 298 aa, Zea Mays
MAEALLQLGRLKEASEHAEVANGLLPPHCPLREQVDDFKQRIASAELEKNRADKNGSSKADTHGKLRSLSEILFRPDVGGSSQEGREDSDYDDDTEMDYETTVSGHESRENDQGVFRGSLSFQFHQREDQTNVHTDENGSVESPRKDDYAFQSDVAIDMKQRYVAHCNVGTDIKQASFLGEQGEFIASGSDDGRWFIWEKRTGRLIKMLAGDGAVVNCIQSHPFDCAVATSGIDNTIKLWTPDANATSMVSGPELDVLSAIENNQQKLCRNRHFVLPSEFLERFQMHEFSEGFECAQS

SEQ ID NO: 197980 - protein, 202 aa, Zea Mays
MDYETTVSGHESRENDQGVFRGSLSFQFHQREDQTNVHTDENGSVESPRKDDYAFQSDVAIDMKQRYVAHCNVGTDIKQASFLGEQGEFIASGSDDGRWFIWEKRTGRLIKMLAGDGAVVNCIQSHPFDCAVATSGIDNTIKLWTPDANATSMVSGPELDVLSAIENNQQKLCRNRHFVLPSEFLERFQMHEFSEGFECAQS

SEQ ID NO: 197981 - protein, 433 aa, Zea Mays
MLLDLRCGAKKSLADLPKHPLALKSCDISSVCSHQILVGGSDAFARLYDRRMLPPLSSCQTKRKPPPCVKMFCPLHLADSKKTYSHLTHVAFSPNGKEVLLSYSGEHVYLFDVDPDGMSSRYTADYVREQLFVPPFHKVSAKGHAKQKKASVNTTSRSLSRVDMCKKFMQVATRSLETGKNLMLGIEACSEVLESMEPDIDDDTRHEFLCTRAALYLKEGREDSDYDDDTEMDYETTVSGHESRENDQGVFRGSLSFQFHQREDQTNVHTDENGSVESPRKDDYAFQSDVAIDMKQRYVAHCNVGTDIKQASFLGEQGEFIASGSDDGRWFIWEKRTGRLIKMLAGDGAVVNCIQSHPFDCAVATSGIDNTIKLWTPDANATSMVSGPELDVLSAIENNQQKLCRNRHFVLPSEFLERFQMHEFSEGFECAQS

SEQ ID NO: 197982 - protein, 543 aa, Zea Mays
MLLDLRCGAKKSLADLPKHPLALKSCDISSVCSHQILVGGSDAFARLYDRRMLPPLSSCQTKRKPPPCVKMFCPLHLADSKKTYSHLTHVAFSPNGKEVLLSYSGEHVYLFDVDPDGMSSRYTADYVREQLFVPPFHKVSAKGHAKQKKASVNTTSRSLSRVDMCKKFMQVATRSLETGKNLMLGIEACSEVLESMEPDIDDDTRHEFLCTRAALYLKRKWKNDVYMAIRDCNRTWKIDVTSYQAHLHMAEALLQLGRLKEASEHAEVANGLLPPHCPLREQVDDFKQRIASAELEKNRADKNGSSKADTHGKLRSLSEILFRPDVGGSSQEGREDSDYDDDTEMDYETTVSGHESRENDQGVFRGSLSFQFHQREDQTNVHTDENGSVESPRKDDYAFQSDVAIDMKQRYVAHCNVGTDIKQASFLGEFIASGSDDGRWFIWEKRTGRLIKMLAGDGAVVNCIQSHPFDCAVATSGIDNTIKLWTPDANATSMVSGPELDVLSAIENNQQKLCRNRHFVLPSEFLERFQMHEFSEGFECAQS

SEQ ID NO: 197983 - protein, 380 aa, Zea Mays
MCKKFMQVATRSLETGKNLMLGIEACSEVLESMEPDIDDDTRHEFLCTRAALYLKRKWKNDVYMAIRDCNRTWKIDVTSYQAHLHMAEALLQLGRLKEASEHAEVANGLLPPHCPLREQVDDFKQRIASAELEKNRADKNGSSKADTHGKLRSLSEILFRPDVGGSSQEGREDSDYDDDTEMDYETTVSGHESRENDQGVFRGSLSFQFHQREDQTNVHTDENGSVESPRKDDYAFQSDVAIDMKQRYVAHCNVGTDIKQASFLGEFIASGSDDGRWFIWEKRTGRLIKMLAGDGAVVNCIQSHPFDCAVATSGIDNTIKLWTPDANATSMVSGPELDVLSAIENNQQKLCRNRHFVLPSEFLERFQMHEFSEGFECAQS

SEQ ID NO: 197984 - protein, 257 aa, Zea Mays
MLLDLRCGAKKSLADLPKHPLALKSCDISSVCSHQILVGGSDAFARLYDRRMLPPLSSCQTKRKPPPCVKMFCPLHLADSKKTYSHLTHVAFSPNGKEVLLSYSGEHVYLFDVDPDGMSSRYTADYVREQLFVPPFHKVSAKGHAKQKKASVNTTSRSLSRVDMCKKFMQVATRSLETGKNLMLGIEACSEVLESMEPDIDDDTRHEFLCTRAALYLKRKWKNDVYMAIRDCNRTWKIDVTSYQAHLHMAEALLQED

SEQ ID NO: 197985 - protein, 546 aa, Zea Mays
MLLDLRCGAKKSLADLPKHPLALKSCDISSVCSHQILVGGSDAFARLYDRRMLPPLSSCQTKRKPPPCVKMFCPLHLADSKKTYSHLTHVAFSPNGKEVLLSYSGEHVYLFDVDPDGMSSRYTADYVREQLFVPPFHKVSAKGHAKQKKASVNTTSRSLSRVDMCKKFMQVATRSLETGKNLMLGIEACSEVLESMEPDIDDDTRHEFLCTRAALYLKRKWKNDVYMAIRDCNRTWKIDVTSYQAHLHMAEALLQLGRLKEASEHAEVANGLLPPHCPLREQVDDFKQRIASAELEKNRADKNGSSKADTHGKLRSLSEILFRPDVGGSSQEGREDSDYDDDTEMDYETTVSGHESRENDQGVFRGSLSFQFHQREDQTNVHTDENGSVESPRKDDYAFQSDVAIDMKQRYVAHCNVGTDIKQASFLGEQGEFIASGSDDGRWFIWEKRTGRLIKMLAGDGAVVNCIQSHPFDCAVATSGIDNTIKLWTPDANATSMVSGPELDVLSAIENNQQKLCRNRHFVLPSEFLERFQMHEFSEGFECAQS

SEQ ID NO: 197986 - protein, 703 aa, Zea Mays
MNGAEKLRWAFSDGSVTDLLDARSLHGSPDIKKKVQFHSSLVQKLALEKEMEGHVGCVNAIAWNSSGSLLVSGSDDTRINIWNYNNRELVHDIDTGHSANIFCTKFVPETCDEVVVSGAGDAEVRVFNMSRLSGRRPREISMEPTAVYQCHSRRVKKLALDLRCGAKKSLADLPKHPLALKSCDISSVCSHQILVGGSDAFARLYDRRMLPPLSSCQTKRKPPPCVKMFCPLHLADSKKTYSHLTHVAFSPNGKEVLLSYSGEHVYLFDVDPDGMSSRYTADYVREQLFVPPFHKVSAKGHAKQKKASVNTTSRSLSRVDMCKKFMQVATRSLETGKNLMLGIEACSEVLESMEPDIDDDTRHEFLCTRAALYLKRKWKNDVYMAIRDCNRTWKIDVTSYQAHLHMAEALLQLGRLKEASEHAEVANGLLPPHCPLREQVDDFKQRIASAELEKNRADKNGSSKADTHGKLRSLSEILFRPDVGGSSQEGREDSDYDDDTEMDYETTVSGHESRENDQGVFRGSLSFQFHQREDQTNVHTDENGSVESPRKDDYAFQSDVAIDMKQRYVAHCNVGTDIKQASFLGEQGEFIASGSDDGRWFIWEKRTGRLIKMLAGDGAVVNCIQSHPFDCAVATSGIDNTIKLWTPDANATSMVSGPELDVLSAIENNQQKLCRNRHFVLPSEFLERFQMHEFSEGFECAQS

SEQ ID NO: 197987 - protein, 111 aa, Zea Mays
MEGHVGCVNAIAWNSSGSLLVSGSDDTRINIWNYNNRELVHDIDTGHSANIFCTKFVPETCDEVVVSGAGDAEVRVFNMSRLSGRRPREISMEPTAVYQCHSRRVKKLAVS

SEQ ID NO: 197988 - protein, 792 aa, Zea Mays
MYLKESISKKIEESAPSLTIDDPDICERIDIVGSLVAPTDGKLSNDSEGKAGTSSDSGSDSDSDSSNSGSDSGSQSRSAAETGSGSSSNSDSDGSSSSKEGSDAAVDITSDDDKANIAHTKVVDDLNLSSSPRDLKRLDVDDEQIDIETNLDYRSTSPHIGLNKFNTGNDDAAAEGFSAGNLSKPSEMSGSKNMTSTRMDSIGVDTKYNEMSFLDNLFDDSMRIASENSPKGEAGQLTVQHVNKRKSTSKDESKFGPVSIAKPKLKRSSGSENSTAKPESAKKVKADIASSIGSLSEHKRSLPPEKYSNDRFNKGTWDVSRHASQDSSPAMKGRPLAPGNLQRIDQSPNLPVPTMHSERTKENTVKSSLKKKSDKSQKPWHGMDGDFGPGYSHGVDHHANFDGSDDFSTRKRSRHGNLLIDDKMFKRSKDANANVDSMNLTKSSRETVVPDEITAFPESNECNGEQSNSQRDNVERSPYGKKKLQREFSDLELAELRKTSLENDDGRIRKQFESSSSKSLDAKLNVINSYPSMNDRKVPVTVFNDTKRKPSPQEYGIGGHINQEGFPRKAAGYEFDDNRPQQNIPDSQHLPRIYNTDFENLIYPDSSGKTSKRETRMTHGGMLEYADIQKKKTTSRLPQNGTNNVRVSRMQKSISPSDNDERSRNDSLIETKTGRKRRGSSSDDDNLFFSKYDKDAPELKDPIKDFSQYKDYVQEYNEKYGVYSYLNSQIDKTMSEFLKIQDDLNVGKERGKEQYYNTLERLRDMYHESGTRHKLMKKVFVLLHEELQVCLL

SEQ ID NO: 197989 - protein, 845 aa, Zea Mays
MNHMQALEKAVADAFPNASKKIQSIIKNIANYQGPERYVLKSGLEVESSKSHVSEGVRSISKKIEESAPSLTIDDPDICERIDIVGSLVAPTDGKLSNDSEGKAGTSSDSGSDSDSDSSNSGSDSGSQSRSAAETGSGSSSNSDSDGSSSSKEGSDAAVDITSDDDKANIAHTKVVDDLNLSSSPRDLKRLDVDDEQIDIETNLDYRSTSPHIGLNKFNTGNDDAAAEGFSAGNLSKPSEMSGSKNMTSTRMDSIGVDTKYNEMSFLDNLFDDSMRIASENSPKGEAGQLTVQHVNKRKSTSKDESKFGPVSIAKPKLKRSSGSENSTAKPESAKKVKADIASSIGSLSEHKRSLPPEKYSNDRFNKGTWDVSRHASQDSSPAMKGRPLAPGNLQRIDQSPNLPVPTMHSERTKENTVKSSLKKKSDKSQKPWHGMDGDFGPGYSHGVDHHANFDGSDDFSTRKRSRHGNLLIDDKMFKRSKDANANVDSMNLTKSSRETVVPDEITAFPESNECNGEQSNSQRDNVERSPYGKKKLQREFSDLELAELRKTSLENDDGRIRKQFESSSSKSLDAKLNVINSYPSMNDRKVPVTVFNDTKRKPSPQEYGIGGHINQEGFPRKAAGYEFDDNRPQQNIPDSQHLPRIYNTDFENLIYPDSSGKTSKRETRMTHGGMLEYADIQKKKTTSRLPQNGTNNVRVSRMQKSISPSDNDERSRNDSLIETKTGRKRRGSSSDDDNLFFSKYDKDAPELKDPIKDFSQYKDYVQEYNEKYGVYSYLNSQIDKTMSEFLKIQDDLNVGKERGKEQYYNTLERLRDMYHESGTRHKLMKKVFVLLHEELQVCLL

SEQ ID NO: 197990 - protein, 1028 aa, Zea Mays
MLVVKNSNSPGHLNEANCVIFMKNVGVERMEMGCFWSVALLGARSIVLDPANPSVKSQAKSMAAAAVEGNPRRMHWKQKSEFLKKNKAAVITPTKSVLKVKLSNNIPKGNISSSPAPSPEQPGESNPSFPVGSDANNEVITPFDFNKEENSKYEKSVRNKMSNKDINRRASSHAANVDDNTNEVRSYLISVLSKNPKGMGLKALEKAVADAFPNASKKIQSIIKNIANYQGPERYVLKSGLEVESSKSHVSEGVRSISKKIEESAPSLTIDDPDICERIDIVGSLVAPTDGKLSNDSEGKAGTSSDSGSDSDSDSSNSGSDSGSQSRSAAETGSGSSSNSDSDGSSSSKEGSDAAVDITSDDDKANIAHTKVVDDLNLSSSPRDLKRLDVDDEQIDIETNLDYRSTSPHIGLNKFNTGNDDAAAEGFSAGNLSKPSEMSGSKNMTSTRMDSIGVDTKYNEMSFLDNLFDDSMRIASENSPKGEAGQLTVQHVNKRKSTSKDESKFGPVSIAKPKLKRSSGSENSTAKPESAKKVKADIASSIGSLSEHKRSLPPEKYSNDRFNKGTWDVSRHASQDSSPAMKGRPLAPGNLQRIDQSPNLPVPTMHSERTKENTVKSSLKKKSDKSQKPWHGMDGDFGPGYSHGVDHHANFDGSDDFSTRKRSRHGNLLIDDKMFKRSKDANANVDSMNLTKSSRETVVPDEITAFPESNECNGEQSNSQRDNVERSPYGKKKLQREFSDLELAELRKTSLENDDGRIRKQFESSSSKSLDAKLNVINSYPSMNDRKVPVTVFNDTKRKPSPQEYGIGGHINQEGFPRKAAGYEFDDNRPQQNIPDSQHLPRIYNTDFENLIYPDSSGKTSKRETRMTHGGMLEYADIQKKKTTSRLPQNGTNNVRVSRMQKSISPSDNDERSRNDSLIETKTGRKRRGSSSDDDNLFFSKYDKDAPELKDPIKDFSQSEFLKIQDDLNVGKERGKEQYYNTLERLRDMYHESGTRHKLMKKVFVLLHEELQIIKERINDFTDAYSNE

SEQ ID NO: 197991 - protein, 1054 aa, Zea Mays
MLVVKNSNSPGHLNEANCVIFMKNVGVERMEMGCFWSVALLGARSIVLDPANPSVKSQAKSMAAAAVEGNPRRMHWKQKSEFLKKNKAAVITPTKSVLKVKLSNNIPKGNISSSPAPSPEQPGESNPSFPVGSDANNEVITPFDFNKEENSKYEKSVRNKMSNKDINRRASSHAANVDDNTNEVRSYLISVLSKNPKGMGLKALEKAVADAFPNASKKIQSIIKNIANYQGPERYVLKSGLEVESSKSHVSEGVRSISKKIEESAPSLTIDDPDICERIDIVGSLVAPTDGKLSNDSEGKAGTSSDSGSDSDSDSSNSGSDSGSQSRSAAETGSGSSSNSDSDGSSSSKEGSDAAVDITSDDDKANIAHTKVVDDLNLSSSPRDLKRLDVDDEQIDIETNLDYRSTSPHIGLNKFNTGNDDAAAEGFSAGNLSKPSEMSGSKNMTSTRMDSIGVDTKYNEMSFLDNLFDDSMRIASENSPKGEAGQLTVQHVNKRKSTSKDESKFGPVSIAKPKLKRSSGSENSTAKPESAKKVKADIASSIGSLSEHKRSLPPEKYSNDRFNKGTWDVSRHASQDSSPAMKGRPLAPGNLQRIDQSPNLPVPTMHSERTKENTVKSSLKKKSDKSQKPWHGMDGDFGPGYSHGVDHHANFDGSDDFSTRKRSRHGNLLIDDKMFKRSKDANANVDSMNLTKSSRETVVPDEITAFPESNECNGEQSNSQRDNVERSPYGKKKLQREFSDLELAELRKTSLENDDGRIRKQFESSSSKSLDAKLNVINSYPSMNDRKVPVTVFNDTKRKPSPQEYGIGGHINQEGFPRKAAGYEFDDNRPQQNIPDSQHLPRIYNTDFENLIYPDSSGKTSKRETRMTHGGMLEYADIQKKKTTSRLPQNGTNNVRVSRMQKSISPSDNDERSRNDSLIETKTGRKRRGSSSDDDNLFFSKYDKDAPELKDPIKDFSQYKDYVQEYNEKYGVYSYLNSQIDKTMSEFLKIQDDLNVGKERGKEQYYNTLERLRDMYHESGTRHKLMKKVFVLLHEELQIIKERINDFTDAYSNE

SEQ ID NO: 197992 - protein, 1186 aa, Zea Mays
MYKLRGRGGGRGGSGVAKRPMPSNARGRGVASSIGGMAGPPRSRAAAAALKQPVGREEAFCLESSGLPAFAAIIRLTPDLVDEIRRTEEAGGGARIKFNPNMYNSSENVIDVSGKEFKFTWASERGELCDIYEERRSGEDGNGLLLECGSAWRKVNVQRILDESTKNLVKMRSEEAERLSKSRKSIVLDPANPSVKSQAKSMAAAAVEGNPRRMHWKQKSEFLKKNKAAVITPTKSVLKVKLSNNIPKGNISSSPAPSPEQPGESNPSFPVGSDANNEVITPFDFNKEENSKYEKSVRNKMSNKDINRRASSHAANVDDNTNEVRSYLISVLSKNPKGMGLKALEKAVADAFPNASKKIQSIIKNIANYQGPERYVLKSGLEVESSKSHVSEGVRSISKKIEESAPSLTIDDPDICERIDIVGSLVAPTDGKLSNDSEGKAGTSSDSGSDSDSDSSNSGSDSGSQSRSAAETGSGSSSNSDSDGSSSSKEGSDAAVDITSDDDKANIAHTKVVDDLNLSSSPRDLKRLDVDDEQIDIETNLDYRSTSPHIGLNKFNTGNDDAAAEGFSAGNLSKPSEMSGSKNMTSTRMDSIGVDTKYNEMSFLDNLFDDSMRIASENSPKGEAGQLTVQHVNKRKSTSKDESKFGPVSIAKPKLKRSSGSENSTAKPESAKKVKADIASSIGSLSEHKRSLPPEKYSNDRFNKGTWDVSRHASQDSSPAMKGRPLAPGNLQRIDQSPNLPVPTMHSERTKENTVKSSLKKKSDKSQKPWHGMDGDFGPGYSHGVDHHANFDGSDDFSTRKRSRHGNLLIDDKMFKRSKDANANVDSMNLTKSSRETVVPDEITAFPESNECNGEQSNSQRDNVERSPYGKKKLQREFSDLELAELRKTSLENDDGRIRKQFESSSSKSLDAKLNVINSYPSMNDRKVPVTVFNDTKRKPSPQEYGIGGHINQEGFPRKAAGYEFDDNRPQQNIPDSQHLPRIYNTDFENLIYPDSSGKTSKRETRMTHGGMLEYADIQKKKTTSRLPQNGTNNVRVSRMQKSISPSDNDERSRNDSLIETKTGRKRRGSSSDDDNLFFSKYDKDAPELKDPIKDFSQYKDYVQEYNEKYGVYSYLNSQIDKTMSEFLKIQDDLNVGKERGKEQYYNTLERLRDMYHESGTRHKLMKKVFVLLHEELQNNSQLRSD

SEQ ID NO: 197993 - protein, 1103 aa, Zea Mays
MYKLRGRGGGRGGSGVAKRPMPSNARGRGVASSIGGMAGPPRSRAAAAALKQPVGREEAFCLESSGLPAFAAIIRLTPDLVDEIRRTEEAGGGARIKFNPNMYNSSENVIDVSGKEFKFTWASERGELCDIYEERRSGEDGNGLLLECGSAWRKVNVQRILDESTKNLVKMRSEEAERLSKSRKSIVLDPANPSVKSQAKSMAAAAVEGNPRRMHWKQKSEFLKKNKAAVITPTKSVLKVKLSNNIPKGNISSSPAPSPEQPGESNPSFPVGSDANNEVITPFDFNKEENSKYEKSVRNKMSNKDINRRASSHAANVDDNTNEVRSYLISVLSKNPKGMGLKALEKAVADAFPNASKKIQSIIKNIANYQGPERYVLKSGLEVESSKSHVSEGVRSISKKIEESAPSLTIDDPDICERIDIVGSLVAPTDGKLSNDSEGKAGTSSDSGSDSDSDSSNSGSDSGSQSRSAAETGSGSSSNSDSDGSSSSKEGSDAAVDITSDDDKANIAHTKVVDDLNLSSSPRDLKRLDVDDEQIDIETNLDYRSTSPHIGLNKFNTGNDDAAAEGFSAGNLSKPSEMSGSKNMTSTRMDSIGVDTKYNEMSFLDNLFDDSMRIASENSPKGEAGQLTVQHVNKRKSTSKDESKFGPVSIAKPKLKRSSGSENSTAKPESAKKVKADIASSIGSLSEHKRSLPPEKYSNDRFNKGTWDVSRHASQDSSPAMKGRPLAPGNLQRIDQSPNLPVPTMHSERTKENTVKSSLKKKSDKSQKPWHGMDGDFGPGYSHGVDHHANFDGSDDFSTRKRSRHGNLLIDDKMFKRSKDANANVDSMNLTKSSRETVVPDEITAFPESNECNGEQSNSQRDNVERSPYGKKKLQREFSDLELAELRKTSLENDDGRIRKQFESSSSKSLDAKLNVINSYPSMNDRKVPVTVFNDTKRKPSPQEYGIGGHINQEGFPRKAAGYEFDDNRPQQNIPDSQHLPRIYNTDFENLIYPDSSGKTSKRETRMTHGGMLEYADIQKKKTTSRLPQNGTNNVRVSRMQKSISPSDNDERSRNDSLIETKTGRKRRGSSSDDDNLFFSKYDKDAPELKDPIKDFSQRRLGV

SEQ ID NO: 197994 - protein, 798 aa, Zea Mays
MKCARVPEVVSKEMHTYLRRNMRVVITADGDEGEEEGEQIDVGPLPSSGTKTKQTKKQIAQASMSSFVVAAPIKPNTQKASKSVSAMLCKTPEEVVAERHKNRTSQTTLEHCTKKGTEAKQIVDDHVADFLYENKIPLNVVNSRSWQIMMESIGQYGPGYRGPSYYEARVPWLERAVKRTSTLRAKHEEAWKEYGCSIMSDGWTDIRQRHLINFLANSPAGTYFLGSVDASSEIANANMLADLLEKQIIKVGKEHVVHVITDNGANFKAAGRILMDRIPHLFWTPCAAHCLDLLLEDIGKIKEFNTCINMAKKVSRFLYKHGRLHSLMREKLGGDLVRPGVTRFATSFLTLASMYKHKSKLQGLFVSDEWNGSKFALVKEGEQAENIVLSVSFWQTLENCLRASQPLLIALRIADGDETPTAPEIMAAMDKAKATIQESLKEKPRLLAEVISCFEKRWDTQMEQKLYGAALYLNPGKFFTLRDKDRRQAARLRAMFNDVLWKMISDEDEQTKISKQADDYERSEGECFSKAGAIREREKKSPSCERNWSDFAAIHTKKRNRLEHQRLNKLVYVSYNRKMENRFQTLRELGSKGKRSNPLVLEEFMWENEWVEENEDDGDNNIWHAVDEALGATQALRGRNLPRIAAAGAGSSSQPQRTYVRTRKRSRNTAAQDIGEEDSDDQEDGVAAAQAEQTQEATGLDEDGSSQQCTIIRTTQLAAAQDRLTDLERQKDDIMRSYSPAALLDKLQTSMAKLDEESEELQQKFLAKDIDFPHLVQKYKKLRTAYHKQALLHLAGQT

SEQ ID NO: 197995 - protein, 74 aa, Zea Mays
MQSWYPTSVVGLSSSPATPTSSSSSPHQRASNNLQFSSRGQPSPAEAAEIIAHLKDKRCVASLERRHCNLQGKI

SEQ ID NO: 197996 - protein, 796 aa, Zea Mays
MKCARVPEVVSKEMHTYLRRNMRVVITADGDEGEEEGEQIDVGPLPSSGTKTKQTKKQIAQASMSSFVVAAPIKPNTQKASKSVSAMLCKTPEEVVAERHKNRTSQTTLEHCTKKGTEAKQIVDDHVADFLYENKIPLNVVNSRSWQIMMESIGQYGPGYRGPSYYEARVPWLERAVKRTSTLRAKHEEAWKEYGCSIMSDGWTDIRQRHLINFLANSPAGTYFLGSVDASSEIANANMLADLLEKQIIKVGKEHVVHVITDNGANFKAAGRILMDRIPHLFWTPCAAHCLDLLLEDIGKIKEFNTCINMAKKVSRFLYKHGRLHSLMREKLGGDLVRPGVTRFATSFLTLASMYKHKSKLQGLFVSDEWNGSKFALVKEGEQAENIVLSVSFWQTLENCLRASQPLLIALRIADGDETPTAPEIMAAMDKAKATIQESLKEKPRLLAEVISCFEKRWDTQMEQKLYGAALYLNPGKFFTLRDKDRRQAARLRAMFNDVLWKMISDEDEQTKISKQADDYERSEGECFSKAGAIREREKKSPSCERNWSDFAAIHTKKRNRLEHQRLNKLVYVSYNRKMENRFQTLRELGSKGKRSNPLVLEEFMWENEWVEENEDDGDNNIWHAVDEALGATQALRGRNLPRIAAAGAGSSSQPQRTYVRTRKRSRNTAAQDIGEEDSDDQEDGVAAAQAEQTQEATGLDEDGSSQQCTIIRTTQLAAAQDRLTDLERQKDDIMRSYSPAALLDKLQTIYLGAVSRLWPREIDPSYWWGQGGPWECVEHSCRISLFERSPRRWSS

SEQ ID NO: 197997 - protein, 232 aa, Zea Mays
MQSWYPTSVVGLSSSPATPTSSSSSPHQRASNNLQFSSRGQPSPAEAAEIIAHLKDKSIEELQRLLKEKEAYNAFFNTFDQVKTQNNVRGELRKETLQLARENLEKEQRILELGNQCTIIRTTQLAAAQDRLTDLERQKDDIMRSYSPAALLDKLQMCSITNYQTTASLNWPNYNPINSLPRIAAIYLGAVSRLWPREIDPSYWWGQGGPWECVEHSCRISLFERSPRRWSS

SEQ ID NO: 197998 - protein, 256 aa, Zea Mays
MSWRFPLFGSSQQQQSDPNFQDIPMQSWYPTSVVGLSSSPATPTSSSSSPHQRASNNLQFSSRGQPSPAEAAEIIAHLKDKSIEELQRLLKEKEAYNAFFNTFDQVKTQNNVRGELRKETLQLARENLEKEQRILELGNQCTIIRTTQLAAAQDRLTDLERQKDDIMRSYSPAALLDKLQMCSITNYQTTASLNWPNYNPINSLPRIAAIYLGAVSRLWPREIDPSYWWGQGGPWECVEHSCRISLFERSPRRWSS

SEQ ID NO: 197999 - protein, 227 aa, Zea Mays
MSWRFPLFGSQQQQSDPNFQDIPMQSWYPTSVVGLSSSPATPTSSSSSPHQRASNNLQFSSRGQPSPAEAAEIIAHLKDKSIEELQRLLKEKEAYNAFFNTFDQVKTQNNVRGELRKETLQLARENLEKEQRILELGNQCTIIRTTQLAAAQDRLTDLERQKDDIMRSYSPAALLDKLQTIYLGAVSRLWPREIDPSYWWGQGGPWECVEHSCRISLFERSPRRWSS

SEQ ID NO: 198000 - protein, 130 aa, Zea Mays
MQSWYPTSVVGLSSSPATPTSSSSSPHQRASNNLQFSSRGQPSPAEAAEIIAHLKDKSIEELQRLLKEKEAYNAFFNTFDQVKTQNNVRGELRKETLQLARENLEKEQRILELGNQRSGLQVLQPSGVCQ

SEQ ID NO: 198001 - protein, 161 aa, Zea Mays
MGDVSLNGPIKAAEPGAGGIAKGNQVLDTMSAGWTDERHRLYISSMEASFVDQLYNHGSRPRNANGTAFKALRREYVEYEKTDAPVRRGAKCCGVPANPWMQHFRPRSDGGNNARGDGLGDSVGDLESGTEANRKSLSASHGRERDACEGEPQLLHESRGD

SEQ ID NO: 198002 - protein, 529 aa, Zea Mays
MAIRKSGGGGGVGDVARRLLLLACCCIWPGGRIFTAADTDPNDLNVLNTLFTSLNSPGQLRAWQANGGDPCGQSWQGITCSGSGVTKILLPNLSLTGNLAYNMNNLGSLVELDLSQNNLGGGGQIQYNLPNVKLEKLNLAGNQFGGNLPYSISTMPNLKYLNLNHNQLQGNITDVFSNLYSLSELDLSFNSLTGDLPQSFTGLSSLKRMYLQNNQFTGYINVLANLPLETLNVGNNHFTGWIPSQLKKINNLQTDGNSWSTGPAPPPPPYTAPPPPNHWNGAGQNDDGSSSSGGRPGIGGGGVAGIIISLLIVGSVVAFFLIKRRKHKAIMEEQFEQHQPFTSFPSNEVNDMKPIYESTTVDIESLASPASINLKPPPKIEQNKSFDDDDDFSNKTAANRSNITPMKATVYSVADLQMATDSFSFDNLVGEGTFGRVYRAQFNGGKMSTARHLAGTLASRSHSALPVHWSTFMKYVLHPSSIRISRHQIFCWTQNSIHTFQILDLQASFLMLNSRQQNKVPDTLPQKWT

SEQ ID NO: 198003 - protein, 571 aa, Zea Mays
MPNLKYLNLNHNQLQGNITDVFSNLYSLSELDLSFNSLTGDLPQSFTGLSSLKRMYLQNNQFTGYINVLANLPLETLNVGNNHFTGWIPSQLKKINNLQTDGNSWSTGPAPPPPPYTAPPPPNHWNGAGQNDDGSSSSGGRPGIGGGGVAGIIISLLIVGSVVAFFLIKRRKHKAIMEEQFEQHQPFTSFPSNEVNDMKPIYESTTVDIESLASPASINLKPPPKIEQNKSFDDDDDFSNKTAANRSNITPMKATVYSVADLQMATDSFSFDNLVGEGTFGRVYRAQFNGGKVLAIKKLDITVMPFQSSDDFAELVSNISKLHHPNLNELVGYCMEHGQHLLVYDFHRNGSLHDLLHLSDEYSKALSWNSRIKIALGSARALEYLHEICSPSIIHKNFKASNILLDSEFNPHLSDTGLASFIPDAEFQAAEQSAGYTAPEVDMTGQYTLKSDVYSFGVVMLELLTGRRPFDSSRPRSEQSLVRWAAPQLHDIDALDRMVDPALKGLYPAKSLSRFADVLALCVQPEPEFRPPMSEVVQALVRLVQRANMTKRMLDGGDTSRGPDDQDQYFI

SEQ ID NO: 198004 - protein, 284 aa, Zea Mays
MAASAGGGAVRALSQKEQDIQMMLAADVHLGTKNCDFQMERYVFKRRTDGIYIINLGKTWDKLQLAARVIVAIENPQDIIVQSARPYGQRAVLKFAQYTGAHAIAGRHTPGTFTNQLQTSFSEPRLLILTDPRTDHQPIKESALGNIPTIAFCDTDSPMRYVDIGIPANNKGRNSIGCLFWLLARMVLQMRGTILPGHKWEVMVDLFFYRDPEEAKEQEEEAAAAPEFAAVTDYQGADQWGGDQWTSDVAAPPVAPTGADWGAAPVVAPTGWESAAQPTAQGWE

SEQ ID NO: 198005 - protein, 568 aa, Zea Mays
MDFLNRSKLSVSGKDFWLTLIARRSRHFAGTRFLKRGVNEKGRVANDVETEQIVFEDTSDGIPTQMASAVQHRGSIPLVWFQETSRLNIRPDIILKPDVDYKATRLHFENLALRYGNPVIILNLIKTREKKPRESLLRAEFAKAIHYINKSLPDDKRLKFLHMDLSKLSRRKGTNVLALLTKVASDVLDLTEFLHCEISTSTKPDDTSSGERTAAKPHDDRSSSDQTECAAKLAPLLLQKGVLRTNCIDCLDRTNVAQFAYGLAALGRQLHALGLTEAQKIELHDPLADDLMDFYEWMGDTLAIQYGGSAAHNKIFCEQRGQWKAATQSQEFLRTIQRYYNNAYTDHDKQDAINMFLGHFQPQQGKPALWKLDSDQHYNIGRQGTLKEEIGRSFIKRSLSDGNILLENNLPVTSCNNETNNTELLPMQQLDDIREPTDSAPEISICEPNPCSSVNYGRVPGRHSISEERQSYLKRLGYPELHSSNFLDLDLLSSSGNSCDEEVFERSSLINSPMDVVSVESSTSYSEQGHTDEGRDDMDLSRSSSQVSDVRDYSDRFAHWVADGGMLW

SEQ ID NO: 198006 - protein, 277 aa, Zea Mays
MDFYEWMGDTLAIQYGGSAAHNKIFCEQRGQWKAATQSQEFLRTIQRYYNNAYTDHDKQDAINMFLGHFQPQQGKPALWKLDSDQHYNIGRQGTLKEEIGRSFIKRSLSDGNILLENNLPVTSCNNETNNTELLPMQQLDDIREPTDSAPEISICEPNPCSSVNYGRVPGRHSISEERQSYLKRLGYPELHSSNFLDLDLLSSSGNSCDEEVFERSSLINSPMDVVSVESSTSYSEQGHTDEGRDDMDLSRSSSQVSDVRDYSDRFAHWVADGGMLW

SEQ ID NO: 198007 - protein, 638 aa, Zea Mays
MKKFMLSPLNFCRYKRLLCSVDLSKDFFFSYSYNIMRSLQKNITQKNTGQAVYEPMCVWNEFLTRAIRNHLKNTCWTVALVHGFFKQSKLSVSGKDFWLTLIARRSRHFAGTRVANDVETEQIVFEDTSDGIPTQMASAVQHRGSIPLVWFQETSRLNIRPDIILKPDVDYKATRLHFENLALRYGNPVIILNLIKTREKKPRESLLRAEFAKAIHYINKSLPDDKRLKFLHMDLSKLSRRKGTNVLALLTKVASDVLDLTEFLHCEISTSTKPDDTSSGERTAAKPHDDRSSSDQTECAAKLAPLLLQKGVLRTNCIDCLDRTNVAQFAYGLAALGRQLHALGLTEAQKIELHDPLADDLMDFYEWMGDTLAIQYGGSAAHNKIFCEQRGQWKAATQSQEFLRTIQRYYNNAYTDHDKQDAINMFLGHFQPQQGKPALWKLDSDQHYNIGRQGTLKEEIGRSFIKRSLSDGNILLENNLPVTSCNNETNNTELLPMQQLDDIREPTDSAPEISICEPNPCSSVNYGRVPGRHSISEERQSYLKRLGYPELHSSNFLDLDLLSSSGNSCDEEVFERSSLINSPMDVVSVESSTSYSEQGHTDEGRDDMDLSRSSSQVSDVRDYSDRFAHWVADGGMLW

SEQ ID NO: 198008 - protein, 649 aa, Zea Mays
MKKFMLSPLNFCRYKRLLCSVDLSKDFFFSYSYNIMRSLQKNITQKNTGQAVYEPMCVWNEFLTRAIRNHLKNTCWTVALVHGFFKQSKLSVSGKDFWLTLIARRSRHFAGTRFLKRGVNEKGRVANDVETEQIVFEDTSDGIPTQMASAVQHRGSIPLVWFQETSRLNIRPDIILKPDVDYKATRLHFENLALRYGNPVIILNLIKTREKKPRESLLRAEFAKAIHYINKSLPDDKRLKFLHMDLSKLSRRKGTNVLALLTKVASDVLDLTEFLHCEISTSTKPDDTSSGERTAAKPHDDRSSSDQTECAAKLAPLLLQKGVLRTNCIDCLDRTNVAQFAYGLAALGRQLHALGLTEAQKIELHDPLADDLMDFYEWMGDTLAIQYGGSAAHNKIFCEQRGQWKAATQSQEFLRTIQRYYNNAYTDHDKQDAINMFLGHFQPQQGKPALWKLDSDQHYNIGRQGTLKEEIGRSFIKRSLSDGNILLENNLPVTSCNNETNNTELLPMQQLDDIREPTDSAPEISICEPNPCSSVNYGRVPGRHSISEERQSYLKRLGYPELHSSNFLDLDLLSSSGNSCDEEVFERSSLINSPMDVVSVESSTSYSEQGHTDEGRDDMDLSRSSSQVSDVRDYSDRFAHWVADGGMLW

SEQ ID NO: 198009 - protein, 302 aa, Zea Mays
MSPNAAPWVKTLRNGGHYNTSIRDASQYNGDSSIGASLHNLTDAYHGSRRSLSSTMDIMNQLESKVDGRRSQNLRSLSFGNSSPTSPASYAQNGLGNYAGREHVSLDVPRGRYKTTSLPVPGLGSSRGYQLLGGSYNGNHDMISTNTPQNMAGIQTGPAWLESDAEASTYLESKDEVHDFASLRHAVLEQELYSIQSLLAQEKARETTYRQRLQTPQLQGLIQEQNPPIDLCGLHISEAIHVLNYELNNRRKIVRSTGRRLQVMIISSARTPARLTAAVEQYLMEHGLLYTQVQPGLLRILL

SEQ ID NO: 198010 - protein, 241 aa, Zea Mays
MSIEERKISVISKSIALNPNAEEFVPSSLRSVNDSSKRSYATTVVSGISKESSTDKPESILRSNSDEEAHQYWQQQLPDDITPDFKVMGQDESPGPDSLSLTDLSINDGIGTSIFSPNQTLSMQHRASPFIRDKLNTHPKINLSIPTYMDERSQATILSPTAGSMSPNAAPWVKTLRNGGHYNTSIRDASQYNGDSSIGASLHNLTDAYHGSRRSLSSTMDIMNQLEVCPQCPHLSTMLHV

SEQ ID NO: 198011 - protein, 243 aa, Zea Mays
MSIEERKISVISKSIALNPNAEEFVPSSLRSVNDSSKRSYATTVVSGISKESSTDKPESILRSNSDEEAHQYWQQQLPDDITPDFKVMGQDESPGPDSLSLTDLSINDGIGTSIFSPNQTLSMQHRASPFIRDKLNTHPKINLSIPTYMDERSQATILSPTAGSMSPNAAPWVKTLRNGGHYNTSIRDASQYNGDSSIGASLHNLTDAYHGSRRSLSSTMDIMNQLEVNLFAVTPCTPVLFYF

SEQ ID NO: 198012 - protein, 344 aa, Zea Mays
MSIEERKISVISKSIALNPNAEEFVPSSLRSVNDSSKRSYATTVVSGISKESSTDKPESILRSNSDEEAHQYWQQQLPDDITPDFKVMGQDESPGPDSLSLTDLSINDGIGTSIFSPNQTLSMQHRASPFIRDKLNTHPKINLSIPTYMDERSQATILSPTAGSMSPNAAPWVKTLRNGGHYNTSIRDASQYNGDSSIGASLHNLTDAYHGSRRSLSSTMDIMNQLESKVDGRRSQNLRSLSFGNSSPTSPASYAQNGLGNYAGREHVSLDVPRGRYKTTSLPVPGLGSSRGYQLLGGSYNGNHDMISTNTPQNMAGIQTGPAWLESDAEGAIQYTKPVGSGEG

SEQ ID NO: 198013 - protein, 249 aa, Zea Mays
MSARDRETAEALVRLAASLDGAVLGLGTAAVAVASWVKYLAVSGQLRLVASAATASIADARSLLSGDGAEPRIAAVRGYVRAHDKFFRAPFSGEAGVVTKHTQMCLFTEWRGIFGWTFDLHALLFRSWKEQIVTSFRSVPFVLVSTELGNPTGVVHINVDKADQPLPLTTVFHKLIPLETTPYTLFQTIIGNGYPIALLDEEKILPIGKKITAIGLCQAKDAESVEITSCPEIPFFLEGGHAFSWCTSF

SEQ ID NO: 198014 - protein, 144 aa, Zea Mays
MATGAVTPPPLAGARRFPRGRSFLHRRLATSPMKDESVISTDGGNEETDTDSLHVARGLSHPGLSSSLSNKASVVPTPLLPSGQSDLRFNRLRPSIDESDCKYKRLFGCYVAREAVIDEEYWIAAWLRAEDQYENESGNRNSMH

SEQ ID NO: 198015 - protein, 290 aa, Zea Mays
MATGAVTPPPLAGARRFPRGRSFLHRRLATSPMKDESVISTDGGNEETDTDSLHVARGLSHPGLSSSLSNKASVVPTPLLPSGQSDLRFNRLRPSIDESDCKYKRLFGCYVAREAVIDEEYWIAAWLRAEDQYENESGNRYVESFKRKFASKEFHALKKRCNTQHREKYICLVAVKNDDIRRTVLNSVVGTLDEPGKPSLHCRIYQPDQPKFGYVTNVCVAKYARRQGIASNMLLLAIDAAKLNGAENIYIHVHKDNLPAWRLYDQIGFKIVDQDDDCRSSDLCLLSFSS

SEQ ID NO: 198016 - protein, 155 aa, Zea Mays
MATGAVTPPPLAGARRFPRGRSFLHRRLATSPMKDESVISTDGGNEETDTDSLHVARGLSHPGLSSSLSNKASVVPTPLLPSGQSDLRFNRLRPSIDESDCKYKRLFGCYVAREAVIDEEYWIAAWLRAEDQYENESGNRYVESFKRKFASKVLV

SEQ ID NO: 198017 - protein, 51 aa, Zea Mays
MWWLRRHVALTMVGWHLVLARWRWGAIETLGRRPISVLVVLHVLPSPVKVP

SEQ ID NO: 198018 - protein, 134 aa, Zea Mays
MFTGSWSCLLDPGSQGCHQGSQDCHHPNMAVRWGCLLGREVVGCHLDNQCYHLGRQGLGSLGNHLDTPEVHLGSQEQHLAGSEEHRQGCSPSVGFAFGADSLVGHHQHVVVAETCCPDYGGMASGSGQVEVGGH

SEQ ID NO: 198019 - protein, 299 aa, Zea Mays
MCFCGPGTKYPDRPVAEACGFKTILPAKPDGPKLTDWKTPDLENILTTNSSKLGWCNVVPEDAYSSKVKFKEECDCKYDGLWGQFCETRAECSCINQCSGHGHCRGGFCKCDSGYFGIDCSIPSAYSLAYDWPSWLQTPVNLPDLKTLNSTTIGVKAVVQKKRPLIYVYDLPAEFDSHLLEGRHYRFQCVNRIYDDMNRTIWTQQLYGAQIALHESILASPHRTLNGDEADYFYVPVLDSCLITRSDDAPHLLLPRDLRRRSYHALEYYRMAHGHIAQQYPYWNRTSGRDHIWAVLFMG

SEQ ID NO: 198020 - protein, 355 aa, Zea Mays
MMLHIFYCRSYHALEYYRMAHGHIAQQYPYWNRTSGRDHIWFFSWDEGACYAPKEIWKSMMLVHWGNTNTKHKNSTTAYWADNWDDIPLDKRGNHPCFDPRKDLVLPAWKEPNPGAIWLKLWARPRNNRTTLFYFNGNLGSAYEGGRPEDTYSMGIRQKLAAEFGSTPNKQGRLGRQHAADVTVTYLRTEKYYEELASSVFCGVLPGDGWSGRMEDSMLQGCIPVIIQDGIFLPYENVLNYNSFAVRIQEDDIPGLISTLRGINDTQVEFMLGNVRQMWQRFFYRDSILLEAQRQKKLFSEEAPWSVEVSKLPDDDDVFATFIQVLHYKLYNDPWRQDFLQTKDTRLPNICSRTS

SEQ ID NO: 198021 - protein, 298 aa, Zea Mays
MCFCGPGTKYPDRPVAEACGFKTILPAKPDGPKLTDWKTPDLENILTTNSSKLGWCNVVPEDAYSSKVKFKEECDCKYDGLWGQFCETRAECSCINQCSGHGHCRGGFCKCDSGYFGIDCSIPSAYSLAYDWPSWLQTPVNLPDLKTLNSTTIGVKAVVQKKRPLIYVYDLPAEFDSHLLEGRHYRFQCVNRIYDDMNRTIWTQQLYGAQIALHESILASPHRTLNGDEADYFYVPVLDSCLITRSDDAPHLLLPVRIVIHMFFDGLDVLQNLSFNFRGTCAEGATMHLSTIEWHMVT

SEQ ID NO: 198022 - protein, 676 aa, Zea Mays
MGAKRCVKDCSARGVCNYNLGECRCFHGYSGKGCEEVLNLECNLPSSPEWPVGQWIVSICAAHCDKTRAMCFCGPGTKYPDRPVAEACGFKTILPAKPDGPKLTDWKTPDLENILTTNSSKLGWCNVVPEDAYSSKVKFKEECDCKYDGLWGQFCETRAECSCINQCSGHGHCRGGFCKCDSGYFGIDCSIPSAYSLAYDWPSWLQTPVNLPDLKTLNSTTIGVKAVVQKKRPLIYVYDLPAEFDSHLLEGRHYRFQCVNRIYDDMNRTIWTQQLYGAQIALHESILASPHRTLNGDEADYFYVPVLDSCLITRSDDAPHLLLPRDLRRRSYHALEYYRMAHGHIAQQYPYWNRTSGRDHIWFFSWDEGACYAPKEIWKSMMLVHWGNTNTKHKNSTTAYWADNWDDIPLDKRGNHPCFDPRKDLVLPAWKEPNPGAIWLKLWARPRNNRTTLFYFNGNLGSAYEGGRPEDTYSMGIRQKLAAEFGSTPNKQGRLGRQHAADVTVTYLRTEKYYEELASSVFCGVLPGDGWSGRMEDSMLQGCIPVIIQDGIFLPYENVLNYNSFAVRIQEDDIPGLISTLRGINDTQVEFMLGNVRQMWQRFFYRDSILLEAQRQKKLFSEEAPWSVEVSKLPDDDDVFATFIQVLHYKLYNDPWRQDFLQTKDTRLPNICSRTS

SEQ ID NO: 198023 - protein, 443 aa, Zea Mays
MFAIRSTKCPVAFVGVAGTLVVLITAVHVFMVPILPASFYYFGSRSSISHPKNVLPAVEVVDSRLKGCFPSDSYGAVAFRGAPWKAEIGRWLAGCHANSSSVDVTEAMGAKRCVKDCSARGVCNYNLGECRCFHGYSGKGCEEVLNLECNLPSSPEWPVGQWIVSICAAHCDKTRAMCFCGPGTKYPDRPVAEACGFKTILPAKPDGPKLTDWKTPDLENILTTNSSKLGWCNVVPEDAYSSKVKFKEECDCKYDGLWGQFCETRAECSCINQCSGHGHCRGGFCKCDSGYFGIDCSIPSAYSLAYDWPSWLQTPVNLPDLKTLNSTTIGVKAVVQKKRPLIYVYDLPAEFDSHLLEGRHYRFQCVNRIYDDMNRTIWTQQLYGAQIALHESILASPHRTLNGDEADYFYVPVLDSCLITRSDDAPHLLLPVPAMHQKRFGRA

SEQ ID NO: 198024 - protein, 388 aa, Zea Mays
MFAIRSTKCPVAFVGVAGTLVVLITAVHVFMVPILPASFYYFGSRSSISHPKNVLPAVEVVDSRLKGCFPSDSYGAVAFRGAPWKAEIGRWLAGCHANSSSVDVTEAMGAKRCVKDCSARGVCNYNLGECRCFHGYSGKGCEEVLNLECNLPSSPEWPVGQWIVSICAAHCDKTRAMCFCGPGTKYPDRPVAEACGFKTILPAKPDGPKLTDWKTPDLENILTTNSSKLGWCNVVPEDAYSSKVKFKEECDCKYDGLWGQFCETRAECSCINQCSGHGHCRGGFCKCDSGYFGIDCSIPSAYSLAYDWPSWLQTPVNLPDLKTLNSTTIGVKAVVQKKRPLIYVYDLPAEFDSHLLEGRHYRFQCVNRIYDDMNRTIWTQQLYGAQVC

SEQ ID NO: 198025 - protein, 436 aa, Zea Mays
MYMICQLSLTVIFLKFQCVNRIYDDMNRTIWTQQLYGAQIALHESILASPHRTLNGDEADYFYVPVLDSCLITRSDDAPHLLLPRDLRRRSYHALEYYRMAHGHIAQQYPYWNRTSGRDHIWFFSWDEGACYAPKEIWKSMMLVHWGNTNTKHKNSTTAYWADNWDDIPLDKRGNHPCFDPRKDLVLPAWKEPNPGAIWLKLWARPRNNRTTLFYFNGNLGSAYEGGRPEDTYSMGIRQKLAAEFGSTPNKQGRLGRQHAADVTVTYLRTEKYYEELASSVFCGVLPGDGWSGRMEDSMLQGCIPVIIQDGIFLPYENVLNYNSFAVRIQEDDIPGLISTLRGINDTQVEFMLGNVRQMWQRFFYRDSILLEAQRQKKLFSEEAPWSVEVSKLPDDDDVFATFIQVLHYKLYNDPWRQDFLQTKDTRLPNICSRTS

SEQ ID NO: 198026 - protein, 767 aa, Zea Mays
MFAIRSTKCPVAFVGVAGTLVVLITAVHVFMVPILPASFYYFGSRSSISHPKNVLPAVEVVDSRLKGCFPSDSYGAVAFRGAPWKAEIGRWLAGCHANSSSVDVTEAMGAKRCVKDCSARGVCNYNLGECRCFHGYSGKGCEEVLNLECNLPSSPEWPVGQWIVSICAAHCDKTRAMCFCGPGTKYPDRPVAEACGFKTILPAKPDGPKLTDWKTPDLENILTTNSSKLGWCNVVPEDAYSSKVKFKEECDCKYDGLWGQFCETRAECSCINQCSGHGHCRGGFCKCDSGYFGIDCSIPSAYSLAYDWPSWLQTPVNLPDLKTLNSTTIGVKAVVQKKRPLIYVYDLPAEFDSHLLEGRHYRFQCVNRIYDDMNRTIWTQQLYGAQIALHESILASPHRTLNGDEADYFYVPVLDSCLITRSDDAPHLLLPRDLRRRSYHALEYYRMAHGHIAQQYPYWNRTSGRDHIWFFSWDEGACYAPKEIWKSMMLVHWGNTNTKHKNSTTAYWADNWDDIPLDKRGNHPCFDPRKDLVLPAWKEPNPGAIWLKLWARPRNNRTTLFYFNGNLGSAYEGGRPEDTYSMGIRQKLAAEFGSTPNKQGRLGRQHAADVTVTYLRTEKYYEELASSVFCGVLPGDGWSGRMEDSMLQGCIPVIIQDGIFLPYENVLNYNSFAVRIQEDDIPGLISTLRGINDTQVEFMLGNVRQMWQRFFYRDSILLEAQRQKKLFSEEAPWSVEVLHYKLYNDPWRQDFLQTKDTRLPNICSRTS

SEQ ID NO: 198027 - protein, 100 aa, Zea Mays
MTYEELLDLGEAVGTQSRGLSQECISLLPITKYKCGFFSRKKTRRERCVICQMEYRRGNLQITLPCKHVYHASCVTRWLSINKVCPVCFAEVPGEDSLRQ

SEQ ID NO: 198028 - protein, 166 aa, Zea Mays
MMHTNSYKTWDNTTPVNNVDSANVVLQGGEAPRTTANTTSEDCIQQVHQSPGSPQVVWQDNIDPDNMTYEELLDLGEAVGTQSRGLSQECISLLPITKYKCGFFSRKKTRRERCVICQMEYRRGNLQITLPCKHVYHASCVTRWLSINKVCPVCFAEVPGEDSLRQ

SEQ ID NO: 198029 - protein, 219 aa, Zea Mays
MTSSRQMELHYINTGFPYTITESFMDFFEGLTYAHADFALMDGFQDQGNPYWTMMHTNSYKTWDNTTPVNNVDSANVVLQGGEAPRTTANTTSEDCIQQVHQSPGSPQVVWQDNIDPDNMTYEELLDLGEAVGTQSRGLSQECISLLPITKYKCGFFSRKKTRRERCVICQMEYRRGNLQITLPCKHVYHASCVTRWLSINKVCPVCFAEVPGEDSLRQ

SEQ ID NO: 198030 - protein, 65 aa, Zea Mays
MLLEDGRGAMRASGGHPKRDAEPTHGVSSDDAQRSSSRREQVVVPAGCTLRLHRNPLQRSVGEGE

SEQ ID NO: 198031 - protein, 207 aa, Zea Mays
MHEALCMKIITHEACVANELYIQALYHEYYGDKQGALENLIQCGNWKKAHTIFVTSVAHSMFLSSNHQEVWRITSALENHKYEIADWDLGAGIYIDFYVLKNSMQERNAMDDSDSLEEMSESCRSFFGRLNESLLVWGSKLPVESRACYSKMAEELCALLVDTPSETLNLPMGCLLTMLNAPVPDESRSSYLQDALSVFTEILCSDP

SEQ ID NO: 198032 - protein, 963 aa, Zea Mays
MAGSTVFPVLRSSEYFTSPSIDELVEREVADPGYCSRVPNFIIGRAGYGQVRFLGNTDVRGIDLNEIVRFEKHYVVVYEDETCKPPVGHGLNKAAEVSLLLNPKDHPEPSILVEVLRCRARKQGSRFLSFNPVNGRWKFEVDHFSRFGLVDEDEEDAVMDEAAVRQPITEVRERDPPSNSYEIELSHSLPAHLGLDPAKVQEMRMVMFSNEEEDEYMEDGFPSDKRYLSRERMNVDSPTSSSKGSRLRSLSPLHMSSQKAGRRSGMPVRKERQALLEYNLNSSELGSSNQGILMSGQNRGFPVSMTKVEGFKLPPEQETPVAGNTYTVCVVDAALFMGRSFRVGWGPNGLLVHSGSLVNSPGTGLSSVIHIEKVASDKVVRDDKDKIKDDLTELCFSAPMDLHKSLDHDFLETESDSFRLKLQKVMTNRLVLPDICRSYIDIIERQLEVNDLSMSSRVLLMHQVTVWELIRVLFSERATGSQLDSVGDDDQEGMVLDKKEGSVDIDPEALPLFRRADFSNWLQDSVCHRVQGEVGSLNDARYLENILVLLTGRQLDTATEIAASRGDVRLAILLSQAGGSMSNRSDLAQTLDQWKMNGLDFDYIEEDWLKVYMLLAGNVQAAFLDLPIDWKRYLGLIMWYQLSPDTPLDIIIRSYDQLLGEGKVPYPVPVYIDEGPLDEAPQWSPGDHFDISFYLMLLHANKDEKFGLLKTMFSAFSSSFDPLDYHFIWHQRSILEAVGAFSSKDLHLLDLSFVYQLLCLGRCHWAIYVILHMPYLDDAPYIHEKLIREVLSQYCESWSRDDAQRQYIVELGIPEEWMHEALCMKIITHEACVANELYIQALYHEYYGDKQGALENLIQCGNWKKAHTIFVTSVAHSMFLSSNHQEVWRITSALENHKYEIADWDLGAGIYIDFYVLKNSMQERNAMDDSDSLEEMSESCRSFFGRLNESLLVWGSKLPVESR

SEQ ID NO: 198033 - protein, 104 aa, Zea Mays
MQERNAMDDSDSLEEMSESCRSFFGRLNESLLVWGSKLPVESRACYSKMAEELCALLVDTPSETLNLPMGCLLTMLNAPVPDESRSSYLQDALSVFTEILCSDP

SEQ ID NO: 198034 - protein, 203 aa, Zea Mays
MTWMISLSSRNEAKSQLPLTKATVTKVEVVGMGDRVCVDLCSIMRPGEGLLVGSYARGMFLVHSECLETNYIASRPFRVNAGPVHAYVTVPGGKTSYLSELGSGKEVIVINQSGLWRTAIVGRVKIESRPLILVEAKDNSGDETYSIFLQNAETVALITPNTGSSGRTAIPVTSLKVGDEVLVRKQGAARHTGIEIQEFIVER

SEQ ID NO: 198035 - protein, 226 aa, Zea Mays
MLALEQGLDGVVLKVDDMDDIIKLKDYFDRRNEAKSQLPLTKATVTKVEVVGMGDRVCVDLCSIMRPGEGLLVCVGSYARGMFLVHSECLETNYIASRPFRVNAGPVHAYVTVPGGKTSYLSELGSGKEVIVINQSGLWRTAIVGRVKIESRPLILVEAKDNSGDETYSIFLQNAETVALITPNTGSSGRTAIPVTSLKVGDEVLVRKQGAARHTGIEIQEFIVER

SEQ ID NO: 198036 - protein, 446 aa, Zea Mays
MASSSSLASAKALARSHASLLAPQTQRTGTRCLAFFLAGFSRPVPQSGPCLAAPCDRAGQFKLLPFDDPSSAVTLPMASALQRLMRASAAAPAEPKKTVWVWTESRQVMTAAVERGWSTFLFGSKDLGKDWSSTARINALFIDGPGIFDEENQKVAVISQVSSPGELDLVQPDNAEAENIVIDFRGGWQVIRAENIVAAFQGCKGNVLAVSTNTTEAQVFLEALEQGLDGVVLKVDDMDDIIKLKDYFDRRNEAKSQLPLTKATVTKVEVVGMGDRVCVDLCSIMRPGEGLLVCVGSYARGMFLVHSECLETNYIASRPFRVNAGPVHAYVTVPGGKTSYLSELGSGKEVIVINQSGLWRTAIVGRVKIESRPLILVEAKDNSGDETYSIFLQNAETVALITPNTGSSGRTAIPVTSLKVGDEVLVRKQGAARHTGIEIQEFIVER

SEQ ID NO: 198037 - protein, 209 aa, Zea Mays
MDDIIKLKDYFDRRNEAKSQLPLTKATVTKVEVVGMGDRVCVDLCSIMRPGEGLLVCVGSYARGMFLVHSECLETNYIASRPFRVNAGPVHAYVTVPGGKTSYLSELGSGKEVIVINQSGLWRTAIVGRVKIESRPLILVEAKDNSGDETYSIFLQNAETVALITPNTGSSGRTAIPVTSLKVGDEVLVRKQGAARHTGIEIQEFIVER

SEQ ID NO: 198038 - protein, 152 aa, Zea Mays
MDDIIKLKDYFDRRNEAKSQLPLTKATVTKVEVVGMGDRVCVDLCSIMRPGEGLLVCVGSYARGMFLVHSECLETNYIASRPFRVNAGPVHAYVTVPGGKTSYLSELGSGKEVIVINQSGLWRTAIVGRVKIESRPLILVEAKDQVEGPPFP

SEQ ID NO: 198039 - protein, 361 aa, Zea Mays
MEHSYAQECDFVAIFDADFQPDPDFLLRTIPFLVHNPKIALVQTRWEFVNYNICLLTRIQKMSLDYHFKVEQESGSSVHAFFGFNGTAGVWRVSAIGEAGGWKDRTTVEDMDLAVRASLKGWQFLYVGDIRFFVQVKSELPSTFKAYRHQQHRWTCGAANLFRKMAGDIVISKGATVWKKLHLLYSFFFVRRVIAPILTFLFYCVVIPLSVMVPEVSIPAWGMFYIPTAITIMTAIRNPWSIHLVPIWILFENVMSMHRMRAALTGLLETTYVDEWVVTEKVGDHVKDKLEVPLLTPVKPTECVERIYLPELLVAFYLLLCASYDVVLGAGHYYPYIFLQAFAFLVLGFGFAGTVTPCSCS

SEQ ID NO: 198040 - protein, 197 aa, Zea Mays
MAGDIVISKGATVWKKLHLLYSFFFVRRVIAPILTFLFYCVVIPLSVMVPEVSIPAWGMFYIPTAITIMTAIRNPWSIHLVPIWILFENVMSMHRMRAALTGLLETTYVDEWVVTEKVGDHVKDKLEVPLLTPVKPTECVERIYLPELLVAFYLLLCASYDVVLGAGHYYPYIFLQAFAFLVLGFGFAGTVTPCSCS

SEQ ID NO: 198041 - protein, 191 aa, Zea Mays
MEEASPSVQLLLRPKGHRSHPNVPVLLRRDPTVCHGPRSQHPCLGNVLHSHCHHHHDSHQESLSYFVHARSIHLVPIWILFENVMSMHRMRAALTGLLETTYVDEWVVTEKVGDHVKDKLEVPLLTPVKPTECVERIYLPELLVAFYLLLCASYDVVLGAGHYYPYIFLQAFAFLVLGFGFAGTVTPCSCS

SEQ ID NO: 198042 - protein, 278 aa, Zea Mays
MQHVKQELVEFECKDWASKKINIKYEIRESRKGYKAGALKKGMEHSYAQECDFVAIFDADFQPDPDFLLRTIPFLVHNPKIALVQTRWEFVNYNICLLTRIQKMSLDYHFKVEQESGSSVHAFFGFNGTAGVWRVSAIGEAGGWKDRTTVEDMDLAVRASLKGWQFLYVGDIRVKSELPSTFKAYRHQQHRWTCGAANLFRKMAGDIVISKGATVWKKLHLLYSFFFVRRVIAPILTFLFYCVVIPLSVMVPEVSIPAWGMFYIPTAITIMTAIRNPW

SEQ ID NO: 198043 - protein, 320 aa, Zea Mays
MELEGPWARVLHLHDACEWGRAVRARAVAPALEAAAWACLAMSVMLVLEVCYMSVSSFVAVNLLRRTPQRRYSWEPMPSGTARGDDEEAAVGDGGGEAYPMVLVQIPMYNEREVYKISIGAACALTWPPDRIIIQVLDDSTDPFIKELVEFECKDWASKKINIKYEIRESRKGYKAGALKKGMEHSYAQECDFVAIFDADFQPDPDFLLRTIPFLVHNPKIALVQTRWEFVNYNICLLTRIQKMSLDYHFKVEQESGSSVHAFFGFNGTAGVWRVSAIGEAGGWKDRTTVEDMDLAVRASLKGWQFLYVGDIRVRLSAHL

SEQ ID NO: 198044 - protein, 1158 aa, Zea Mays
MGDRRVLLVASPEVAVFGYDGVVSLASVQDAVDTVPLNNQTRTVIRIGPGVHQQQVRIPRTKNFITLCGSSIKDTVICWDNRTTTCIKHTQPSGAIGTGTLSSATVIVEGDDFIAENVIFKNSAPQSGQAAAVRVTADRCAFYDCRFLGWQETLHLHGGKQLLKNCYVEGSYDFIFGDSAALLEHCHIHCKSAGYITAHGRKSSSEPTGFVFFKCVITGNGEAAYMYLGRPWEPFGRVVFAETFMDRCIEPAGWHNWDKPDNEQTACFYEYRCSGPGSSSSGRERWCKELFGDEAMPFLAQTFIDPDIENPWLVHSKAVAVVGDLGDAQLVAHPDELLPEPPGSLLVQGEPTRQCKVNSRFPAGVQSKSQTEKTAAAAYHRAAGRVAADGLLQRAAVEEDLLVVVVGENGVELPAGAEHREPGLRRRAVELQQPARVGGTAVSLHPAGCRPFILKFEDPGGASERSYYLLLQPTVPDLGALRASAASRRRLDHGREVEAGPGAYQRGRRVTDRERGARRVAAPSPVGQIVEQTPRGQWAAALLAYCLCLASVYPTTSRGPTVERGSRSTEYSEIWPVSTAFSSLTSTSCRSALTPRPAFMAVTFPSPTPRSPRRPDAIVAPDPSSADMSPSLDFGDPTSFTALRVLTDGGAATRLLHECVAYQRALDARLDALLARRADLDRAAASLLRSAPPLLSLAASDAAALKESSSSTAALADALSSRVRHLDAAHSRADAALARAEAALDRSRALEATRRALAADDLAAAATAAHEFLAIDARFPTDDDLRRDLIDIKRRLEGLARRRLAAVVDAQDHPAVLRLVRLFPLLGLADEGLQVYVAYLKKVVALRARADFEHLAELTSATQPTSDRPDFVGCLTRLFKDIVLAVEENDGVLRELRGDDVAYAIIELQEECDSRGTQILRRYADYRKLARLASDINSYTKNLLSVMGSMASAAGGNEGPDPREIELYLEEILALTQLGEDYTEFMVNKIRVLRDVKPELGPRAMKAFRNGNFNKMEQDLTGFYVIFEEFFMVENVRKAIRIDEPISDGLTTSMVDDVFFVLQSCCRRATSTASINSVIAVLGGATSLLSNEYQEALQWRMREPNLGAKLFLGGVGVQKTGEEIATALNNIDISSEYVLKLRHEIEELCVELQQLHHL

SEQ ID NO: 198045 - protein, 55 aa, Zea Mays
MVVLVRKMPTRLLKLGRMPSLLALQFSGLQTTLKLSKESRPAKGLQLYTHKELDV

SEQ ID NO: 198046 - protein, 249 aa, Zea Mays
MPLDAAAKAFQVRASARVDKFSKSDIIVSPSILSANFAKLGDQVKAVEVAGCDWIHVDVMDGRFVPNITIGPLVVDALRPVTDLPLDVHLMIVEPEQRVPDFIKAGADIVSVHCEQTSTIHLHRTVNQIKSLGAKAGVVLNPATPLNAIDYILDVVDLVLIMSVNPGFGGQSFIESQVRKIAELRRLCAEKGVNPWIEVDGGVGPKNAYKVIEAGANAIVAGSAVFGAPDYAEAIKGIKTSQRPAAVHA

SEQ ID NO: 198047 - protein, 316 aa, Zea Mays
MVRSVSVRVAELLVQQANNPRAGRVGDCEAETGDRLREPERWADGDTVVVALLQLRLPADRLHRPPPRHRVIYAQAFQVRASARVDKFSKSDIIVSPSILSANFAKLGDQVKAVEVAGCDWIHVDVMDGRFVPNITIGPLVVDALRPVTDLPLDVHLMIVEPEQRVPDFIKAGADIVSVHCEQTSTIHLHRTVNQIKSLGAKAGVVLNPATPLNAIDYILDVVDLVLIMSVNPGFGGQSFIESQVRKIAELRRLCAEKGVNPWIEVDGGVGPKNAYKVIEAGANAIVAGSAVFGAPDYAEAIKGIKTSQRPAAVHA

SEQ ID NO: 198048 - protein, 86 aa, Zea Mays
MAATGLLRRAAASSLPRLPSGISLIQPPLPAPLTESQSLVIPGIGAAAGPAMELMAVPKKKVSKYKKGLRNGPKALKSVPVIIRCR

SEQ ID NO: 198049 - protein, 1591 aa, Zea Mays
MMDQCVVYSCASRKFWFVVGVGPGPRKEPGTRHSFDRHGRVAVTTTDAMCHRLCRPCIKVRTCQSRASAAAAMAATPAWDWEESLVFFLQPFFLHGVSAAAHLILALAVAGRLLFRRLSASRTKDGEVGGGDASRGVGRFRYWYGVSVCTTWAMGAFEVLLAVYSWYANGGAGWSRDAVVEQVDAAARAVSWLLLAAYLQFDFWWRRQRQERFPVALRLWLALFMLLSVVTVGVHAAMILDGSLVPGRSWALDAVSVTAAAVLLSVSAGFFGRKEGEGGGHASEAHEPLLNGAHEGSGDDDENSSSAADASLFTGAGFLSVLTFSWMTPLLGVGHRKTLVPEDVPGLEPGDSVAGVLPPFKANLEALTGDGGRSSRKAVTAFKLTKALLRTLRWHVAVTAFYTLVYCVAVYVGPYLIDSLVQYLYLNGDERYASKGQLLVLAFVVAKVLECLSQRHLFFRLQQAGIRARSALVAVLYQKSLALSSQSRRSHTSGEMINIVSVDADRVGIFSWYLHEVWQVPLQVVMAMFILYSTLGVASLAALGATVATGLATVPLGRMQERFQEKLMDSKDGRMKATSEILHSMRILKLQGWEMRFLSKIIELRKTEANWLKRYLYTSATMTFIFWGTPTFVAVVTFGACMLMGIPLETGKMLSALATFRVLEEPIYELPGTIAMVIKTKVSLDRIASFLCLDELPSDAVQRLPRGSSADFAVSVGNGCFSWEASPDAPTLKDLNFQARPGMRVAVCGTVGSGKSSLLSCILGEIPKLSGEVRTCGTTAYVSQSAWIQSGKIQENILFGMEMDRDKYDRVLESCALKKDLENLPFGDQTVIGERGINLSGGQKQRIQIARALYQDADVYLFDDPFSAVDAHTGSHIFKECLLADLASKTVVYVTHQIEFLPAADLILVMKDGRIAQAGRYDEILGSGEEFMELVGAHEESLTALDVVDAMNENEANVSSSPSSRIETPNLSRSLSLAEKKHGATNEAEGDDDDARSGQLVQEEEREKGRVGFWVYWEYLTQAYKGALVPLVLLAQTLFQIMQIASNYWMAWATPASKDAEPPVSAPTLLFVYVVLALGSSLCILVRSLLLATAAYKTATLLFNKMHLSIFRAPMSFFDSTPSGRILNRASTDQSEVDTNIADQMGTVAFSIIQLVGITAVMSQVAWQVFVVFVPVFAACVWYQRYYIDTARELQRLVGVCRAPIIQHFAESIAGSSTIRSFGKEDQFVSTNSRLTDAYSRPKFYNAGAREWLCFRLDVLSSLAFAFSLIFLINLPAGLIDPGIAGLAITYGLTLNTLQAQVVWSMCTLENKIISVERILQYMGVPAEPPLVMPENKLAQSWPSNGEIQLQNLHVKYAPQLPFVLKGLTVAFPGGVKTGIVGRTGSGKSTLIQSLFRIVDPAVGQIVIDGIDIRTVGLHDLRSRLSIIPQEPTMFEGTVRSNLDPLGEYSDDQIWEALDCCQLGDEVRKQELKLDSPVVENGENWSVGQRQLVCLGRVILKRSKVLVLDEATASVDTATDGLIQRTLRRQFKETTVITIAHRITSVLDSHMVLLLDNGVAVEHDRPDKLLEDKSSLFSKLVAEYTMRSVLT

SEQ ID NO: 198050 - protein, 121 aa, Zea Mays
MKTRRSRNEVERELGKLFSNGGGSGVGTKSKYSGTKFNMVVEDIRDGVLVFEDEDDAVKYCNLLQGGGQGCEGIAEIEASSVFSMCRKMKALAVLFRRGKTPPLPQSLERDLRARKRSLED

SEQ ID NO: 198051 - protein, 311 aa, Zea Mays
MVNCMTLNPTSRVALASCRNASTMVANLGLYGIALGVFGAIKAKEYSDIVTQYRWIAYLSIFIGCCFLVVFHAGTKEPTLKSEPSCKKAARISWGYWFKKTLYYQVALLYMLARLITNVSQSLIAFYVTRDLRMNEYSKAIIPAIIFCCSFFVSIVLQEIKWTSRRLKSLLTVGATLWVISGVAVFVLPSQMNSLMYPLAMVIGAANALVMVTTIGLEGALVGEDLNGCAFVYGSLSFLDKISCGIALFALESYEDTMVSYGETRGLNTVSRYGTGLIPSCFAVLSLVVTSTLRLQDDTPRAAALDAPLLV

SEQ ID NO: 198052 - protein, 711 aa, Zea Mays
MAGTEAFEAYFRRADLDQDGRISGQEAVAFFQGANLPQQVLAQVWMHADRNKTGFLGRPEFFNALRLVTVAQSGRQLTPDIVQSALYGPAAARIPAPKIAAGAVPPQMGAAGAPRPQGSAAMTPTPGQVGAAQMNPAATPRPQGSGMVPTSTQVSVPQVNPGAAPRPQGINSTMPAASQGGALQATQFAGPRVMQPQPSNLGITQQQPSSTGFMHPPQVGAPAASLQAQAPGINQGLVSGGSMGGSVGWQGWQGGNAASVGGIPQAIPGAAPSQAAQGGFGPGLPRTIGVALVQQVQAMSPSPLPPQSNSAGLPQDSKALVMSGNGPAISSGSSTDIFSALTQQKPSISAPAPQTSSIPSSSSFMPTPTGSQNLTNLTQFGSLQGSSQRQQTQPVVKPSPAPAAPVVSAGISNPSPQWPKITQSDIQKYMKVFGDVDRDRDGKITGAEARTLFLSWRLPREVLKQVWDLSDQDNDGMLSLREFCVALYLMERHRAGTPLPPALPDSLRHDETLLRATGLPSTAYNGPSWQQNQGGLSQRGPGAPGVPAGGVRPPLPPHLHSQTDGASRPGQPRSYMSGMDNHVVVQGNKDDKSGVNQSVQEVADPKKVEVEKQVLDSREKLEYYRTKMQDLVLYKSRCDNRLNEITERASSDKREVESLAKKYEEKYKQVAELASKLAVEEAAYRDVQERKVELNDALIKMVQGGSVDGSS

SEQ ID NO: 198053 - protein, 690 aa, Zea Mays
MPTPTGSQNLTNLTQFGSLQGSSQRQQTQPVVKPSPAPAAPVVSAGISNPSPQWPKITQSDIQKYMKVFGDVDRDRDGKITGAEARTLFLSWRLPREVLKQVWDLSDQDNDGMLSLREFCVALYLMERHRAGTPLPPALPDSLRHDETLLRATGLPSTAYNGPSWQQNQGGLSQRGPGAPGVPAGGVRPPLPPHLHSQTDGASRPGQPRSYMSGMDNHVVVQGNKDDKSGVNQSVQEVADPKKVEVEKQVLDSREKLEYYRTKMQDLVLYKSRCDNRLNEITERASSDKREVESLAKKYEEKYKQVAELASKLAVEEAAYRDVQERKVELNDALIKMVQGGSVDGLLQVRADRIQYQLEEMEKALSERCKHFGLQFKSSASVELPSGWEPGPQEGLIEWDEDWDKFEDEGFSIVKDNGTIQENPISAENGKVPSLWDDGDDMSPVASSNGHIKEERRYSVGDQVAESEIAYDFGDESVRSPGSAGRSASGSPFKSSRFGMHDSSPSKRESYSDHGGSESVFGDKFGDETSWNFDDQDTDSVWGSTALNAEADQHGGSGTHNSFFGSEAGSPSGASVFGKKRSSFFDDSVPSTPAYTSGFSPKFGESRDDSSSYSFGKFDSFRSQDTGFFPQESGFSRFDSISSSKGEDVSGFDTGNSSRNFGRFDSFDDTDPFGSSGPFKASGSRSPPKF

SEQ ID NO: 198054 - protein, 526 aa, Zea Mays
MGGGDADAGGEPADAQATLHIRCTNGSKFTVRTDLGATVGAFKAIVAHSCDVPAPQQRLIYKGRILKDEQTLASYGVETDHTIHMVRGAVLSPTSTAPAANQEPTTAAPASSPATGLGGLLQSLGTTGAAANSEGLFGSAPPGLDQMQQQLAENPNLMREMMNMPLMQNLMNNPELIRSIIMNNPQMRELIDRNPDLAHVLNDPSIMRQTFEAVRNPELMREMMRNTDRAMSNIESSPEGFNMLRRMYETVQEPFLNATTMGSEGDRNSNPFSALLGNQGSNQARDSAANGTTRASDPTSGSPAPNTNPLPNPWGSNARSSPASNVRSTTASGLGGLGSADLGSTHGASGGGSDATLLTQVLQNPTMMQMMQNIMSNPQSMNQLLNMNPNVRNMMESNTQMREMIENPEFLRQLTSPETLQQLISFQQSLMSQLGQQQAGQERTQSGSGAGNVNLNTLMNMFSGLGAGGGLGVPNAPNAPPEELYATQLAQLQEMGFFDTQENIRALAATAGNVHAAVERLLGNMG

SEQ ID NO: 198055 - protein, 500 aa, Zea Mays
MGGGDADAGGEPADAQATLHIRCTNGSKFTVRTDLGATVGAFKAIVAHSCDVPAPQQRLIYKGRILKDEQTLASYGVETDHTIHMVRGAVLSPTSTAPAANQEPTTAAPASSPATGLGGLLQSLGTTGAAANSEGLFGSAPPGLDQMQQQLAENPNLMREMMNMPLMQNLMNNPELIRSIIMNNPQMRELIDRNPDLAHVLNDPSIMRQTFEAVRNPELMREMMRNTDRAMSNIESSPEGFNMLRRMYETVQEPFLNATTMGSEGDRNSNPFSALLGNQGSNQARDSAANGTTRASDPTSGSPAPNTNPLPNPWGSNAGSAQGAARSSPASNVRSTTASGLGGLGSADLGSTHGASGGGSDATLLTQVLQNPTMMQMMQNIMSNPQSMNQLLNMNPNVRNMMESNTQMREMIENPEFLRQLTSPETLQQLISFQQSLMSQLGQQQAGQERTQSGSGAGNVNLNTLMNMFSGLGAGGGLGVPNAPNDVFLKFSHQQSNVKI

SEQ ID NO: 198056 - protein, 289 aa, Zea Mays
MMLAADVHLGTKNCDFQMERYAFKRRTDGIYIINLGKTWEKLQLAARVIVAIENPQDIIVQSARPYGQRAVLKFAQYTGAHAIAGRHTPGTFTNQLQTSFSEPRLLILTDPRTDHQPIKESALGNIPTIAFCDTDSPMRYVDIGIPANNKGRNSIGCLFWLLARMVLQMRGTILPGHKWEVMVDLFFYRDPEEAKEQEEEAAVAPEFAAITDYQGADQWGGDQWTSDVTAPPVAPTGADWGAAPAPVPTGDGWDQAGAPAPVVDGTVPPLVAPTGWDQAAPPPTAQGWE

SEQ ID NO: 198057 - protein, 437 aa, Zea Mays
MTMLLELLVAVTEGQQCMDYVKTPVFFPSLQKLCLAVDFITDHLIGSISVALPSLTHLDLQDAPIVEPNSSSDLTNAGLQQINPHGKLKHISLMRSQEFLVTSFRRVNDLGILLMADRCSNLESVCLGGFSRVTDTGFRAIIHSCSGLHKLRVSHGSHLTDLVFHDIIATSLCLTHVSLRWCKLLTNVGIERLSCNKDLNVLDLRDCRSLGDEAVRALSCLPKLQTLTLDATDISDQSLKYLGLGTCPLTSLSLRGCRKLTNDCITLLFAGHVKQSLQMLDLSRIPSITDDGIMLLARSRTPLIELRMRENPKIGDASVMALASMQIDGGTYGSTLQLLDLFDCGGITPLAARWFKKPYFPRLRWLGITGSLNRVMVDALSRSRPFLHMACRGEELGTMLWDTSSDWYRHNDDDLDELEQWLLEGEPVSDDDTIMEE

SEQ ID NO: 198058 - protein, 603 aa, Zea Mays
MPPPLPPDPIEPCAPAPAMDVALPAAVVATILSRLDVRSLLLAAAACRGLRACASHALVFLPSFHLLEVALTHELLRPLLPPNPSLRSLRLDCARLEDAAIACLARAGLHELLLLNCDNISGRLLCELGTTCRDLRVLSLNSLGARRGLVVNFSDLQELLNGCSQLENLRLALDFSTFDDPNFGRVWASASERLSSLEIGYIPMTMLLELLVAVTEGQQCMDYVKTPVFFPSLQKLCLAVDFITDHLIGSISVALPSLTHLDLQDAPIVEPNSSSDLTNAGLQQINPHGKLKHISLMRSQEFLVTSFRRVNDLGILLMADRCSNLESVCLGGFSRVTDTGFRAIIHSCSGLHKLRVSHGSHLTDLVFHDIIATSLCLTHVSLRWCKLLTNVGIERLSCNKDLNVLDLRDCRSLGDEAVRALSCLPKLQTLTLDATDISDQSLKYLGLGTCPLTSLSLRGCRKLTNDCITLLFAGHVKQSLQMLDLSRIPSITDDGIMLLARSRTPLIELRMRENPKIGDASVMALASMQIDGGTYGSLNRVMVDALSRSRPFLHMACRGEELGTMLWDTSSDWYRHNDDDLDELEQWLLEGEPVSDDDTIMEE

SEQ ID NO: 198059 - protein, 221 aa, Zea Mays
MKSDWLSCLDSDVGFKGFAVPKESQGKVAEFLFHGTPAKIKHGDVVIAAITSCTNTSNPNVMLGAALVAKKACELGLEVKPWIKTSLAPGSGVVKQYLDKSGLQKYLDQLGFNIVGYGCTTCIGNSGELDESVSAAITENDIVSAAVLSGNRNFEGRVHPLTRANYLASPPLVVAYALAGTVNIDFEKEPIGISKDGKEVYFRDVWPSTEEIAETAQLQHI

SEQ ID NO: 198060 - protein, 689 aa, Zea Mays
MAYFLVDLLHCFSNIHTYTSIVLCFFMQPMSMVLPGVVGFKLSGKLRNGVTATDLVLTVTQMLRKHGVVGKFVEFYGQGMSELSLADRATIANMSPEYGATMGFFPVDGKTLDYLKLTGRSDDTVAMVESYLRANKMFVDHSQAEAERVYSSYLELNLEEVEPCLSGPKRPHDRVTLKNMKSDWLSCLDSDVGFKGFAVPKESQGKVAEFLFHGTPAKIKHGDVVIAAITSCTNTSNPNVMLGAALVAKKACELGLEVKPWIKTSLAPGSGVVKQYLDKSGLQKYLDQLGFNIVGYGCTTCIGNSGELDESVSAAITENDIVSAAVLSGNRNFEGRVHPLTRANYLASPPLVVAYALAGTVNIDFEKEPIGISKDGKEVYFRDVWPSTEEIAEVVKSSVLPDMFKSTYESITQGNPMWNELPVSTSTLYPWDPSSTYIHEPPYFKDMTMTPPGPRPVKDAYCLLNFGDSITTDHISPAGNIHPDSAAATYLKERGVERKDFNSYGSRRGNDEIMARGTFANIRLVNKFLKGEVGPKTIHVPSGDKLSVFDAAMKYKNEGHDTIILAGAEYGSGSSRDWAAKGPMLQGVKAVIAKSFERIHRSNLAGMGIIPLCFKAGEDADTLGLTGHERYTVHLPTNVSEIKPGQDVTVTTDNGKSFTCTLRFDTEVELAYYDHGGILPYVIRKIAEQ

SEQ ID NO: 198061 - protein, 258 aa, Zea Mays
MATATTLSFSGGGGGTTLLRGHVALTSGRCCTFPSSRWRPPRLSASRADDSSPAPFEMTVEDALKLLGVAEGASFDEILRAKNAVLASCKDDQDAVAQVEAAYDMLLMQSLSQRRAGKVANNRIRFADVKPVKSAGAGTVPQWMQATMKNAPITFETPSSSSLGIQSCVYGALMVFTYASGSSTSLPSAYSSPDVPGFILATGFGASLYFLAKKNMNLGKLIDPPPLSYSYVIQCFMLVHLAICFATYMPLFLNLNNS

SEQ ID NO: 198062 - protein, 241 aa, Zea Mays
MEKSRGKYAEVDKQRSSGSGGYIGGLHQRYESRLGGYSPRKKKTSLQAEQATTKTPSKVIQSPEKKSATWDQPPVKANQSNFPTTFLPTVGQMAPTPFSFSVIKDPSTTAVTMLAGNSLTADSVQLTQATRPLRRLHIENLPDSATEDKLIDCLNDFLLSTGSKLQRSKPCLSCTINREKRQAFVEFLTPEDATAAISFDGRSLNGSVLRIRRPKEYVETVGILIGCVIIHVQQHREAKEL

SEQ ID NO: 198063 - protein, 634 aa, Zea Mays
MEKSRGKYAEVDKQRSSGSGGYIGGLHQRYESRLGGYSPRKKKTSLQAEQATTKTPSKVIQSPEKKSATWDQPPVKANQSNFPTTFLPTVGQMAPTPFSFSVIKDPSTTAVTMLAGNSLTADSVQLTQATRPLRRLHIENLPDSATEDKLIDCLNDFLLSTGSKLQRSKPCLSCTINREKRQAFVEFLTPEDATAAISFDGRSLNGSVLRIRRPKEYVETNVTPKKAEETALISDVVADSPYKIFIAGIAGVISSKMLMEIVSAFGPLAAYRFLFNNELGGPCAFLEYADRSVTSKACAGLNGMMLGGRVLTAVHVFPNPHVEAANEASPFYGIPDNAKLLLKEPTKVLQLKNVFEREEYMLLSKSELEETLEDVRVECTRFGAVKSVNVVEYPAAGVSAAEENIVELKIECTEFSDTENIAKAVSEYSVPIIPSIDVLNHSVASDTKDVDLIPESQDQKDKHLPSNAALCESEAPVADEDAELDETQSRAALPTPQHAEADHTEAAVDENKHTGAGKVTATATDDDAVEKSHGDPRTSETCNPAGPTDKAEKPGRYSEQGAGDVTEDRPEKEAQAVGTSDTGFVFEPGSVLVEFLREEAACMAAHSLHGRRFGNRTVHAGYAPYDLYLQKYPR

SEQ ID NO: 198064 - protein, 347 aa, Zea Mays
MLMEIVSAFGPLAAYRFLFNNELGGPCAFLEYADRSVTSKACAGLNGMMLGGRVLTAVHVFPNPHVEFEREEYMLLSKSELEETLEDVRVECTRFGAVKSVNVVEYPAAGVSAAEENIVELKIECTEFSDTENIAKAVSEYSVPIIPSIDVLNHSVASDTKDVDLIPESQDQKDKHLPSNAALCESEAPVADEDAELDETQSRAALPTPQHAEADHTEAAVDENKHTGAGKVTATATDDDAVEKSHGDPRTSETCNPAGPTDKAEKPGRYSEQGAGDVTEDRPEKEAQAVGTSDTGFVFEPGSVLVEFLREEAACMAAHSLHGRRFGNRTVHAGYAPYDLYLQKYPR

SEQ ID NO: 198065 - protein, 255 aa, Zea Mays
MEKSRGKYAEVDKQRSSGSGGYIGGLHQRYESRLGGYSPRKKKTSLQAEQATTKTPSKVIQSPEKKSATWDQPPVKANQSNFPTTFLPTVGQMAPTPFSFSVIKDPSTTAVTMLAGNSLTADSVQLTQATRPLRRLHIENLPDSATEDKLIDCLNDFLLSTGSKLQRSKPCLSCTINREKRQAFVEFLTPEDATAAISFDGRSLNGSVLRIRRPKEYVETVNVTPKKAEETALISDVVADSPYKFLGCSVRTQLE

SEQ ID NO: 198066 - protein, 228 aa, Zea Mays
MEKSRGKYAEVDKQRSSGSGGYIGGLHQRYESRLGGYSPRKKKTSLQAEQATTKTPSKVIQSPEKKSATWDQPPVKANQSNFPTTFLPTVGQMAPTPFSFSVIKDPSTTAVTMLAGNSLTADSVQLTQATRPLRRLHIENLPDSATEDKLIDCLNDFLLSTGSKLQRSKPCLSCTINREKRQAFVEFLTPEDATAAISFDGRSLNGSVLRIRRPKEYVETVFEVCVFA

SEQ ID NO: 198067 - protein, 398 aa, Zea Mays
MMMLFEEDAAAMAIPDALCIEEISSPIAAHILDFYYGDGLGDDLFAAVTATSGPFPATDDDVSSSTATTPPICGYSEDTAAAGGATAYTPLTSFDTTLTALLEEEQHHGLDAGFLPQIDGLSEVAAYYPTATDEASIGQFDQMGLPETLDEQVPPPVQMSSSASALMPLATDYDECFMAAVAAGGFMGLDGAMYQQTGAVLPGCSADASQQEFFSSAGSNSMVMIGEYQKMMEGEGLTTTYDDTDSMQGTFNTNAEMQVGGNNQHLINGCNGNPATLPPTELSVLEDSTFKVVRLSPEERKEKIHRYIKKRNERNFRKKIKYACRKTLADSRPRVRGRFAKNDELCEAAQSGSQSHEHYEQTDHMKEEDMLDTSDILAQLNGLNPYNYKYKSTIESWI

SEQ ID NO: 198068 - protein, 739 aa, Zea Mays
MEATLAFSQDSPPISIICAAKFVGLPLTIDPSLASGLAPTLRFASGESLHGVNPILLYIASGATIPCFSGKNDIEFGHVVEWLEYVPIFLSGSEFENACLFVDGFLASRTFLVGHGLTIADIVVWSNLAGIGQRWESLRKSKKYQNLVRWFNSIDSEYSDTLNEVLAAYVGKRGIGKSPAPSLKEKVHVSKDPSAPEVDLPGAKVGKVCVRFAPEPSGYLHIGHAKAGLLNKYFAERYQGRLIVRFDDTNPSKESNEFVENVLKDIETLGIKYDAVTYTSDYFPKLMEMAGSLIKQGKAYIDDTPKEQMRKERMDGIESRCRNSTVEENLSLWNEMVNGTERGMQCCVRGKLDMQDPNKSLRDPVYYRCNIDPHHRVGSKYKVYPTYDFACPFVDALEGVTHALRSSEYHDRNAQYYRILQDMGLRRVEIYEFSRLNMVYTLLSKRKLLWFVQNKKVEDWTDPRFPTVQGIVRRGLKIEALIQFILQQGASKNLNLMEWDKLWTINKKIIDPLCARHTAVLKDQRVIFTLTNGPEKPFVRILPRHKKFVGAGKKATTFANRIWLDYADAAAISKGEEVTLMDWGNAIVKEIKVESGVITELVGELHLEGSVKTTKLKITWLADIEELVPLSLVEFDYLISKKKLEEDDDFLENLNPCTRRENPALGDANMMNLKRGEIIQLERKGYYRSWPRDLWKRSFFQFLQETWLDEFFCDGCVVCALWRLQRPKQISLSARNIVL

SEQ ID NO: 198069 - protein, 415 aa, Zea Mays
MEMAGSLIKQGKAYIDDTPKEQMRKERMDGIESRCRNSTVEENLSLWNEMVNGTERGMQCCVRGKLDMQDPNKSLRDPVYYRCNIDPHHRVGSKYKVYPTYDFACPFVDALEGVTHALRSSEYHDRNAQYYRILQDMGLRRVEIYEFSRLNMVYTLLSKRKLLWFVQNKKVEDWTDPRFPTVQGIVRRGLKIEALIQFILQQGASKNLNLMEWDKLWTINKKIIDPLCARHTAVLKDQRVIFTLTNGPEKPFVRILPRHKKFVGAGKKATTFANRIWLDYADAAAISKGEEVTLMDWGNAIVKEIKVESGVITELVGELHLEGSVKTTKLKITWLADIEELVPLSLVEFDYLISKKKLEEDDDFLENLNPCTRRENPALGDANMMNLKRGEIIQLERKGYYRSWPRDLWKRYYKE

SEQ ID NO: 198070 - protein, 668 aa, Zea Mays
MEATLAFSQDSPPISIICAAKFVGLPLTIDPSLASGLAPTLRFASGESLHGVNPILLYIASGATIPCFSGKNDIEFGHVVEWLEYVPIFLSGSEFENACLFVDGFLASRTFLVGHGLTIADIVVWSNLAGIGQRWESLRKSKKYQNLVRWFNSIDSEYSDTLNEVLAAYVGKRGIGKSPAPSLKEKVHVSKDPSAPEVDLPGAKVGKVCVRFAPEPSGYLHIGHAKAGLLNKYFAERYQGRLIVRFDDTNPSKESNEFVENVLKDIETLGIKYDAVTYTSDYFPKLMEMAGSLIKQGKAYIDDTPKEQMRKERMDGIESRCRNSTVEENLSLWNEMVNGTERGMQCCVRGKLDMQDPNKSLRDPVYYRCNIDPHHRVGSKYKVYPTYDFACPFVDALEGVTHALRSSEYHDRNAQYYRILQDMGLRRVEIYEFSRLNMVYTLLSKRKLLWFVQNKKVEDWTDPRFPTVQGIVRRGLKIEALIQFILQQGASKNLNLMEWDKLWTINKKIIDPLCARHTAVLKDQRVIFTLTNGPEKPFVRILPRHKKFVGAGKKATTFANRIWLDYADAAAISKGEEVTLMDWGNAIVKEIKVESGVITELVGELHLEGSVKTTKLKITWLADIEELVPLSLVEFDYLISKKKRKMMTSSRISTLALDEKTQPLEMQT

SEQ ID NO: 198071 - protein, 429 aa, Zea Mays
MEMAGSLIKQGKAYIDDTPKEQMRKERMDGIESRCRNSTVEENLSLWNEMVNGTERGMQCCVRGKLDMQDPNKSLRDPVYYRCNIDPHHRVGSKYKVYPTYDFACPFVDALEGVTHALRSSEYHDRNAQYYRILQDMGLRRVEIYEFSRLNMVYTLLSKRKLLWFVQNKKVEDWTDPRFPTVQGIVRRGLKIEALIQFILQQGASKNLNLMEWDKLWTINKKIIDPLCARHTAVLKDQRVIFTLTNGPEKPFVRILPRHKKFVGAGKKATTFANRIWLDYADAAAISKGEEVTLMDWGNAIVKEIKVESGVITELVGELHLEGSVKTTKLKITWLADIEELVPLSLVEFDYLISKKKLEEDDDFLENLNPCTRRENPALGDANMMNLKRGEIIQLERKGYYRCDAPFIRSLKPVVLFAIPDGRQQALLN

SEQ ID NO: 198072 - protein, 396 aa, Zea Mays
MGTEAEQPDMDSHRNDGVVVVPAPRPRKGLASWALDLLESLAVRLGHDKTKPLHWLSGNFAPVVEETPPAPNLSVRGHLPECLNGEFVRVGPNPKFAPVAGYHWFDGDGMIHAMRIKDGKATYVSRYVKTARLKQEEYFGGAKFMKIGDLKGFFGLFMVQMQQLRKKFKVLDFTYGFGTANTALIYHHGKLMALSEADKPYVVKVLEDGDLQTLGLLDYDKRLKHSFTAHPKVDPFTDEMFTFGYSHEPPYCTYRVINKEGAMLDPVPITIPESVMMHDFAITENYSIFMDLPLLFRPKEMVKNGEFIYKFDPTKKGRFGILPRYAKDDKLIRWFQLPNCFIFHNANAWEEGDEVVLITCRLENPDLDKVRDEIQHENGCCFTKAIVCFCCGFSSC

SEQ ID NO: 198073 - protein, 441 aa, Zea Mays
MIHAMRIKDGKATYVSRYVKTARLKQEEYFGGAKFMKIGDLKGFFGLFMVQMQQLRKKFKVLDFTYGFGTANTALIYHHGKLMALSEADKPYVVKVLEDGDLQTLGLLDYDKRLKHSFTAHPKVDPFTDEMFTFGYSHEPPYCTYRVINKEGAMLDPVPITIPESVMMHDFAITENYSIFMDLPLLFRPKEMVKNGEFIYKFDPTKKGRFGILPRYAKDDKLIRWFQLPNCFIFHNANAWEEGDEVVLITCRLENPDLDKVNGYQSDKLENFGNELYEMRFNMKTGAASQKQLSVSAVDFPRVNESYTGRKQRYVYCTILDSIAKVTGIIKFDLHAEPESGVKELEVGGNVQGIYDLGPGRFGSEAIFVPKHPGVSGEEDDGYLIFFVHDENTGKSEVNVIDAKTMSADPVAVVELPNRVPYGFHAFFVTEDQLARQAEGQ

SEQ ID NO: 198074 - protein, 133 aa, Zea Mays
MSRKIRSKACSLPRLPHYKELVSNLGPLHARLSCENSLAKRHPIYKCNEVQADVAWKFLNIMRTYLESLCSDLRFHTITNVQSNNDRVSLLLKDSFIDSFPSNDRPFIKLFVETQMFSVLSDSRLSSFENERT

SEQ ID NO: 198075 - protein, 450 aa, Zea Mays
MSDLNEVIFGQEHLSRDDLSFIFSLKVSDNAPLYGVCLHVQEIVQKAPGILGAVSPLNPTSYKPSRFLVSAPRCYCLLTKVPFFELHYEMLNSIIAQERLDRITQFASEITLAEPVPRPIKEQDGVDGDFDSSNGIPYIDWTEYAVPVNSISGLISSSSIPSERDMSSYLFRSWEPNSSQSISGSEISDSSYVREVEEARHSFQHYEDCIVENLEPRCDSFGRASYMYDNGHTSPDLLSMHSPASSRLERAQSVESLESSVKGATSDEEYEVNVKHEVIVDDEKVVGWAKAHNNEPLQIVCGYHALHLPPRGGELVFRPLEHLQPVKYSRPGLPLLGFGEEILDNALTRAEKNKINLHLVAAEEALALSIWTMATVCRSLSLESVLGLFTGVLLEKQIVVICPNLGVLSAILLSIIPMIRPFQWQSLLLPILPRKLIDFLDAPVPFIFIL

SEQ ID NO: 198076 - protein, 473 aa, Zea Mays
MSDLNEVIFGQEHLSRDDLSFIFSLKVSDNAPLYGVCLHVQEIVQKAPGILGAVSPLNPTSYKPSRFLVSAPRCYCLLTKVPFFELHYEMLNSIIAQERLDRITQFASEITLAEPVPRPIKEQDGVDGDFDSSNGIPYIDWTEYAVPVNSISGLISSSSIPSERDMSSYLFRSWEPNSSQSISGSEISDSSYVREVEEARHSFQHYEDCIVENLEPRCDSFGRASYMYDNGHTSPDLLSMHSPASSRLERAQSVESLESSVKGATSDEEYEVNVKHEVIVDDEKVVGWAKAHNNEPLQIVCGYHALHLPPRGGELVFRPLEHLQPVKYSRPGLPLLGFGEEILDNALTRAEKNKINLHLVAAEEALALSIWTMATVCRSLSLESVLGLFTGVLLEKQIVVICPNLGVLSAILLSIIPMIRPFQWQSLLLPAGVQHKPPDIKMKGSSLVRVNVQKDQVQGMFTASTSTLQGARF

SEQ ID NO: 198077 - protein, 476 aa, Zea Mays
MSDLNEVIFGQEHLSRDDLSFIFSLKVSDNAPLYGVCLHVQEIVQKAPGILGAVSPLNPTSYKPSRFLVSAPRCYCLLTKVPFFELHYEMLNSIIAQERLDRITQFASEITLAEPVPRPIKEQDGVDGDFDSSNGIPYIDWTEYAVPVNSISGLISSSSIPSERDMSSYLFRSWEPNSSQSISGSEISDSSYVREVEEARHSFQHYEDCIVENLEPRCDSFGRASYMYDNGHTSPDLLSMHSPASSRLERAQSVESLESSVKGATSDEEYEVNVKHEVIVDDEKVVGWAKAHNNEPLQIVCGYHALHLPPRGGELVFRPLEHLQPVKYSRPGLPLLGFGEEILDNALTRAEKNKINLHLVAAEEALALSIWTMATVCRSLSLESVLGLFTGVLLEKQIVVICPNLGVLSAILLSIIPMIRPFQWQSLLLPILPRKLIDFLDAPVPFIAGVQHKPPDIKMKGSSLVRVNVQKDQTIV

SEQ ID NO: 198078 - protein, 393 aa, Zea Mays
MICLLSSPSSIIAQERLDRITQFASEITLAEPVPRPIKEQDGVDGDFDSSNGIPYIDWTEYAVPVNSISGLISSSSIPSERDMSSYLFRSWEPNSSQSISGSEISDSSYVREVEEARHSFQHYEDCIVENLEPRCDSFGRASYMYDNGHTSPDLLSMHSPASSRLERAQSVESLESSVKGATSDEEYEVNVKHEVIVDDEKVVGWAKAHNNEPLQIVCGYHALHLPPRGGELVFRPLEHLQPVKYSRPGLPLLGFGEEILDNALTRAEKNKINLHLVAAEEALALSIWTMATVCRSLSLESVLGLFTGVLLEKQIVVICPNLGVLSAILLSIIPMIRPFQWQSLLLPILPRKLIDFLDAPVPFIAGVQHKPPDIKMKGSSLVRVNVQKDQTIV

SEQ ID NO: 198079 - protein, 182 aa, Zea Mays
MWWCVYSMNSIIAQERLDRITQFASEITLAEPVPRPIKEQDGVDGDFDSSNGIPYIDWTEYAVPVNSISGLISSSSIPSERDMSSYLFRSWEPNSSQSISGSEISDSSYVREVEEARHSFQHYEDCIVENLEPRCDSFGRASYMYDNGHTSPDLLSMHSPASSRLERAQSVESLESQRCNIR

SEQ ID NO: 198080 - protein, 504 aa, Zea Mays
MSDLNEVIFGQEHLSRDDLSFIFSLKVSDNAPLYGVCLHVQEIVQKAPGILGAVSPLNPTSYKPSRFLVSAPRCYCLLTKVPFFELHYEMLNSIIAQERLDRITQFASEITLAEPVPRPIKEQDGVDGDFDSSNGIPYIDWTEYAVPVNSISGLISSSSIPSERDMSSYLFRSWEPNSSQSISGSEISDSSYVREVEEARHSFQHYEDCIVENLEPRCDSFGRASYMYDNGHTSPDLLSMHSPASSRLERAQSVESLESSVKGATSDEEYEVNVKHEVIVDDEKVVGWAKAHNNEPLQIVCGYHALHLPPRGGELVFRPLEHLQPVKYSRPGLPLLGFGEEILDNALTRAEKNKINLHLVAAEEALALSIWTMATVCRSLSLESVLGLFTGVLLEKQIVVICPNLGVLSAILLSIIPMIRPFQWQSLLLPILPRKLIDFLDAPVPFIAGVQHKPPDIKMKGSSLVRVNVQKDQASIHYMLFPHSEKTCWEGKGISKTFFFGKRA

SEQ ID NO: 198081 - protein, 294 aa, Zea Mays
MWWCVYSMNSIIAQERLDRITQFASEITLAEPVPRPIKEQDGVDGDFDSSNGIPYIDWTEYAVPVNSISGLISSSSIPSERDMSSYLFRSWEPNSSQSISGSEISDSSYVREVEEARHSFQHYEDCIVENLEPRCDSFGRASYMYDNGHTSPDLLSMHSPASSRLERAQSVESLESSVKGATSDEEYEVNVKHEVIVDDEKVVGWAKAHNNEPLQIVCGYHALHLPPRGGELVFRPLEHLQPVKYSRPGLPLLGFGEEILDNALTRAEKNKKKLLHCRYGLWLQFVVLCLWKVC

SEQ ID NO: 198082 - protein, 279 aa, Zea Mays
MEEEELTSGGGDAALLAPEPREQAAEEGRSPRDAEAFEDAVEEASAASTSPVACCNGDAAETSSPPAWKSQVDGPSAPEEAETYESPSASSSGCAAMEVESSLVSELREEPGRVDAGSAASPSGQRAGGTEEHENSMATPGAGSPSREETDSCMHSAPSSPPRSASSTSSPPRSASLTSSPPLPQIKQQSRHVRTGSFQRFREQMQRAWKWGPIGGGGGGERSPREQLLRTTVNIEAMANQKRHWYQVRSKSIIGNIGNRHRSLNIFSWLVSTLMQMSE

SEQ ID NO: 198083 - protein, 295 aa, Zea Mays
MEEEELTSGGGDAALLAPEPREQAAEEGRSPRDAEAFEDAVEEASAASTSPVACCNGDAAETSSPPAWKSQVDGPSAPEEAETYESPSASSSGCAAMEVESSLVSELREEPGRVDAGSAASPSGQRAGGTEEHENSMATPGAGSPSREETDSCMHSAPSSPPRSASSTSSPPRSASLTSSPPLPQIKQQSRHVRTGSFQRFREQMQRAWKWGPIGGGGGGERSPREQLLRTTVNIEAMANQKRHWYQVRSKSQDNWQYREPTSLFEHFFVVGLHSYADVGVVEDAFAKKKAWNLM

SEQ ID NO: 198084 - protein, 528 aa, Zea Mays
MRIRRYAARLLSATTAAPSSPPRPPAASWLHTDDDDDCCAFCELSRPAPQEGQDAVKHKGHIAGRVPESDVRADERVGLHQRPPAPEVKKCKIDHVPPVDKSSVGLQVVKCASEVSGAVAKPEGGTPASEAAAGPAAKAGAFVVNDAASEQGVQCIASPLGGASKLEEVTAGNSFANGPTTELGVFKGASLANELADVPGVTSIMPEVIGKPSTDPGAITTVVEVSDIGSVVHETTELESAGEDYIASEAAAEPEDAGRASCNTDDTAALDEPLPPSCDPNIGNAQVGNAMDTVASTVRPSRCDAAEEGASVNSTANGPVRARGPTVKGGVPKDKSVAPSVLRVLDVVTRSIGKSGRTDVICYARRTGKRKPELQEVKTENIDLEDGVLCEKEEALLRTDCCESVLSTAGSIDVKLADIKKDLMDNSAASKVTKMKRNIFECKIDYCHMTFKTKAELAAHKKNMCTVNSCSKHFRSHSYLRRHESAHNDDMPYKCPWDGCNMAFKWSWDRAEHFKVHAGAKPYKCMTP

SEQ ID NO: 198085 - protein, 59 aa, Zea Mays
MVARRPQAGVRRRIGPLVRSSRRCASSCRLRFYMYRIFRFHFAGRGPNEGVTSERRSCM

SEQ ID NO: 198086 - protein, 484 aa, Zea Mays
MASQGEPSSSDPKGKKDYSTAILERKKSPNRLVVDEATNDDNSVVALHPDTMERLQLFRGDTVLIKGKKRKDTVCIVLADETCEEPKVRMNKIVRKNLRVRLGDVVSVHQCPDVKYGKRVHILPIDDTIEGITGNLFDAFLKPYFLEAYRPLRKGDLFLVRGGMRSVEFKVIETDPAEYCIVAPDTEIFCEGEPIKREDEERLDEVGYDDVGGVRKQMAQIRELVELPLRHPQLFKSIGVKPPKGILLFGPPGSGKTLIARAVANETGAFFFLINGPEIMSKLAGESESNLRKAFEEAEKNAPSIIFIDEIDSIAPKREKTHGEVERRIVSQLLTLMDGLKSRAHVIVMGATNRPNSIDPALRRFGRFDREIDIGVPDEVGRLEVLRIHTKNMKLAEDVDLELIAKDTHGLLKSQMSLGKILVVWKMLRGSYRRLFNIQWSIQINLKSLACLLRRVFCFMALLAVARLCWPRQSLMNARLTSSV

SEQ ID NO: 198087 - protein, 60 aa, Zea Mays
MVLVGNKADLHDNRSVSSQDAQDYAEKNNMFFIETSAKTADNINQLFEEIAKRLPRPTAS

SEQ ID NO: 198088 - protein, 170 aa, Zea Mays
MPNAAARVCVCGGGGGGGGGRRDEDGGWPHWKESESEETFLHEHTTDSAAASRQRPPLPLQPEPGGALLQPTHDARVLNAPNDLDSLFPEPQQQQRVARASQRDSEPEPEPQPQTNDEKGQTAADLPEVGGRAKGPIPPPRRLPRSCHGAVAPSTPADSVHYGLLLLRAS

SEQ ID NO: 198089 - protein, 175 aa, Zea Mays
MDVPDMLSYLKEKLNRDVEAVAPAKKDGDGKDEDKKDGGGGSGGGEDKNKGAGAAGGDDKKDKGKGADDVPVAPSTAAAAALMAAPAGASTYRVAPPYPYGYVAAYQQQPPPPASYYPYPSYYGNGDGVGLANPAHHYPQPQLAYPPYPYRFDVAPPPPPPQLFSDENPNACSVM

SEQ ID NO: 198090 - protein, 165 aa, Zea Mays
MADSAALSTSLPRSLASRRPLSSPLHARARARSQRRCRLGSRSLHRLRARAGKDDPEDLYGPYPWDQPLDLTAGSDIQWVPEDRVTLFTSDGLIQIGGSLVPRRVSASEKRQRKLKSGQKLRRFQESSYMDPNQSLCLGALFNIAATNTWAEDYASLAFAVLLKC

SEQ ID NO: 198091 - protein, 318 aa, Zea Mays
MSVPMAIALSGQLLLGQQVMVKPSEAEKNLVQSNASSGAASGGARKLYVGNLHSNINEDQLRQVFEPFGQVELVQLPLDPLSGLCKGFGFVQFARLEDAKAAQSLNGQLEIAGRVIKVSAVTDQAGMQVSGATGDLDDEEAGGLALNASSRALLMQKLDRSGITTSLTGGTGIAGLTTPVAIPTVSVLGAAPAAAPLLHPTVPGLAIPGATLPITTPSIDLAPPSQCLLLKNMFDPALETDPDFDLDIRDDVQEECSKFGQLKHIFVDKSTAGFVYLRFDSITAAMSAQKALHGRWFAGKMITATFMTPQQYEMKFPS

SEQ ID NO: 198092 - protein, 245 aa, Zea Mays
MSVPMAIALSGQLLLGQQVMVKPSEAEKNLVQSNASSGAASGGARKLYVGNLHSNINEDQLRQVFEPFGQVELVQLPLDPLSGLCKGFGFVQFARLEDAKAAQSLNGQLEIAGRVIKVSAVTDQAGMQVSGATGDLDDEEAGGLALNASSRALLMQKLDRSGITTRIQPPLQQHCFHIYLAYQVLVFSASCIDCKFQDGELMMFESGHKRGILLQCPYHFDADFNDWLHKKLELNFVIVDVPFYV

SEQ ID NO: 198093 - protein, 365 aa, Zea Mays
MDFDEYEYLEKTVEAFAAPANGSSPPGSGYKDKERSSRRRSTGGDEERDNVERRSKRSRPEEGRDRDRERHRYRDGDRHRSSRERRDRDRDVKEKEQGRENDKDRRSRDREREKEEREKDRQRRSRSRSERRRDDEERDRYRERDVRRRKEEVAEPEVDPERDQRTVFAYQLSLKADERDVYEFFSRAGKVRDVRLIMDRNSRRSKGVGYIEFYDAMSVPMAIALSGGARKLYVGNLHSNINEDQLRQVFEPFGQVELVQLPLDPLSGLCKGFGFVQFARLEDAKAAQSLNGQLEIAGRVIKVSAVTDQAGMQVSGATGDLDDEEAGGLALNASSRALLMQKLDRSGITTRYLFGVDCIIIILTF

SEQ ID NO: 198094 - protein, 250 aa, Zea Mays
MDFDEYEYLEKTVEAFAAPANGSSPPGSGYKDKERSSRRRSTGGDEERDNVERRSKRSRPEEGRDRDRERHRYRDGDRHRSSRERRDRDRDVKEKEQGRENDKDRRSRDREREKEEREKDRQRRSRSRSERRRDDEERDRYRERDVRRRKEEVAEPEVDPERDQRTVFAYQLSLKADERDVYEFFSRAGKVRDVRLIMDRNSRRSKGVGYIEFYDAMSVPMAIALSVKCFKWSCFRWSKEVVCWKSSLKH

SEQ ID NO: 198095 - protein, 320 aa, Zea Mays
MAAVATPPAPAPAAPAPAPAPAAAPAPVTVAPAADQTTDLLQKLSLDSQPKAAGATEPAAAAAKEGAVTSQPLSVAIPPERSITPVLQDFMDPNLFYLPAYYYGGYDSSMSEWDDYPRYLNSDGVEIAPAVYGDIYGYGYAPYGAYSPATSPVPTVDGQMFGAQHYQYPTTYFQPPTPIPSTTQSNLQSSNNPEKPAAKADPAKATANGVPNGTGHTHSYSGTVPSQQSSALTPDGTYRAPLLGGVPSAGYLDTTYYGYDSTGAQFAWYDGSAYANGQQRTTTTNRFPSSSFSGNGSSAIYQNKSSTTQQMFKLGWGGKD

SEQ ID NO: 198096 - protein, 950 aa, Zea Mays
MDFQNGDTFQDYSSEDTPVLVSAPFPFEHGKPKSVLVGETSADTIQIENTSPEPVNLWSVRIFSSNPEDSYVLSMMRPPSNGASEEEKQAFLALTSVEDRTLRPGQTLTVWLSCTPKDIGLHTSIVHVDIGNEKIERVAFLLADDNVSKSLFSDKPYSRRRVQVKKFEPSPFVPGCRPTQQHVQGYKHKLPQYAIPAHIRELIESKQTPDVLYDELSMINYAEYFSTLIVMEELNLEEEMRAYDMEGVLMRRRGMHFLSLEVPGLAERRPSLVQGDFIFARYAGNDSQPYQGFIHKVEADEIFLKFDHQFHMNHRERNQYHVSFTYNRVNMRRLYKSIDDAKYLGPGILFPHKSPYRVLKRLPFKPLDPYINTEQADAVASILACRGVPPYVIYGPPGTGKTMTIVEAVLQLYTGKKRANILICAASNTAADHVLEKLLQGSHPIRPRDIFRLNAPSRQYEDVNTDFIKFCFFQDLVFKCPPLQALVQYKIIISTYTSSYLLQAEGIRQGHFTHIFLDEAGQASEPEAMVPLSGLCGRDTVVVLAGDPKQLGPVVYCREAERCGLGTSYLERLLTGFEQYQTGNANYVTKLVRNYRCHPAILELPSELFYEGELIACKEGESSAYDCIGLPNKSFPVLFVGIQGCDEREGNNPSWFNRIEVSKVVSIIRNLTRGEDVHESDIGVITPYRQQVAKIKKALEAFEMPSFKVGSVEQFQGQEREVIIISTVRSTVKHNEFDKFFNLGFLSNHRRFNVAITRAKSLLVIIGNPYIITKDRHWDRLLRYCADNGSYQGCPLPPPESPYSDDARFFSKYDEDQGGPSGQDYSQEPAYCNYNQEPAYCNYDDQEPSDFGSGHDTGVAQPEPASENQESWSEELPEDESQPFSNPQADVEETPKQDGEEGAAAAQGDAQADQSLTNDDSQLQDAGAGKYTFPPGWCDVSSIPATGWGD

SEQ ID NO: 198097 - protein, 803 aa, Zea Mays
MGHRRNYSDDEFSVASEKPEVEFMDFQNGDTFQDYSSEDTPVLVSAPFPFEHGKPKSVLVGETSADTIQIENTSPEPVNLWSVRIFSSNPEDSYVLSMMRPPSNGASEEEKQAFLALTSVEDRTLRPGQTLTVWLSCTPKDIGLHTSIVHVDIGNEKIERVAFLLADDNVSKSLFSDKPYSRRRVQVKKFEPSPFVPGCRPTQQHVQGYKHKLPQYAIPAHIRELIESKQTPDVLYDELSMINYAEYFSTLIVMEELNLEEEMRAYDMEGVLMRRRGMHFLSLEVPGLAERRPSLVQGDFIFARYAGNDSQPYQGFIHKVEADEIFLKFDHQFHMNHRERNQYHVSFTYNRVNMRRLYKSIDDAKYLGPGILFPHKSPYRVLKRLPFKPLDPYINTEQADAVASILACRGVPPYVIYGPPGTGKTMTIVEAVLQLYTGKKRANILICAASNTAADHVLEKLLQGSHPIRPRDIFRLNAPSRQYEDVNTDFIKFCFFQDLVFKCPPLQALVQYKIIISTYTSSYLLQAEGIRQGHFTHIFLDEAGQASEPEAMVPLSGLCGRDTVVVLAGDPKQLGPVVYCREAERCGLGTSYLERLLTGFEQYQTGNANYVTKLVRNYRCHPAILELPSELFYEGELIACKEGESSAYDCIGLPNKSFPVLFVGIQGCDEREGNNPSWFNRIEVSKVVSIIRNLTRGEDVHESDIGVITPYRQQVAKIKKALEAFEMPSFKVGSVEQFQGQEREVIIISTVRSTVKHNEFDKFFNLGFLSNHRRFNVAITRAKSLLVIIGNPYIITKAPAVLR

SEQ ID NO: 198098 - protein, 362 aa, Zea Mays
MRDGSNTTKKSKLSWSKSLVRKWFNIRSKAHDFHADDVAAIGRTVAGGGDDEWRRGSSFTRREPSTVKKSKTERSSRRSNGHSRRGKIDLDAAEATVTLDYSRIFVATWNVGGRSPPNNMSLEDWLHAAPPADIYVLGFQEIVPLNAGNVLGTEDNVPAKRWVSLVRRTLNNLPGTSGNGSFRTPSPAPNPVVEIDDDFEGLSSKQNSASFFHRRSFQAGLSRSLRMEGDILAPQPRLERRYSVCDRAIYGRRPSDYENNYRWGGSSDDENNTGESPSTVYSPVSYGYGNASSLEDGQRRPGQTRYCLVASKQMVGLFLMIWARKDIRDDIRNLKVSCVGRGLMGYLGNKVSHSVSFFLSFF

SEQ ID NO: 198099 - protein, 361 aa, Zea Mays
MRDGSNTTKKSKLSWSKSLVRKWFNIRSKAHDFHADDVAAIGRTVAGGGDDEWRRGSSFTRREPSTVKKSKTERSSRRSNGHSRRGKIDLDAAEATVTLDYRIFVATWNVGGRSPPNNMSLEDWLHAAPPADIYVLGFQEIVPLNAGNVLGTEDNVPAKRWVSLVRRTLNNLPGTSGNGSFRTPSPAPNPVVEIDDDFEGLSSKQNSASFFHRRSFQAGLSRSLRMEGDILAPQPRLERRYSVCDRAIYGRRPSDYENNYRWGGSSDDENNTGESPSTVYSPVSYGYGNASSLEDGQRRPGQTRYCLVASKQMVGLFLMIWARKDIRDDIRNLKVSCVGRGLMGYLGNKVSHSVSFFLSFF

SEQ ID NO: 198100 - protein, 359 aa, Zea Mays
MRDGSNTTKKSKLSWSKSLVRKWFNIRSKAHDFHADDVAAIGRTGGGDDEWRRGSSFTRREPSTVKKSKTERSSRRSNGHSRRGKIDLDAAEATVTLDYRIFVATWNVGGRSPPNNMSLEDWLHAAPPADIYVLGFQEIVPLNAGNVLGTEDNVPAKRWVSLVRRTLNNLPGTSGNGSFRTPSPAPNPVVEIDDDFEGLSSKQNSASFFHRRSFQAGLSRSLRMEGDILAPQPRLERRYSVCDRAIYGRRPSDYENNYRWGGSSDDENNTGESPSTVYSPVSYGYGNASSLEDGQRRPGQTRYCLVASKQMVGLFLMIWARKDIRDDIRNLKVSCVGRGLMGYLGNKVSHSVSFFLSFF

SEQ ID NO: 198101 - protein, 473 aa, Zea Mays
MHAMVSTVMHFLLTNLTSPQCGLKLGVAGSRNLVGPSANDRLKILHLLLLDLYKRVVLLSITTCIMEEQILGALLGVPSSQQAMIMMLQLMNMVGVQTSQMQMWGDGASSMTWERYDEEVDSLAAAPLLTTTGLLEQLNVTRDSSDYLWYITSVDISSSENFLQGGGKPLSLSVQSAGHALHVFVNGQLQGSAYGTREDRRIKYNGNASLRAGTNKIALLSVACGLPNVGVHYETWNTGVGGPVVLHGLDEGSRDLTWQTWSYQVGLKGEQMNLNSIEGSSSVEWMQGSLIAQNQQPLAWYRAYFETPSGDEPLALDMGSMGKGQIWINGQSIGRYWTAYADGDCKECSYTGTFRAPKCQSGCGQPTQRWYHVPKSWLQPTRNLLVVFEELGGDSSKIALVKRSVSSVCADVSEDHPNIKNWQIESYGEREYHRAQSALKMCTWAVHFRNQIRKLWDTYGNLWRFPARRLPLS

SEQ ID NO: 198102 - protein, 644 aa, Zea Mays
MMKSENLFASQGGPIILSQASIIFSLDLIENEYGPEGREFGAAGQAYINWAAKMAVGLGTGVPWVMCKEEDAPDPVINACNGFYCDAFSPNKPYKPTMWTEAWSGWFTEFGGTIRQRPVEDLAFAVARFVQKGGSFINYYMYHGGTNFGRTAGGPFITTSYDYDAPIDEYGLVREPKHSHLKELHRAVKLCEQALVSVDPAITTLGTMQEARVFQSPSGCAAFLANYNSNSYAKVVFNNEQYSLPPWSISILPDCKNVVFNSATVGVQTSQMQMWGDGASSMTWERYDEEVDSLAAAPLLTTTGLLEQLNVTRDSSDYLWYITSVDISSSENFLQGGGKPLSLSVQSAGHALHVFVNGQLQGSAYGTREDRRIKYNGNASLRAGTNKIALLSVACGLPNVGVHYETWNTGVGGPVVLHGLDEGSRDLTWQTWSYQVGLKGEQMNLNSIEGSSSVEWMQGSLIAQNQQPLAWYRAYFETPSGDEPLALDMGSMGKGQIWINGQSIGRYWTAYADGDCKECSYTGTFRAPKCQSGCGQPTQRWYHVPKSWLQPTRNLLVVFEELGGDSSKIALVKRSVSSVCADVSEDHPNIKNWQIESYGEREYHRAQSALKMCTWAVHFRNQIRKLWDTYGNLWRFPARRLPLS

SEQ ID NO: 198103 - protein, 373 aa, Zea Mays
MQGFTEKIVGMMKSENLFASQGGPIILSQASIIFSLDLIENEYGPEGREFGAAGQAYINWAAKMAVGLGTGVPWVMCKEEDAPDPVINACNGFYCDAFSPNKPYKPTMWTEAWSGWFTEFGGTIRQRPVEDLAFAVARFVQKGGSFINYYMYHGGTNFGRTAGGPFITTSYDYDAPIDEYGLVREPKHSHLKELHRAVKLCEQALVSVDPAITTLGTMQEARVFQSPSGCAAFLANYNSNSYAKVVFNNEQYSLPPWSISILPDCKNVVFNSATVGVQTSQMQMWGDGASSMTWERYDEEVDSLAAAPLLTTTGLLEQLNVTRDSSDYLWYITRWRQASVSQCAVCWSCLACLCQWTTSRFCLWYQGRSKNQI

SEQ ID NO: 198104 - protein, 547 aa, Zea Mays
MWTEAWSGWFTEFGGTIRQRPVEDLAFAVARFVQKGGSFINYYMYHGGTNFGRTAGGPFITTSYDYDAPIDEYGLVREPKHSHLKELHRAVKLCEQALVSVDPAITTLGTMQEARVFQSPSGCAAFLANYNSNSYAKVVFNNEQYSLPPWSISILPDCKNVVFNSATVGVQTSQMQMWGDGASSMTWERYDEEVDSLAAAPLLTTTGLLEQLNVTRDSSDYLWYITSVDISSSENFLQGGGKPLSLSVQSAGHALHVFVNGQLQGSAYGTREDRRIKYNGNASLRAGTNKIALLSVACGLPNVGVHYETWNTGVGGPVVLHGLDEGSRDLTWQTWSYQVGLKGEQMNLNSIEGSSSVEWMQGSLIAQNQQPLAWYRAYFETPSGDEPLALDMGSMGKGQIWINGQSIGRYWTAYADGDCKECSYTGTFRAPKCQSGCGQPTQRWYHVPKSWLQPTRNLLVVFEELGGDSSKIALVKRSVSSVCADVSEDHPNIKNWQIESYGEREYHRAQSALKMCTWAVHFRNQIRKLWDTYGNLWRFPARRLPLS

SEQ ID NO: 198105 - protein, 748 aa, Zea Mays
MWEGLIQKAKDGGLDVIQTYVFWNGHEPTPGNYYFEERYDLVRFIKTVQKAGLFVHLRIGPYICGEWNFGGFPVWLKYVPGISFRTDNEPFKTAMQGFTEKIVGMMKSENLFASQGGPIILSQASIIFSLDLIENEYGPEGREFGAAGQAYINWAAKMAVGLGTGVPWVMCKEEDAPDPVINACNGFYCDAFSPNKPYKPTMWTEAWSGWFTEFGGTIRQRPVEDLAFAVARFVQKGGSFINYYMYHGGTNFGRTAGGPFITTSYDYDAPIDEYGLVREPKHSHLKELHRAVKLCEQALVSVDPAITTLGTMQEARVFQSPSGCAAFLANYNSNSYAKVVFNNEQYSLPPWSISILPDCKNVVFNSATVGVQTSQMQMWGDGASSMTWERYDEEVDSLAAAPLLTTTGLLEQLNVTRDSSDYLWYITSVDISSSENFLQGGGKPLSLSVQSAGHALHVFVNGQLQGSAYGTREDRRIKYNGNASLRAGTNKIALLSVACGLPNVGVHYETWNTGVGGPVVLHGLDEGSRDLTWQTWSYQVGLKGEQMNLNSIEGSSSVEWMQGSLIAQNQQPLAWYRAYFETPSGDEPLALDMGSMGKGQIWINGQSIGRYWTAYADGDCKECSYTGTFRAPKCQSGCGQPTQRWYHVPKSWLQPTRNLLVVFEELGGDSSKIALVKRSVSSVCADVSEDHPNIKNWQIESYGEREYHRAQSALKMCTWAVHFRNQIRKLWDTYGNLWRFPARRLPLS

SEQ ID NO: 198106 - protein, 724 aa, Zea Mays
MQCSQKQIVLAAPLSSTMWEGLIQKAKDGGLDVIQTYVFWNGHEPTPGNYYFEESGFPVWLKYVPGISFRTDNEPFKTAMQGFTEKIVGMMKSENLFASQGGPIILSQIENEYGPEGREFGAAGQAYINWAAKMAVGLGTGVPWVMCKEEDAPDPVINACNGFYCDAFSPNKPYKPTMWTEAWSGWFTEFGGTIRQRPVEDLAFAVARFVQKGGSFINYYMYHGGTNFGRTAGGPFITTSYDYDAPIDEYGLVREPKHSHLKELHRAVKLCEQALVSVDPAITTLGTMQEARVFQSPSGCAAFLANYNSNSYAKVVFNNEQYSLPPWSISILPDCKNVVFNSATVGVQTSQMQMWGDGASSMTWERYDEEVDSLAAAPLLTTTGLLEQLNVTRDSSDYLWYITSVDISSSENFLQGGGKPLSLSVQSAGHALHVFVNGQLQGSAYGTREDRRIKYNGNASLRAGTNKIALLSVACGLPNVGVHYETWNTGVGGPVVLHGLDEGSRDLTWQTWSYQVGLKGEQMNLNSIEGSSSVEWMQGSLIAQNQQPLAWYRAYFETPSGDEPLALDMGSMGKGQIWINGQSIGRYWTAYADGDCKECSYTGTFRAPKCQSGCGQPTQRWYHVPKSWLQPTRNLLVVFEELGGDSSKIALVKRSVSSVCADVSEDHPNIKNWQIESYGEREYHRAQSALKMCTWAVHFRNQIRKLWDTYGNLWRFPARRLPLS

SEQ ID NO: 198107 - protein, 830 aa, Zea Mays
MRRWWPAALLGCAVAVSVLVAAVECAVTYDKKAVLIDGQRRILFSGSIHYPRSTPDVTAFYKISSPPTIPWRGLWLRIYGSEMWEGLIQKAKDGGLDVIQTYVFWNGHEPTPGNYYFEERYDLVRFIKTVQKAGLFVHLRIGPYICGEWNFGGFPVWLKYVPGISFRTDNEPFKTAMQGFTEKIVGMMKSENLFASQGGPIILSQASIIFSLDLIENEYGPEGREFGAAGQAYINWAAKMAVGLGTGVPWVMCKEEDAPDPVINACNGFYCDAFSPNKPYKPTMWTEAWSGWFTEFGGTIRQRPVEDLAFAVARFVQKGGSFINYYMYHGGTNFGRTAGGPFITTSYDYDAPIDEYGLVREPKHSHLKELHRAVKLCEQALVSVDPAITTLGTMQEARVFQSPSGCAAFLANYNSNSYAKVVFNNEQYSLPPWSISILPDCKNVVFNSATVGVQTSQMQMWGDGASSMTWERYDEEVDSLAAAPLLTTTGLLEQLNVTRDSSDYLWYITSVDISSSENFLQGGGKPLSLSVQSAGHALHVFVNGQLQGSAYGTREDRRIKYNGNASLRAGTNKIALLSVACGLPNVGVHYETWNTGVGGPVVLHGLDEGSRDLTWQTWSYQVGLKGEQMNLNSIEGSSSVEWMQGSLIAQNQQPLAWYRAYFETPSGDEPLALDMGSMGKGQIWINGQSIGRYWTAYADGDCKECSYTGTFRAPKCQSGCGQPTQRWYHVPKSWLQPTRNLLVVFEELGGDSSKIALVKRSVSSVCADVSEDHPNIKNWQIESYGEREYHRAQSALKMCTWAVHFRNQIRKLWDTYGNLWRFPARRLPLS

SEQ ID NO: 198108 - protein, 800 aa, Zea Mays
MRRWWPAALLGCAVAVSVLVAAVECAVTYDKKAVLIDGQRRILFSGSIHYPRSTPDVTAFYKISSPPTIPWRGLWLRIYGSEMWEGLIQKAKDGGLDVIQTYVFWNGHEPTPGNDSDGIFFRFEQYYFEESGFPVWLKYVPGISFRTDNEPFKTAMQGFTEKIVGMMKSENLFASQGGPIILSQIENEYGPEGREFGAAGQAYINWAAKMAVGLGTGVPWVMCKEEDAPDPVINACNGFYCDAFSPNKPYKPTMWTEAWSGWFTEFGGTIRQRPVEDLAFAVARFVQKGGSFINYYMYHGGTNFGRTAGGPFITTSYDYDAPIDEYGLVREPKHSHLKELHRAVKLCEQALVSVDPAITTLGTMQEARVFQSPSGCAAFLANYNSNSYAKVVFNNEQYSLPPWSISILPDCKNVVFNSATVGVQTSQMQMWGDGASSMTWERYDEEVDSLAAAPLLTTTGLLEQLNVTRDSSDYLWYITSVDISSSENFLQGGGKPLSLSVQSAGHALHVFVNGQLQGSAYGTREDRRIKYNGNASLRAGTNKIALLSVACGLPNVGVHYETWNTGVGGPVVLHGLDEGSRDLTWQTWSYQVGLKGEQMNLNSIEGSSSVEWMQGSLIAQNQQPLAWYRAYFETPSGDEPLALDMGSMGKGQIWINGQSIGRYWTAYADGDCKECSYTGTFRAPKCQSGCGQPTQRWYHVPKSWLQPTRNLLVVFEELGGDSSKIALVKRSVSSVCADVSEDHPNIKNWQIESYGEREYHRAQSALKMCTWAVHFRNQIRKLWDTYGNLWRFPARRLPLS

SEQ ID NO: 198109 - protein, 489 aa, Zea Mays
MYRASASGQTTNLSRSMHAMVSTVMHFLLTNLTSPQCGLKLGVAGSRNLVGPSANDRLKILHLLLLDLYKRVVLLSITTCIMEEQILGALLGVPSSQQAMIMMLQLMNMVGVQTSQMQMWGDGASSMTWERYDEEVDSLAAAPLLTTTGLLEQLNVTRDSSDYLWYITSVDISSSENFLQGGGKPLSLSVQSAGHALHVFVNGQLQGSAYGTREDRRIKYNGNASLRAGTNKIALLSVACGLPNVGVHYETWNTGVGGPVVLHGLDEGSRDLTWQTWSYQVGLKGEQMNLNSIEGSSSVEWMQGSLIAQNQQPLAWYRAYFETPSGDEPLALDMGSMGKGQIWINGQSIGRYWTAYADGDCKECSYTGTFRAPKCQSGCGQPTQRWYHVPKSWLQPTRNLLVVFEELGGDSSKIALVKRSVSSVCADVSEDHPNIKNWQIESYGEREYHRAQSALKMCTWAVHFRNQIRKLWDTYGNLWRFPARRLPLS

SEQ ID NO: 198110 - protein, 795 aa, Zea Mays
MRRWWPAALLGCAVAVSVLVAAVECAVTYDKKAVLIDGQRRILFSGSIHYPRSTPDMWEGLIQKAKDGGLDVIQTYVFWNGHEPTPGNYYFEERYDLVRFIKTVQKAGLFVHLRIGPYICGEWNFGGFPVWLKYVPGISFRTDNEPFKTAMQGFTEKIVGMMKSENLFASQGGPIILSQIENEYGPEGREFGAAGQAYINWAAKMAVGLGTGVPWVMCKEEDAPDPVINACNGFYCDAFSPNKPYKPTMWTEAWSGWFTEFGGTIRQRPVEDLAFAVARFVQKGGSFINYYMYHGGTNFGRTAGGPFITTSYDYDAPIDEYGLVREPKHSHLKELHRAVKLCEQALVSVDPAITTLGTMQEARVFQSPSGCAAFLANYNSNSYAKVVFNNEQYSLPPWSISILPDCKNVVFNSATVGVQTSQMQMWGDGASSMTWERYDEEVDSLAAAPLLTTTGLLEQLNVTRDSSDYLWYITSVDISSSENFLQGGGKPLSLSVQSAGHALHVFVNGQLQGSAYGTREDRRIKYNGNASLRAGTNKIALLSVACGLPNVGVHYETWNTGVGGPVVLHGLDEGSRDLTWQTWSYQVGLKGEQMNLNSIEGSSSVEWMQGSLIAQNQQPLAWYRAYFETPSGDEPLALDMGSMGKGQIWINGQSIGRYWTAYADGDCKECSYTGTFRAPKCQSGCGQPTQRWYHVPKSWLQPTRNLLVVFEELGGDSSKIALVKRSVSSVCADVSEDHPNIKNWQIESYGEREYHRAQSALKMCTWAVHFRNQIRKLWDTYGNLWRFPARRLPLS

SEQ ID NO: 198111 - protein, 238 aa, Zea Mays
MNDASEVLGVIFECLHKSYTSRTVYHGVSHEKNSIGSWDCANISCITHNLFGMDVYERMNCHNCKMESRQLKYTSFFHNINASSLRTAKMMCPDSSFDELLKVVIMNDQLACDQDVGGCGTPNHIDHILSNSPHVFTVVLGWQNNKERVDDISATLAGISTEIDISIFYRGLDQGGKHTLGSVVCYYGQHYHCFAFKDGRWVMYDDQTVKVIGSWGDVLVMCEKGHLQPQVLFFEAAN

SEQ ID NO: 198112 - protein, 592 aa, Zea Mays
MKQSHEKSKDKKKFKDSRKSKELKDSSWSNQSLIHQDSTDEGTSETSQMLADCDDLCCKCSTSEDYFNEQEEELRHRVQLEAEERKLEEALEYQRWIEEEAKQKHLAEQCRSTHASSVIGIKFGDFSYTENENNFSQKLNGIEFDSSDAHALTSSDMSVSMLTLKMNGVCNNAQPIKPLGNFGTQNPKRSSSEPQRYSQGHSAGIEKPNFEKVGSGAIPSTDVCIEDDFDKRFQEDLDEAVRQSLGCDAYPAGTVSTSNGTEVYGTGLKNAAGEYNCFLNVIIQSLWHIRRFRDEFLKTSLLHKHVEDPCAVCALYGIFIDLSKASKGQREAVAPTSLRIALSKSYPNSKFFQEMNDASEVLGVIFECLHKSYTSRTVYHGVSHEKNSIGSWDCANISCITHNLFGMDVYERMNCHNCKMESRQLKYTSFFHNINASSLRTAKMMCPDSSFDELLKVVIMNDQLACDQDVGGCGTPNHIDHILSNSPHVFTVVLGWQNNKERVDDISATLAGISTEIDISIFYRGLDQGGKHTLGSVVCYYGQHYHCFAFKDGRWVMYDDQTVKVIGSWGDVLVMCEKGHLQPQVLFFEAAN

SEQ ID NO: 198113 - protein, 1474 aa, Zea Mays
MGRKKRTSTPNPTSPPSYAPRRPAGAKVAGNGGEDDGVRAEVEKALACLQRGNHARAVRLMRDAIAHHGEASTPLLLRAHGTVLARAASVLDDPAARARRHRAALQAAQRAVELAPDSIELSHFHAMLLFDAATDTRAYEEVVAECERGLSIEAPSDPAPHSLRLPGPDVDQVQSELRNLIQKANLASVSTWFKTLRSAGDDKFRLIPVHRFADEPMEARLVPSAPSPRRSNEIKKATKTSEERRQEIEVRLAAMRLLQQQKEQSNGVVSATPASSQSQGDEAPSSSLSLVGGHRADRRKGGSRKATGLSASERTDQARAYWGSIPVDQRLAFLNTSISELKSHYASAIHKEKDVASAASDVLNEVIRFANKHGNWEFMVCGRCRGQFTDVEAHRWHVMGEHVGLLSSELQEMVPQEIDADWVEMLIGWNWSPLDATAALKLFEEDQTDNLGTDRGKESDPTDNWSNKDNPDMSESSASPHNGECNGFGVVVREGDGTWPLSDDDERAKILERIHSLFKILVKNHNLSVCNLNRVIRFAVEELRGLSSGSLLLNHSLDKSPLCICFLEASSLWKVAKFLQDLVQASGINRNLENDGLGDRDSSPQNHNVLEKVILSSDSSELIIDGQTFGGKFDSESVDTDTLFSWLYAGSSIGEQLLAWNRMIDERSNQCMDLIRALGREFNNLQNSCERKLEQLRNEEAFISVEDLLCEEQTRREQVEQYGFQSFEEILRKRQAELLERNTEVQSDSNRSEIDAISAVLKKLHTSHFGYDDAFSGMAPRLFDLDGVEDEWRLHDFIHPNDSMVHTVISKMKEKVTVEISKIDAQIMRNLSVMRHLEHKLGPASALDYRMILLPLMRSFLQSHLGELVDKDAKERSDAAREAFLAELSLDAKKNASKGADMKQSHEKSKDKKKFKDSRKSKELKDSSWSNQSLIHQDSTDEGTSETSQMLADCDDLCCKCSTSEDYFNEQEEELRHRVQLEAEERKLEEALEYQRWIEEEAKQKHLAEQCRSTHASSVIGIKFGDFSYTENENNFSQKLNGIEFDSSDAHALTSSDMSVSMLTLKMNGVCNNAQPIKPLGNFGTQNPKRSSSEPQRYSQGHSAGIEKPNFEKVGSGAIPSTDVCIEDDFDKRFQEDLDEAVRQSLGCDAYPAGTVSTSNGTEVYGTGLKNAAGEYNCFLNVIIQSLWHIRRFRDEFLKTSLLHKHVEDPCAVCALYGIFIDLSKASKGQREAVAPTSLRIALSKSYPNSKFFQEGQMNDASEVLGVIFECLHKSYTSRTVYHGVSHEKNSIGSWDCANISCITHNLFGMDVYERMNCHNCKMESRQLKYTSFFHNINASSLRTAKMMCPDSSFDELLKVVIMNDQLACDQDVGGCGTPNHIDHILSNSPHVFTVVLGWQNNKERVDDISATLAGISTEIDISIFYRGLDQGGKHTLGFVTMASITIVLPSRMDGGSCMMTRQSRLLVVGVMCS

SEQ ID NO: 198114 - protein, 302 aa, Zea Mays
MDRYQRVEKPPPEPAAIGENEVRITTQGLVRNYVTYATSLVQVKEIVLKAMGQAISKAVAIAEIIKKRIPGLHQDTIISSVSITDVWEPIEEGLVPLEMTRHVSMISISLSPKEHNKNSPGYQAPLHSDLKPQRYQQPQQYQQYQPRQHQVQTDSYGRGRGRSRGRGRGWGTRGGYGGGYGGYEYDNNQVGYGGYEHHGGYGHQGGYGNQGGYGHNQGGYGHDQGGYGGYGYNQGGYGGYENGGWNYNRNRGGGGRGRGNWGYGGPGYDRGGRGAGGPGGRGYVRGRGRMGGGRGRGNQNYY

SEQ ID NO: 198115 - protein, 204 aa, Zea Mays
MTRHVSMISISLSPKEHNKNSPGYQAPLHSDLKPQRYQQPQQYQQYQPRQHQVQTDSYGRGRGRSRGRGRGWGTRGGYGGGYGGYEYDNNQVGYGGYEHHGGYGHQGGYGNQGGYGHNQGGYGHDQGGYGGYGYNQGGYGGYENGGWNYNRNRGGGGRGRGNWGYGGPGYDRGGRGAGGPGGRGYVRGRGRMGGGRGRGNQNYY

SEQ ID NO: 198116 - protein, 446 aa, Zea Mays
MLDLSRFRDRDRARCHDWCFAAFVHAYATYLDDRLKERMQARRAGGASPGKWHVDGDPVGMACQVAEAWELVPQGRSASATETTAAEDVIGKAQQLKHLLGRFIQCRPTGKAMTNPVVTAALYRLVKESAAMYCELTEMSGPNKSPFSGVADDLKGRAGCYKQDWNHGFRSGLRILAPTLYIFFASTVPVIAFGEQLSKDTDSALTTVETLASAAICGIVHSIIGGQPLLIVGVAEPTIIMYTYIYNFAKNQPNLGEKMFLPWAAWVCIWTAVMLFLMAIFNVAAILNKFTSFFMQEAIKGMVGEFSAPDGSNQSQSTFQFQWLYINGLLGFIFSMGVLYTALASRSIIPAAWQRSLIADYGVPLMVILWTSLSYSLPSRIPSGVPRRLFTPLPWEPKSLQHWTVAKDLFSVPTVHIFLAIVPATMVAGLSFFDHSVASQMSQQKP

SEQ ID NO: 198117 - protein, 66 aa, Zea Mays
MISAPCHGAVLGAWLGAWPMPLDWERPWQEWPICVTYGAVAGYLFGMAVSLVLTALYKRRVRAKAD

SEQ ID NO: 198118 - protein, 190 aa, Zea Mays
MRAEVTQISALTAVAAHVLCSAGLAAAHALAGRGALVSDPALALRLLVVCEAPIVIAVFSYLRRDAKSCSFFRAVARGLIGLPVGAFLNAFGAIILGAPVGVKYWIATIYWSLVMSLFTFVPAACVFGASRIDWQDVLSHSIYFTPTDVENYMISAPCHGAVLGAWLGAWPMPLDWERPWQVDIPSLNLK

SEQ ID NO: 198119 - protein, 151 aa, Zea Mays
MLKVARAVARGLIGLPVGAFLNAFGAIILGAPVGVKYWIATIYWSLVMSLFTFVPAACVFGASRIDWQDVLSHSIYFTPTDVENYMISAPCHGAVLGAWLGAWPMPLDWERPWQEWPICVTYGAVAGYLFGMAVSLVLTALYKRRVRAKAD

SEQ ID NO: 198120 - protein, 183 aa, Zea Mays
MRAEVTQISALTAVAAHVLCSAGLAAAHALAGRGALVSDPALALRLLVVCEAPIVIAVFSYLRRDAKSCSFFRAVARGLIGLPVGLFYILTLIAGLLFFERVQGRRELTPLHTTHVCASITHTRPRPIVRGNTQYRMCTRVYTLYLDPDTTWEATRDKLQCEDRTHALATNLAKTHAYFDSLL

SEQ ID NO: 198121 - protein, 356 aa, Zea Mays
MRRAELKTLVDMHGNEAGKGGELTHDETTIITGALELTQKIAKDAMTAISETFSLDINAKLDLHTMGMIMTRGHSRVPIYSGMPSNIIGLILVKNLITCRAEDEVPIRNLTIRKIPRVADDLPLYDILNEFQKGHSHMAVVIKRTKEAGVSTEKQKSTTADYKINPKDARADGSSPSYGSTAVSRRINIEKHGDGRPYNKKSERKRENILDFNNDPLPSYSMDEEAVGIITMEDVMEELLQEEIYDETDEYVDVHNKIRINMLTPGKSLSPAISPGGGPLSQGFRRTPMASPFSPYHHGSSVLRSPASNHGQSPGTLPTILSPGRSPTAQTPGQSSPNGSQVSINSNGQHKKDGES

SEQ ID NO: 198122 - protein, 287 aa, Zea Mays
MASHEACCGTMFWVYLMSCVGLVMFAGLMSGLTLGLMSLSLVDLEVLAKAGTPKDKLNAARILPVVKNQHLLLCTLLIGNSLAMEALPIFLDTLVPPYVAVLISVTLILAFGEIMPQAICTRYGLSVGAKAAPVVRLLLILFFPVAYPISKLLDWLLGKGHFALMRRAELKTLVDMHGNEAGKGGELTHDETTIITGALELTQKIAKDAMTAISETFSLDINAKLDLHTMGMIMTRGHSRVPIYSGMPSNIIGLILVKNLITCRAEDEVPIRNLTIRKIPRLIPFLW

SEQ ID NO: 198123 - protein, 289 aa, Zea Mays
MASHEACCGTMFWVYLMSCVGLVMFAGLMSGLTLGLMSLSLVDLEVLAKAGTPKDKLNAARILPVVKNQHLLLCTLLIGNSLAMEALPIFLDTLVPPYVAVLISVTLILAFGEIMPQAICTRYGLSVGAKAAPVVRLLLILFFPVAYPISKLLDWLLGKGHFALMRRAELKTLVDMHGNEAGKGGELTHDETTIITGALELTQKIAKDAMTAISETFSLDINAKLDLHTMGMIMTRGHSRVPIYSGMPSNIIGLILVKNLITCRAEDEVPIRNLTIRKIPRKVTATWLW

SEQ ID NO: 198124 - protein, 219 aa, Zea Mays
MLVYEYVDNGNLDQWLHGDVGEVSPLTWDILLDQQWNAKVSDFGLAKLLCSERSYVTTRVMGTFGYVAPEYASTGMLNERSDVYSFGVLIMEIITGRCPVDYTRAAGEVQLVEWLKNMVAERKAEEVVDSKMAERPPPKTLKRALLVALRCVDPDANKRPKMGHVIHMLEMDDLQFRDDKRPGAGRDGRRPQGPDRYSSKLGGGREPQQARAPASVQMR

SEQ ID NO: 198125 - protein, 95 aa, Zea Mays
MANIQASLRTITSSQQQIGKNKKITRRQWPHGRKAVEAVAAAPPKSEPVSLTSATFASASQGIFTREVRVCSLVTREVRACSLVKYWVPLGDYLL

SEQ ID NO: 198126 - protein, 231 aa, Zea Mays
MESHRMRVGALAWSSSLLSSGSRDKSILHHDIRAQEDHVSKLTGHKSEVCGLKWSYDNRQLASGGNDNRLFVWNPHSVQPVLKYTEHTAAVKAIAWSPHLHGLLASGGGTADRCIRFWNTTTNAHLSCVDTGSQVCNLAWSKNVNELVSTHGYSQNQIIVWRYPTMSKLATLTGHTYRVLYLAISPDGQTIVTGAGDETLRFWNVFPSPKSQSSDSLSCVGGTSFVRSYIR

SEQ ID NO: 198127 - protein, 444 aa, Zea Mays
MDHHRTPMENSASSKPPTPASTPNSRLASAPSPRHSATPPHASAPASAPAPASRTVYSDRFIPSRAGSNLALFDLGPSPSPAAAAASSSSSHEAGPAASSGSAPAAASPYCALLRAALFGPDTPDRVASSAAACSSSSSSPGLSPVGTPATGNIFRFKTEVRRNAKRALFSGGEEEEDALFPGIFTTRGAGPRKVPRSPYKIWDATRCKRIRTMESHRMRVGALAWSSSLLSSGSRDKSILHHDIRAQEDHVSKLTGHKSEVCGLKWSYDNRQLASGGNDNRLFVWNPHSVQPVLKYTEHTAAVKAIAWSPHLHGLLASGGGTADRCIRFWNTTTNAHLSCVDTGSQVCNLAWSKNVNELVSTHGYSQNQIIVWRYPTMSKLATLTGHTYRVLYLAISPDGQTIVTGAGDETLRFWNVFPSPKSQSSDSLSCVGGTSFVRSYIR

SEQ ID NO: 198128 - protein, 207 aa, Zea Mays
MESHRHDIRAQEDHVSKLTGHKSEVCGLKWSYDNRQLASGGNDNRLFVWNPHSVQPVLKYTEHTAAVKAIAWSPHLHGLLASGGGTADRCIRFWNTTTNAHLSCVDTGSQVCNLAWSKNVNELVSTHGYSQNQIIVWRYPTMSKLATLTGHTYRVLYLAISPDGQTIVTGAGDETLRFWNVFPSPKSQSSDSLSCVGGTSFVRSYIR

SEQ ID NO: 198129 - protein, 220 aa, Zea Mays
MGMAMVLTDGEVGALIKVSAAVWVAMSYARLAAARLRPGALRLLALLPVVALLCAIPFAFSTSTFRGTSGFFLAWLGSFKLLLLGAGIGPLDPSLRLSHFVCSATLPVKLRRQSKEKSQAPARGPARILLSGAVIPGVIYAYQFKSSMGRWTAPTWRRRCATSGAGGGTSWCPPSCGRRCSAPSARASATRPASMRRSSCPASCTSSCSTTSCGARPAAR

SEQ ID NO: 198130 - protein, 89 aa, Zea Mays
MFAPLLSAKTETKPTNDEITPSEENTDKPAHSSNEAPSKEVIHLAIVQKILKFRPFSAGVSAAWSISSQGQGAPDKKKPFSCSIPPVYI

SEQ ID NO: 198131 - protein, 554 aa, Zea Mays
MLRSPGNSPRRLSRRPHPRTPPLARPPRPLHRPSSKRRRSEVLDEDTYVAAIERIIERDYFPDLPRLRDRLDWLQAVRSHDPLILRDAQLKILDRRRRAQRHAAGPVPTPTPATSTALRSPSFLTTPAGSVAGGVGGPDADHDDDVAAAVSLDGFFRRFTSEDNDSFSRILDKVNQRRRERYAHLLEPPPPTEAGSKASEGAKRDRITDGYGTSGQPPSTLEGAKFTAKNQLMYYPADQGEAPLTEEERAERLRGMTKEINKPNTRLHGRATADDARPKEEGAAILYALVAGSTPGGMAYHDPDKLKKYDLEDLRKTPNPFYLESDKKAGNGYSFVRTPSPAPGVDESPFMTWGEIDGTPLRLDSDETPGGSERAHFKMPPPPARDVKAHLLSRDAARKIKERSNTFHRPPLPSPARGVSASPRTLSRAAQKFVRNAITKSAKSSSAIDESLRASYRGSTPSASTPKSRFSKDPGLASRSPSTRQGSTPPWVCIHSSPTLIVGDSLKMVSHAHATVFFQKSQVLVLFSVLCLLLVDCSRYCNAVVTLCVTCIGC

SEQ ID NO: 198132 - protein, 541 aa, Zea Mays
MLRSPGNSPRRLSRRPHPRTPPLARPPRPLHRPSSKRRRSEVLDEDTYVAAIERIIERDYFPDLPRLRDRLDWLQAVRSHDPLILRDAQLKILDRRRRAQRHAAGPVPTPTPATSTALRSPSFLTTPAGSVAGGVGGPDADHDDDVAAAVSLDGFFRRFTSEDNDSFSRILDKVNQRRRERYAHLLEPPPPTEAGSKASEGAKRDRITDGYGTSGQPPSTLEGAKFTAKNQLMYYPADQGEAPLTEEERAERLRGMTKEINKPNTRLHGRATADDARPKEEGAAILYALVAGSTPGGMAYHDPDKLKKYDLEDLRKTPNPFYLESDKKAGNGYSFVRTPSPAPGVDESPFMTWGEIDGTPLRLDSDETPGGSERAHFKMPPPPARDVKAHLLSRDAARKIKERSNTFHRPPLPSPARGVSASPRTLSRAAQKFVRNAITKSAKSSSAIDESLRASYRGSTPSASTPKSRFSKDPGLASRSPSTRQGSTPPWVCIHSSPTLIVGDSLKMPKLKQNLQTMRSHLLKKIQTNQLTAVTKHPRRR

SEQ ID NO: 198133 - protein, 69 aa, Zea Mays
MRVPLNLLDRSDRPHHTFRLHIEEKVKTFISTWDNAIMLVDKLFILHHLSIERFIFTLIISNSVSLSRA

SEQ ID NO: 198134 - protein, 122 aa, Zea Mays
MKPKAEKRLPAGKSAGKEGGEKKGKKKAKKSVETYKIYIFKVLKQVHPDIGISSKAMSIMNSFINDIFEKLAAEAAKLARYNKKPTITSREIQTSVRLVLPGELAKHAVSEGTKAVTKFTSS

SEQ ID NO: 198135 - protein, 91 aa, Zea Mays
MSEALQKDKEIGEEEEEEEYVLLELDNCLYSDISPGAQFVLSGLDTLTPTLIVGDNLKMSTEYIFVMTVACAVECCNRTRSVTSLSSLLGE

SEQ ID NO: 198136 - protein, 130 aa, Zea Mays
MTTKDSGSSFSVFSKLKALIRDKFLVKKLPSSCQRSLLGSKETAAVSELLQMVVSSLLLTPTEVTGPTTEQEKLARKAMKPGPRRCDGSHAWLLPLPKRSKGISSMFFSGKWAFLTSALAIRAPGPGCNH

SEQ ID NO: 198137 - protein, 50 aa, Zea Mays
MTSTLLACPQPPSNSEQTTETEMQILLCNLHTSCELQHSSGKIGKGEKEG

SEQ ID NO: 198138 - protein, 407 aa, Zea Mays
MASEAKDVGILAMDIYFPPNCVLQEELETHDGVSKGKYTIGLGQESMAFCTEVEDVISMSLTVVKSLLKNYNIDPMCIGRLEVGSETVIDKSKSIKTWLMQIFEESGNTDIEGVDSSNACYGGTAALFNCVNWVESKSWDGRYGLVVCTDSAVYAEGPARPTGGAAAIAMLIGPNAPICFESKYRGSHMAHVYDFYKPDLASEYPVVDGKLSQTCYLMALDSCYNVFCKKYEKHEGKQFSISDADYVVFHSPYNKLVQKSFARLYYNDFLRNCSTVDGESREKLAPYAGLSSEESYQSRDLEKASQQVAKNLYETKVQPTTLIPKQVGNMYTASLYAALASVVHSRHETLAGQRIVMFSYGSGLTSTMFSFMINEGHHPFSLLNIANILDISKKLKARFPQRNLWRH

SEQ ID NO: 198139 - protein, 274 aa, Zea Mays
MTGGGEEQGRSLFGVSLTNRPRWQQFMICSSGFFFGYLVNGICEEYVYNRLQFSYGWYFTFVQGFVYLALIRLQGFTVKQMVNPWRTYVRLSAVLMGSNGLTKGSLAFLNYPAQIMFKSTKVLPVMVMGAFIPGLRRKYAFQEYVSAVMLVVGLILFTLADAQTSPNFSMAGVAMVSGALVMDAFLGNLQEAIFKMNPDTTQVTTARKAVTLLLSYLIFTKPLTEQHATGLLLITMGIVIKLLPENKERRPRRLPKNDDDDKPRESREAGEETA

SEQ ID NO: 198140 - protein, 278 aa, Zea Mays
MASARSTCTTGFSSGVRVPGADTAAGVHGEADGEPVADLRAPLGGAHGLQWPHQGIPRLPQLPCTDHVQVNQGSTGDGDGSLHPWSEAQVRVPRVRVGRDARRRPHTLHARGRADVAQLQHGRRGHGVRGARHGCFPWQPARSNLQDEPGHDSDGDAVLLHCRWPSVPSGAHGVNRRARDGLDFLLPASVRVRGAGVGGDGHVRRPGLRALPHRAFRCSNHSHGDDGEEGGDAAAVVPDIHQAPHGAARDGAPPHNHGHRHQAPAGEQGETPAPAAQE

SEQ ID NO: 198141 - protein, 242 aa, Zea Mays
MQLAYLHFIYLFIYLLCLCIYKGGYHILASSSCGLASPGRRGLVHIYSFLVRPPFLSWSSPLTITSPPPSPRRRAAIDDWILHSCSQGKDDPRQEEEEEEEEEEEEEEEEEEEDSAAMTGGGEEQGRSLFGVSLTNRPRWQQFMICSSGFFFGYLVNGICEEYVYNRLQFSYGWYFTFVQGFVYLALIRLQGFTVKQMVNPWRTYVRLSAVLMGSNGLTKGSLAFLNYPAQIMFKSTKIAQL

SEQ ID NO: 198142 - protein, 328 aa, Zea Mays
MASARSTCTTGFSSGTQLRLVLHVCAGVRVPGADTAAGVHGEADGEPVADLRAPLGGAHGLQWPHQGIPRLPQLPCTDHVQVNQDSTAMNEKGAQVVYLASRFDVLVRCQTSHLCHVSLYFRGSTGDGDGSLHPWSEAQVRVPRVRVGRDARRRPHTLHARGRADVAQLQHGRRGHGVRGARHGCFPWQPARSNLQDEPGHDSDGDAVLLHCRWPSVPSGAHGVNRRARDGLDFLLPASVRVRGAGVGGDGHVRRPGLRALPHRAFRCSNHSHGDDGEEGGDAAAVVPDIHQAPHGAARDGAPPHNHGHRHQAPAGEQGETPAPAAQE

SEQ ID NO: 198143 - protein, 700 aa, Zea Mays
MPPQPLHCLYLACTRGGSDVTAFDKDQEGFRDVPMPSIQTAGSVPHLRVEKLPMQEVSDPPETVRKAETKNITSIGKDVIFEQDPCSSYQLWGSMKFEEDGHLLSQAKRDLSHLDYRAQSADTKYVTELGSHACLKDPLPMGRDYHRQKLQFSTSDCSFEKASALEAASSSPDALGTMRTKIKSSTLSASPDYLSSYPTAAPCMRKCPGAVELDHGLGHSEHSNRRSDQFTLFSSRNGRSVEKCKEMVQYARGFHHADEINHVPFQWCFEDEGPSVSRGLQYGDEIPSLSRKKYNVAPSRSSQWHYGPQTALSSRRPDYGDEIPSLSLHYGYRDRTHLRSGNWCHDAEARIPSRYQQGTSHGNGHSRNCFSRINTNEQAKVITSKHTFAKPRMINRNCSDQHRINMKGNRWRNSEDLMDQVRGPRANKLNNASVSSTVKDITSPLIRRNQYNRSDFSVQYNQAKFFMIKSYSEDDIHKGIKYNVWASTPNGNNKLDAAYHEAQNLMDSGERCPVFLFFSVNTSGQFVGLAEMLGPVDFKKTMDFWEEDKWSGFFPIKWHIIKDIPNRLFKHIILENNDNRIVTFSRDTQEIGLPQGVQMLKIFKEQPQGTSILDDFDFYEEKANARRTQKRGNSESTYGARFSDDSKSIVCTFLFRAVMKHVFKNIIKHSFCYLIFIIELDAPLRKMCLPPLFTSLCRIA

SEQ ID NO: 198144 - protein, 518 aa, Zea Mays
MPPQPLHCLYLACTRGGSDVTAFDKDQEGFRDVPMPSIQTAGSVPHLRVEKLPMQEVSDPPETVRKAETKNITSIGKDVIFEQDPCSSYQLWGSMKFEEDGHLLSQAKRDLSHLDYRAQSADTKYVTELGSHACLKDPLPMGRDYHRQKLQFSTSDCSFEKASALEAASSSPDALGTMRTKIKSSTLSASPDYLSSYPTAAPCMRKCPGAVELDHGLGHSEHSNRRSDQFTLFSSRNGRSVEKCKEMVQYARGFHHADEINHVPFQWCFEDEGPSVSRGLQYGDEIPSLSRKKYNVAPSRSSQWHYGPQTALSSRRPDYGDEIPSLSLHYGYRDRTHLRSGNWCHDAEARIPSRYQQGTSHGNGHSRNCFSRINTNEQAKVITSKHTFAKPRMINRNCSDQHRINMKGNRWRNSEDLMDQVRGPRANKLNNASVSSTVKDITSPLIRRNQYNRSDFSVQYNQAKFFMIKSYSEDDIHKGIKYNVWASTPNGNNKLDAAYHEAQNLMDSGERLTPVDSS

SEQ ID NO: 198145 - protein, 572 aa, Zea Mays
MKFEEDGHLLSQAKRDLSHLDYRAQSADTKYVTELGSHACLKDPLPMGRDYHRQKLQFSTSDCSFEKASALEAASSSPDALGTMRTKIKSSTLSASPDYLSSYPTAAPCMRKCPGAVELDHGLGHSEHSNRRSDQFTLFSSRNGRSVEKCKEMVQYARGFHHADEINHVPFQWCFEDEGPSVSRGLQYGDEIPSLSRKKYNVAPSRSSQWHYGPQTALSSRRPDYGDEIPSLSLHYGYRDRTHLRSGNWCHDAEARIPSRYQQGTSHGNGHSRNCFSRINTNEQAKVITSKHTFAKPRMINRNCSDQHRINMKGNRWRNSEDLMDQVRGPRANKLNNASVSSTVKDITSPLIRRNQYNRSDFSVQYNQAKFFMIKSYSEDDIHKGIKYNVWASTPNGNNKLDAAYHEAQNLMDSGERCPVFLFFSVNTSGQFVGLAEMLGPVDFKKTMDFWEEDKWSGFFPIKWHIIKDIPNRLFKHIILENNDNRIVTFSRDTQEIGLPQGVQMLKIFKEQPQGTSILDDFDFYEEKANARRTQKRGNSESTYGARFSDDSKSIENLEANMESWSLFETLE

SEQ ID NO: 198146 - protein, 473 aa, Zea Mays
MQEVSDPPETVRKAETKNITSIGKDVIFEQDPCSSYQLWGSMKFEEDGHLLSQAKRDLSHLDYRAQSADTKYVTELGSHACLKDPLPMGRDYHRQKLQFSTSDCSFEKASALEAASSSPDALGTMRTKIKSSTLSASPDYLSSYPTAAPCMRKCPGAVELDHGLGHSEHSNRRSDQFTLFSSRNGRSVEKCKEMVQYARGFHHADEINHVPFQWCFEDEGPSVSRGLQYGDEIPSLSRKKYNVAPSRSSQWHYGPQTALSSRRPDYGDEIPSLSLHYGYRDRTHLRSGNWCHDAEARIPSRYQQGTSHGNGHSRNCFSRINTNEQAKVITSKHTFAKPRMINRNCSDQHRINMKGNRWRNSEDLMDQVRGPRANKLNNASVSSTVKDITSPLIRRNQYNRSDFSVQYNQAKFFMIKSYSEDDIHKGIKYNVWASTPNGNNKLDAAYHEAQNLMDSGERCPVFLFFSWTVRRFG

SEQ ID NO: 198147 - protein, 432 aa, Zea Mays
MKFEEDGHLLSQAKRDLSHLDYRAQSADTKYVTELGSHACLKDPLPMGRDYHRQKLQFSTSDCSFEKASALEAASSSPDALGTMRTKIKSSTLSASPDYLSSYPTAAPCMRKCPGAVELDHGLGHSEHSNRRSDQFTLFSSRNGRSVEKCKEMVQYARGFHHADEINHVPFQWCFEDEGPSVSRGLQYGDEIPSLSRKKYNVAPSRSSQWHYGPQTALSSRRPDYGDEIPSLSLHYGYRDRTHLRSGNWCHDAEARIPSRYQQGTSHGNGHSRNCFSRINTNEQAKVITSKHTFAKPRMINRNCSDQHRINMKGNRWRNSEDLMDQVRGPRANKLNNASVSSTVKDITSPLIRRNQYNRSDFSVQYNQAKFFMIKSYSEDDIHKGIKYNVWASTPNGNNKLDAAYHEAQNLMDSGERCPVFLFFSWTVRRFG

SEQ ID NO: 198148 - protein, 740 aa, Zea Mays
MSYLSLRGPYIPLDIEQGSNHKAERHPRAAGARSAHRRAAVRLPPHRPAPVLQARLARLSYALPLATRGLLGGSTSFPPLPSSHRPRSLDRGRRPPATYCPGPGRALGASSQTHPCRCRPIWFLALEMQEVSDPPETVRKAETKNITSIGKDVIFEQDPCSSYQLWGSMKFEEDGHLLSQAKRDLSHLDYRAQSADTKYVTELGSHACLKDPLPMGRDYHRQKLQFSTSDCSFEKASALEAASSSPDALGTMRTKIKSSTLSASPDYLSSYPTAAPCMRKCPGAVELDHGLGHSEHSNRRSDQFTLFSSRNGRSVEKCKEMVQYARGFHHADEINHVPFQWCFEDEGPSVSRGLQYGDEIPSLSRKKYNVAPSRSSQWHYGPQTALSSRRPDYGDEIPSLSLHYGYRDRTHLRSGNWCHDAEARIPSRYQQGTSHGNGHSRNCFSRINTNEQAKVITSKHTFAKPRMINRNCSDQHRINMKGNRWRNSEDLMDQVRGPRANKLNNASVSSTVKDITSPLIRRNQYNRSDFSVQYNQAKFFMIKSYSEDDIHKGIKYNVWASTPNGNNKLDAAYHEAQNLMDSGERCPVFLFFSVNTSGQFVGLAEMLGPVDFKKTMDFWEEDKWSGFFPIKWHIIKDIPNRLFKHIILENNDNRIVTFSRDTQEIGLPQGVQMLKIFKEQPQGTSILDDFDFYEEKANARRTQKRGNSESTYGARFSDDSKSIENLEANMESWSLFETLE

SEQ ID NO: 198149 - protein, 451 aa, Zea Mays
MQEVSDPPETVRKAETKNITSIGKDVIFEQDPCSSYQLWGSMKFEEDGHLLSQAKRDLSHLDPLPMGRDYHRQKLQFSTSDCSFEKASALEAASSSPDALGTMRTKIKSSTLSASPDYLSSYPTAAPCMRKCPGAVELDHGLGHSEHSNRRSDQFTLFSSRNGRSVEKCKEMVQYARGFHHADEINHVPFQWCFEDEGPSVSRGLQYGDEIPSLSRKKYNVAPSRSSQWHYGPQTALSSRRPDYGDEIPSLSLHYGYRDRTHLRSGNWCHDAEARIPSRYQQGTSHGNGHSRNCFSRINTNEQAKVITSKHTFAKPRMINRNCSDQHRINMKGNRWRNSEDLMDQVRGPRANKLNNASVSSTVKDITSPLIRRNQYNRSDFSVQYNQAKFFMIKSYSEDDIHKGIKYNVWASTPNGNNKLDAAYHEAQNLMDSGERCPVFLFFSWTVRRFG

SEQ ID NO: 198150 - protein, 613 aa, Zea Mays
MQEVSDPPETVRKAETKNITSIGKDVIFEQDPCSSYQLWGSMKFEEDGHLLSQAKRDLSHLDYRAQSADTKYVTELGSHACLKDPLPMGRDYHRQKLQFSTSDCSFEKASALEAASSSPDALGTMRTKIKSSTLSASPDYLSSYPTAAPCMRKCPGAVELDHGLGHSEHSNRRSDQFTLFSSRNGRSVEKCKEMVQYARGFHHADEINHVPFQWCFEDEGPSVSRGLQYGDEIPSLSRKKYNVAPSRSSQWHYGPQTALSSRRPDYGDEIPSLSLHYGYRDRTHLRSGNWCHDAEARIPSRYQQGTSHGNGHSRNCFSRINTNEQAKVITSKHTFAKPRMINRNCSDQHRINMKGNRWRNSEDLMDQVRGPRANKLNNASVSSTVKDITSPLIRRNQYNRSDFSVQYNQAKFFMIKSYSEDDIHKGIKYNVWASTPNGNNKLDAAYHEAQNLMDSGERCPVFLFFSVNTSGQFVGLAEMLGPVDFKKTMDFWEEDKWSGFFPIKWHIIKDIPNRLFKHIILENNDNRIVTFSRDTQEIGLPQGVQMLKIFKEQPQGTSILDDFDFYEEKANARRTQKRGNSESTYGARFSDDSKSIENLEANMESWSLFETLE

SEQ ID NO: 198151 - protein, 345 aa, Zea Mays
MELLAKAPVLGCAGKMQRQRQRGSALGRWICRAVAPPRAAPATPPRVRLRDGRHLAYAESGASKEDARFKVVFSHGFTGSRLDTVRPAPEVAEELGVYMVGFDRAGYGQSDPNPNRSVKSAALDVEELADALGLGPKFYVIGISLGCHAVWGALKYIPDRIAGAAMMAPVVNYWWPGFSPELAAEVYAKQEVGDQWALRVSHHAPGILHWWMEQSWLPTSTVVAGTTPLPNERDAEIRSKMKADGTFQQKREQATQQGIHESYYRDMTVMFGKWEFDPMALPEPPCPVHLWQGDEDGLVPVVLQRYLAGKIGWINYHELPGTGHFLSSVPGLGDNVLRTLFSDKQ

SEQ ID NO: 198152 - protein, 330 aa, Zea Mays
MQAEIHPVFGFCYLCRWIRWLTPDMAKTRGFDPQWLSITFSKAIFLGNGLIAIVSGLFANLLAENLGFGPVAPFDAAACFLAIGMAIIMSSWSENYGDPSESKDLMAQFKVAAKAIASDEKIALLGAIQSLFEGSMYTFVFLWTPALSPNEEDIPHGFIFATFMLSSMLGSSIASRLLARKLKVEGYMQIVFSISAVTLVLPVATNILVPTSSVKGGSVSIGGSLQLLGFCTFEACVGIFWPSIMKMRSQYIPEEARSTIMNFFRIPLNLFVCVVLYNVNAFPITVMFGMCSIFLFMAAILQRRLMVVSDQVHKSSTTQEMIGEDEPLNP

SEQ ID NO: 198153 - protein, 2199 aa, Zea Mays
MEAAAPDGAGKASPAPEEPDWPPELRLLAPPPAAGTDDPQFLSSIIGDAAAPPPPMPPLAQKRKRGRPPKRKDGAGAVVPARPARRREDEEEVVCFICFDGGNLVVCDRRGCPKVYHPACIKRDEAFFQSRSKWNCGWHICSSCEKAVHYMCYTCTYSLCKVCIKQGKFFSVRGTKGFCDTCYGTILLIESKDESAIKVDFDDILSWEYLFKLYWLDLKGKLSLTLEELTIAKTRWNVPSTSARKEKDESSDDLYDANNDDDAGTDCSSGKRRRTNSRKKGQKCRKVNKDCSVPAKKVELPITNTESVPTEVTNERVPLPVDTKVPNGWVPLPVDTKVPNESVPLPANTKWASPELLEFVGHMRDGDQSFISQFDVQTLLLDYIKKNNLRDPQRKSQIICDLRLHRLFRKARVAHFEMLKLLEMHFLMNETSTVTDSRQVTIDLNSAYVDTNGYNDMAAKFSPDKRRKIHRKMERDTQVNLEDYAAIDMHNINLIFMRRSLMEDLVDDAKFSDKIHGGFVRIKISDVYQKQDIYRLVKVTGTHKVPEKYSIGKKMTNFALEILNLNKKEIITMDTISNHDFTEEECKRLRQSMKCGVISRLKVGDILEKAKILQSVKVNDWFENEKQRLGHLRDRASETGRRKELREYVEKLQLLNDSEERTRRINEVLEVHVDSHMDPNYESAEETDEKRTVGKSVDRTRPDTTISRRISRYLSTMQNHPQKVSDCSHHPKNLSTESTICGSGARSLENSTANRTMYEAGSFSSSGVTMSNDTEPEKVWHYKDPSGNVQGPFTLLQLSKWTSYFPRDLRVWLTFESEERSLLLTEVLSKQQKDFTQAASHTSSKATLVGTGHTRNNPSVDQTNAFSPAGHSVVSSSGITVQYNKYSVPERESVYSPDDSLSLSTSSVPPKDACTVNSQTHCQNKHSVFIQSPGSAYGHTDLNHDGIQGGCSGESNHHHSSGALWSPTVVQVSCGHGNVESHQSQHVSWSQSQHESKNSSQRPVKDLNSRRDLSKNLPTQRIGKDVSSPLFACAWSPAESRTASSQHDGSCLSSTTNPNFLDELHYSIASAKPKSCAPATPIEDRGSSSPSGMLSHAERVPICSPQSTPLASAFDMCKMEEIMNQQRTLEPDTSNASINQSPESKIFPVSSPDNHDIDREFPSPVPRSENKDIAVDSSGLTPASPENITTNLPGSDTCKMEVMSQQQVTEAVVSNSSDNHSPQSKVSPVSSPNNEDMKHQYPSSTRRSENKIPAVDNLLSTSAARENLTTTSAHDSDTCKMVELVNQPKTPEVDASNAPLCQSPHSHTSQVPSDNQDIERECPGPTPRSDSKEPLVNNSATTSASASDTIKMEEFVNQQKTVEADASNAPLNQSHSHIFPVPSDSQDIEHECPGPTPRSDTKEPLLNNSVLTLAASEILTTTSAASDTCKMEDSVNQQKTLEADALNAPLNHHPHSHVLPVSFDNQDIQHEYPSPTPKSDSKEPLVDNSVLTSVGPEMLATTSVSDTCKTEEFVNQQKAVEADASNASLNQPHISAVPSDKQDIECECSSPTPRSDCKEPLMDNSVLTSAVPEILATSSASDKCKMEEFVNQQRPIEVDASNASLNQYSRCHIFNVSSDNQYVERECSSTTPRSDCEEPLMDNSILTSAVPEILATSSASASDKCKMEEFVNQQRPIEADASNASLNQPHRCHIFTVSSDNQDIECECPSPTSRSDSKESLVDNLVLTSAVPENLPTSFAVASDSCKMEILNKKRTLEADASNASLDQPSHSSVFTSSSNDNQGNACERPSPNPRPEGEQPLMDNSGLTSPVPQNLTSASDICKMGEILNENRTLEANPSNGSITQSHQSKVFLVPSIDILERECSSETPRPQFKEPVVDSSGLTSAAPESLTAKQHVHSPDAFIPPKHGAPTGELGDAKSDFKGEEIIQKEQYCEREPIVATRENLLIDLSCGAESIDVSDVLESLMEERSVTSYVPVSIEDFLAASAVEEPQYSSPIALSPWGEPSYYQGDAGDSALWGIQDSINDMWSLLSPRPMLQASSGIGTEGKETFDINEVAVTHVNSDFFQRGSMLGEENMNQANLSVAADRMLLPEQVPSIPNGMSTSSVDEGTRVIGSQASINQSLDWGTTWRTSQNLSVYSNEIAGPSSKSYWEESRKQEATNSGVSISGEAIRNKRLNPPDNAIRGSHHHRGRSFLL

SEQ ID NO: 198154 - protein, 1641 aa, Zea Mays
MKCGVISRLKVGDILEKAKILQSVKVNDWFENEKQRLGHLRDRASETGRRKEYPIRPYYDVLLNDSEERTRRINEVLEVHVDSHMDPNYESAEETDEKRTVGKSVDRTRPDTTISRRISRYLSTMQNHPQKVSDCSHHPKNLSTESTICGSGARSLENSTANRTMYEAGSFSSSGVTMSNDTEPEKVWHYKDPSGNVQGPFTLLQLSKWTSYFPRDLRVWLTFESEERSLLLTEVLSKQQKDFTQAASHTSSKATLVGTGHTRNNPSVDQTNAFSPAGHSVVSSSGITVQYNKYSVPERESVYSPDDSLSLSTSSVPPKDACTVNSQTHCQNKHSVFIQSPGSAYGHTDLNHDGIQGGCSGESNHHHSSGALWSPTVVQVSCGHGNVESHQSQHVSWSQSQHESKNSSQRPVKDLNSRRDLSKNLPTQRIGKDVSSPLFACAWSPAESRTASSQHDGSCLSSTTNPNFLDELHYSIASAKPKSCAPATPIEDRGSSSPSGMLSHAERVPICSPQSTPLASAFDMCKMEEIMNQQRTLEPDTSNASINQSPESKIFPVSSPDNHDIDREFPSPVPRSENKDIAVDSSGLTPASPENITTNLPGSDTCKMEVMSQQQVTEAVVSNSSDNHSPQSKVSPVSSPNNEDMKHQYPSSTRRSENKIPAVDNLLSTSAARENLTTTSAHDSDTCKMVELVNQPKTPEVDASNAPLCQSPHSHTSQVPSDNQDIERECPGPTPRSDSKEPLVNNSATTSASASDTIKMEEFVNQQKTVEADASNAPLNQSHSHIFPVPSDSQDIEHECPGPTPRSDTKEPLLNNSVLTLAASEILTTTSAASDTCKMEDSVNQQKTLEADALNAPLNHHPHSHVLPVSFDNQDIQHEYPSPTPKSDSKEPLVDNSVLTSVGPEMLATTSVSDTCKTEEFVNQQKAVEADASNASLNQPHISAVPSDKQDIECECSSPTPRSDCKEPLMDNSVLTSAVPEILATSSASDKCKMEEFVNQQRPIEVDASNASLNQYSRCHIFNVSSDNQYVERECSSTTPRSDCEEPLMDNSILTSAVPEILATSSASASDKCKMEEFVNQQRPIEADASNASLNQPHRCHIFTVSSDNQDIECECPSPTSRSDSKESLVDNLVLTSAVPENLPTSFAVASDSCKMEILNKKRTLEADASNASLDQPSHSSVFTSSSNDNQGNACERPSPNPRPEGEQPLMDNSGLTSPVPQNLTSASDICKMGEILNENRTLEANPSNGSITQSHQSKVFLVPSIDILERECSSETPRPQFKEPVVDSSGLTSAAPESLTAKQHVHSPDAFIPPKHGAPTGELGDAKSDFKGEEIIQKEQYCEREPIVATRENLLIDLSCGAESIDVSDVLESLMEERSVTSYVPVSIEDFLAASAVEEPQYSSPIALSPWGEPSYYQGDAGDSALWGIQDSINDMWSLLSPRPMLQASSGIGTEGKETFDINEVAVTHVNSDFFQRGSMLGEENMNQANLSVAADRMLLPEQVPSIPNGMSTSSVDEGTRVIGSQASINQSLDWGTTWRTSQNLSVYSNEIAGPSSKSYWEESRKQEATNSGVSISGEAIRNKRLNPPDNAIRGSHHHRGRYSQISESWLLSSNHSRSSSAKFGSGGSSRSTSKGQTRG

SEQ ID NO: 198155 - protein, 2226 aa, Zea Mays
MEAAAPDGAGKASPAPEEPDWPPELRLLAPPPAAGTDDPQFLSSIIGDAAAPPPPMPPLAQKRKRGRPPKRKDGAGAVVPARPARRREDEEEVVCFICFDGGNLVVCDRRGCPKVYHPACIKRDEAFFQSRSKWNCGWHICSSCEKAVHYMCYTCTYSLCKVCIKQGKFFSVRGTKGFCDTCYGTILLIESKDESAIKVDFDDILSWEYLFKLYWLDLKGKLSLTLEELTIAKTRWNVPSTSARKEKDESSDDLYDANNDDDAGTDCSSGKRRRTNSRKKGQKCRKVNKDCSVPAKKVELPITNTESVPTEVTNERVPLPVDTKVPNGWVPLPVDTKVPNESVPLPANTKWASPELLEFVGHMRDGDQSFISQFDVQTLLLDYIKKNNLRDPQRKSQIICDLRLHRLFRKARVAHFEMLKLLEMHFLMNETSTVTDSRQVTIDLNSAYVDTNGYNDMAAKFSPDKRRKIHRKMERDTQVNLEDYAAIDMHNINLIFMRRSLMEDLVDDAKFSDKIHGGFVRIKISDVYQKQDIYRLVKVTGTHKVPEKYSIGKKMTNFALEILNLNKKEIITMDTISNHDFTEEECKRLRQSMKCGVISRLKVGDILEKAKILQSVKVNDRLGHLRDRASETGRRKELREYVEKLQLLNDSEERTRRINEVLEVHVDSHMDPNYESAEETDEKRTVGKSVDRTRPDTTISRRISRYLSTMQNHPQKVSDCSHHPKNLSTESTICGSGARSLENSTANRTMYEAGSFSSSGVTMSNDTEPEKVWHYKDPSGNVQGPFTLLQLSKWTSYFPRDLRVWLTFESEERSLLLTEVLSKQQKDFTQAASHTSSKATLVGTGHTRNNPSVDQTNAFSPAGHSVVSSSGITVQYNKYSVPERESVYSPDDSLSLSTSSVPPKDACTVNSQTHCQNKHSVFIQSPGSAYGHTDLNHDGIQGGCSGESNHHHSSGALWSPTVVQVSCGHGNVESHQSQHVSWSQSQHESKNSSQRPVKDLNSRRDLSKNLPTQRIGKDVSSPLFACAWSPAESRTASSQHDGSCLSSTTNPNFLDELHYSIASAKPKSCAPATPIEDRGSSSPSGMLSHAERVPICSPQSTPLASAFDMCKMEEIMNQQRTLEPDTSNASINQSPESKIFPVSSPDNHDIDREFPSPVPRSENKDIAVDSSGLTPASPENITTNLPGSDTCKMEVMSQQQVTEAVVSNSSDNHSPQSKVSPVSSPNNEDMKHQYPSSTRRSENKIPAVDNLLSTSAARENLTTTSAHDSDTCKMVELVNQPKTPEVDASNAPLCQSPHSHTSQVPSDNQDIERECPGPTPRSDSKEPLVNNSATTSASASDTIKMEEFVNQQKTVEADASNAPLNQSHSHIFPVPSDSQDIEHECPGPTPRSDTKEPLLNNSVLTLAASEILTTTSAASDTCKMEDSVNQQKTLEADALNAPLNHHPHSHVLPVSFDNQDIQHEYPSPTPKSDSKEPLVDNSVLTSVGPEMLATTSVSDTCKTEEFVNQQKAVEADASNASLNQPHISAVPSDKQDIECECSSPTPRSDCKEPLMDNSVLTSAVPEILATSSASDKCKMEEFVNQQRPIEVDASNASLNQYSRCHIFNVSSDNQYVERECSSTTPRSDCEEPLMDNSILTSAVPEILATSSASASDKCKMEEFVNQQRPIEADASNASLNQPHRCHIFTVSSDNQDIECECPSPTSRSDSKESLVDNLVLTSAVPENLPTSFAVASDSCKMEILNKKRTLEADASNASLDQPSHSSVFTSSSNDNQGNACERPSPNPRPEGEQPLMDNSGLTSPVPQNLTSASDICKMGEILNENRTLEANPSNGSITQSHQSKVFLVPSIDILERECSSETPRPQFKEPVVDSSGLTSAAPESLTAKQHVHSPDAFIPPKHGAPTGELGDAKSDFKGEEIIQKEQYCEREPIVATRENLLIDLSCGAESIDVSDVLESLMEERSVTSYVPVSIEDFLAASAVEEPQYSSPIALSPWGEPSYYQGDAGDSALWGIQDSINDMWSLLSPRPMLQASSGIGTEGKETFDINEVAVTHVNSDFFQRGSMLGEENMNQANLSVAADRMLLPEQVPSIPNGMSTSSVDEGTRVIGSQASINQSLDWGTTWRTSQNLSVYSNEIAGPSSKSYWEESRKQEATNSGVSISGEAIRNKRLNPPDNAIRGSHHHRGRYSQISESWLLSSNHSRSSSAKFGSGGSSRSTSKGQTRG

SEQ ID NO: 198156 - protein, 2199 aa, Zea Mays
MEAAAPDGAGKASPAPEEPDWPPELRLLAPPPAAGTDDPQFLSSIIGDAAAPPPPMPPLAQKRKRGRPPKRKDGAGAVVPARPARRREDEEEVVCFICFDGGNLVVCDRRGCPKVYHPACIKRDEAFFQSRSKWNCGWHICSSCEKAVHYMCYTCTYSLCKVCIKQGKFFSVRGTKGFCDTCYGTILLIESKDESAIKVDFDDILSWEYLFKLYWLDLKGKLSLTLEELTIAKTRWNVPSTSARKEKDESSDDLYDANNDDDAGTDCSSGKRRRTNSRKKGQKCRKVNKDCSVPAKKVELPITNTESVPTEVTNERVPLPVDTKVPNGWVPLPVDTKVPNESVPLPANTKWASPELLEFVGHMRDGDQSFISQFDVQTLLLDYIKKNNLRDPQRKSQIICDLRLHRLFRKARVAHFEMLKLLEMHFLMNETSTVTDSRQVTIDLNSAYVDTNGYNDMAAKFSPDKRRKIHRKMERDTQVNLEDYAAIDMHNINLIFMRRSLMEDLVDDAKFSDKIHGGFVRIKISDVYQKQDIYRLVKVTGTHKVPEKYSIGKKMTNFALEILNLNKKEIITMDTISNHDFTEEECKRLRQSMKCGVISRLKVGDILEKAKILQSVKVNDWFENEKQRLGHLRDRASETGRRKEYPIRPYYDVLLNDSEERTRRINEVLEVHVDSHMDPNYESAEETDEKRTVGKSVDRTRPDTTISRRISRYLSTMQNHPQKVSDCSHHPKNLSTESTICGSGARSLENSTANRTMYEAGSFSSSGVTMSNDTEPEKVWHYKDPSGNVQGPFTLLQLSKWTSYFPRDLRVWLTFESEERSLLLTEVLSKQQKDFTQAASHTSSKATLVGTGHTRNNPSVDQTNAFSPAGHSVVSSSGITVQYNKYSVPERESVYSPDDSLSLSTSSVPPKDACTVNSQTHCQNKHSVFIQSPGSAYGHTDLNHDGIQGGCSGESNHHHSSGALWSPTVVQVSCGHGNVESHQSQHVSWSQSQHESKNSSQRPVKDLNSRRDLSKNLPTQRIGKDVSSPLFACAWSPAESRTASSQHDGSCLSSTTNPNFLDELHYSIASAKPKSCAPATPIEDRGSSSPSGMLSHAERVPICSPQSTPLASAFDMCKMEEIMNQQRTLEPDTSNASINQSPESKIFPVSSPDNHDIDREFPSPVPRSENKDIAVDSSGLTPASPENITTNLPGSDTCKMEVMSQQQVTEAVVSNSSDNHSPQSKVSPVSSPNNEDMKHQYPSSTRRSENKIPAVDNLLSTSAARENLTTTSAHDSDTCKMVELVNQPKTPEVDASNAPLCQSPHSHTSQVPSDNQDIERECPGPTPRSDSKEPLVNNSATTSASASDTIKMEEFVNQQKTVEADASNAPLNQSHSHIFPVPSDSQDIEHECPGPTPRSDTKEPLLNNSVLTLAASEILTTTSAASDTCKMEDSVNQQKTLEADALNAPLNHHPHSHVLPVSFDNQDIQHEYPSPTPKSDSKEPLVDNSVLTSVGPEMLATTSVSDTCKTEEFVNQQKAVEADASNASLNQPHISAVPSDKQDIECECSSPTPRSDCKEPLMDNSVLTSAVPEILATSSASDKCKMEEFVNQQRPIEVDASNASLNQYSRCHIFNVSSDNQYVERECSSTTPRSDCEEPLMDNSILTSAVPEILATSSASASDKCKMEEFVNQQRPIEADASNASLNQPHRCHIFTVSSDNQDIECECPSPTSRSDSKESLVDNLVLTSAVPENLPTSFAVASDSCKMEILNKKRTLEADASNASLDQPSHSSVFTSSSNDNQGNACERPSPNPRPEGEQPLMDNSGLTSPVPQNLTSASDICKMGEILNENRTLEANPSNGSITQSHQSKVFLVPSIDILERECSSETPRPQFKEPVVDSSGLTSAAPESLTAKQHVHSPDAFIPPKHGAPTGELGDAKSDFKDVSDVLESLMEERSVTSYVPVSIEDFLAASAVEEPQYSSPIALSPWGEPSYYQGDAGDSALWGIQDSINDMWSLLSPRPMLQASSGIGTEGKETFDINEVAVTHVNSDFFQRGSMLGEENMNQANLSVAADRMLLPEQVPSIPNGMSTSSVDEGTRVIGSQASINQSLDWGTTWRTSQNLSVYSNEIAGPSSKSYWEESRKQEATNSGVSISGEAIRNKRLNPPDNAIRGSHHHRGRYSQISESWLLSSNHSRSSSAKFGSGGSSRSTSKGQTRG

SEQ ID NO: 198157 - protein, 559 aa, Zea Mays
MVKVSAYLLGEYGHLLARRPGCSPKELFAIINDKLPTVSTSTVAILLSTYAKILIHTQPPDVGLQQQILTIFKKYESYIDVEIQQRAVEYFELSRKGPALADVLAEMPKFPERESALLKKAEDAEIDTAEQSAIKLRSQQQTSSALVVADHSPANGSAPPANHLTLVKMPSQIVSDTQESGVIHEEVPNPPVEAPKENGTPVEVESRDTNITGINNEVKTEPPSTSHSTSPADLLADLLGPLAIEGPPAVEQNPTQGLNSNQSPVGDLALATLDDQSNSVQPIVNVEEKFHILCTKDSGVLYEDPHIQIGMKAEWRAHHGRLVLFLGNKNTSALTSVRVLILPPSHLKMELSSVPDTIPPRAQVQVPLEVANLRASRDVAVLDLSYTFGTSLVDGKLRLPVVLNKFLQPITLTPEEFFLQWKALTVHLLKVQEVVKGVKPMPLSEMANLFMSLHLAVAPGLDNNPNNLVACTTFFSEATRAMLCLIRLETDPQDRTQLRLTVASGDQHLTFELKEFVKEHLIDIPRTQAAPPMAMVQPQLLTAAPATYNDPGAMLAGLL

SEQ ID NO: 198158 - protein, 698 aa, Zea Mays
MLLVTDVQDIIRRHQAQIITSLKDPDISIRRRALDLLYGMCDVTNAKEIVEELLQYLDTAEFAMREELSLKAAILAEKFAPQLLWYVDVILQLIDKAGDFVSDDIWYRVVQFVTNNEDLQSYAAAKAREYLDKPALHETMVKVSAYLLGEYGHLLARRPGCSPKELFAIINDKLPTVSTSTVAILLSTYAKILIHTQPPDVGLQQQILTIFKKYESYIDVEIQQRAVEYFELSRKGPALADVLAEMPKFPERESALLKKAEDAEIDTAEQSAIKLRSQQQTSSALVVADHSPANGSAPPANHLTLVKMPSQIVSDTQESGVIHEEVPNPPVEAPKENGTPVEVESRDTNITGINNEVKTEPPSTSHSTSPADLLADLLGPLAIEGPPAVEQNPTQGLNSNQSPVGDLALATLDDQSNSVQPIVNVEEKFHILCTKDSGVLYEDPHIQIGMKAEWRAHHGRLVLFLGNKNTSALTSVRVLILPPSHLKMELSSVPDTIPPRAQVQVPLEVANLRASRDVAVLDLSYTFGTSLVDGKLRLPVVLNKFLQPITLTPEEFFLQWKALTVHLLKVQEVVKGVKPMPLSEMANLFMSLHLAVAPGLDNNPNNLVACTTFFSEATRAMLCLIRLETDPQDRTQLRLTVASGDQHLTFELKEFVKEHLIDIPRTQAAPPMAMVQPQLLTAAPATYNDPGAMLAGLL

SEQ ID NO: 198159 - protein, 635 aa, Zea Mays
MREELSLKAAILAEKFAPQLLWYVDVILQLIDKAGDFVSDDIWYRVVQFVTNNEDLQSYAAAKAREYLDKPALHETMVKVSAYLLGEYGHLLARRPGCSPKELFAIINDKLPTVSTSTVAILLSTYAKILIHTQPPDVGLQQQILTIFKKYESYIDVEIQQRAVEYFELSRKGPALADVLAEMPKFPERESALLKKAEDAEIDTAEQSAIKLRSQQQTSSALVVADHSPANGSAPPANHLTLVKMPSQIVSDTQESGVIHEEVPNPPVEAPKENGTPVEVESRDTNITGINNEVKTEPPSTSHSTSPADLLADLLGPLAIEGPPAVEQNPTQGLNSNQSPVGDLALATLDDQSNSVQPIVNVEEKFHILCTKDSGVLYEDPHIQIGMKAEWRAHHGRLVLFLGNKNTSALTSVRVLILPPSHLKMELSSVPDTIPPRAQVQVPLEVANLRASRDVAVLDLSYTFGTSLVDGKLRLPVVLNKFLQPITLTPEEFFLQWKALTVHLLKVQEVVKGVKPMPLSEMANLFMSLHLAVAPGLDNNPNNLVACTTFFSEATRAMLCLIRLETDPQDRTQLRLTVASGDQHLTFELKEFVKEHLIDIPRTQAAPPMAMVQPQLLTAAPATYNDPGAMLAGLL

SEQ ID NO: 198160 - protein, 454 aa, Zea Mays
MALSGMRGLSVFISDVRNCHNKEQERLRVDKELGNIRTRFKNEKGLSPYEKKKYVWKMLYIYMLGYDVDFGHMETVSLISAPKYPEKQVGYIVTSCLLNENNDFLRMVINTVRNDIIGRNETFQCLALTMVGNIGGKEFSESLAPDVQKLLISSSCRPVVRKKAALCLLRLYRKNPDVVNIDGWADRMAQLLDERDLGVLTSVMSLFVSLVSNNSEAYWNCLPKCVRILERLARNQDIPQEYTYYGIPSPWLQVKTMRALQYFPTIEDPNARRALFEVLQRILMGTDVVKNVNKNNASHAVLFEALALVMHLDAEKEMMSQCVALLGKFIAVREPNIRYLGLENMTRMLLVTDVQDIIRRHQAQIITSLKDPDISIRRRALDLLYGMCDVTNAKEIVEELLQYLDTAEFAMREELSLKAAILAEKFAPQLLWVRLPPCLALACKASAEAWGVLG

SEQ ID NO: 198161 - protein, 390 aa, Zea Mays
MALSGMRGLSVFISDVRNCHNKEQERLRVDKELGNIRTRFKNEKGLSPYEKKKYVWKMLYIYMLGYDVDFGHMETVSLISAPKYPEKQVGNIGGKEFSESLAPDVQKLLISSSCRPVVRKKAALCLLRLYRKNPDVVNIDGWADRMAQLLDERDLGVLTSVMSLFVSLVSNNSEAYWNCLPKCVRILERLARNQDIPQEYTYYGIPSPWLQVKTMRALQYFPTIEDPNARRALFEVLQRILMGTDVVKNVNKNNASHAVLFEALALVMHLDAEKEMMSQCVALLGKFIAVREPNIRYLGLENMTRMLLVTDVQDIIRRHQAQIITSLKDPDISIRRRALDLLYGMCDVTNAKEIVEELLQYLDTAEFAMREELSLKAAILAEKFAPQLLW

SEQ ID NO: 198162 - protein, 389 aa, Zea Mays
MALSGMRGLSVFISDVRNCHNKEQERLRVDKELGNIRTRFKNEKGLSPYEKKKYVWKMLYIYMLGYDVDFGHMETVSLISAPKYPEKQVGYIVTSCLLNENNDFLRMVINTVRNDIIGRNETFQCLALTMVGNIGGKEFSESLAPDVQKLLISSSCRPVVRKKAALCLLRLYRKNPDVVNIDGWADRMAQLLDERDLGVLTSVMSLFVSLVSNNSEAYWNCLPKCVRILERLARNQDIPQEYTYYGIPSPWLQVKTMRALQYFPTIEDPNARRALFEVLQRILMGTDVVKNVNKNNASHAVLFEALALVMHLDAEKEMMSQCVALLGKFIAVREPNIRYLGLENMTRMLLVTDVQDIIRRHQAQIITSLKDPDISTLIQLNLQCVKSCL

SEQ ID NO: 198163 - protein, 410 aa, Zea Mays
MSFQWLTTHMPPKLPRNRLKSGHIKQRVEEGNFSVVQPNMDVMDHMENDWRYLSVTAFHLKHPVLSRLTVCFVAVACSDATVVLRALLLPSRLWFDVAFLVPHASPVLVLRHIIINASHYKDDAGDRYLIASGSTDGSITFWNLTETIHGFMQLISETQPHMSIDYQKRPRTGRGSQGGRLRWRSLSYASKKRDGDMSSSDGSNPGSLNTAENSSEASGVENTQIVVHEASDSSKTEMPSSTQSCDIPELRPMHSLSGVHQSGVNCLHISFSTPDKSYCIISGGDDQSVQRFNFRVISSEDCLTTPARLNSHDNDTLKILYQHKVASAHSAAVKGIWTDGTWSFSTGLDQRVRCWKMGLAGQFTEYSHAIISVPEPETLDVFHDRAKRKYHIAVAGRGMQMVEFSPPEDD

SEQ ID NO: 198164 - protein, 962 aa, Zea Mays
MVPWIGVMYFFMVSQITWYLYLSSCDSGIVYSLVHHSKSEYVRCLHFAEENVLYVATNNGYLRQAKLSNIEDVRWTKIIQVTEKAPVICMDVLTTYSNLSLNREDIIALGDGRGNVTIVRLTSSSSEPKLDLSFTWSAEKDRQLLGVYWCKALECSHIFTADPRGVLKLWNIRNVLFSSTDIINAPQMFPPVAVFEPSFGARIMCLDASPEEEILIAGDKKGNITAYPFPKILVLHDSGLMQQKMLPCCRFKGAHGISSVTSVHIEDSTSDHIEIHTTGGDGCICFFKYGRIAQKIEFFGMRQVKELGTIQSIYTNLASESQSSSTYAIGFTSADFIIWDLENETKMAQVSCGGWRRPYSYYLGTVPEYQNCFAFVKDHDIHIHRHWAPTHDKKLLAQVLHLQFHGREVHSLCFINPASHSDPENSSDLLIATGCEDGTVRLTGFLTGSSGKWHSSKLLGEHVGGSAVRATCFIPETYTVTYNSCNYSSNGISDGIAVEKDETFLLISVGSKQVLTTWILQPRNAENRQVYSSGLDIDSKQNSRNLENVDSAMSFQWLTTHMPPKLPRNRLKSGHIKQRVEEGNFSVVQPNMDVMDHMENDWRYLSVTAFHLKHPVLSRLTVCFVAVACSDATVVLRALLLPSRLWFDVAFLVPHASPVLVLRHIIINASHYKDDAGDRYLIASGSTDGSITFWNLTETIHGFMQLISETQPHMSIDYQKRPRTGRGSQGGRLRWRSLSYASKKRDGDMSSSDGSNPGSLNTAENSSEASGVENTQIVVHEASDSSKTEMPSSTQSCDIPELRPMHSLSGVHQSGVNCLHISFSTPDKSYCIISGGDDQSVQRFNFRVISSEDCLTTPARLNSHDNDTLKILYQHKVASAHSAAVKGIWTDGTWSFSTGLDQRVRCWKMGLAGQFTEYSHAIISVPEPETLDVFHDRAKRKYHIAVAGRGMQMVEFSPPEDD

SEQ ID NO: 198165 - protein, 775 aa, Zea Mays
MAVAWKGKKLHPSGIERILTFFMTNKILIAGDKKGNITAYPFPKILVLHDSGLMQQKMLPCCRFKGAHGISSVTSVHIEDSTSDHIEIHTTGGDGCICFFKYGRIAQKIEFFGMRQVKELGTIQSIYTNLASESQSSSTYAIGFTSADFIIWDLENETKMAQVSCGGWRRPYSYYLGTVPEYQNCFAFVKDHDIHIHRHWAPTHDKKLLAQVLHLQFHGREVHSLCFINPASHSDPENSSDLLIATGCEDGTVRLTGFLTGSSGKWHSSKLLGEHVGGSAVRATCFIPETYTVTYNSCNYSSNGISDGIAVEKDETFLLISVGSKQVLTTWILQPRNAENRQVYSSGLDIDSKQNSRNLENVDSAMSFQWLTTHMPPKLPRNRLKSGHIKQRVEEGNFSVVQPNMDVMDHMENDWRYLSVTAFHLKHPVLSRLTVCFVAVACSDATVVLRALLLPSRLWFDVAFLVPHASPVLVLRHIIINASHYKDDAGDRYLIASGSTDGSITFWNLTETIHGFMQLISETQPHMSIDYQKRPRTGRGSQGGRLRWRSLSYASKKRDGDMSSSDGSNPGSLNTAENSSEASGVENTQIVVHEASDSSKTEMPSSTQSCDIPELRPMHSLSGVHQSGVNCLHISFSTPDKSYCIISGGDDQSVQRFNFRVISSEDCLTTPARLNSHDNDTLKILYQHKVASAHSAAVKGIWTDGTWSFSTGLDQRVRCWKMGLAGQFTEYSHAIISVPEPETLDVFHDRAKRKYHIAVAGRGMQMVEFSPPEDD

SEQ ID NO: 198166 - protein, 860 aa, Zea Mays
MEDIIALGDGRGNVTIVRLTSSSSEPKLDLSFTWSAEKDRQLLGVYWCKALECSHIFTADPRGVLKLWNIRNVLFSSTDIINAPQMFPPVAVFEPSFGARIMCLDASPEEEILIAGDKKGNITAYPFPKILVLHDSGLMQQKMLPCCRFKGAHGISSVTSVHIEDSTSDHIEIHTTGGDGCICFFKYGRIAQKIEFFGMRQVKELGTIQSIYTNLASESQSSSTYAIGFTSADFIIWDLENETKMAQVSCGGWRRPYSYYLGTVPEYQNCFAFVKDHDIHIHRHWAPTHDKKLLAQVLHLQFHGREVHSLCFINPASHSDPENSSDLLIATGCEDGTVRLTGFLTGSSGKWHSSKLLGEHVGGSAVRATCFIPETYTVTYNSCNYSSNGISDGIAVEKDETFLLISVGSKQVLTTWILQPRNAENRQVYSSGLDIDSKQNSRNLENVDSAMSFQWLTTHMPPKLPRNRLKSGHIKQRVEEGNFSVVQPNMDVMDHMENDWRYLSVTAFHLKHPVLSRLTVCFVAVACSDATVVLRALLLPSRLWFDVAFLVPHASPVLVLRHIIINASHYKDDAGDRYLIASGSTDGSITFWNLTETIHGFMQLISETQPHMSIDYQKRPRTGRGSQGGRLRWRSLSYASKKRDGDMSSSDGSNPGSLNTAENSSEASGVENTQIVVHEASDSSKTEMPSSTQSCDIPELRPMHSLSGVHQSGVNCLHISFSTPDKSYCIISGGDDQSVQRFNFRVISSEDCLTTPARLNSHDNDTLKILYQHKVASAHSAAVKGIWTDGTWSFSTGLDQRVRCWKMGLAGQFTEYSHAIISVPEPETLDVFHDRAKRKYHIAVAGRGMQMVEFSPPEDD

SEQ ID NO: 198167 - protein, 774 aa, Zea Mays
MFPPVAVFEPSFGARIMCLDASPEEEILIAGDKKGNITAYPFPKILVLHDSGLMQQKMLPCCRFKGAHGISSVTSVHIEDSTSDHIEIHTTGGDGCICFFKYGRIAQKIEFFGMRQVKELGTIQSIYTNLASESQSSSTYAIGFTSADFIIWDLENETKMAQVSCGGWRRPYSYYLGTVPEYQNCFAFVKDHDIHIHRHWAPTHDKKLLAQVLHLQFHGREVHSLCFINPASHSDPENSSDLLIATGCEDGTVRLTGFLTGSSGKWHSSKLLGEHVGGSAVRATCFIPETYTVTYNSCNYSSNGISDGIAVEKDETFLLISVGSKQVLTTWILQPRNAENRQVYSSGLDIDSKQNSRNLENVDSAMSFQWLTTHMPPKLPRNRLKSGHIKQRVEEGNFSVVQPNMDVMDHMENDWRYLSVTAFHLKHPVLRLTVCFVAVACSDATVVLRALLLPSRLWFDVAFLVPHASPVLVLRHIIINASHYKDDAGDRYLIASGSTDGSITFWNLTETIHGFMQLISETQPHMSIDYQKRPRTGRGSQGGRLRWRSLSYASKKRDGDMSSSDGSNPGSLNTAENSSEASGVENTQIVVHEASDSSKTEMPSSTQSCDIPELRPMHSLSGVHQSGVNCLHISFSTPDKSYCIISGGDDQSVQRFNFRVISSEDCLTTPARLNSHDNDTLKILYQHKVASAHSAAVKGIWTDGTWSFSTGLDQRVRCWKMGLAGQFTEYSHAIISVPEPETLDVFHDRAKRKYHIAVAGRGMQMVEFSPPEDD

SEQ ID NO: 198168 - protein, 859 aa, Zea Mays
MEDIIALGDGRGNVTIVRLTSSSSEPKLDLSFTWSAEKDRQLLGVYWCKALECSHIFTADPRGVLKLWNIRNVLFSSTDIINAPQMFPPVAVFEPSFGARIMCLDASPEEEILIAGDKKGNITAYPFPKILVLHDSGLMQQKMLPCCRFKGAHGISSVTSVHIEDSTSDHIEIHTTGGDGCICFFKYGRIAQKIEFFGMRQVKELGTIQSIYTNLASESQSSSTYAIGFTSADFIIWDLENETKMAQVSCGGWRRPYSYYLGTVPEYQNCFAFVKDHDIHIHRHWAPTHDKKLLAQVLHLQFHGREVHSLCFINPASHSDPENSSDLLIATGCEDGTVRLTGFLTGSSGKWHSSKLLGEHVGGSAVRATCFIPETYTVTYNSCNYSSNGISDGIAVEKDETFLLISVGSKQVLTTWILQPRNAENRQVYSSGLDIDSKQNSRNLENVDSAMSFQWLTTHMPPKLPRNRLKSGHIKQRVEEGNFSVVQPNMDVMDHMENDWRYLSVTAFHLKHPVLRLTVCFVAVACSDATVVLRALLLPSRLWFDVAFLVPHASPVLVLRHIIINASHYKDDAGDRYLIASGSTDGSITFWNLTETIHGFMQLISETQPHMSIDYQKRPRTGRGSQGGRLRWRSLSYASKKRDGDMSSSDGSNPGSLNTAENSSEASGVENTQIVVHEASDSSKTEMPSSTQSCDIPELRPMHSLSGVHQSGVNCLHISFSTPDKSYCIISGGDDQSVQRFNFRVISSEDCLTTPARLNSHDNDTLKILYQHKVASAHSAAVKGIWTDGTWSFSTGLDQRVRCWKMGLAGQFTEYSHAIISVPEPETLDVFHDRAKRKYHIAVAGRGMQMVEFSPPEDD

SEQ ID NO: 198169 - protein, 67 aa, Zea Mays
MNMIRAVRRRFTVGHLATAKDPATLRHAAAELLATAIFVFAAEGATLSLGWLLAMPILPMNATRLLN

SEQ ID NO: 198170 - protein, 122 aa, Zea Mays
MNMIRAVRRRFTVGHLATAKDPATLRHAAAELLATAIFVFAAEGATLSLGRMHHHDKGGGGLVAVALAHALALAAAVGCAANISGGHVNPAVTFGALLAGRICLVRSLVYWPAPSCGDRRRA

SEQ ID NO: 198171 - protein, 233 aa, Zea Mays
MSVPPLGYVHFIINMVSFREWTTRRPPKNAASMDPFLKPPRSTVSPSMSLLQGYYGLPPTPQENLTYEGTEMATYAQGHHRKARSLSSSEHGDGADDAEKPIRRRQKADSELTTGREDNGGCLLPRAGQGLALRPKSGSRPDGNGSQLDLSATWVPSYGDGLHTVKKSSSTPEFQDSDSISIASEWLKSKWNLKPDAFTLTLPPLPLLDSIPKPLLDNIPNSIAAWRNKAAKD

SEQ ID NO: 198172 - protein, 252 aa, Zea Mays
MFAHKTLRVPLHGSHQPAAAPPSLPSYSPRNHADRVAREWTTRRPPKNAASMDPFLKPPRSTVSPSMSLLQGYYGLPPTPQENLTYEGTEMATYAQGHHRKARSLSSSEHGDGADDAEKPIRRRQKADSELTTGREDNGGCLLPRAGQGLALRPKSGSRPDGNGSQLDLSATWVPSYGDGLHTVKKSSSTPEFQDSDSISIASEWLKSKWNLKPDAFTLTLPPLPLLDSIPKPLLDNIPNSIAAWRNKAAKD

SEQ ID NO: 198173 - protein, 498 aa, Zea Mays
MLPAKGTHFLFFFKPQETRILTPTREAHPHPKVPPCIAAGEKKYREIDTVVVQVAFTASKFLPARHKGWGTGGPPGPSRQISRPSRHVSTGGVRSSCWARGTGHVSLALSASTCSAVVACPFLDSCGLCQVSSALRDEDAGGGSRRLSLLHGAGAGAGADGCIGDCGCDGLPLAHVPALAPSGHCRHRSAGARAGGGRCRAAHGALLRGARRGVLPEAAAAAGPPRRPPPPLPLPGRPLLPPPAQARAALAAGVCLLRLRLVRRRRPLLRRRQLALLPGPARAAAGRTPRRRRGGAAGGGAGGRVGGARRAGGRGGAARGGVGAQDPAAGEPGGGAGVGAPGAAGRERAPGVPRDGGRGRGRGGGGRPGLRAPPRRRDGPPRAQAPRGPPRLRAGAQGRGAAGAGVRAGAPQPRVLRGHGGVGGRGPAAQRREPTPRGPSHDGEEEAQGRWWWVVGEGQDGSGRVDAVCARGHGRRADQGEGGRQVPPLRRRMLLCLD

SEQ ID NO: 198174 - protein, 202 aa, Zea Mays
MHLQDSVAAMARQYVRSVISAVQRVSMAISPSQSGLNAGHRMLSGFPEAATLARWVCQSYHYSFGPQYSYHLGMELLNQSDGAGEALLKMLWHHPDAVLCCSFKEKPMFTFANKAGLDMLETSLVALQDLTLDKIFDESGRKALFSDISKLMEQGYAYLPSGVCMSGMGRHVSFDQAVAWKVLGEDSNIHCLAFCFVNWSFV

SEQ ID NO: 198175 - protein, 154 aa, Zea Mays
MLGIGCFLASLKLPHLLDGFARVISMELLNQSDGAGEALLKMLWHHPDAVLCCSFKEKPMFTFANKAGLDMLETSLVALQDLTLDKIFDESGRKALFSDISKLMEQGYAYLPSGVCMSGMGRHVSFDQAVAWKVLGEDSNIHCLAFCFVNWSFV

SEQ ID NO: 198176 - protein, 154 aa, Zea Mays
MREEFVVIAGPLFCIGSGKRGFGTVCPPPLAGRLVPEGRREGEQEESKRERERERERERERERERKGTNLDGAEVGESEVEALADAVGGAVAVKLEHPALLVVVTMRCGRGESGGPPPRLRLGSGGGTAVGDADLRLRYGGAWSGRAGAAQQKV

SEQ ID NO: 198177 - protein, 261 aa, Zea Mays
MDLGAQAGRNHPPQQTEPRKSRELFAGHAHHGMEAGAEVVGGDEDVVGPGGAIPIRHPGLDEVDGVGEHAPGVRQRGEAVGRGEVAGDVDGDEEEVGVLGPRGAAGVGEQRFMHRYLGREEVARAPRVGDRPVAVEAGGEVVDVDADGGRRGCAGGGEGAGLGAEEGGAAERSSCGRRGGEEEGEGDGEPEQEEEPRGVLPQLVGESGGCWASPRPGISHGRCARVDGDHTEAPLSYAFVWLCGIMLFFSELAGSAAVLCV

SEQ ID NO: 198178 - protein, 125 aa, Zea Mays
MVKNFGSKIVQIAMNVVVTSHLLVCLYSTAGKKAKRQDFYTRRTAACTRCAVDRRDQTVTVQGGTATRSETESFLDNELREGVFWTFVFPKLKRHFSRTKLVTKNDLAPRKGLLLGLCFVAPKVL

SEQ ID NO: 198179 - protein, 68 aa, Zea Mays
MISICIMGLRRWLKLIAVHLWRSKSCCNSSRSFNSQSYFKCTAEAVPKSFFQQAKRIYMDTQSVPNEI

SEQ ID NO: 198180 - protein, 420 aa, Zea Mays
MVLKYSSVEITPNKGSILSKIISVTVRTIQKDAEEKKASFNPRPYFRLFINWLYDLTTTDGHHDGSNFQVLTAFANAFHLLQPLRVPAWSFAWLELVSHRSFMPKLLMSNSQKGWPFFQRLLVALFKFMEPYLRNAELPEAVDLLYKGTMRVLLVLLHDFPEFICDYHFSFCDVIPSSCIQMRNVILSAFPRNMRLPDPSTPNLKIDLLAEISIAPRIMSDVDGTLKSKQLKTEFDEYLKRPEGSSFLSVLKQNLLLPQNEAAVAGTRYNVPLINSLVLYVGIQAVQQLQQNKANASASVQQIKHTPTMDSFQIETATEMFTNLITSFDTEGRYLLLNAIANQLRYPNSHTHYYSFIILHLFAEATQEIIQEQITRVLLERLIVNRPHPWGLLITSIELIKKTTRLWSSMELLMKILSYS

SEQ ID NO: 198181 - protein, 429 aa, Zea Mays
MVLKYSSVEITPNKGSILSKIISVTVRTIQKDAEEKKASFNPRPYFRLFINWLYDLTTTDGHHDGSNFQVLTAFANAFHLLQPLRVPAWSFAWLELVSHRSFMPKLLMSNSQKGWPFFQRLLVALFKFMEPYLRNAELPEAVDLLYKGTMRVLLVLLHDFPEFICDYHFSFCDVIPSSCIQMRNVILSAFPRNMRLPDPSTPNLKIDLLAEISIAPRIMSDVDGTLKSKQLKTEFDEYLKRPEGSSFLSVLKQNLLLPQNEAAVAGTRYNVPLINSLVLYVGIQQIKHTPTMDSFQIETATEMFTNLITSFDTEGRYLLLNAIANQLRYPNSHTHYYSFIILHLFAEATQEIIQEQITRVLLERLIVNRPHPWGLLITSIELIKNPRYNFWNRSFTHSAPEIEKLFESVARSCGAKAVDEGISVQDGSH

SEQ ID NO: 198182 - protein, 427 aa, Zea Mays
MVLKYSSVEITPNKGSILSKIISVTVRTIQKDAEEKKASFNPRPYFRLFINWLYDLTTTDGHHDGSNFQVLTAFANAFHLLQPLRVPAWSFAWLELVSHRSFMPKLLMSNSQKGWPFFQRLLVALFKFMEPYLRNAELPEAVDLLYKGTMRVLLVLLHDFPEFICDYHFSFCDVIPSSCIQMRNVILSAFPRNMRLPDPSTPNLKIDLLAEISIAPRIMSDVDGTLKSKQLKTEFDEYLKNEAAVAGTRYNVPLINSLVLYVGIQAVQQLQQNKANASASVQQIKHTPTMDSFQIETATEMFTNLITSFDTEGRYLLLNAIANQLRYPNSHTHYYSFIILHLFAEATQEIIQEQITRVLLERLIVNRPHPWGLLITSIELIKNPRYNFWNRSFTHSAPEIEKLFESVARSCGAKAVDEGISVQDGSH

SEQ ID NO: 198183 - protein, 430 aa, Zea Mays
MVLKIISVTVRTIQKDAEEKKASFNPRPYFRLFINWLYDLTTTDGHHDGSNFQVLTAFANAFHLLQPLRVPAWSFAWLELVSHRSFMPKLLMSNSQKGWPFFQRLLVALFKFMEPYLRNAELPEAVDLLYKGTMRVLLVLLHDFPEFICDYHFSFCDVIPSSCIQMRNVILSAFPRNMRLPDPSTPNLKIDLLAEISIAPRIMSDVDGTLKSKQLKTEFDEYLKRPEGSSFLSVLKQNLLLPQNEAAVAGTRYNVPLINSLVLYVGIQAVQQLQQNKANASASVQQIKHTPTMDSFQIETATEMFTNLITSFDTEGRYLLLNAIANQLRYPNSHTHYYSFIILHLFAEATQEIIQEQITRVLLERLIVNRPHPWGLLITSIELIKNPRYNFWNRSFTHSAPEIEKLFESVARSCGAKAVDEGISVQDGSH

SEQ ID NO: 198184 - protein, 283 aa, Zea Mays
MLNSQRRFCDVIPSSCIQMRNVILSAFPRNMRLPDPSTPNLKIDLLAEISIAPRIMSDVDGTLKSKQLKTEFDEYLKRPEGSSFLSVLKQNLLLPQNEAAVAGTRYNVPLINSLVLYVGIQAVQQLQQNKANASASVQQIKHTPTMDSFQIETATEMFTNLITSFDTEGRYLLLNAIANQLRYPNSHTHYYSFIILHLFAEATQEIIQEQITRVLLERLIVNRPHPWGLLITSIELIKNPRYNFWNRSFTHSAPEIEKLFESVARSCGAKAVDEGISVQDGSH

SEQ ID NO: 198185 - protein, 1809 aa, Zea Mays
MIPVSADIPVELRFLLECATGSNFDSIRLELCQLVDSGLDGCILVLRVCLNQMLLNAGEVKNLQLQQKLLSDVFRYCLHKTCFTTSFCEALATIALTDDFLESLTNLLELSVAEKIGVGLALSDSEDSEMKQKGQWFSIAQIEKLCTSHIQSLSNGQIHEIVMFLHQSDGLSKHMDTFNNIISLLKVTERPFFVPVTNGDFDSQANPSRHLEMYFGSTNDDFESLLSEIGKEISMADIVAELGYGFTVDSTHCKEILSIVEPLDDIAISKLLGAVVGTHIGLGEAHNTYATFVSAIRNSHTNDSPQPTKWNTDVLVDSINELAPSTNWVRVIEYLDHEGFNIPDEASFYLLMSIYECACKDPFPLHAVCGSLWENTEGQISFLKHAVCAPSDKFTFAHSSRHLAFQDLAGPSQGNHAWFCLDLLEVLCQLAEVGYTASVRSMLEYPLGHCPELLLVGVSHISTVYNLLQNEVLSCVFPALLKDPTKRNVVNYLWHTNSYLTLQGFVDAHNDPDCLLRIVDVCHDLKILSTVLDSTPFAFSIKLAAASLRKDYSNLEKWLTEKLSLYGKGFVEECVNFLKATMSNTDYVLEGTTQPQSIVRNIYWESSYAFIKSHSGQLLSDAILDEIRKLCVSFESRNPSSAVRELANSDGGSDDIEVEANAYFQHMFSGQISVDSMIQMLGRFKESTDKREVSIFNCMISNLFKEYTFFPKYPDKQLKIAAVLFGSLIKHQLVAHSELGIALRGVRDALRKPVDSKMFMFGTSALEQFMDRVIEWPRYCNYILQISHLRGTHLEMVSVIERALAKISSSQNEPNVGNLLSAEQHVSGSSSMEGIEASESSWLMGTIPSQLGRPLSSPLQHRQQGLLSERSEVSMNSLNKSNLSSQPPLASSSADLTINSKTTAPPSLLASPHQSISVSTSVHVGFLRSRSTPGLPRQPSYTTGFGTALNIETLVAAAEQRDIPIETPPPEVQDKILFMINNISISNMEAKAKEFNEVIQEQHYPWFAQYMVMKRASIEPNFHDLYLKFFDKLNSKSLNKEMLKATYENCKVLLRSDLIKSSSEERSLLKNLGSWLGKFTIGRNQALRAKEIDPKSLIVEAYEKGLMIAVIPFTSKILEPCQSSIAYRPPNPWTIGILSLLAEIYNLPNLKMNLKFDIEVLFKNLTVDMKDVKPTSLLKDRLREVEGNPDFSNKDVTTSQTPVVPEVLPGTIPSSTHVELQPEINITSRAMSLPNILNQYVAPVRLPTNSTVEADKVALMMPEQVSSLTQLMAAIPRDEICFKINPKLGSIGPQLQYSKIMDLALDKANREIILPVIQRSVTIASRTTKELILKDYALESDNNMITRSAHLMVGTLAGSLAHVTCKEPLRVALYSNLRNLIQNLMSGSETIEQIIHMLVNDNLDLGCAIIEAVATRQAVELIDAEIAQSFSQQRKQREGGGPTYHETFAYAQGPFARVPEALSSKPGHLSASQQRVYEDFVHVWHPHNQNVGATGSGLSGVATVSSTLGVLRAYSPNSTSASSSNLSTVHMGGLTCITQPTELGSEDTVIAQFLSNPAQVGPSESPVLFSGTVGAASTFSPLASNDLPEISAMVPPPSTSADRLGSILPEPLNTGDALERYKQVAQKLEALIANDGKHVEIQSVIAEVPDMLRRCVSRDEAALVVAQKVFKSLYDNASNSAYVSWLLATLIAIRDVCKLVVKELTSWVIYSDEEKKFNIEIIFGLIHSKLLNLGEYNVHLTKLIDGGRNKVATEFAMSLVQTLITQDPVSISELHNVVDAISKVAVLFSEWCQICSHVNASDAIYSRFV

SEQ ID NO: 198186 - protein, 1850 aa, Zea Mays
MIPVSADIPVELRFLLECATGSNFDSIRLELCQLVDSGLDGCILVLRVCLNQMLLNAGEVKNLQLQQKLLSDVFRYCLHKTCFTTSFCEALATIALTDDFLESLTNLLELSVAEKIGVGLALSDSEDSEMKQKGSHFCMVIDIASSVPGQWFSIAQIEKLCTSHIQSLSNGQIHEIVMFLHQSDGLSKHMDTFNNIISLLKVTERPFFVPVTNGDFDSQANPSRHLEMYFGSTNDDFESLLSEIGKEISMADIVAELGYGFTVDSTHCKEILSIVEPLDDIAISKLLGAVVGTHIGLGEAHNTYATFVSAIRNSHTNDSPQPTKWNTDVLVDSINELAPSTNWVRVIEYLDHEGFNIPDEASFYLLMSIYECACKDPFPLHAVCGSLWENTEGQISFLKHAVCAPSDKFTFAHSSRHLAFQDLAGPSQGNHAWFCLDLLEVLCQLAEVGYTASVRSMLEYPLGHCPELLLVGVSHISTVYNLLQNEVLSCVFPALLKDPTKRNVVNYLWHTNSYLTLQGFVDAHNDPDCLLRIVDVCHDLKILSTVLDSTPFAFSIKLAAASLRKDYSNLEKWLTEKLSLYGKGFVEECVNFLKATMSNTDYVLEGTTQPQSIVRNIYWESSYAFIKVLQSHSGQLLSDAILDEIRKLCVSFESRNPSSAVRELANSDGGSDDIEVEANAYFQHMFSGQISVDSMIQMLGRFKESTDKREVSIFNCMISNLFKEYTFFPKYPDKQLKIAAVLFGSLIKHQLVAHSELGIALRGVRDALRKPVDSKMFMFGTSALEQFMDRVIEWPRYCNYILQISHLRGTHLEMVSVIERALAKISSSQNEPNVGNLLSAEQHVSGSSSMEGIEASESSWLMGTIPSQLGRPLSSPLQHRQQGLLSERSEVSMNSLNKSNLSSQPPLASSSADLTINSKTTAPPSLLASPHQSISVSTSVHVGFLRSRSTPGLPRQPSYTTGFGTALNIETLVAAAEQRDIPIETPPPEVQDKILFMINNISISNMEAKAKEFNEVIQEQHYPWFAQYMVMKRASIEPNFHDLYLKFFDKLNSKSLNKEMLKATYENCKVLLRSDLIKSSSEERSLLKNLGSWLGKFTIGRNQALRAKEIDPKSLIVEAYEKGLMIAVIPFTSKILEPCQSSIAYRPPNPWTIGILSLLAEIYNLPNLKMNLKFDIEVLFKNLTVDMKDVKPTSLLKDRLREVEGNPDFSNKDVTTSQTPVVPEVLPGTIPSSTHVELQPEINITSRAMSLPNILNQYVAPVRLPTNSTVEADKVALMMPEQVSSLTQLMAAIPRDEICFKINPKLGSIGPQLQYSKIMDLALDKANREIILPVIQRSVTIASRTTKELILKDYALESDNNMITRSAHLMVGTLAGSLAHVTCKEPLRVALYSNLRNLIQNLMSGSETIEQIIHMLVNDNLDLGCAIIEAVATRQAVELIDAEIAQSFSQQRKQREGGGPTYHETFAYAQGPFARVPEALSSKPGHLSASQQRVYEDFVHVWHPHNQNVGATGSGLSGVATVSSTLGVLRAYSPNSTSASSSNLSTVHMGGLTCITQPTELGSEDTVIAQFLSNPAQVGPSESPVLFSGTVGAASTFSPLASNDLPEISAMVPPPSTSADRLGSILPEPLNTGDALERYKQVAQKLEALIANDGKHVEIQSVIAEVPDMLRRCVSRDEAALVVAQKVFKSLYDNASNSAYVSWLLATLIAIRDVCKLVVKELTSWVIYSDEEKKFNIEIIFGLIHSKLLNLGEYNVHLTKLIDGGRNKVATEFAMSLVQTLITQDPVSISELHNVVDAISKVLAAQVNKEESIANETTLIDPNQVAVLFSEWCQICSHVNASDAIYSRFV

SEQ ID NO: 198187 - protein, 451 aa, Zea Mays
MEMRAAPDRATPRMVAAMSPPTPERGTLGRRVAAVAVSAGSPRSSPDRGRPALVERSSATALAVELIDAEIAQSFSQQRKQREGGGPTYHETFAYAQGPFARVPEALSSKPGHLSASQQRVYEDFVHVWHPHNQNVGATGSGLSGVATVSSTLGVLRAYSPNSTSASSSNLSTVHMGGLTCITQPTELGSEDTVIAQFLSNPAQVGPSESPVLFSGTVGAASTFSPLASNDLPEISAMVPPPSTSADRLGSILPEPLNTGDALERYKQVAQKLEALIANDGKHVEIQSVIAEVPDMLRRCVSRDEAALVVAQKVFKSLYDNASNSAYVSWLLATLIAIRDVCKLVVKELTSWVIYSDEEKKFNIEIIFGLIHSKLLNLGEYNVHLTKLIDGGRNKVATEFAMSLVQTLITQDPVSISELHNVVDAISKVLAAQVNKEESIANETTLIDPNQ

SEQ ID NO: 198188 - protein, 1840 aa, Zea Mays
MIPVSADIPVELRFLLECATGSNFDSIRLELCQLVDSGLDGCILVLRVCLNQMLLNAGEVKNLQLQQKLLSDVFRYCLHKTCFTTSFCEALATIALTDDFLESLTNLLELSVAEKIGVGLALSDSEDSEMKQKGSHFCMVIDIASSVPGQWFSIAQIEKLCTSHIQSLSNGQIHEIVMFLHQSDGLSKHMDTFNNIISLLKVTERPFFVPVTNGDFDSQANPSRHLEMYFGSTNDDFESLLSEIGKEISMADIVAELGYGFTVDSTHCKEILSIVEPLDDIAISKLLGAVVGTHIGLGEAHNTYATFVSAIRNSHTNDSPQPTKWNTDVLVDSINELAPSTNWVRVIEYLDHEGFNIPDEASFYLLMSIYECACKDPFPLHAVCGSLWENTEGQISFLKHAVCAPSDKFTFAHSSRHLAFQDLAGPSQGNHAWFCLDLLEVLCQLAEVGYTASVRSMLEYPLGHCPELLLVGVSHISTVYNLLQNEVLSCVFPALLKDPTKRNVVNYLWHTNSYLTLQGFVDAHNDPDCLLRIVDVCHDLKILSTVLDSTPFAFSIKLAAASLRKDYSNLEKWLTEKLSLYGKGFVEECVNFLKATMSNTDYVLEGTTQPQSIVRNIYWESSYAFIKSHSGQLLSDAILDEIRKLCVSFESRNPSSAVRELANSDGGSDDIEVEANAYFQHMFSGQISVDSMIQMLGRFKESTDKREVSIFNCMISNLFKEYTFFPKYPDKQLKIAAVLFACGGSSFEGTSSLPLSLQLESRATTEGSCETGEMFMFGTSALEQFMDRVIEWPRYCNYILQISHLRGTHLEMVSVIERALAKISSSQNEPNVGNLLSAEQHVSGSSSMEGIEASESSWLMGTIPSQLGRPLSSPLQHRQQGLLSERSEVSMNSLNKSNLSSQPPLASSSADLTINSKTTAPPSLLASPHQSISVSTSVHVGFLRSRSTPGLPRQPSYTTGFGTALNIETLVAAAEQRDIPIETPPPEVQDKILFMINNISISNMEAKAKEFNEVIQEQHYPWFAQYMVMKRASIEPNFHDLYLKFFDKLNSKSLNKEMLKATYENCKVLLRSDLIKSSSEERSLLKNLGSWLGKFTIGRNQALRAKEIDPKSLIVEAYEKGLMIAVIPFTSKILEPCQSSIAYRPPNPWTIGILSLLAEIYNLPNLKMNLKFDIEVLFKNLTVDMKDVKPTSLLKDRLREVEGNPDFSNKDVTTSQTPVVPEVLPGTIPSSTHVELQPEINITSRAMSLPNILNQYVAPVRLPTNSTVEADKVALMMPEQVSSLTQVLPAQTQSPSPSPFSVNQLMAAIPRDEICFKINPKLGSIGPQLQYSKIMDLALDKANREIILPVIQRSVTIASRTTKELILKDYALESDNNMITRSAHLMVGTLAGSLAHVTCKEPLRVALYSNLRNLIQNLMSGSETIEQIIHMLVNDNLDLGCAIIEAVATRQAVELIDAEIAQSFSQQRKQREGGGPTYHETFAYAQGPFARVPEALSSKPGHLSASQQRVYEDFVHVWHPHNQNVGATGSGLSGVATVSSTLGVLRAYSPNSTSASSSNLSTVHMGGLTCITQPTELGSEDTVIAQFLSNPAQVGPSESPVLFSGTVGAASTFSPLASNDLPEISAMVPPPSTSADRLGSILPEPLNTGDALERYKQVAQKLEALIANDGKHVEIQSVIAEVPDMLRRCVSRDEAALVVAQKVFKSLYDNASNSAYVSWLLATLIAIRDVCKLVVKELTSWVIYSDEEKKFNIEIIFGLIHSKLLNLGEYNVHLTKLIDGGRNKVATEFAMSLVQTLITQDPVSISELHNVVDAISKVLAAQVNKEESIANETTLIDPNQ

SEQ ID NO: 198189 - protein, 1704 aa, Zea Mays
MVIDIASSVPGQWFSIAQIEKLCTSHIQSLSNGQIHEIVMFLHQSDGLSKHMDTFNNIISLLKVTERPFFVPVTNGDFDSQANPSRHLEMYFGSTNDDFESLLSEIGKEISMADIVAELGYGFTVDSTHCKEILSIVEPLDDIAISKLLGAVVGTHIGLGEAHNTYATFVSAIRNSHTNDSPQPTKWNTDVLVDSINELAPSTNWVRVIEYLDHEGFNIPDEASFYLLMSIYECACKDPFPLHAVCGSLWENTEGQISFLKHAVCAPSDKFTFAHSSRHLAFQDLAGPSQGNHAWFCLDLLEVLCQLAEVGYTASVRSMLEYPLGHCPELLLVGVSHISTVYNLLQNEVLSCVFPALLKDPTKRNVVNYLWHTNSYLTLQGFVDAHNDPDCLLRIVDVCHDLKILSTVLDSTPFAFSIKLAAASLRKDYSNLEKWLTEKLSLYGKGFVEECVNFLKATMSNTDYVLEGTTQPQSIVRNIYWESSYAFIKVLQSHSGQLLSDAILDEIRKLCVSFESRNPSSAVRELANSDGGSDDIEVEANAYFQHMFSGQISVDSMIQMLGRFKESTDKREVSIFNCMISNLFKEYTFFPKYPDKQLKIAAVLFGSLIKHQLVAHSELGIALRGVRDALRKPVDSKMFMFGTSALEQFMDRVIEWPRYCNYILQISHLRGTHLEMVSVIERALAKISSSQNEPNVGNLLSAEQHVSGSSSMEGIEASESSWLMGTIPSQLGRPLSSPLQHRQQGLLSERSEVSMNSLNKSNLSSQPPLASSSADLTINSKTTAPPSLLASPHQSISVSTSVHVGFLRSRSTPGLPRQPSYTTGFGTALNIETLVAAAEQRDIPIETPPPEVQDKILFMINNISISNMEAKAKEFNEVIQEQHYPWFAQYMVMKRASIEPNFHDLYLKFFDKLNSKSLNKEMLKATYENCKVLLRSDLIKSSSEERSLLKNLGSWLGKFTIGRNQALRAKEIDPKSLIVEAYEKGLMIAVIPFTSKILEPCQSSIAYRPPNPWTIGILSLLAEIYNLPNLKMNLKFDIEVLFKNLTVDMKDVKPTSLLKDRLREVEGNPDFSNKDVTTSQTPVVPEVLPGTIPSSTHVELQPEINITSRAMSLPNILNQYVAPVRLPTNSTVEADKVALMMPEQVSSLTQVLPAQTQSPSPSPFSVNQLMAAIPRDEICFKINPKLGSIGPQLQYSKIMDLALDKANREIILPVIQRSVTIASRTTKELILKDYALESDNNMITRSAHLMVGTLAGSLAHVTCKEPLRVALYSNLRNLIQNLMSGSETIEQIIHMLVNDNLDLGCAIIEAVATRQAVELIDAEIAQSFSQQRKQREGGGPTYHETFAYAQGPFARVPEALSSKPGHLSASQQRVYEDFVHVWHPHNQNVGATGSGLSGVATVSSTLGVLRAYSPNSTSASSSNLSTVHMGGLTCITQPTELGSEDTVIAQFLSNPAQVGPSESPVLFSGTVGAASTFSPLASNDLPEISAMVPPPSTSADRLGSILPEPLNTGDALERYKQVAQKLEALIANDGKHVEIQSVIAEVPDMLRRCVSRDEAALVVAQKVFKSLYDNASNSAYVSWLLATLIAIRDVCKLVVKELTSWVIYSDEEKKFNIEIIFGLIHSKLLNLGEYNVHLTKLIDGGRNKVATEFAMSLVQTLITQDPVSISELHNVVDAISKVLAAQVNKEESIANETTLIDPNQ

SEQ ID NO: 198190 - protein, 811 aa, Zea Mays
MRASIEPNFHDLYLKFFDKLNSKSLNKEMLKATYENCKVLLRSDLIKSSSEERSLLKNLGSWLGKFTIGRNQALRAKEIDPKSLIVEAYEKGLMIAVIPFTSKILEPCQSSIAYRPPNPWTIGILSLLAEIYNLPNLKMNLKFDIEVLFKNLTVDMKDVKPTSLLKDRLREVEGNPDFSNKDVTTSQTPVVPEVLPGTIPSSTHVELQPEINITSRAMSLPNILNQYVAPVRLPTNSTVEADKVALMMPEQVSSLTQVLPAQTQSPSPSPFSVNQLMAAIPRDEICFKINPKLGSIGPQLQYSKIMDLALDKANREIILPVIQRSVTIASRTTKELILKDYALESDNNMITRSAHLMVGTLAGSLAHVTCKEPLRVALYSNLRNLIQNLMSGSETIEQIIHMLVNDNLDLGCAIIEAVATRQAVELIDAEIAQSFSQQRKQREGGGPTYHETFAYAQGPFARVPEALSSKPGHLSASQQRVYEDFVHVWHPHNQNVGATGSGLSGVATVSSTLGVLRAYSPNSTSASSSNLSTVHMGGLTCITQPTELGSEDTVIAQFLSNPAQVGPSESPVLFSGTVGAASTFSPLASNDLPEISAMVPPPSTSADRLGSILPEPLNTGDALERYKQVAQKLEALIANDGKHVEIQSVIAEVPDMLRRCVSRDEAALVVAQKVFKSLYDNASNSAYVSWLLATLIAIRDVCKLVVKELTSWVIYSDEEKKFNIEIIFGLIHSKLLNLGEYNVHLTKLIDGGRNKVATEFAMSLVQTLITQDPVSISELHNVVDAISKVLAAQVNKEESIANETTLIDPNQ

SEQ ID NO: 198191 - protein, 1671 aa, Zea Mays
MVIDIASSVPGQWFSIAQIEKLCTSHIQSLSNGQIHEIVMFLHQSDGLSKHMDTFNNIISLLKVTERPFFVPVTNGDFDSQANPSRHLEMYFGSTNDDFESLLSEIGKEISMADIVAELGYGFTVDSTHCKEILSIVEPLDDIAISKLLGAVVGTHIGLGEAHNTYATFVSAIRNSHTNDSPQPTKWNTDVLVDSINELAPSTNWVRVIEYLDHEGFNIPDEASFYLLMSIYECACKDPFPLHAVCGSLWENTEGQISFLKHAVCAPSDKFTFAHSSRHLAFQDLAGPSQGNHAWFCLDLLEVLCQLAEVGYTASVRSMLEYPLGHCPELLLVGVSHISTVYNLLQNEVLSCVFPALLKDPTKRNVVNYLWHTNSYLTLQGFVDAHNDPDCLLRIVDVCHDLKILSTVLDSTPFAFSIKLAAASLRKDYSNLEKWLTEKLSLYGKGFVEECVNFLKATMSNTDYVLEGTTQPQSIVRNIYWESSYAFIKVLQSHSGQLLSDAILDEIRKLCVSFESRNPSSAVRELANSDGGSDDIEVEANAYFQHMFSGQISVDSMIQMLGRFKESTDKREVSIFNCMISNLFKEYTFFPKYPDKQLKIAAVLFGSLIKHQLVAHSELGIALRGVRDALRKPVDSKMFMFGTSALEQFMDRVIEWPRYCNYILQISHLRGTHLEMVSVIERALAKISSSQNEPNVGNLLSAEQHVSGSSSMEGIEASESSWLMGTIPSQLGRPLSSPLQHRQQGLLSERSEVSMNSLNKSNLSSQPPLASSSADLTINSKTTAPPSLLASPHQSISVSTSVHVGFLRSRSTPGLPRQPSYTTGFGTALNIETLVAAAEQRDIPIETPPPEVQDKILFMINNISISNMEAKAKEFNEVIQEQHYPWFAQYMVMKRASIEPNFHDLYLKFFDKLNSKSLNKEMLKATYENCKVLLRSDLIKSSSEERSLLKNLGSWLGKFTIGRNQALRAKEIDPKSLIVEAYEKGLMIAVIPFTSKILEPCQSSIAYRPPNPWTIGILSLLAEIYNLPNLKMNLKFDIEVLFKNLTVDMKDVKPTSLLKDRLREVEGNPDFSNKDVTTSQTPVVPEVLPGTIPSSTHVELQPEINITSRAMSLPNILNQYVAPVRLPTNSTVEADKVALMMPEQVSSLTQLMAAIPRDEICFKINPKLGSIGPQLQYSKIMDLALDKANREIILPVIQRSVTIASRTTKELILKDYALESDNNMITRSAHLMVGTLAGSLAHVTCKEPLRVALYSNLRNLIQNLMSGSETIEQIIHMLVNDNLDLGCAIIEAVATRQAVELIDAEIAQSFSQQRKQREGGGPTYHETFAYAQGPFARVPEALSSKPGHLSASQQRVYEDFVHVWHPHNQNVGATGSGLSGVATVSSTLGVLRAYSPNSTSASSSNLSTVHMGGLTCITQPTELGSEDTVIAQFLSNPAQVGPSESPVLFSGTVGAASTFSPLASNDLPEISAMVPPPSTSADRLGSILPEPLNTGDALERYKQVAQKSVIAEVPDMLRRCVSRDEAALVVAQKVFKSLYDNASNSAYVSWLLATLIAIRDVCKLVVKELTSWVIYSDEEKKFNIEIIFGLIHSKLLNLGEYNVHLTKLIDGGRNKVATEFAMSLVQTLITQDPVSISELHNVVDAISKVLAAQVNKEESIANETTLIDPNQ

SEQ ID NO: 198192 - protein, 1828 aa, Zea Mays
MIPVSADIPVELRFLLECATGSNFDSIRLELCQLVDSGLDGCILVLRVCLNQMLLNAGEVKNLQLQQKLLSDVFRYCLHKTCFTTSFCEALATIALTDDFLESLTNLLELSVAEKIGVGLALSDSEDSEMKQKGSHFCMVIDIASSVPGQWFSIAQIEKLCTSHIQSLSNGQIHEIVMFLHQSDGLSKHMDTFNNIISLLKVTERPFFVPVTNGDFDSQANPSRHLEMYFGSTNDDFESLLSEIGKEISMADIVAELGYGFTVDSTHCKEILSIVEPLDDIAISKLLGAVVGTHIGLGEAHNTYATFVSAIRNSHTNDSPQPTKWNTDVLVDSINELAPSTNWVRVIEYLDHEGFNIPDEASFYLLMSIYECACKDPFPLHAVCGSLWENTEGQISFLKHAVCAPSDKFTFAHSSRHLAFQDLAGPSQGNHAWFCLDLLEVLCQLAEVGYTASVRSMLEYPLGHCPELLLVGVSHISTVYNLLQNEVLSCVFPALLKDPTKRNVVNYLWHTNSYLTLQGFVDAHNDPDCLLRIVDVCHDLKILSTVLDSTPFAFSIKLAAASLRKDYSNLEKWLTEKLSLYGKGFVEECVNFLKATMSNTDYVLEGTTQPQSIVRNIYWESSYAFIKVYMVLQSHSGQLLSDAILDEIRKLCVSFESRNPSSAVRELANSDGGSDDIEVEANAYFQHMFSGQISVDSMIQMLGRFKESTDKREVSIFNCMISNLFKEYTFFPKYPDKQLKIAAVLFACGGSSFEGTSSLPLSLQLESRATTEGSCETGEMFMFGTSALEQFMDRVIEWPRYCNYILQISHLRGTHLEMVSVIERALAKISSSQNEPNVGNLLSAEQHVSGSSSMEGIEASESSWLMGTIPSQLGRPLSSPLQHRQQGLLSERSEVSMNSLNKSNLSSQPPLASSSADLTINSKTTAPPSLLASPHQSISVSTSVHVGFLRSRSTPGLPRQPSYTTGFGTALNIETLVAAAEQRDIPIETPPPEVQDKILFMINNISISNMEAKAKEFNEVIQEQHYPWFAQYMVMKRASIEPNFHDLYLKFFDKLNSKSLNKEMLKATYENCKVLLRSDLIKSSSEERSLLKNLGSWLGKFTIGRNQALRAKEIDPKSLIVEAYEKGLMIAVIPFTSKILEPCQSSIAYRPPNPWTIGILSLLAEIYNLPNLKMNLKFDIEVLFKNLTVDMKDVKPTSLLKDRLREVEGNPDFSNKDVTTSQTPVVPEVLPGTIPSSTHVELQPEINITSRAMSLPNILNQYVAPVRLPTNSTVEADKVALMMPEQVSSLTQLMAAIPRDEICFKINPKLGSIGPQLQYSKIMDLALDKANREIILPVIQRSVTIASRTTKELILKDYALESDNNMITRSAHLMVGTLAGSLAHVTCKEPLRVALYSNLRNLIQNLMSGSETIEQIIHMLVNDNLDLGCAIIEAVATRQAVELIDAEIAQSFSQQRKQREGGGPTYHETFAYAQGPFARVPEALSSKPGHLSASQQRVYEDFVHVWHPHNQNVGATGSGLSGVATVSSTLGVLRAYSPNSTSASSSNLSTVHMGGLTCITQPTELGSEDTVIAQFLSNPAQVGPSESPVLFSGTVGAASTFSPLASNDLPEISAMVPPPSTSADRLGSILPEPLNTGDALERYKQVAQKLEALIANDGKHVEIQSVIAEVPDMLRRCVSRDEAALVVAQKVFKSLYDNASNSAYVSWLLATLIAIRDVCKLVVKELTSWVIYSDEEKKFNIEIIFGLIHSKLLNLGEYNVHLTKLIDGGRNKVATEFAMSLVQTLITQDPVSISELHNVVDAISKVLAAQVNKEESIANETTLIDPNQ

SEQ ID NO: 198193 - protein, 1709 aa, Zea Mays
MVIDIASSVPGQWFSIAQIEKLCTSHIQSLSNGQIHEIVMFLHQSDGLSKHMDTFNNIISLLKVTERPFFVPVTNGDFDSQANPSRHLEMYFGSTNDDFESLLSEIGKEISMADIVAELGYGFTVDSTHCKEILSIVEPLDDIAISKLLGAVVGTHIGLGEAHNTYATFVSAIRNSHTNDSPQPTKWNTDVLVDSINELAPSTNWVRVIEYLDHEGFNIPDEASFYLLMSIYECACKDPFPLHAVCGSLWENTEGQISFLKHAVCAPSDKFTFAHSSRHLAFQDLAGPSQGNHAWFCLDLLEVLCQLAEVGYTASVRSMLEYPLGHCPELLLVGVSHISTVYNLLQNEVLSCVFPALLKDPTKRNVVNYLWHTNSYLTLQGFVDAHNDPDCLLRIVDVCHDLKILSTVLDSTPFAFSIKLAAASLRKDYSNLEKWLTEKLSLYGKGFVEECVNFLKATMSNTDYVLEGTTQPQSIVRNIYWESSYAFIKVLQSHSGQLLSDAILDEIRKLCVSFESRNPSSAVRELANSDGGSDDIEVEANAYFQHMFSGQISVDSMIQMLGRFKESTDKREVSIFNCMISNLFKEYTFFPKYPDKQLKIAAVLFGSLIKHQLVAHSELGIALRGVRDALRKPVDSKMFMFGTSALEQFMDRVIEWPRYCNYILQISHLRGTHLEMVSVIERALAKISSSQNEPNVGNLLSAEQHVSGSSSMEGIEASESSWLMGTIPSQLGRPLSSPLQHRQQGLLSERSEVSMNSLNKSNLSSQPPLASSSADLTINSKTTAPPSLLASPHQSISVSTSVHVGFLRSRSTPGLPRQPSYTTGFGTALNIETLVAAAEQRDIPIETPPPEVQDKILFMINNISISNMEAKAKEFNEVIQEQHYPWFAQYMVMKRASIEPNFHDLYLKFFDKLNSKSLNKEMLKATYENCKVLLRSDLIKSSSEERSLLKNLGSWLGKFTIGRNQALRAKEIDPKSLIVEAYEKGLMIAVIPFTSKILEPCQSSIAYRPPNPWTIGILSLLAEIYNLPNLKMNLKFDIEVLFKNLTVDMKDVKPTSLLKDRLREVEGNPDFSNKDVTTSQTPVVPEVLPGTIPSSTHVELQPEINITSRAMSLPNILNQYVAPVRLPTNSTVEADKVALMMPEQVSSLTQLMAAIPRDEICFKINPKLGSIGPQLQYSKIMDLALDKANREIILPVIQRSVTIASRTTKELILKDYALESDNNMITRSAHLMVGTLAGSLAHVTCKEPLRVALYSNLRNLIQNLMSGSETIEQIIHMLVNDNLDLGCAIIEAVATRQAVELIDAEIAQSFSQQRKQREGGGPTYHETFAYAQGPFARVPEALSSKPGHLSASQQRVYEDFVHVWHPHNQNVGATGSGLSGVATVSSTLGVLRAYSPNSTSASSSNLSTVHMGGLTCITQPTELGSEDTVIAQFLSNPAQVGPSESPVLFSGTVGAASTFSPLASNDLPVSEISAMVPPPSTSADRLGSILPEPLNTGDALERYKQVAQKLEALIANDGKHVEIQSVIAEVPDMLRRCVSRDEAALVVAQKVFKSLYDNASNSAYVSWLLATLIAIRDVCKLVVKELTSWVIYSDEEKKFNIEIIFGLIHSKLLNLGEYNVHLTKLIDGGRNKVATEFAMSLVQTLITQDPVSISELHNVVDAISKLAWGPGSPESLQQLIGIARNNVLAAQVNKEESIANETTLIDPNQ

SEQ ID NO: 198194 - protein, 1848 aa, Zea Mays
MIPVSADIPVELRFLLECATGSNFDSIRLELCQLVDSGLDGCILVLRVCLNQMLLNAGEVKNLQLQQKLLSDVFRYCLHKTCFTTSFCEALATIALTDDFLESLTNLLELSVAEKIGVGLALSDSEDSEMKQKGQWFSIAQIEKLCTSHIQSLSNGQIHEIVMFLHQSDGLSKHMDTFNNIISLLKVTERPFFVPVTNGDFDSQANPSRHLEMYFGSTNDDFESLLSEIGKEISMADIVAELGYGFTVDSTHCKEILSIVEPLDDIAISKLLGAVVGTHIGLGEAHNTYATFVSAIRNSHTNDSPQPTKWNTDVLVDSINELAPSTNWVRVIEYLDHEGFNIPDEASFYLLMSIYECACKDPFPLHAVCGSLWENTEGQISFLKHAVCAPSDKFTFAHSSRHLAFQDLAGPSQGNHAWFCLDLLEVLCQLAEVGYTASVRSMLEYPLGHCPELLLVGVSHISTVYNLLQNEVLSCVFPALLKDPTKRNVVNYLWHTNSYLTLQGFVDAHNDPDCLLRIVDVCHDLKILSTVLDSTPFAFSIKLAAASLRKDYSNLEKWLTEKLSLYGKGFVEECVNFLKATMSNTDYVLEGTTQPQSIVRNIYWESSYAFIKVLQSHSGQLLSDAILDEIRKLCVSFESRNPSSAVRELANSDGGSDDIEVEANAYFQHMFSGQISVDSMIQMLGRFKESTDKREVSIFNCMISNLFKEYTFFPKYPDKQLKIAAVLFGSLIKHQLVAHSELGIALRGVRDALRKPVDSKMFMFGTSALEQFMDRVIEWPRYCNYILQISHLRGTHLEMVSVIERALAKISSSQNEPNVGNLLSAEQHVSGSSSMEGIEASESSWLMGTIPSQLGRPLSSPLQHRQQGLLSERSEVSMNSLNKSNLSSQPPLASSSADLTINSKTTAPPSLLASPHQSISVSTSVHVGFLRSRSTPGLPRQPSYTTGFGTALNIETLVAAAEQRDIPIETPPPEVQDKILFMINNISISNMEAKAKEFNEVIQEQHYPWFAQYMVMKRASIEPNFHDLYLKFFDKLNSKSLNKEMLKATYENCKVLLRSDLIKSSSEERSLLKNLGSWLGKFTIGRNQALRAKEIDPKSLIVEAYEKGLMIAVIPFTSKILEPCQSSIAYRPPNPWTIGILSLLAEIYNLPNLKMNLKFDIEVLFKNLTVDMKDVKPTSLLKDRLREVEGNPDFSNKDVTTSQTPVVPEVLPGTIPSSTHVELQPEINITSRAMSLPNILNQYVAPVRLPTNSTVEADKVALMMPEQVSSLTQVLPAQTQSPSPSPFSVNQLMAAIPRDEICFKINPKLGSIGPQLQYSKIMDLALDKANREIILPVIQRSVTIASRTTKELILKDYALESDNNMITRSAHLMVGTLAGSLAHVTCKEPLRVALYSNLRNLIQNLMSGSETIEQIIHMLVNDNLDLGCAIIEAVATRQAVELIDAEIAQSFSQQRKQREGGGPTYHETFAYAQGPFARVPEALSSKPGHLSASQQRVYEDFVHVWHPHNQNVGATGSGLSGVATVSSTLGVLRAYSPNSTSASSSNLSTVHMGGLTCITQPTELGSEDTVIAQFLSNPAQVGPSESPVLFSGTVGAASTFSPLASNDLPEISAMVPPPSTSADRLGSILPEPLNTGDALERYKQVAQKLEALIANDGKHVEIQSVIAEVPDMLRRCVSRDEAALVVAQKVFKSLYDNASNSAYVSWLLATLIAIRDVCKLVVKELTSWVIYSDEEKKFNIEIIFGLIHSKLLNLGEYNVHLTKLIDGGRNKVATEFAMSLVQTLITQDPVSISELHNVVDAISKLAWGPGSPESLQQLIGIARNNVLAAQVNKEESIANETTLIDPNQ

SEQ ID NO: 198195 - protein, 1683 aa, Zea Mays
MVIDIASSVPGQWFSIAQIEKLCTSHIQSLSNGQIHEIVMFLHQSDGLSKHMDTFNNIISLLKVTERPFFVPVTNGDFDSQANPSRHLEMYFGSTNDDFESLLSEIGKEISMADIVAELGYGFTVDSTHCKEILSIVEPLDDIAISKLLGAVVGTHIGLGEAHNTYATFVSAIRNSHTNDSPQPTKWNTDVLVDSINELAPSTNWVRVIEYLDHEGFNIPDEASFYLLMSIYECACKDPFPLHAVCGSLWENTEGQISFLKHAVCAPSDKFTFAHSSRHLAFQDLAGPSQGNHAWFCLDLLEVLCQLAEVGYTASVRSMLEYPLGHCPELLLVGVSHISTVYNLLQNEVLSCVFPALLKDPTKRNVVNYLWHTNSYLTLQGFVDAHNDPDCLLRIVDVCHDLKILSTVLDSTPFAFSIKLAAASLRKDYSNLEKWLTEKLSLYGKGFVEECVNFLKATMSNTDYVLEGTTQPQSIVRNIYWESSYAFIKSHSGQLLSDAILDEIRKLCVSFESRNPSSAVRELANSDGGSDDIEVEANAYFQHMFSGQISVDSMIQMLGRFKESTDKREVSIFNCMISNLFKEYTFFPKYPDKQLKIAAVLFGSLIKHQLVAHSELGIALRGVRDALRKPVDSKMFMFGTSALEQFMDRVIEWPRYCNYILQISHLRGTHLEMVSVIERALAKISSSQNEPNVGNLLSAEQHVSGSSSMEGIEASESSWLMGTIPSQLGRPLSSPLQHRQQGLLSERSEVSMNSLNKSNLSSQPPLASSSADLTINSKTTAPPSLLASPHQSISVSTSVHVGFLRSRSTPGLPRQPSYTTGFGTALNIETLVAAAEQRDIPIETPPPEVQDKILFMINNISISNMEAKAKEFNEVIQEQHYPWFAQYMVMKRASIEPNFHDLYLKFFDKLNSKSLNKEMLKATYENCKVLLRSDLIKSSSEERSLLKNLGSWLGKFTIGRNQALRAKEIDPKSLIVEAYEKGLMIAVIPFTSKILEPCQSSIAYRPPNPWTIGILSLLAEIYNLPNLKMNLKFDIEVLFKNLTVDMKDVKPTSLLKDRLREVEGNPDFSNKDVTTSQTPVVPEVLPGTIPSSTHVELQPEINITSRAMSLPNILNQYVAPVRLPTNSTVEADKVALMMPEQVSSLTQLMAAIPRDEICFKINPKLGSIGPQLQYSKIMDLALDKANREIILPVIQRSVTIASRTTKELILKDYALESDNNMITRSAHLMVGTLAGSLAHVTCKEPLRVALYSNLRNLIQNLMSGSETIEQIIHMLVNDNLDLGCAIIEAVATRQAVELIDAEIAQSFSQQRKQREGGGPTYHETFAYAQGPFARVPEALSSKPGHLSASQQRVYEDFVHVWHPHNQNVGATGSGLSGVATVSSTLGVLRAYSPNSTSASSSNLSTVHMGGLTCITQPTELGSEDTVIAQFLSNPAQVGPSESPVLFSGTVGAASTFSPLASNDLPEISAMVPPPSTSADRLGSILPEPLNTGDALERYKQVAQKLEALIANDGKHVEIQSVIAEVPDMLRRCVSRDEAALVVAQKVFKSLYDNASNSAYVSWLLATLIAIRDVCKLVVKELTSWVIYSDEEKKFNIEIIFGLIHSKLLNLGEYNVHLTKLIDGGRNKVATEFAMSLVQTLITQDPVSISELHNVVDAISKVLAAQVNKEESIANETTLIDPNQ

SEQ ID NO: 198196 - protein, 1687 aa, Zea Mays
MVIDIASSVPGQWFSIAQIEKLCTSHIQSLSNGQIHEIVMFLHQSDGLSKHMDTFNNIISLLKVTERPFFVPVTNGDFDSQANPSRHLEMYFGSTNDDFESLLSEIGKEISMADIVAELGYGFTVDSTHCKEILSIVEPLDDIAISKLLGAVVGTHIGLGEAHNTYATFVSAIRNSHTNDSPQPTKWNTDVLVDSINELAPSTNWVRVIEYLDHEGFNIPDEASFYLLMSIYECACKDPFPLHAVCGSLWENTEGQISFLKHAVCAPSDKFTFAHSSRHLAFQDLAGPSQGNHAWFCLDLLEVLCQLAEVGYTASVRSMLEYPLGHCPELLLVGVSHISTVYNLLQNEVLSCVFPALLKDPTKRNVVNYLWHTNSYLTLQGFVDAHNDPDCLLRIVDVCHDLKILSTVLDSTPFAFSIKLAAASLRKDYSNLEKWLTEKLSLYGKGFVEECVNFLKATMSNTDYVLEGTTQPQSIVRNIYWESSYAFIKVLQSHSGQLLSDAILDEIRKLCVSFESRNPSSAVRELANSDGGSDDIEVEANAYFQHMFSGQISVDSMIQMLGRFKESTDKREVSIFNCMISNLFKEYTFFPKYPDKQLKIAAVLFACGGSSFEGTSSLPLSLQLESRATTEGSCETGEMFMFGTSALEQFMDRVIEWPRYCNYILQISHLRGTHLEMVSVIERALAKISSSQNEPNVGNLLSAEQHVSGSSSMEGIEASESSWLMGTIPSQLGRPLSSPLQHRQQGLLSERSEVSMNSLNKSNLSSQPPLASSSADLTINSKTTAPPSLLASPHQSISVSTSVHVGFLRSRSTPGLPRQPSYTTGFGTALNIETLVAAAEQRDIPIETPPPEVQDKILFMINNISISNMEAKAKEFNEVIQEQHYPWFAQYMVMKRASIEPNFHDLYLKFFDKLNSKSLNKEMLKATYENCKVLLRSDLIKSSSEERSLLKNLGSWLGKFTIGRNQALRAKEIDPKSLIVEAYEKGLMIAVIPFTSKILEPCQSSIAYRPPNPWTIGILSLLAEIYNLPNLKMNLKFDIEVLFKNLTVDMKDVKPTSLLKDRLREVEGNPDFSNKDVTTSQTPVVPEVLPGTIPSSTHVELQPEINITSRAMSLPNILNQYVAPVRLPTNSTVEADKVALMMPEQVSSLTQLMAAIPRDEICFKINPKLGSIGPQLQYSKIMDLALDKANREIILPVIQRSVTIASRTTKELILKDYALESDNNMITRSAHLMVGTLAGSLAHVTCKEPLRVALYSNLRNLIQNLMSGSETIEQIIHMLVNDNLDLGCAIIEAVATRQAVELIDAEIAQSFSQQRKQREGGGPTYHETFAYAQGPFARVPEALSSKPGHLSASQQRVYEDFVHVWHPHNQNVGATGSGLSGVATVSSTLGVLRAYSPNSTSASSSNLSTVHMGGLTCITQPTELGSEDTVIAQFLSNPAQVGPSESPVLFSGTVGAASTFSPLASNDLPEISAMVPPPSTSADRLGSILPEPLNTGDALERYKQVAQKLEALIANDGKHVEIQSVIAEVPDMLRRCVSRDEAALVVAQKVFKSLYDNASNSAYVSWLLATLIAIRDVCKLVVKELTSWVIYSDEEKKFNIEIIFGLIHSKLLNLGEYNVHLTKLIDGGRNKVATEFAMSLVQTLITQDPVSISELHNVVDAISKVLAAQVNKEESIANETTLIDPNQ

SEQ ID NO: 198197 - protein, 1653 aa, Zea Mays
MIPVSADIPVELRFLLECATGSNFDSIRLELCQLVDSGLDGCILVLRVCLNQMLLNAGEVKNLQLQQKLLSDVFRYCLHKTCFTTSFCEALATIALTDDFLESLTNLLELSVAEKIGVGLALSDSEDSEMKQKGQWFSIAQIEKLCTSHIQSLSNGQIHEIVMFLHQSDGLSKHMDTFNNIISLLKVTERPFFVPVTNGDFDSQANPSRHLEMYFGSTNDDFESLLSEIGKEISMADIVAELGYGFTVDSTHCKEILSIVEPLDDIAISKLLGAVVGTHIGLGEAHNTYATFVSAIRNSHTNDSPQPTKWNTDVLVDSINELAPSTNWVRVIEYLDHEGFNIPDEASFYLLMSIYECACKDPFPLHAVCGSLWENTEGQISFLKHAVCAPSDKFTFAHSSRHLAFQDLAGPSQGNHAWFCLDLLEVLCQLAEVGYTASVRSMLEYPLGHCPELLLVGVSHISTVYNLLQNEVLSCVFPALLKDPTKRNVVNYLWHTNSYLTLQGFVDAHNDPDCLLRIVDVCHDLKILSTVLDSTPFAFSIKLAAASLRKDYSNLEKWLTEKLSLYGKGFVEECVNFLKATMSNTDYVLEGTTQPQSIVRNIYWESSYAFIKVLQSHSGQLLSDAILDEIRKLCVSFESRNPSSAVRELANSDGGSDDIEVEANAYFQHMFSGQISVDSMIQMLGRFKESTDKREVSIFNCMISNLFKEYTFFPKYPDKQLKIAAVLFGSLIKHQLVAHSELGIALRGVRDALRKPVDSKMFMFGTSALEQFMDRVIEWPRYCNYILQISHLRGTHLEMVSVIERALAKISSSQNEPNVGNLLSAEQHVSGSSSMEGIEASESSWLMGTIPSQLGRPLSSPLQHRQQGLLSERSEVSMNSLNKSNLSSQPPLASSSADLTINSKTTAPPSLLASPHQSISVSTSVHVGFLRSRSTPGLPRQPSYTTGFGTALNIETLVAAAEQRDIPIETPPPEVQDKILFMINNISISNMEAKAKEFNEVIQEQHYPWFAQYMVMKRASIEPNFHDLYLKFFDKLNSKSLNKEMLKATYENCKVLLRSDLIKSSSEERSLLKNLGSWLGKFTIGRNQALRAKEIDPKSLIVEAYEKGLMIAVIPFTSKILEPCQSSIAYRPPNPWTIGILSLLAEIYNLPNLKMNLKFDIEVLFKNLTVDMKDVKPTSLLKDRLREVEGNPDFSNKDVTTSQTPVVPEVLPGTIPSSTHVELQPEINITSRAMSLPNILNQYVAPVRLPTNSTVEADKVALMMPEQVSSLTQVLPAQTQSPSPSPFSVNQLMAAIPRDEICFKINPKLGSIGPQLQYSKIMDLALDKANREIILPVIQRSVTIASRTTKELILKDYALESDNNMITRSAHLMVGTLAGSLAHVTCKEPLRVALYSNLRNLIQNLMSGSETIEQIIHMLVNDNLDLGCAIIEAVATRQAVELIDAEIAQSFSQQRKQREGGGPTYHETFAYAQGPFARVPEALSSKPGHLSASQQRVYEDFVHVWHPHNQNVGATGSGLSGVATVSSTLGVLRAYSPNSTSASSSNLSTVHMGGLTCITQPTELGSEDTVIAQFLSNPAQVGPSESPVLFSGTVGAASTFSPLASNDLPEISAMVPPPSTSADRLGSILPEPLNTGDALERYKQVAQKYLVIP

SEQ ID NO: 198198 - protein, 943 aa, Zea Mays
MIPVSADIPVELRFLLECATGSNFDSIRLELCQLVDSGLDGCILVLRVCLNQMLLNAGEVKNLQLQQKLLSDVFRYCLHKTCFTTSFCEALATIALTDDFLESLTNLLELSVAEKIGVGLALSDSEDSEMKQKGSHFCMVIDIASSVPGQWFSIAQIEKLCTSHIQSLSNGQIHEIVMFLHQSDGLSKHMDTFNNIISLLKVTERPFFVPVTNGDFDSQANPSRHLEMYFGSTNDDFESLLSEIGKEISMADIVAELGYGFTVDSTHCKEILSIVEPLDDIAISKLLGAVVGTHIGLGEAHNTYATFVSAIRNSHTNDSPQPTKWNTDVLVDSINELAPSTNWVRVIEYLDHEGFNIPDEASFYLLMSIYECACKDPFPLHAVCGSLWENTEGQISFLKHAVCAPSDKFTFAHSSRHLAFQDLAGPSQGNHAWFCLDLLEVLCQLAEVGYTASVRSMLEYPLGHCPELLLVGVSHISTVYNLLQNEVLSCVFPALLKDPTKRNVVNYLWHTNSYLTLQGFVDAHNDPDCLLRIVDVCHDLKILSTVLDSTPFAFSIKLAAASLRKDYSNLEKWLTEKLSLYGKGFVEECVNFLKATMSNTDYVLEGTTQPQSIVRNIYWESSYAFIKSHSGQLLSDAILDEIRKLCVSFESRNPSSAVRELANSDGGSDDIEVEANAYFQHMFSGQISVDSMIQMLGRFKESTDKREVSIFNCMISNLFKEYTFFPKYPDKQLKIAAVLFGSLIKHQLVAHSELGIALRGVRDALRKPVDSKMFMFGTSALEQFMDRVIEWPRYCNYILQISHLRGTHLEMVSVIERALAKISSSQNEPNVGNLLSAEQHVSGSSSMEGIEASESSWLMGTIPSQLGRPLSSPLQHRQQGLLSERSEVSMNSLNKSNLSSQPPLASSSADLTINSKLHCFIEYAGDLRINILRTKRSNVDQVQ

SEQ ID NO: 198199 - protein, 315 aa, Zea Mays
MVAAGRHAPVPPRYLRPDLAADVVVADDATTIPIIDFQRLLLVDPEESARLHAACQDWGFFQKMCTQLINHGVPDDVMEAMKASIQSFFALPAEAKQQYRQQAGQLEGYGQLFVVSEDQKLDWADVLYLNTQPPEHRNLSFWPAGESFRQTLDTYSAAVKHVADRLLGAMYMNLGLQLSIMDMDPERGAGIQSVNQLQGLQIKRPPDGGGAWAWLPVTPLQGAFVVNVGDVLEIFTNGRYRSVEHRALVNAHTERLSIAAFHSPSIHATIGPLPELLGDQEVPKYKTLDHQSFITLFFSAKLQGKSFLERMKKLS

SEQ ID NO: 198200 - protein, 221 aa, Zea Mays
MGLGIHIIHQPPPPSLSLSQRYPPTHPSVHPMRWCRWRAGRSPPPYLRATSSASISSGAPTPLASSPSSRNASPPAVATSTASTSSSPTTNPSSTPAVSLPTIQGSGRVMSSTRISSISPAASMRKPPPYEFPILTPNTTSPSSHQSRTTACSICSIDGKKAGFQYTLIVSLEAWNPIPLLTHRTCQQKRERDLGIDPGYRFCCAGKIHADTLRKPVKSIW

SEQ ID NO: 198201 - protein, 197 aa, Zea Mays
MGLGIHIIHQPPPPSLSLSQRYPPTHPSVHPMRWCRWRAGRSPPPYLRATSSASISSGAPTPLASSPSSRNASPPAVATSTASTSSSPTTNPSSTPAGIEFTYNPRLWPRHELHKDFLNLSRCFNAQTSTVRVPDLDPKYNISILASKQDHCLFDLLYRWQEGRLPVHINCVIRGMESHTTTYPPHLPTKERKRSWN

SEQ ID NO: 198202 - protein, 220 aa, Zea Mays
MAEDATSSHPSRYVKLTKDQDAPAEDIRPGELNQPVHVPQQLEGRRCSECGQVLPESYEPPADEPWTTGIFGCTDDPETCRTGLFCPCVLFGRNVEAVREDIPWTTPCVCHAVFVEGGITLAILTAIFHGVDPRTSFLIGEGLVFSWWLCATYTGIFRQGLQRKYHLKEHRERTGRLAENNAVPMTVVNPPPVQEMSMLEEVEEKGAEKSEHDDVEVIPL

SEQ ID NO: 198203 - protein, 785 aa, Zea Mays
MGLGKTLQAISLLSYLKIHRIAPGPFLVLCPLSVTDGWLSEFSKFCPSFRVMQYVGGKLHRRDLRRTIYEDVQKASTSSRSFELPFDVLMTTYDIALMDQDFLSQIPWHYAVIDEAQRLKNPSSVLYNVLEQRFIMPRRLLLTGTPIQNNLSELWALMHFCLPSIFGKLDEFLSTFKEAGESLTGDEANKAKGQFKIIKHVLKAFMLRRTKFLLIESGILALPPLTELTVMVPLTQLQKKLYMSVLRKELPTLISFARGSSRHQSLQNIVIQLRKVCSHPYLFSGIEPEPYVEGEHLIQASGKLIVLDLILKKLHECGHRVLLFAQMTQTLDILQDFLELRNYTYERLDGSVRAEERFAAIRNFSSQSTKGLIRDDNRSEAFVFMISTRAGGVGLNLIGADTVIFYEQDWNPQADKQALQRAHRIGQLNHVLSINLVSQRTIEEVIMRRADRKLKLSHNIIGEEDGTDGKGGDPGIEASDMRSIIFGLHLFDPADTATETIDEDITAETFSVEKLAKLKTMSEKVVMMRSHESSEKDERAFEINPNMTDDSGTVIRRASDSIRIDPGLNEAAYLSWVKKFKEASISSEDATVGFGRQRAAPEEKLLKHDVNKQKIEEKRLAKWESLGYQTLAVKEPDITASQNISDAGSIQFVYGDCTNPSKVCPAKPAIIFSCIDNSGTWGHGGMFDALTSLSTCIPDAYHRASEFDDLHMGDLHLIQLDAAIHMPRIGYQGGSQRSEWYTIERLLRKHSSLHGIDIFVYYFQRRQTDCQIVTQVGHADDSTQA

SEQ ID NO: 198204 - protein, 829 aa, Zea Mays
MGLGKTLQAISLLSYLKIHRIAPGPFHGWLSEFSKFCPSFRVMQYVGGKLHRRDLRRTIYEDVQKASTSSRSFELPFDVLMTTYDIALMDQDFLSQIPWHYAVIDEAQRLKNPSSVLYNVLEQRFIMPRRLLLTGTPIQNNLSELWALMHFCLPSIFGKLDEFLSTFKEAGESLTGDEANKAKGQFKIIKHVLKAFMLRRTKFLLIESGILALPPLTELTVMVPLTQLQKKLYMSVLRKELPTLISFARGSSRHQSLQNIVIQLRKVCSHPYLFSGIEPEPYVEGEHLIQASGKLIVLDLILKKLHECGHRVLLFAQMTQTLDILQDFLELRNYTYERLDGSVRAEERFAAIRNFSSQSTKGLIRDDNRSEAFVFMISTRAGGVGLNLIGADTVIFYEQDWNPQADKQALQRAHRIGQLNHVLSINLVSQRTIEEVIMRRADRKLKLSHNIIGEEDGTDGKGGDPGIEASDMRSIIFGLHLFDPADTATETIDEDITAETFSVEKLAKLKTMSEKVVMMRSHESSEKDERAFEINPNMTDDSGTVIRRASDSIRIDPGLNEAAYLSWVKKFKEASISSEDATVGFGRQRAAPEEKLLKHDVNKQKIEEKRLAKWESLGYQTLAVKEPDITASQNISDAGSIQFVYGDCTNPSKVCPAKPAIIFSCIDNSGTWGHGGMFDALTSLSTCIPDAYHRASEFDDLHMGDLHLIQLDEGNCTRSLDAPLWVALAIVQSYNPRRKVPRSEISMSDLELCISKAAFSAAQHSAAIHMPRIGYQGGSQRSEWYTIERLLRKHSSLHGIDIFVYYFQRRQTDCQIVTQVGHADDSTQA

SEQ ID NO: 198205 - protein, 838 aa, Zea Mays
MGLGKTLQAISLLSYLKIHRIAPGPFLVLCPLSVTDGWLSEFSKFCPSFRVMQYVGGKLHRRDLRRTIYEDVQKASTSSRSFELPFDVLMTTYDIALMDQDFLSQIPWHYAVIDEAQRLKNPSSVLYNVLEQRFIMPRRLLLTGTPIQNNLSELWALMHFCLPSIFGKLDEFLSTFKEAGESLTGDEANKAKGQFKIIKHVLKAFMLRRTKFLLIESGILALPPLTELTVMVPLTQLQKKLYMSVLRKELPTLISFARGSSRHQSLQNIVIQLRKVCSHPYLFSGIEPEPYVEGEHLIQASGKLIVLDLILKKLHECGHRVLLFAQMTQTLDILQDFLELRNYTYERLDGSVRAEERFAAIRNFSSQSTKGLIRDDNRSEAFVFMISTRAGGVGLNLIGADTVIFYEQDWNPQADKQALQRAHRIGQLNHVLSINLVSQRTIEEVIMRRADRKLKLSHNIIGEEDGTDGKGGDPGIEASDMRSIIFGLHLFDPADTATETIDEDITAETFSVEKLAKLKTMSEKVVMMRSHESSEKDERAFEINPNMTDDSGTVIRRASDSIRIDPGLNEAAYLSWVKKFKEASISSEDATVGFGRQRAAPEEKLLKHDVNKQKIEEKRLAKWESLGYQTLAVKEPDITASQNISDAGSIQFVYGDCTNPSKVCPAKPAIIFSCIDNSGTWGHGGMFDALTSLSTCIPDAYHRASEFDDLHMGDLHLIQLDEGNCTRSLDAPLWVALAIVQSYNPRRKVPRSEISMSDLELCISKAAFSAAQHSAAIHMPRIGYQGGSQRSEWYTIERLLRKHSSLHGIDIFVYYFQRRQTDCQIVTQVGHADDSTQA

SEQ ID NO: 198206 - protein, 381 aa, Zea Mays
MRRADRKLKLSHNIIGEEDGTDGKGGDPGIEASDMRSIIFGLHLFDPADTATETIDEDITAETFSVEKLAKLKTMSEKVVMMRSHESSEKDERAFEINPNMTDDSGTVIRRASDSIRIDPGLNEAAYLSWVKKFKEASISSEDATVGFGRQRAAPEEKLLKHDVNKQKIEEKRLAKWESLGYQTLAVKEPDITASQNISDAGSIQFVYGDCTNPSKVCPAKPAIIFSCIDNSGTWGHGGMFDALTSLSTCIPDAYHRASEFDDLHMGDLHLIQLDEGNCTRSLDAPLWVALAIVQSYNPRRKVPRSEISMSDLELCISKAAFSAAQHSGGSQRSEWYTIERLLRKHSSLHGIDIFVYYFQRRQTDCQIVTQVGHADDSTQA

SEQ ID NO: 198207 - protein, 787 aa, Zea Mays
MQYVGGKLHRRDLRRTIYEDVQKASTSSRSFELPFDVLMTTYDIALMDQDFLSQIPWHYAVIDEAQRLKNPSSVLYNVLEQRFIMPRRLLLTGTPIQNNLSELWALMHFCLPSIFGKLDEFLSTFKEAGESLTGDEANKAKGQFKIIKHVLKAFMLRRTKFLLIESGILALPPLTELTVMVPLTQLQKKLYMSVLRKELPTLISFARGSSRHQSLQNIVIQLRKVCSHPYLFSGIEPEPYVEGEHLIQASGKLIVLDLILKKLHECGHRVLLFAQMTQTLDILQDFLELRNYTYERLDGSVRAEERFAAIRNFSSQSTKGLIRDDNRSEAFVFMISTRAGGVGLNLIGADTVIFYEQDWNPQADKQALQRAHRIGQLNHVLSINLVSQRTIEEVIMRRADRKLKLSHNIIGEEDGTDGKGGDPGIEASDMRSIIFGLHLFDPADTATETIDEDITAETFSVEKLAKLKTMSEKVVMMRSHESSEKDERAFEINPNMTDDSGTVIRRASDSIRIDPGLNEAAYLSWVKKFKEASISSEDATVGFGRQRAAPEEKLLKHDVNKQKIEEKRLAKWESLGYQTLAVKEPDITASQNISDAGSIQFVYGDCTNPSKVCPAKPAIIFSCIDNSGTWGHGGMFDALTSLSTCIPDAYHRASEFDDLHMGDLHLIQLDEGNCTRSLDAPLWVALAIVQSYNPRRKVPRSEISMSDLELCISKAAFSAAQHSAAIHMPRIGYQGGSQRSEWYTIERLLRKHSSLHGIDIFVYYFQRRQTDCQIVTQVGHADDSTQA

SEQ ID NO: 198208 - protein, 614 aa, Zea Mays
MVLCFRMVPLTQLQKKLYMSVLRKELPTLISFARGSSRHQSLQNIVIQLRKVCSHPYLFSGIEPEPYVEGEHLIQASGKLIVLDLILKKLHECGHRVLLFAQMTQTLDILQDFLELRNYTYERLDGSVRAEERFAAIRNFSSQSTKGLIRDDNRSEAFVFMISTRAGGVGLNLIGADTVIFYEQDWNPQADKQALQRAHRIGQLNHVLSINLVSQRTIEEVIMRRADRKLKLSHNIIGEEDGTDGKGGDPGIEASDMRSIIFGLHLFDPADTATETIDEDITAETFSVEKLAKLKTMSEKVVMMRSHESSEKDERAFEINPNMTDDSGTVIRRASDSIRIDPGLNEAAYLSWVKKFKEASISSEDATVGFGRQRAAPEEKLLKHDVNKQKIEEKRLAKWESLGYQTLAVKEPDITASQNISDAGSIQFVYGDCTNPSKVCPAKPAIIFSCIDNSGTWGHGGMFDALTSLSTCIPDAYHRASEFDDLHMGDLHLIQLDEGNCTRSLDAPLWVALAIVQSYNPRRKVPRSEISMSDLELCISKAAFSAAQHSAAIHMPRIGYQGGSQRSEWYTIERLLRKHSSLHGIDIFVYYFQRRQTDCQIVTQVGHADDSTQA

SEQ ID NO: 198209 - protein, 776 aa, Zea Mays
MQYVGGKLHRRDLRRTIYEDELPFDVLMTTYDIALMDQDFLSQIPWHYAVIDEAQRLKNPSSVLYNVLEQRFIMPRRLLLTGTPIQNNLSELWALMHFCLPSIFGKLDEFLSTFKEAGESLTGDEANKAKGQFKIIKHVLKAFMLRRTKFLLIESGILALPPLTELTVMVPLTQLQKKLYMSVLRKELPTLISFARGSSRHQSLQNIVIQLRKVCSHPYLFSGIEPEPYVEGEHLIQASGKLIVLDLILKKLHECGHRVLLFAQMTQTLDILQDFLELRNYTYERLDGSVRAEERFAAIRNFSSQSTKGLIRDDNRSEAFVFMISTRAGGVGLNLIGADTVIFYEQDWNPQADKQALQRAHRIGQLNHVLSINLVSQRTIEEVIMRRADRKLKLSHNIIGEEDGTDGKGGDPGIEASDMRSIIFGLHLFDPADTATETIDEDITAETFSVEKLAKLKTMSEKVVMMRSHESSEKDERAFEINPNMTDDSGTVIRRASDSIRIDPGLNEAAYLSWVKKFKEASISSEDATVGFGRQRAAPEEKLLKHDVNKQKIEEKRLAKWESLGYQTLAVKEPDITASQNISDAGSIQFVYGDCTNPSKVCPAKPAIIFSCIDNSGTWGHGGMFDALTSLSTCIPDAYHRASEFDDLHMGDLHLIQLDEGNCTRSLDAPLWVALAIVQSYNPRRKVPRSEISMSDLELCISKAAFSAAQHSAAIHMPRIGYQGGSQRSEWYTIERLLRKHSSLHGIDIFVYYFQRRQTDCQIVTQVGHADDSTQA

SEQ ID NO: 198210 - protein, 845 aa, Zea Mays
MASPGSSAAIASASTSYSMGLGKTLQAISLLSYLKIHRIAPGPFLVLCPLSVTDGWLSEFSKFCPSFRVMQYVGGKLHRRDLRRTIYEDELPFDVLMTTYDIALMDQDFLSQIPWHYAVIDEAQRLKNPSSVLYNVLEQRFIMPRRLLLTGTPIQNNLSELWALMHFCLPSIFGKLDEFLSTFKEAGESLTGDEANKAKGQFKIIKHVLKAFMLRRTKFLLIESGILALPPLTELTVMVPLTQLQKKLYMSVLRKELPTLISFARGSSRHQSLQNIVIQLRKVCSHPYLFSGIEPEPYVEGEHLIQASGKLIVLDLILKKLHECGHRVLLFAQMTQTLDILQDFLELRNYTYERLDGSVRAEERFAAIRNFSSQSTKGLIRDDNRSEAFVFMISTRAGGVGLNLIGADTVIFYEQDWNPQADKQALQRAHRIGQLNHVLSINLVSQRTIEEVIMRRADRKLKLSHNIIGEEDGTDGKGGDPGIEASDMRSIIFGLHLFDPADTATETIDEDITAETFSVEKLAKLKTMSEKVVMMRSHESSEKDERAFEINPNMTDDSGTVIRRASDSIRIDPGLNEAAYLSWVKKFKEASISSEDATVGFGRQRAAPEEKLLKHDVNKQKIEEKRLAKWESLGYQTLAVKEPDITASQNISDAGSIQFVYGDCTNPSKVCPAKPAIIFSCIDNSGTWGHGGMFDALTSLSTCIPDAYHRASEFDDLHMGDLHLIQLDEGNCTRSLDAPLWVALAIVQSYNPRRKVPRSEISMSDLELCISKAAFSAAQHSAAIHMPRIGYQGGSQRSEWYTIERLLRKHSSLHGIDIFVYYFQRRQTDCQIVTQVGHADDSTQA

SEQ ID NO: 198211 - protein, 852 aa, Zea Mays
MASPGSSAAIASASTSYSMGLGKTLQAISLLSYLKIHRIAPGPFLVLCPLSVTDGWLSEFSKFCPSFRVMQYVGGKLHRRDLRRTIYEDVQKASTSSRSFELPFDVLMTTYDIALMDQDFLSQIPWHYAVIDEAQRLKNPSSVLYNVLEQRFIMPRRLLLTGTPIQNNLSELWALMHFCLPSIFGKLDEFLSTFKEAGESLTGDEANKAKGQFKIIKHVLKAFMLRRTKFLLIESGILALPPLTELTVMVPLTQLQKKLYMSVLRKELPTLISFARGSSRHQSLQNIVIQLRKVCSHPYLFSGIEPEPYVEGEHLIQASGKLIVLDLILKKLHECGHRVLLFAQMTQTLDILQDFLELRNYTYERLDGSVRAEERFAAIRNFSSQSTKGLIRDDNRSEAFVFMISTRAGGVGLNLIGADTVIFYEQDWNPQADKQALQRAHRIGQLNHVLSINLVSQRTIEEVIMRRADRKLKLSHNIIGEEDGTDGKGGDPGIEASDMRSIIFGLHLFDPADTATETIDEDITAETFSVEKLAKLKTMSEKVVMMRSHESSEKDERAFEINPNMTDDSGTVIRRASDSIRIDPGLNEAAYLSWVKKFKEASISSEDATVGFGRQRAAPEEKLLKHDVNKQKIEEKRLAKWESLGYQTLAVKEPDITASQNISDAGSIQFVYGDCTNPSKVCPAKPAIIFSCIDNSGTWGHGGMFDALTSLSTCIPDAYHRASEFDDLHMGDLHLIQLDEGNCTRSLDAPLWVALAIVQSYNPRRKVPRSEISMSDLELCISKAAFSAAQHSGIVLVWFLNIELFSNLKHALEYRNATHLFSNACQLSKCMLFQVICTHQKILFSLNVYLIS

SEQ ID NO: 198212 - protein, 169 aa, Zea Mays
MVKGIDREVLLPKDGHQEVAEVALQLGKYCIDDPVKSPPGGRRMVIRTAKRMGGCVLLGANLAGRALPDALGRLVFKTDEMVQAVEAPDVVRNKVSFSVFGLEGAVSLKGKLNVLDSKWIQVVFEAPELKVGSLGFQYGGESEVKLEKGRRWEKTTARGRRIVIRSLND

SEQ ID NO: 198213 - protein, 463 aa, Zea Mays
MAPVHKKRRRRTWGGDSGSKRPKFEQDGAGDIVIEPHLTEAKPVRIDQESSSSSNRDAEASTSTSMKPVKTEEPVADLLPKELNDMTISDDKADDHNDKEGEGVTLDGNGAETGQIIVTTIGGHNGKPKQKVSYMAERVVGTGSFGIVFQAKCLETGETVAIKKVLQDKRYKNRELQTMQLLDHPNVVQLKHHFFSTTQRGEVYLNLVLEFVSETVYRVAKYYNRMNQRVPILYVKLYAYQMCRALAYIHRVVGVCHRDIKPQNLLVNPHTHQLKICDFGSAKKLVPGEPNISYICSRYYRAPELIFGATEYTTAIDIWSVGCVVAELLIGQPLFPGESGVDQLVEIIKILGTPTREEIRCMNPNYSEFKFPQIKAHPWHKLFGKRMPPEAVDLVSRLLQYSPNLRCTAVDACAHPFFDELRDPKVCLPSGRPLPALFDFTAAELEGLPIELVHRIVPEHMRK

SEQ ID NO: 198214 - protein, 361 aa, Zea Mays
MPRRGVVGGIDYGFTGEVKKIDVSRIRERLDRDSIVVVSNMGYSSAGEVLNCNTYEVATACALSIEADKLICIVDGQIFDEHGRVNRFMSIEEADMLIRTRAKQSEIAANYVKVVDEEDINHVRCLPMKHGTEHGFAIGGEERLSRSNGYLSELAAAAYVCHGGVQRVHIIDGTVGGALLLELFTRDGVGTMIARDMYEGTRMAREEDLSGIRKIIRPLEESGVLVRRTDQELLEALTSFIVVERDGSIIACAALFPFLEDKSGEVAAIAVSEECRGQGQGDKLLDYVEKKALSLGLEKLFLLTTRTADWFVRRGFKECSFDSLPLVRRKRIDLSRGSKYYMKWLQAAEVGHMAADGFAMR

SEQ ID NO: 198215 - protein, 462 aa, Zea Mays
MIRQDISLLHGLGIKFVLVPGTHVQIDKLLAERGKKAKYAGRYRITDSDSLDAAMEAAGRIRLTIEAKLSPGPPMLNLRRHGVNGRWHEISDNVASGNFLGAKRRGVVGGIDYGFTGEVKKIDVSRIRERLDRDSIVVVSNMGYSSAGEVLNCNTYEVATACALSIEADKLICIVDGQIFDEHGRVNRFMSIEEADMLIRTRAKQSEIAANYVKVVDEEDINHVRCLPMKHGTEHGFAIGGEERLSRSNGYLSELAAAAYVCHGGVQRVHIIDGTVGGALLLELFTRDGVGTMIARDMYEGTRMAREEDLSGIRKIIRPLEESGVLVRRTDQELLEALTSFIVVERDGSIIACAALFPFLEDKSGEVAAIAVSEECRGQGQGDKLLDYVEKKALSLGLEKLFLLTTRTADWFVRRGFKECSFDSLPLVRRKRIDLSRGSKYYMKWLQAAEVGHMAADGFAMR

SEQ ID NO: 198216 - protein, 331 aa, Zea Mays
MVLMAVGMKSLIMLQVEISLVLSTYEVATACALSIEADKLICIVDGQIFDEHGRVNRFMSIEEADMLIRTRAKQSEIAANYVKVVDEEDINHVRCLPMKHGTEHGFAIGGEERLSRSNGYLSELAAAAYVCHGGVQRVHIIDGTVGGALLLELFTRDGVGTMIARDMYEGTRMAREEDLSGIRKIIRPLEESGVLVRRTDQELLEALTSFIVVERDGSIIACAALFPFLEDKSGEVAAIAVSEECRGQGQGDKLLDYVEKKALSLGLEKLFLLTTRTADWFVRRGFKECSFDSLPLVRRKRIDLSRGSKYYMKWLQAAEVGHMAADGFAMR

SEQ ID NO: 198217 - protein, 590 aa, Zea Mays
MAASLAAAASRLAATGGELSWSARPCPGSLVASFPSAGRLRRPASGVRCGGGVLPAAAGTGAEAEEGGRFVGWFREAWPYIRGHRGSTFVVVISGEVIAGPHLDGILQDISLLHGLGIKFVLVPGTHVQIDKLLAERGKKAKYAGRYRITDSDSLDAAMEAAGRIRLTIEAKLSPGPPMLNLRRHGVNGRWHEISDNVASGNFLGAKRRGVVGGIDYGFTGEVKKIDVSRIRERLDRDSIVVVSNMGYSSAGEVLNCNTYEVATACALSIEADKLICIVDGQIFDEHGRVNRFMSIEEADMLIRTRAKQSEIAANYVKVVDEEDINHVRCLPMKHGTEHGMNGRDHINGYTASFRNGVGFNDGNGLSGEQGFAIGGEERLSRSNGYLSELAAAAYVCHGGVQRVHIIDGTVGGALLLELFTRDGVGTMIARDMYEGTRMAREEDLSGIRKIIRPLEESGVLVRRTDQELLEALTSFIVVERDGSIIACAALFPFLEDKSGEVAAIAVSEECRGQDYVEKKALSLGLEKLFLLTTRTADWFVRRGFKECSFDSLPLVRRKRIDLSRGSKYYMKWLQAAEVGHMAADGFAMR

SEQ ID NO: 198218 - protein, 538 aa, Zea Mays
MAASLAAAASRLAATGGELSWSARPCPGSLVASFPSAGRLRRPASGVRCGGGVLPAAAGTGAEAEEGGRFVGWFREAWPYIRGHRGSTFVVVISGEVIAGPHLDGILQDISLLHGLGIKFVLVPGTHVQIDKLLAERGKKAKYAGRYRITDSDSLDAAMEAAGRIRLTIEAKLSPGPPMLNLRRHGVNGRWHEISDNVASGNFLGAKRRGVVGGIDYGFTGEVKKIDVSRIRERLDRDSIVVVSNMGYSSAGEVLNCNTYEVATACALSIEADKLICIVDGQIFDEHGRVNRFMSIEEADMLIRTRAKQSEIAANYVKVVDEEDINHVRCLPMKHGTEHGMNGRDHINGYTASFRNGVGFNDGNGLSGEQGFAIGGEERLSRSNGYLSELAAAAYVCHGGVQRVHIIDGTVGGALLLELFTRDGVGTMIARDMYEGTRMAREEDLSGIRKIIRPLEESGVLVRRTDQELLEALTSFIVVERDGSIIACAALFPFLEDKSGEVAAIAVSEECRGQGQGDKLLGLFVAALRSARSIPCLW

SEQ ID NO: 198219 - protein, 234 aa, Zea Mays
MDEKVDLVEVLTRQVENLQRERDELRKDIEQLCMQQAGPGYVSVATRMLTQRTAALEQDIENLQKKLGGCLRENQNLQEELAEAYRIKSQLAELHGAALSKNKDLEKQVRFFQSSVAQAFAERDSSLMECEKAKEREEAVSRKFADFEERMREYQSEIDEQKHLNDDLQRELTELKAHTELSLKVILKFYDLRCRDSGCSSSLTIEEKCSILLGDSADNWSFSSDGGTSTLKHL

SEQ ID NO: 198220 - protein, 298 aa, Zea Mays
MGLEIEQHLQRNARILEKRQALYDGFLRNGLSELQKFYTCQKAEIMKILEEESLRLMKVVAEIQDKLTEICINTEVSDHPADEIQCCDSSCKDVHVTKDISPSTCRKSDYPADLNSVSFDESKALAQALQEKMEALMLFSQEQERYLLEKQRDLIVIEELQKNLSQVKDEKVKVLMELTKLKEQYLLLKGSAVKEGHDTGDSSKLIPGHDQQGMLKTMLKRTSLRHWMRKESNTIGHGSSDGNDHTVCKEHSVDVARLRVENAMLLEGVGTVEHLTSSVHRLHIVLLKAGQDFFWLYY

SEQ ID NO: 198221 - protein, 440 aa, Zea Mays
MDEKVDLVEVLTRQVENLQRERDELRKDIEQLCMQQAGPGYVSVATRMLTQRTAALEQDIENLQKKLGGCLRENQNLQEELAEAYRIKSQLAELHGAALSKNKDLEKQVRFFQSSVAQAFAERDSSLMECEKAKEREEAVSRKFADFEERMREYQSEIDEQKHLNDDLQRELTELKAHTELSLKVILKFYDLRCRDSGCSSSLTIEEKCSILLGDSADNWSFSSDGGTSTLKYIASLEEEKESLKAKISKLQSNLRMGLEIEQHLQRNARILEKRQALYDGFLRNGLSELQKFYTCQKAEIMKILEEESLRLMKVVAEIQDKLTEICINTEVSDHPADEIQCCDSSCKDVHVTKDISPSTCRKSDYPADLNSVSFDESKALAQALQEKMEALMLFSQEQERYLLEKQRDLIVIEELQKNLSQVVPLEFLLVIIFQSQRTI

SEQ ID NO: 198222 - protein, 359 aa, Zea Mays
MGLEIEQHLQRNARILEKRQALYDGFLRNGLSELQKFYTCQKAEIMKILEEESLRLMKVVAEIQDKLTEICINTEVSDHPADEIQCCDSSCKDVHVTKDISPSTCRKMEALMLFSQEQERYLLEKQRDLIVIEELQKNLSQVKDEKVKVLMELTKLKEQYLLLKGSAVKEGHDTGDSSKLIPGHDQQGMLKTMLKRTSLRHWMRKESNTIGHGSSDGNDHTVCKEHSVDVARLRVENAMLLEGVGTVEHLTSSVHRLHIVLLKAYDDIKSADPLESTFEALNSLITEANLMKTALNVVLPVSWSGDSSDAIKYEAMCDPSDSPKSKSGKVDPLSSAGMEMVELLILAAEILKESFLVKK

SEQ ID NO: 198223 - protein, 277 aa, Zea Mays
MDQAADSSELLRRIEELQREKDEKQNSLELLLRRIEGLQYEMDEKVDLVEVLTRQVENLQRERDELRKDIEQLCMQQAGPGYVSVATRMLTQRTAALEQDIENLQKKLGGCLRENQNLQEELAEAYRIKSQLAELHGAALSKNKDLEKQVRFFQSSVAQAFAERDSSLMECEKAKEREEAVSRKFADFEERMREYQSEIDEQKHLNDDLQRELTELKAHTELSLKVILKFYDLRCRDSGCSSSLTIEEKCSILLGDSADNWSFSSDGGTSTLKYIAS

SEQ ID NO: 198224 - protein, 295 aa, Zea Mays
MDQAADSSELLRRIEELQREKDEKQNSLELLLRRIEGLQYEMDEKVDLVEVLTRQVENLQRERDELRKDIEQLCMQQAGPGYVSVATRMLTQRTAALEQDIENLQKKLGGCLRENQNLQEELAEAYRIKSQLAELHGAALSKNKDLEKQVRFFQSSVAQAFAERDSSLMECEKAKEREEAVSRKFADFEERMREYQSEIDEQKHLNDDLQRELTELKAHTELSLKVILKFYDLRCRDSGCSSSLTIEEKCSILLGDSADNWSFSSDGGTSTLKYIDLCSYALFPVSHSTYCSIHG

SEQ ID NO: 198225 - protein, 235 aa, Zea Mays
MDQAADSSELLRRIEELQREKDEKQNSLELLLRRIEGLQYEMDEKVDLVEVLTRQVENLQRERDELRKDIEQLCMQQAGPGYVSVATRMLTQRTAALEQDIENLQKKLGGCLRENQNLQEELAEAYRIKSQLAELHGAALSKNKDLEKQVRFFQSSVAQAFAERDSSLMECEKAKEREEAVSRKFADFEERMREYQSEIDEQKHLNDDLQRELTELKAHTELSLKRLWMFFKPYY

SEQ ID NO: 198226 - protein, 681 aa, Zea Mays
MDQAADSSELLRRIEELQREKDEKQNSLELLLRRIEGLQYEMDEKVDLVEVLTRQVENLQRERDELRKDIEQLCMQQAGPGYVSVATRMLTQRTAALEQDIENLQKKLGGCLRENQNLQEELAEAYRIKSQLAELHGAALSKNKDLEKQVRFFQSSVAQAFAERDSSLMECEKAKEREEAVSRKFADFEERMREYQSEIDEQKHLNDDLQRELTELKAHTELSLKVILKFYDLRCRDSGCSSSLTIEEKCSILLGDSADNWSFSSDGGTSTLKYIASLEEEKESLKAKISKLQSNLRMGLEIEQHLQRNARILEKRQALYDGFLRNGLSELQKFYTCQKAEIMKILEEESLRLMKVVAEIQDKLTEICINTEVSDHPADEIQCCDSSCKDVHVTKDISPSTCRKSDYPADLNSVSFDESKALAQALQEKMEALMLFSQEQERYLLEKQRDLIVIEELQKNLSQVKDEKVKVLMELTKLKEQYLLLKGSAVKEGHDTGDSSKLIPGHDQQGMLKTMLKRTSLRHWMRKESNTIGHGSSDGNDHTVCKEHSVDVARLRVENAMLLEGVGTVEHLTSSVHRLHIVLLKAYDDIKSADPLESTFEALNSLITEANLMKTALNVVLPVSWSGDSSDAIKYEAMCDPSDSPKSKSGKVDPLSSAGMEMVELLILAAEILKESFLVKK

SEQ ID NO: 198227 - protein, 299 aa, Zea Mays
MDQAADSSELLRRIEELQREKDEKQNSLELLLRRIEGLQYEMDEKVDLVEVLTRQVENLQRERDELRKDIEQLCMQQAGPGYVSVATRMLTQRTAALEQDIENLQKKLGGCLRENQNLQEELAEAYRIKSQLAELHGAALSKNKDLEKQVRFFQSSVAQAFAERDSSLMECEKAKEREEAVSRKFADFEERMREYQSEIDEQKHLNDDLQRELTELKAHTELSLKVILKFYDLRCRDSGCSSSLTIEEKCSILLGDSADNWSFSSDGGTSTLKTYAVMLCSQFLIQHTAQYMDRKHPYY

SEQ ID NO: 198228 - protein, 69 aa, Zea Mays
MANCWCAAMPCLIRSYILQRLCWRSIQNMHSRHHSLPPKPRRHLALLEQGSCHGHHSLIPALNHTILLR

SEQ ID NO: 198229 - protein, 175 aa, Zea Mays
MATGSVNICSSRLSTALSLPVTSSRVSASKSRNCSMATTICEYLAGTVRRNFSTTRSSVMSLSPWMTSCWCRVDNRTAKSSTCSPGLTLMFSQSRRRRCSVARRTLSTPMRVAAMASHASFAVALSSSGRPISLGTAPTITSSARLSSRNWTGPPSMASQRSRACILSFMVWLHS

SEQ ID NO: 198230 - protein, 79 aa, Zea Mays
MFSSLVVSLLLCMLRISIFSSKFSIASWELANLALSFSFFLIRPSSVAVDGALDSNSSILVDSSQFRFAKVSNFSSNPL

SEQ ID NO: 198231 - protein, 94 aa, Zea Mays
MLFISVLQMLAALAADVSLLLFPNQNSISFFLIYLYPNLSSTPDSPWRARELRSSQAQSKMESQSDITWSPIYSDCFEHCICTSKTRTALLYYT

SEQ ID NO: 198232 - protein, 83 aa, Zea Mays
MAAFCLALRRSAACMWPARRPSRSRSALRSPSPSLASSETVSSLSLARWLNVVHRMQGELTTMLVASPAIWMRGEFSRFNLLH

SEQ ID NO: 198233 - protein, 179 aa, Zea Mays
MMALEVAAGMERQRARMMVRPSGGAARDGRPRGPLITPTPTPETTGANKQSNKRRAPFVRLPEPRVALASCCHRPGAWRSSTSRGWVGLGSSRPSPPRQRAQLSLAFGRHPPAFAFAAPALLGGGGVTSRGPGPAGAQSRLHAGPPPQFGAGWLARPGAAMARRRCCARALVAGLDRRG

SEQ ID NO: 198234 - protein, 135 aa, Zea Mays
MTQPDTLLVDNHSSQTRTKGQINLVFAISPLISALSTPPHEHISAEEERRGETHSNDQKPDKSQNRSSRVSKAWSTKKWATIQHDQAKEASPQDEAKEGLNTTSQQSKPPSEHKISIKDEIKASSSRKRQIAQYN

SEQ ID NO: 198235 - protein, 54 aa, Zea Mays
MKWEKRRGESSIYRQLSWSSGPVQPPPWASSAGSDQCGQRTRNSRGKMQKNSNF

SEQ ID NO: 198236 - protein, 56 aa, Zea Mays
MGRLGRQERRESSAVPIYREKEGRRRVCQGGHEVPQASNAVNMSVTNGEIIGIRNG

SEQ ID NO: 198237 - protein, 119 aa, Zea Mays
MPYLVPSEIVELLLHRHHPIRILQCFLYPMWLNIGNKRVMFTKMCNTRSSGYPLMNVAEDGVDRVISLDCLVDSWVWQSFWFFILLVLIICISPLIIAVILRWLISLIFSFIILSLIPI

SEQ ID NO: 198238 - protein, 104 aa, Zea Mays
MIRARVRLPRVNSPNFALGITGRLQNVTLVILRHGSLALYKVRQSFRRGTKFDIVPLLEANAILDAIASPTIEHASSKFKFFIFQVMLINFCIKLSYVIILFLN

SEQ ID NO: 198239 - protein, 136 aa, Zea Mays
MITKKHRSKGGERNTHKTQSKSTITHTKPQLELTTQLEEFSTQIVLKSQSQRIKCARMESWCLGMIKECLGVSFMRLGASFIAPRQLGAVGGNLGRQFLPSVGWRTEQSGAPPDRYCSVSGADRLPKMAQPTIAEL

SEQ ID NO: 198240 - protein, 64 aa, Zea Mays
MELNAICHMYCIAGVVITFVLLLNWVDIYLYLVIANKILTNFKSNAQLQPSPLVSLTLHISSRL

SEQ ID NO: 198241 - protein, 69 aa, Zea Mays
MDAVGLELLPSTSIIFDKEKNSCMKDETALETCKLDAASILAAGSVAIVSRELGAVIYDAKLSIDAIVA

SEQ ID NO: 198242 - protein, 65 aa, Zea Mays
MHSTDIGLKPPAHSKYSIDRISFLEKNKILNKQFYFWEVESTIGRQEKDDDNSCIQKIIHRWPFL

SEQ ID NO: 198243 - protein, 132 aa, Zea Mays
MMGEKLSGKKKRNRKSRLSVGLSFLLISHGGWRSCRTWRRRSTCCCRRGRGRWCCSRHRRGSSRSYVDTEQDDMRYWRRTNQPASTGKTTFVVAVCEGGLSVSMEIEGGAVRFHWNKPGFVPTHQNLYKLEK

SEQ ID NO: 198244 - protein, 65 aa, Zea Mays
MTHAPSHAPPASAPSGGITLRRGYEAGGGRRSVRCRIEHLRLGLDNSVPVRKSIWAIDHSGRGQD

SEQ ID NO: 198245 - protein, 53 aa, Zea Mays
MSTEKRHLDQVECLSVRRLLFDHRFFSCGGVCETARVSSHTFIAQQVVGNKVA

SEQ ID NO: 198246 - protein, 86 aa, Zea Mays
MMRTRDETGSVEMCVRVPKIDGVIREGWARPSAQHDVEGLVTQLLLEEARLQSSAQELARFCTDASREHRARKGELEMAGGRRVGS

SEQ ID NO: 198247 - protein, 175 aa, Zea Mays
MNQQEAPTRVGEFLRDFGVPVVLWRLLQEVGYIETPKYQWSRTVLRGQPWYEVVVRIPERARKPSWPHWMFHAEGMTPWEGAQVAALEALTTICYQKWEEIQATSMRLFPAVALSDPLVYHHQARLLESIPIGHDSVESASARVLMAVLELQLTRGHSRQKWKQLYTGSYAAFKM

SEQ ID NO: 198248 - protein, 53 aa, Zea Mays
MTFGTFEAVYICPANWMLMADLIECSPELSRILVIILATLVLLLSFADSTLYT

SEQ ID NO: 198249 - protein, 55 aa, Zea Mays
MKQHAMKLKASHRCNQHYNFTPSNWDATIHQHQCLKTTLFYEGVICTKHNSYQLQ

SEQ ID NO: 198250 - protein, 91 aa, Zea Mays
MTKLRLARPQGSDSALASAERLPPRPTPWLGLGHGNRRQTQPRLRRKPHVALPRAQTATSTGGAIIIPPRIDSGHGEQDRRLIRPAPPERQ

SEQ ID NO: 198251 - protein, 51 aa, Zea Mays
MEHPMWPRWFSSTFWNTHYYSYHGCPLRIVCDSISLRGKSFISIVLSMMHV

SEQ ID NO: 198252 - protein, 71 aa, Zea Mays
MIYSNFLHTTWESPNKKFIHFFKLHNFDIWTFVKLLLDFEFLFWASFSVSHVLHFLQVFLPLALPLKTRLP

SEQ ID NO: 198253 - protein, 78 aa, Zea Mays
MPPLYLPSNKWQLELGKAKQSSPQRTRCVPACLLARKPQRTTRKGHARSLTIQSLLDCMCAAAALCRSATTRRLPVLA

SEQ ID NO: 198254 - protein, 52 aa, Zea Mays
MCHSLAALQAVAIYILGVVTSFAALCIRQSAVRLEPRTALLSSGPRHAPESG

SEQ ID NO: 198255 - protein, 51 aa, Zea Mays
MPASRWLHSGSCLVHLSSSMKASECSSGFYRFDLLFFYRLHSNIQNYGILS

SEQ ID NO: 198256 - protein, 72 aa, Zea Mays
MIGRADIEGSKSNVAMNAWLPQASYPCGNFSDTSSFKLRRSKGSIGHAFTVRIRTGNQNQTSFYPFVPHEIS

SEQ ID NO: 198257 - protein, 53 aa, Zea Mays
MYPFAHNDPGCRFLIRRSKSNPDIGLGRCNISHSIQIKRVCGWGPNKISAVGF

SEQ ID NO: 198258 - protein, 58 aa, Zea Mays
MAHDMMSPRLLLRTKHPAMVACYSTARSSYCSCKHDCSDIFVFVSLCPPPTYLSQPYR

SEQ ID NO: 198259 - protein, 87 aa, Zea Mays
MDICMIQIFSKDMFEDFKYIVIYKNTGLKYWFYPCLTAPSQRSHRWLTPLPAYKRERQVSEQGDQKERVFEETRRLQTDTNPQGRIG

SEQ ID NO: 198260 - protein, 71 aa, Zea Mays
MRRKRAKLTSKWCKEWSSSHDDVVSRTNLKRDRRSTYQNKGWSPSGRHLTNTNVVFIPGKPRFMQPLFLCF

SEQ ID NO: 198261 - protein, 59 aa, Zea Mays
MASYKRLMRLARGLTFRCAGARAKLGQRLGMLGQADKLVRLSSFPVFLISFYLSNFILK

SEQ ID NO: 198262 - protein, 63 aa, Zea Mays
MSPFKTIPLFRWCKLISLIPFCLFLRIMSLFYQPNPEKTGLIIFLSLMPLVSPYLSKAYQLNP

SEQ ID NO: 198263 - protein, 83 aa, Zea Mays
MGTKAGLLGQQKNSRGEGASTRSWSEGRWGGVGRARGETMRDLPASMANAERDPVHATGGRRQGTRREIQGARGTGRTPGGRR

SEQ ID NO: 198264 - protein, 66 aa, Zea Mays
MLEEERSPNTKCSELNGLLCPAGDSLKCRRLCGYSLRDVARCCSLACNDNVNGRRTMRLYLVFRRV

SEQ ID NO: 198265 - protein, 79 aa, Zea Mays
MDLPNAPPVVADPAVAAQVRIMQHMADTMADMHAQMRHERQEMRQEREEMRQERRVQQQQAPLPPPPPPVPPRDKHREF

SEQ ID NO: 198266 - protein, 88 aa, Zea Mays
MKRKAISQGQGSSNVRPRYVPPQGTPVRTGGGQRPAQYTPQGTPPTHQAAPTGTPVKFSGQSAGTTCYKCGKTGHYANVCPQRIATTP

SEQ ID NO: 198267 - protein, 61 aa, Zea Mays
MQLLSKTYPTKEKTLKGMLAFGNQGKAHQSSRTNFAEKLTRSGSLSQILFHKLVYYLNLLA

SEQ ID NO: 198268 - protein, 64 aa, Zea Mays
MAANFSSYSSLEEESLVDLISVSQSPTMYTFPPLPLWNLFCLPSFLLKIFFSFFSSSLSSFSCP

SEQ ID NO: 198269 - protein, 150 aa, Zea Mays
MCSSSFRSLLCGGRSRGRRKPWRGAAMGGEDSQPKGKGERGGQVWEGGKGWRPSRGKRGKRPPLGFSLREKRSDATDDSDLASNGPQPFSHIHAPKINLWQHFFGILHSTPLKKNSSTPNKTSMVPHITPPFQNMGPLLVLINTRTSTLD

SEQ ID NO: 198270 - protein, 64 aa, Zea Mays
MGKNISLILSSPSTQCVPPLLDPCCAGGDLEGGGSREEGLPWEERTASPREKERGAAKCGRGGE

SEQ ID NO: 198271 - protein, 86 aa, Zea Mays
MVILDDFSHFLWTFPFRLKFDMFTTLTSSPGSPPSFVARSMPSSVIMVASSTTTLAPSSPMASSCASPAPTPLLRRGRVEPIIRTT

SEQ ID NO: 198272 - protein, 97 aa, Zea Mays
MWPTAWQWPIGYASFSRSSTAPSSAPPSSTATTPSEVYLSTNPVQHHHTKHVEIDMHFVRERAAASDVRVLSVPTMLQFADIFNNGLSSSVFADFSI

SEQ ID NO: 198273 - protein, 169 aa, Zea Mays
MLFVMVMGVLNSLFRAAESRGLLQGLEEARVRNRLSIYADDVVFFVKPLVEDLNCVRLILDCFGEATGLVTNLRKSFAIPIRCDGLEVQAGCNILQCSSGSFPCSYLGLPISDKKLRRREFMVWVDKIADRLPNWKARLLSLAGRTALVRHVLSAIPVYLLMARVFPNG

SEQ ID NO: 198274 - protein, 94 aa, Zea Mays
MSADHGHRRALGPARRLSVHPSGHLEGPSSPMPSSLGVPPMVAPSSKLASTSHHPSSSSCWTPLAPRCGPTLDSCSLTHAISPVRLCAPLPYHC

SEQ ID NO: 198275 - protein, 50 aa, Zea Mays
MITKITLGSSFPPSFLPSSSLQTPMEDSHPHDGHQAGRLHLGEEEVGGGG

SEQ ID NO: 198276 - protein, 104 aa, Zea Mays
MCRPSQTPHLTMSSARIGPARPGLGAKRRGGAPLPTHGISKITLKVVVFHLRPEAPTYPTPLKSFHKVGLESSSTGSSFPADSAKPVPLAVVSLDSRQGQWESR

SEQ ID NO: 198277 - protein, 77 aa, Zea Mays
MRPTYWRVKPRGGLHGGKEISGPSHANSSPRDSLFLFFSFLYFLFCFSFLFFNSNFKFKFLWQICSRIKYEILNILA

SEQ ID NO: 198278 - protein, 106 aa, Zea Mays
MGLLRWTGTAAQIGSTLATRTGSHGCCCSAQLAAQVGDGVRCATMERGSGRNVRQQGKGGARCRGLLAMVAELAAGGNFGQGGKKIGRALLEFLGAVQGSCCRCFA

SEQ ID NO: 198279 - protein, 122 aa, Zea Mays
MPVNPDLSETNSTLWARSCPAVRVLRFLRAIKKSIKQPLPSCHRDSRGRLNKPRKALVTNAVDTASELARAVPTSTRFVPCRGVFRRGHPGEKERDREICSPPYLCSSCSGFVPPHHTEKRI

SEQ ID NO: 198280 - protein, 144 aa, Zea Mays
MLVDIELSSPTITNTISFPRTTIIGSITLPCVNNTCKYHFNVCIGMQCVGTLSSYLWGYKTTSSANITSMNAYECNAYVLCLHTSKGMKPHRTPSRATYDAKLYRYGRTIGHDKTSYANESCNVYGMLHLSINFTSFRYNTNLK

SEQ ID NO: 198281 - protein, 88 aa, Zea Mays
MNAYECNAYVLCLHTSKGMKPHRTPPRATYDAKLYRYGRTIGHDPTSDASESCNVYGMLHLSIYFTSFTYNTTSNNTSFTFKYNINLK

SEQ ID NO: 198282 - protein, 80 aa, Zea Mays
MPGLRKVPQVMVKNDRDETTALFRFPIFLFVLWFYPFSFVFFFYFLFFLFLFFYVTDGEKQGRGTDSVCGMIKREMVAAR

SEQ ID NO: 198283 - protein, 66 aa, Zea Mays
MVEERRMVKKTQCNQQQMTCKHTNSTMQIIKRKCEAQKGAGIRSNLNFYVVLWTVGEKTLDKLVQF

SEQ ID NO: 198284 - protein, 78 aa, Zea Mays
MPGLRKVPQVMVKNDRDETTALSPSLFFCLFSGSILSLSFSFFSFFLFLLFFDVTEGEKQGSGVDSVCGVIKREMVAA

SEQ ID NO: 198285 - protein, 55 aa, Zea Mays
MPGLKKVPQVMVKNDRDETTALFPFPIFFVCSLVLSFLFPFLFSFLFFCFCFFLT

SEQ ID NO: 198286 - protein, 58 aa, Zea Mays
MVEERRMVKKTQYNQQQMTRKHTNSTMQIVERKCEAQKGAGIRSNLNFYVVLWVVGEK

SEQ ID NO: 198287 - protein, 54 aa, Zea Mays
MFFCLFSGSILSLSFSFFFSFFCFYFFYVTEGEKQGRGGDSVCGVIKREMVATR

SEQ ID NO: 198288 - protein, 52 aa, Zea Mays
MIWGKRKLIIGDFYSGWWILIHLKILYLSLLKLTFLLGLIQGPSIVVLGVII

SEQ ID NO: 198289 - protein, 193 aa, Zea Mays
MVSRPSPSPWARPLQAWLQGQRPPFPLLSRRGRPFPMAELKLPGPDAAPLCCRSSVLLAPPPSERLQQGAFLPYALELLGPTSARSMSMATQQLHSSMAMAPPPSSSLPRRGNAGTRALSLVWVEQRLPLLSPPRRPLEMAPNSPGTFLCFVSLPPLRTCQVFDKMSRETCCCSTVGAHRLVAVFAQPQHHRR

SEQ ID NO: 198290 - protein, 85 aa, Zea Mays
MASGSRFSLRAAFFYLFPKFPVMACSPCSPGRSALRSARPWSLLSSISARSCPYRVSHGRTLGFAGVCFPRRALLLPMARLPCSI

SEQ ID NO: 198291 - protein, 90 aa, Zea Mays
MKEREPLWEREENWARRWTKSELEQGDKHGIGTEPSGRAPAAREERPTEEHGARTEHRSWARPWTGRWAPSVQGGEGGARHQGAARPGCV

SEQ ID NO: 198292 - protein, 55 aa, Zea Mays
MLVLNSSRKPYFDHRFALSPVLLTTNLSPVPCGTFMSSPRPSLDLARRYIRLLMC

SEQ ID NO: 198293 - protein, 73 aa, Zea Mays
MFWLWCGELGGCGHHKHRKTTHTALDSANLVAVGEELWLAIHMNPSHHCELWLEHQGRGKSSPNQHLNKGQEG

SEQ ID NO: 198294 - protein, 78 aa, Zea Mays
MHFFALALLFSLFLTKVTQKQDITQEYQKILICLLQIFFSNFNILFDKFRDLKRINSQHKSCWLPFYLCFRYMKHLFW

SEQ ID NO: 198295 - protein, 60 aa, Zea Mays
MAATLPPFLANSGLWRLGNRCGRRRMRRGVTMVELLWPEEERSRPTYSPAIPDGGFSGVC

SEQ ID NO: 198296 - protein, 77 aa, Zea Mays
MITKITLGSSFPPSFLPSSSLQSPMEDSHLHDGHQAGRLHLGEEEVGGLGLRGGAAITWGRRRGIGAAARVEERGEG

SEQ ID NO: 198297 - protein, 86 aa, Zea Mays
MGTDKHLDLNMGGNFIDQKVNRSMICSLLYLCASSPNIMLFVYICARFQSDPKECHLVDVKRILRYLVHTPYIGLWYRKGCDRHLT

SEQ ID NO: 198298 - protein, 101 aa, Zea Mays
MGLPASQLGLVVLGHWAARPLAAGLPAGLMAAQGWVAAGQTAAPARAQRTLAGATCRRCGYQDSVPMSSESTGVGQERRLTRDGESTASVGSKACTRSGRD

SEQ ID NO: 198299 - protein, 66 aa, Zea Mays
MLLLQASQRPLALLVAPSTRPRALAQFCSPFVALWICQRLGIAAPPSSDQRVGEPAGTVGSPADGC

SEQ ID NO: 198300 - protein, 66 aa, Zea Mays
MWERVVGRWMQRQKSSGASVLFSHKTLGGHPFSLHPLSWPPPSPLFPLVGHPLSSHGSRPPFLPPP

SEQ ID NO: 198301 - protein, 66 aa, Zea Mays
MWERVVGRWMQRQKSSGASVLFSHKTLGGHPFSLHPLSWPPPSPLFPLDGHPLSSHGSRPPFLPPP

SEQ ID NO: 198302 - protein, 58 aa, Zea Mays
MGVFLVCIVILCFYIYLCLYVYVDVIVDITPQPSHSIKDPNQTSIIRTNIEAHRYLQK

SEQ ID NO: 198303 - protein, 60 aa, Zea Mays
MAQDRMSHLYYITGILYKINNYIIRRQRSSNPKLTGRRRPRSLTNTSQHPPCASSSGTCS

SEQ ID NO: 198304 - protein, 120 aa, Zea Mays
MKKCTFVKHELKYLGHVISRDGVATDSSKTEAMLSWKQPMNVIELRGFLGLTGYYRKFVKDYGIMARPLTRLLQKQQVFQWSEDAQVAFQELKQDMASTPVLALPKFDLPFTVETDASDV

SEQ ID NO: 198305 - protein, 124 aa, Zea Mays
MFCNGGVIWGTMDVLFGVDEFEDEFLLRGVECNIPKKCCQRLIFSAWMWEKGCGPLDAKSESSVASLLFFRKENPSGGIFPLLPLLGRHPFPPPPTLGRPSLLFPWAGCPLLPWQPLSMISSSL

SEQ ID NO: 198306 - protein, 160 aa, Zea Mays
MRSHLFSLHPSIWEIVENGMKFDSSDSPMLINEQIHRNAQATTVLLASLCREEYNKVSGLDNAKQIWDTLKISHEGNDITMLTKMELVEGELGRFAMIRGEEPTQTYNRLKTLVNKIRSYGSTRWTDHDVVRLLLRSFTVLDPHLVNNIRENPRYTMMTP

SEQ ID NO: 198307 - protein, 108 aa, Zea Mays
MFFSGATDEEGRLEESGATFTSATMSSGTITPGLLIKIRPARMALSIALSRWALKVAEVSSAALTASRAASSSWTTDLLEARRSLMMESLLDTNCLRQIISSRDSCSL

SEQ ID NO: 198308 - protein, 112 aa, Zea Mays
MNAYECNAYVLCLHTSKGMKPHRTPPRATYDAKLYRYGRTIGHDKTSDVSESCNVYGMLHLSIYFTSFKYNTNLKQYFVYLQIQYKPQIILRLPSDIIQTSNNTSFTFRSVN

SEQ ID NO: 198309 - protein, 53 aa, Zea Mays
MSDPLDKEVHNWVVIPNSFFINFLYPESGIELSHYFVVLGVLHSHYVFQPLSL

SEQ ID NO: 198310 - protein, 54 aa, Zea Mays
MQVNHAMYMACCIYQYTSLPSHTIQPQIILHLPSDTIPTSNNTSFTFRYNTNLK

SEQ ID NO: 198311 - protein, 68 aa, Zea Mays
MSPDFASNGPQLFPSSTHRRPSFGQYFFGILHSTPLKKNSSSNSTTLGKTPKVPHIAPPFETWVHYCS

SEQ ID NO: 198312 - protein, 60 aa, Zea Mays
MEQKTSQKAPWSGAPDCPVCHRTASGAPLDIVRCTRELDAELATFGKMGGRSAIIHRTVR

SEQ ID NO: 198313 - protein, 95 aa, Zea Mays
MAPKELAELKTQLQDLLNKGFIRPSSSPWGCPAIFVKKKDQTLRLCVDYRPLNEVTIKNKYPLPRIDLLFDQLSGAKVFSKIDLRSGYHQIRIRP

SEQ ID NO: 198314 - protein, 243 aa, Zea Mays
MLRACVLAFSTKWDECLPLAEFSYNNGYQESIRMAPFEALYGRRCRTPLNWSEPGERCFFGPDLVKEAEEKVQVIQRNLQVAQSRQKSYADKRRRSLVFQVGDHVYLKVSPMKGVSRFGVKGKLAPRYVGPFPVIERCGPVAYKVQLPENLSAVHNIFHVSQLKKCLRVPEHVVEVSDVNLEPDLTYSEYPIKVLDQKDRVTRRKVIKFYKVQWNQHLEDEATWESEDYLMEKFPEFLVTCKP

SEQ ID NO: 198315 - protein, 104 aa, Zea Mays
MMPLCLVSQSIPRITSIPLDGKTVKSARNITPLKRILTWEYFSWHRRSDPGVRVTKGISRGVEGMPCFSTKLVAMKEWDAPESKSTVAGVNSTRNSPSTTPGAC

SEQ ID NO: 198316 - protein, 128 aa, Zea Mays
MRRFKVKGKLSPCFIGPFMVFRRVGEMAYQLKLYDNLSDVHNVFHLSQLKKCLRVPEEQLPMEELSVQGDLTYTEYPVKILDTLTQITRNKVIKICKVQWSHHGEDEATWEREEELHIDFPHLFPRPS

SEQ ID NO: 198317 - protein, 72 aa, Zea Mays
MKFCPRKPIPPLTSEPAHREVDRDTRAAVRPWDMSTAPTREEEHRTVGSPNTRPRWTITRGTHHHTGTQVKQ

SEQ ID NO: 198318 - protein, 88 aa, Zea Mays
MTVSTTDIPSFTLCRGCTSLPTSHVTHLPRDRDFLYTSTEEATQGNTTRPLQSSTSFRKPATVSMKLQCRDPSPDRHRSKINPMASLH

SEQ ID NO: 198319 - protein, 83 aa, Zea Mays
MMDPQSSFIFENIPFHLKHHLLLKTKHLFSKTRLSIRKPFNKTGNQGRVNSSKEGNATIGSSPNFYHLMHHSSDKEFKITRKR

SEQ ID NO: 198320 - protein, 95 aa, Zea Mays
MNESSARLGNVSFGEITPLFGLTAEIRVWLSIMSNDWINIRRRREKRAHGRGNNAASGGGGPACAGAGCARRRFAPVSRVPKQGRRPTLAPRHPF

SEQ ID NO: 198321 - protein, 78 aa, Zea Mays
MVRRRNLSVVESDSDDDAQEIREETPPRSGSKRGRGSGNVMQGGEASGSHGARGRTARNPSGRSRPAANPQAWEPTSD

SEQ ID NO: 198322 - protein, 57 aa, Zea Mays
MGKPVPSLLMLLLSRGRVPLDCPTWWQDGRPSHSSNHVLQRTCKIMPQARLSILILS

SEQ ID NO: 198323 - protein, 78 aa, Zea Mays
MEVNMHVARFFYECGIPSNAINSRSFEIMCEAIGQYEPGYKPPSFCEVRVPLLGKAVERTNKLKKHEAVRKQLAVHSC

SEQ ID NO: 198324 - protein, 327 aa, Zea Mays
MRKIHLIEQHDMYIDEYYSGFDRFIGPLMSMVPSCTADECTAHKFIEKFFTYRFVMGLRTDFEDIRTRLLHGSTSLIMTEALSDLLAEETCLSSMSVSHTPVSHNVLATSHKSGGRGGYFEPCKHCNKTKHQSDQCFLKYPEKLAEFRSRRTAQGCGPSKGSVSVVAACSSASQSTWVLDFGASFHVTSYQSQLDTCAPVTNGSSVQTPDGTSCSVTHKGSLCSSQFSISNISFVPELSMNLLFIGQIIDHNYFVGFDSSSCFAQDRRSEPVIGTGHRRRDSSRLYTLDFLRLHIVYTASVSSAASTSSFAQWHHVLVTYVGLGYLL

SEQ ID NO: 198325 - protein, 57 aa, Zea Mays
MLYKKETFHAYLVSSFIGSIPSNLYTYIMQTSSIMHLYICFGLCWHQSPKRGRLKGN

SEQ ID NO: 198326 - protein, 78 aa, Zea Mays
MGGEDGQPKGKGRRDGQVWEGGKGWRPSRGKRGKRLPLGFSLREERSDATDDSDLASNGPQPFSHIHAPKINLWQQFF

SEQ ID NO: 198327 - protein, 61 aa, Zea Mays
MHHKEIEYNNLHIRSKVTHIKCYSFVAIKAQCLFYCLLHRPFKNVFTISASLLSRFSPQLH

SEQ ID NO: 198328 - protein, 53 aa, Zea Mays
MVFPIFTDLPVRFCESAFFFGFCQLFPKVFDFILLDFGLSLETSFIFFHFVYQ

SEQ ID NO: 198329 - protein, 66 aa, Zea Mays
MVIGGGGGKCCCGAASSWGAYCSGCARLAPLRLFSDICRNHTHIRSDSAVFQHKKRYTEIFTALNN

SEQ ID NO: 198330 - protein, 71 aa, Zea Mays
MSIGNACPKEPEEPSQALDQPSSSIQASPPTQDEELIQEEEDQDQYDKPPQEEYIDQQGDEYDQEKEDEQE

SEQ ID NO: 198331 - protein, 64 aa, Zea Mays
MCVLQVADFTSRTASGALTATLSAEVERLRTQHADAVREKSASDSKCRKLAEKVAALEKEKADL

SEQ ID NO: 198332 - protein, 119 aa, Zea Mays
MVEPYRPLHARIPSRHSLPPYVATFYTGVVGPAVTDKLYKVSQPQCLGSTRSSPCPIHSLITYNITTGIWTFAECQRLCRVLFIGHSAKKTLPKKTLPKKTLPRATLGKVLRSVKSLCS

SEQ ID NO: 198333 - protein, 59 aa, Zea Mays
MKYYLRLVLYLKVNEVLFEVVLYVKEVKYIDKCSMPYTLHDSLASEVGRDLWSDRTDTT

SEQ ID NO: 198334 - protein, 58 aa, Zea Mays
MVKEMRHRFISQLLLQGRGCDPIKRQLIQTHGFQDTRNSEIYFSKYFSDYYVTLSSGC

SEQ ID NO: 198335 - protein, 81 aa, Zea Mays
MVPFVAARISVAWCNSSTVFGGGRKGGRKGGEPKVIFVFISCSFYAAIQLFRCCVCDLVEGLSRILRGGRTAAGLVISGHF

SEQ ID NO: 198336 - protein, 54 aa, Zea Mays
MGRTLHGSRSHSTRIVSSHSDGWHRSWELLEHRTPQKVLSLTVFQKLLGRQCTL

SEQ ID NO: 198337 - protein, 60 aa, Zea Mays
MVVELFFWWAELPIFYLVMNVHYYRCISIILCELSFFYILYKLYVPLVMLLSREVLPDFA

SEQ ID NO: 198338 - protein, 59 aa, Zea Mays
MACGSGWESFHWVLVSSVGVFCSFMANVCEIFVLSFMPASRWLHSRSCLVHFFFFDEGK

SEQ ID NO: 198339 - protein, 50 aa, Zea Mays
MSSGCNVDNLGGGGGLVCKARVSTHQHTQHNVPFGCSGLALCGVKSSSCF

SEQ ID NO: 198340 - protein, 82 aa, Zea Mays
MESQVKCSIASEGQEMRSASPLLLIILLFFYNQLLTKERIEVCYVVQSLSVLEVISVFNNMLMILFLSCKPIKNNCFSLRLS

SEQ ID NO: 198341 - protein, 68 aa, Zea Mays
MLSLGLVLAYRGCRATRSKRRAVLHGSCVGFLAGASHHGEGSLGEGGFVPGQGASRIARTPVVAAARR

SEQ ID NO: 198342 - protein, 62 aa, Zea Mays
MERRLWIKEGATRTSGMRKEPEGPATPTDVTGRHEPFATMMDEGREEGGRTEVSIPGSGVVW

SEQ ID NO: 198343 - protein, 52 aa, Zea Mays
MLGTARFKSNVWESIGFGKILYVHHGSYGPHRIPVHLMAGGDLGRSFLIGRL

SEQ ID NO: 198344 - protein, 120 aa, Zea Mays
MCMRCGQGSSRPKKTIPIEASDVAYSHLQPLKKVKEKELEVAIQCVPRTSVRPTGLHRPSPALMANWRWNGRRPSLNTDRVVLSSALSISWPVYQHSKTPDAVGGRDGLMTRWPLAFTLL

SEQ ID NO: 198345 - protein, 295 aa, Zea Mays
MVRGLPSLDRIDQVCDSCLAGKQRRRSFPTEAKFRAKNKLELVHADLCGPIAPITPSGNRFFLLLVDDFSRYMWLILLSSKDQAAESIIRLLGGVETQAGRRLGTLRTDRGGEFTARSFADYCAAQGIARHLTAPYSPQQNGVVERRNQTVMGTARSMMKAMRMPSWFWGEAVTTAVFLLNRAPTQSVEGRTPFEVWHDAKPPVHFLRTFGCVAHVKTVGKYLSKLEDRSVPMVFVGYEIGTKGYRFYNPTTQRVLVSRDAVFEEERAWDWTAEHPSALEDAFEPFCVEHGVAAV

SEQ ID NO: 198346 - protein, 51 aa, Zea Mays
MLPCNMHAQNTRQVILGCIPLSFSLHVGPLAVTTSTKLRAADSHNGHQTEL

SEQ ID NO: 198347 - protein, 71 aa, Zea Mays
MEESLKHSLSILRHPDSPAHSLCCVRDLSSIRVANSLCCQLSSSLHLCVWVCCGFMSCVCCSSQPYSVLSL

SEQ ID NO: 198348 - protein, 81 aa, Zea Mays
MLLLLPPPPPPFGTVASGTLDLTSCPILPATLTYPILGALLSTSVMLVSLAVTPVFLFPLPRPGLFRPLILSTVTSDVSCP

SEQ ID NO: 198349 - protein, 112 aa, Zea Mays
MGWLWHHRLSHVGMKNLHKLIKREHILGLTNVHFGKDRICSACQAGKQVGVHHPHKNIMTTDRPLELLNIDLFGPIAYLNIGGSKYCLIIVDDYSRFTWVFFLQENLKPKRF

SEQ ID NO: 198350 - protein, 72 aa, Zea Mays
MWSKISNKRKPIHSLLFLVILSIGLTPCNLCTLIINANLLHFCTLYLLWFVLASITKKGEIEREIGLTIFYY

SEQ ID NO: 198351 - protein, 81 aa, Zea Mays
MKMMADGVAPRTVRWIGRVVGAGERLSSGPRSSGWRARKGRVWAARGEKGVLGRISFIFFFFNFFFLFSFFLPKFKTSIQI

SEQ ID NO: 198352 - protein, 94 aa, Zea Mays
MSKELVKVNDNEATFDVLSWWKGQVTSFPILSTLARDVLSMQVSTVASESAFSSGGRIVDAFRSRLKPEIIETLVCCKDWKIASEKGIAIFITL

SEQ ID NO: 198353 - protein, 87 aa, Zea Mays
MYVYRVPVFDHTVDTIQEKASDIKVVRDRSGTVPVRGSKTHATTSRATFFCYELMTKRTHTEKKNSEKKETALYAFARIGTGGDLLF

SEQ ID NO: 198354 - protein, 109 aa, Zea Mays
MSGRSCRATARFPSSVLPLTQLAWQVDDIGRRGRMVSQPILRVKAVRNQWATQWRETERNDKTVVFIAECHVFIQGIQSLPRGVSLGSNCQLITGQYFVTLPLDQPISI

SEQ ID NO: 198355 - protein, 144 aa, Zea Mays
MLVDIELSSPTITNTISFPRTTTIGSITLPCVNNTCKYHFNVCIGIQCVGTLSSYLWGYKTTSSANITSMNAYECNAYVLCLHTSKGMKPHRTPSRATYDAKLYRYGRTIGHDKTSYANESCNVYGMLHLSINFTSFRYNTNLK

SEQ ID NO: 198356 - protein, 110 aa, Zea Mays
MPRRCILESKRKSRRCSSVEISAVSSYLLLGFLPSSFSQLSSLSLLLLASSHGAPVLLFSSLASRALLLPAMELPAVQLAQSPTRPELPSTRFPISLYLPWESVLDLLWA

SEQ ID NO: 198357 - protein, 178 aa, Zea Mays
MTKEAGQGSGSSERIGGYDQFIYLLFCVLEIIYVSYFHLCCFIVTNDFILSVLSYYNMIDLSVLIFQSCYLSFYLFTFICLVSIHVYRIYMIYIIHMLYVLLIHTGMDQFEITISMVNYLLYVIIIMLIYGIKIIRKMPIFLTIQKPKVRHFSVRGFAAVLKPDPFDDKNFLIWKAKM

SEQ ID NO: 198358 - protein, 56 aa, Zea Mays
MGRGCGRGLGAKSAVPSAGGIKRRSGGAGENGGRRGQTRQTAGLRECCWCFQKSLD

SEQ ID NO: 198359 - protein, 71 aa, Zea Mays
MPRLKLGEAPWLHWEAIQGLGRGWGSTGKAGHDGRAWAEMVGGGACLSRRAPVISGSGEARGVQVPMAKAS

SEQ ID NO: 198360 - protein, 59 aa, Zea Mays
MIIWSCKAGSTEMRQSTRRNYFNLHLAQLITQCVNTRIHHNTVTLQLPTQGICYHIGFS

SEQ ID NO: 198361 - protein, 59 aa, Zea Mays
MSSMKTTTNLSNSGMKTEFIRYIKYASALVSPKYITKNSYNPYLVEKAVFGISLARILI

SEQ ID NO: 198362 - protein, 72 aa, Zea Mays
MANSMSRSGGIPGNSSGKISAYSQITGIFFTGDSIIAKAHDQVESWQGRYNTRSSEVGEQISRALAATSITT

SEQ ID NO: 198363 - protein, 59 aa, Zea Mays
MIPCILAQVIEGLSVLQHRAGSLIECQKFIQFAIKNSSWDMVPSESSLEFLLRHFTISW

SEQ ID NO: 198364 - protein, 127 aa, Zea Mays
MCHSVALQGLKAVQRTHALNSDPPNQVGIHCPYVLHMAHTVAPHGVILLLNSKECQGVHHHFQGMVATESRQSLHGCRFSGVVCPESNHLGVENAIPAEGDEPPKSARLGNEVPNAPHTTAPCTKGA

SEQ ID NO: 198365 - protein, 62 aa, Zea Mays
MSTIPINSPFAARAHRLGIQCSTDPGCRRAVTTLVPTIASMVDPVSGRVRGKVHARLHSGTR

SEQ ID NO: 198366 - protein, 121 aa, Zea Mays
MPRLKLGEAPRLHWEAIQGLGRGWGSTRKAGHDGRAWAEMAGDGACLSRRAPVISGSGEARGVQVPTAKASGGIYRRGRDTGVRGGATTRGARAAAASPHLAGQASDRTRGFLLLPEFKRS

SEQ ID NO: 198367 - protein, 60 aa, Zea Mays
MGGVMHSVFPSLLCPPRNQHIMLTMLCCAGTGIEVCGCWELRMDADAAGNYASVSGETHN

SEQ ID NO: 198368 - protein, 74 aa, Zea Mays
MPAPCVQSRSSALSTRAQLLSSMARGSAASPSHGQRCSSPCVARLSRPPAPRPTPASPAPLSPCSDLVKLARDS

SEQ ID NO: 198369 - protein, 77 aa, Zea Mays
MGVGRASSASCAQGTEKQGARRRRNRAGSSGQEDARRAGQREGTWARCSGAPAGRFCRRGRRHAGAAEQGPSGSRTL

SEQ ID NO: 198370 - protein, 55 aa, Zea Mays
MGRSLLSVFINEEEKCIHTNILLRVHCFVRLCAFLREFRAMFLLVSVWEVHLRFC

SEQ ID NO: 198371 - protein, 62 aa, Zea Mays
MRSLFLPVIIGFWRLWIMGIKGLEVGFDVGLGFDLEFSFLQNDRFDSFCSCQFSVVLVASKK

SEQ ID NO: 198372 - protein, 50 aa, Zea Mays
MPGLRRHRGSDALIFACLRECVRTTLFTGFGLIQYYNVMRRDHFQGKKYM

SEQ ID NO: 198373 - protein, 239 aa, Zea Mays
MAREKKVCTRNSTYASSSEDESSDEDEVDYSCLFKGLDRTKVDKINELIDALNDKNMLLEKQEDLLYEEHDKFVEAQRSHALEVKRNEMLSCELSSCHETISKLRSINDDLNAKLEIASKSISCVENIVTCTRCKDINIDAYSEHLACISKLNEEVASLNAQLETSKSDFDKLKFTRDAYTIGRHPSIKDGLGFKREAKNLTSHKAPIPAKEKGKAPMASSVQKNHAFMYHDKRRTRNA

SEQ ID NO: 198374 - protein, 107 aa, Zea Mays
MRLGVPFIAPRQLGAVESKSGRLILPSVVGCTGQSGAHRTLSGARFPSLNGAADRCRSGSIWRTGQVRCTPDSPVPPSDRWLGHVSRADRAADRWLTGQSGAHRTVR

SEQ ID NO: 198375 - protein, 304 aa, Zea Mays
MGIFVWAVRSQGLEPNAKSFCNMHELLYETKPWGKEQYHNNFGCYSFVARSGSSCPVPTFRKRWPGDWMKEWFYVKNDSKAREDFKDIIMRPIWQRFGLRKPKVEIDEAAEECQKAFGIVCSFIGTRDLVQEHIAFRVWPLVEEWEMPKETISKSDEGGLVRLKYTFRYEGKFIEPDDDWLKCIEATSDELLGPYSKTEDNALSTTFGGRKKKRLNRVFDAIGFMYPDYRYPLKGQKRKNATSRKGDASVALSEAILKRKKVKVLTHRPRFIEPASVPEFGGETSTATEAKGPALTQKNEEPAI

SEQ ID NO: 198376 - protein, 126 aa, Zea Mays
MITNAITISAVGYLLVDVLRLWYSTVDCTSFGLLSEVSLLMSVLAPFWLLASLYWWWRWKLLPRCLRLACRSNRSCRMVTHCNTPGSTNNPVCYCTTLPTSIYKISAASLLQVCIKEGATEYKHIS

SEQ ID NO: 198377 - protein, 73 aa, Zea Mays
MSMSTQRGKMYKRHPLLPSPPRRLRRLPPAPVGTRTAPCGAAPRTKNSPPLQVDRRRRYGAIEQSLSAAEEET

SEQ ID NO: 198378 - protein, 591 aa, Zea Mays
MAPKRKTANSSAAVIPAIDPNSQLPFAGNHMSVISEVELLRLVSVGVLPPRELCSWRSCHGTTVPTEDTHESVVYTPFLLRGLGLPISPFFRGILDFYHINLTHLNPNSILQISIFVHLCEAFLGVLPHFGLWKYLYHCRPGMAGGQHQLVGGASLEMRRGRKTEYLEIPLKDSIKGWRLEWFIVDNYGNSLPPRSGRQADVRTPSWTESPTDQEVAEAGVLLTEVGLLKERGLTAEAVVTDFVFKNIQPLKDRAYPAYLYRGLADPTRVTNRRIPSVDLVSRLEMILRGKVSNVGAPVAYSAWNLPSPKDFTLFVSNPPVTDSNLGLRVRPSAEDVRSLVASLGEIPDDERQIYFEVPLNPSDADINDMLDLLAEDSSDTVPDGTLAVVPPPEVDATLDVSKPVNARPRRPSRTSQPEPSADEQKRKRRRLRRVSSFDEDASTLAPTVEEMTATGLADVDPNGCAPPVADPNEDAVCAAAVEDEEEENETPLIRKNSRQLVASGGSSGVPSPALSALIGLQELSMTNFDQALEDMVPENLLLEPADVDATEICAAVPDAGLRSSRASSTLERDLEGRDNDLDRPDPVETS

SEQ ID NO: 198379 - protein, 119 aa, Zea Mays
MEELDNQRRQLQESSDEVARLTQLLSAKDASIKELRASKKTIARELETAQQAVKVAEEAAVTFKTQRDKALDKAIRAGRILMRRPGVVVPEDIRADVVAAPDSSNRPSSSVVPERDIGR

SEQ ID NO: 198380 - protein, 96 aa, Zea Mays
MTTRESPYTISLLTPSDMAMFNPCIKASYSAALLEAGNSNWRAYLRCSPPGAVKRIPAPAPCSFSEPSKYICHTSAVSGLSGTCCSVHSDTKSTSA

SEQ ID NO: 198381 - protein, 55 aa, Zea Mays
MTGTGLILGEPSSYLLFTILFSLLTFHFSLPLSFSLLFPLEDSIDEYYHHTEEET

SEQ ID NO: 198382 - protein, 57 aa, Zea Mays
MRSESESLSSLARPNLNGYTGRSQATTMSKPDKTFPLLILPVLPSLHNPGVGPYEFR

SEQ ID NO: 198383 - protein, 62 aa, Zea Mays
MRSLFLPVIMCFWRLWIMGIKGLEVGLDVGLGFDLEFSFLQNGKFDSFCSCQFSVVLVASKK

SEQ ID NO: 198384 - protein, 86 aa, Zea Mays
MRCSSRPWKDLQIIYDSYIDFLFFEATKTTENWHEQKLSNLPFCRKLNSRSKPNPTSNPTSNPLIPMIHNLQKHIIIGRNKDLIHT

SEQ ID NO: 198385 - protein, 129 aa, Zea Mays
MPFSLFRIIFWAIFRPPLSQMSVKNFPPTRLASAEGSFVSLEDKAASDCAKNFTCSQPFLSKMVAIPLAPEKAHMFPWLFKISSKASASWLIHSIGPSGSPFVKFSSLENAPTLAKLVFTFLTHSIDFS

SEQ ID NO: 198386 - protein, 112 aa, Zea Mays
MSRHAALSSHSVSSDLWHCWLGHPSFSVVDFIVKSNKLACTPRQSSRVCDPYQRAKAHQLPFQKSKHVTSPPLELVHSDVWGPAVTSVGGFKYYVSFLDDFSRFTWIYLLKR

SEQ ID NO: 198387 - protein, 59 aa, Zea Mays
MDCATAQRSAAFQTEPNRPQHRSATQRARALGVEGMTEASAILSFSAAAVVEDVLRQHG

SEQ ID NO: 198388 - protein, 66 aa, Zea Mays
MDGAGWLAGLVWPSTGRLLEAEGKMGTKESFSPGEVLGRSGGRKEAQSGAEQSGQNALLSRIALSS

SEQ ID NO: 198389 - protein, 75 aa, Zea Mays
MAQVRSPEPAPGTLVTVCPIPLVAAFSSLSARVRAVDGDGCMPQVFMHQRGRSAGGTWLASCAACSDLVARLLRG

SEQ ID NO: 198390 - protein, 154 aa, Zea Mays
MPAGCKGRRGPGEKARLLGHTVPCRAGEQRIMERRAMLLLPAGLSPRGPPLRAGALHPGARFLAKVFYFYFDREKFLRRFWANGISFVDHVPGRHPASVRDVLASQLTWTQDSWCWRTVWGMTFDCITLESSIALKSLLISRPLPFSFVVCQIN

SEQ ID NO: 198391 - protein, 101 aa, Zea Mays
MQQDVLPPMCAVGPSTAGLSSSRSTRDTFENVAQDDDDDDDDDAGAGAGAAGQVEIGPSQLQDAPTTQPSQLTPRRRRPRDPYTPGTDALGAKGKGKTRRK

SEQ ID NO: 198392 - protein, 73 aa, Zea Mays
MEEHIVDIQLMNRPVLMKRQAEDGADGGGLHNGTKSLVEINARAMSKSTKDPTRLVALKGTIRMKLVFEYPLA

SEQ ID NO: 198393 - protein, 98 aa, Zea Mays
MFCSTILLGGIGTQHTKVDTVGEEESSCVGVVKLTTIIALQAFYGGAKLSGNKREKISNSGKCVGFEAERECPQEVGAVVKDGEIVLVTRNTGYWRSP

SEQ ID NO: 198394 - protein, 85 aa, Zea Mays
MQCVSPLPSYLLEYKTTPSANTTSMNAYECNAYVLCLHTSKGMKPHRTPPRATYDAKLYRYGRTIGHDKTSDASESCNVFGMLHL

SEQ ID NO: 198395 - protein, 61 aa, Zea Mays
MPSSSCTLLRFVFVWTCCSLILPFHVYITCAIYFGFFLTVLSDQSQILHFSLCICICLIYA

SEQ ID NO: 198396 - protein, 59 aa, Zea Mays
MMTCTSCIASDRIRSIGGQHPPPPPRAMAGVRACPAGSAADALVLCQIPGDPTRCFGSE

SEQ ID NO: 198397 - protein, 59 aa, Zea Mays
MARDPLRGLYKVPLASENPQQFMGRALARIPRLTAIAAKSTREPPCMQLPYCPCPFQVR

SEQ ID NO: 198398 - protein, 87 aa, Zea Mays
MQDMHSEGVWRDIGRQIRDVRTRLDLAAREAVRRTTRPFCDQRRRSNYSEISPDLFDQVRRSGSNARRGILQFNLSRRLRSDDLILP

SEQ ID NO: 198399 - protein, 61 aa, Zea Mays
MRSPRTSTNVIGYQRLFWMIDMDPSRDGYQTVLTRPCRCLEMDWRPWESLIRLSQTLCLSC

SEQ ID NO: 198400 - protein, 54 aa, Zea Mays
MHLLSHYSLGLYCAHHLSFVVVTLPTAFPRLLQKNSKYRYNITVGAKTKIPTSS

SEQ ID NO: 198401 - protein, 81 aa, Zea Mays
MRGVGALGAQDRTNATLGSGERRGVSIGNFRLSGRHERGRRRSTRSIGWWDARALGHFFFSFFYFLDLNLSLISKFKLNEL

SEQ ID NO: 198402 - protein, 103 aa, Zea Mays
MVRSSVRPIVRSFVRSFVQIIFFLPLCCRNSDRSFVRSFDRSSFVHSSYPSFIVRSYELFTITIYCYYLPLLLPLLFTVTIYRYFLPLLFTVTFYRYYLPLLF

SEQ ID NO: 198403 - protein, 79 aa, Zea Mays
MSLGSRRSIPPSPSLPRGPPLCYPLRPAVLGSVCLIAAPPLPRSIDLRGQRRLARAARRAVARVMSRAEGRGRLTTRPL

SEQ ID NO: 198404 - protein, 51 aa, Zea Mays
MWRQGFHFLLALGFGADILLEATTHTNLPFRFRVGIESDYSEYSISPSLPS

SEQ ID NO: 198405 - protein, 53 aa, Zea Mays
MRPTNRVRQAHGWAGWLAAITTTTTNPVGRRQALINPRHHSHRYWKFRLRQKK

SEQ ID NO: 198406 - protein, 71 aa, Zea Mays
MHPTPHSSQLYSLQCFLLLLVVERFGNARTGQVLGRLLSSKVLFYKKKKRNASFEFLVRQEVAVVVPSVAL

SEQ ID NO: 198407 - protein, 87 aa, Zea Mays
MHAMRAMPKHTRRACLFVKVAYLLVFYLTQTYPLLFLLAVAAAPRDEGEQRLQTKAIICSSAEPQPTRQDGQVQMHKSGEREKNKTK

SEQ ID NO: 198408 - protein, 116 aa, Zea Mays
MAILLRRGVACHLCPYPVTASPRAHKKLPSRASAAAPLGQLTPTSPPLSPISAALAACRVSPSRSPLSLHQAHRRTDVGHEPPSQDLRLLGTAVFTPRRAGAPLSRCRDILRRDPF

SEQ ID NO: 198409 - protein, 82 aa, Zea Mays
MLISGLLFEISPFLSQLESSVLPTMPLVVSFYWSLTMLALTPYFMVLVPLSCTYCSSPLPLTTLESSYSLFKKDHHLTNINA

SEQ ID NO: 198410 - protein, 89 aa, Zea Mays
MFPFFHSPLKGESHASVCGPRSHALIPTGAHSRPAALPKPIIISVPRPHCWKGSASKPYVELPPHTAPLGMGVGPAQACVVKVVVHDLS

SEQ ID NO: 198411 - protein, 158 aa, Zea Mays
MLSHGLVSSALFLCVGVLYDRHKTRLVRYYGGLVSTMPNFSTIFFFFTLANMSLPGTSSFIGEFLILVGAFQRNSLVATLAALGMILGAAYSLWLYNRVVSGNLKPDFLYKFSDLNGREVSIFLPFLVGVVRMGVHPKVFPDCMHTSVSNLVQHGKFH

SEQ ID NO: 198412 - protein, 471 aa, Zea Mays
MLEHFSECYFDLSGPILCPVLGSITPLFIPNSSIRPIRLIGLCVSLITFLYPPVPRIQFDPSTANSQFVESLRWLPYENIHLYMGIDGLSLFFVILTTFLIPICISVGWSGMRSFGKEYITAFLIREFLMIAVSCMLDPLLFYVLSESVPIPMFIIIGVWGSRQRKIKAAYQFFLYTLLGSVFMLLAILLILLQTGTTDLQILLTTEFSERRQILLWIAFFASFAVKVPMVPVHIWLPEAHVEAPTAGSVILAGILLKLGTYGFLRFSIPMFPEATLCFTPFIYTLSAIAIIYTSLTTLRQIDLKKIIAYSSVAHMNLVTIGMFSPNIPGIGGSILLMLSHGLVSSALFLCVGVLYDRHKTRLVRYYGGLVSTMPNFSTIFFFFTLANMSLPGTSSFIGEFLILVGAFQRNSLVATLAALGMILGAAYSLWLYNRVVSGNLKPDFLYKFSDLNGREVSIFLPFLVGGATVR

SEQ ID NO: 198413 - protein, 362 aa, Zea Mays
MLEHFSECYFDLSGPILCPVLGSITPLFIPNSSIRPIRLIGLCVSLITFLYPPVPRIQFDPSTANSQFVESLRWLPYENIHLYMGIDGLSLFFVILTTFLIPICISVGWSGMRSFGKEYITAFLIREFLMIAVSCMLDPLLFYVLSESVPIPMFIIIGVWGSRQRKIKAAYQFFLYTLLGSVFMLLAILLILLQTGTTDLQILLTTEFSERRQILLWIAFFASFAVKVPMVPVHIWLPEAHVEAPTAGSVILAGILLKLGTYGFLRFSIPMFPEATLCFTPFIYTLSAIAIIYTSLTTLRQIDLKKIIAYSSVAHMNLVTIGMFSRAAAVRSPILSYGHTSKAKTCVPGVRPINLLAIGEKT

SEQ ID NO: 198414 - protein, 77 aa, Zea Mays
MERTPLRVYRPIQYVISETVPACSILDTVATCLQTTGVPSYVRRQDLTSRAKARKQNFHILCSHYLDWNWFYRDIQT

SEQ ID NO: 198415 - protein, 78 aa, Zea Mays
MGTNEQGYHLLWPDLPIFLENQFTARPTPSCVAYACAPMLTLYNSVGRATATQPTLAACWFFHHPIHNKSNETASDFF

SEQ ID NO: 198416 - protein, 240 aa, Zea Mays
MRLVYLFRNSITKTVILERKRITAKNRTPRSHLSSCTEKSAAGIIIHSREVSSWAELGSELLPVVANYLQIYSEGAVPQPQGGAAQVVQGTPTPAPQEAPLPSIVPPSCYSLTGYVEDWVACNPTFMSDALNENMMGRGSLVHSSGFPAASGSGPSLNPAVASTPSSSFFQGVGSALEAAAAPAEPGEEVQQGAIEALNVAALPGVPQDELFGAMEQNLGTARPSSGSSGPACSSNSSRY

SEQ ID NO: 198417 - protein, 111 aa, Zea Mays
MEVWLGLVTTTSSWRRRKTRHEGQPPGGVVRSGNSTRPAPKQRKRCVPHSRGTASEILEEGGDDVKSAWPLWAGPHTCYNGNDNGKQGCKAERIRKDCLSSDCSLQLGNMK

SEQ ID NO: 198418 - protein, 50 aa, Zea Mays
MTLRDRCGLFRNCTGHAILQIDPSRDDTRVEFIHLSNPRMSNLSLEFSVR

SEQ ID NO: 198419 - protein, 65 aa, Zea Mays
MRCYFSPFAIIRSCVSLEPDLSLAYAPRNSVKKPPRFSINKGFLIKFLHIISQRYFFNNFCINKV

SEQ ID NO: 198420 - protein, 324 aa, Zea Mays
MKYIKYYILNITHTYDAMPWWVSGIPWWMAESILTLLSLVCIHSILQFNPLIYKGNRCDIIYKVPDITLIGITNHITKEPIKQLQWLYSLTPDNYPTKWIYRLRNLFSYDENIPYRIGFLRIKCSLGLRSIKGLVLSDSVLYQYAHLGAGLKSLIPQSRVAIFMQVATRHFDERHRKYLYGFFNILVYSGVGLVVWYYITPHLIPDLGFFRGVNLDSFKDPASVVDGYKRVSYIFTKDVVKTVLRTCRNDTFFHNLLNEESIQFFDNEIISITDLNSNRHLNLDHFEEVEANKLDLVACIAVGIMSATFIATNLLPPGTTTIVQ

SEQ ID NO: 198421 - protein, 79 aa, Zea Mays
MSLTINPVEGQMEWRVKENKVILLSSFWSVPLLQLRQPRLCYSSRKVFRASCVLPVLTSLKPVHLPGHYWTTIQDSILS

SEQ ID NO: 198422 - protein, 52 aa, Zea Mays
MVSSYLTRVNAKTREAASVILSQNAVFYPRIYTCAILDGLKEVRGRVPYRGW

SEQ ID NO: 198423 - protein, 57 aa, Zea Mays
MWGVVLEPLVLWAYKACGLFDLTYGMGVPIFVAFRIDLRNGPEYQNRCASCDSFRLA

SEQ ID NO: 198424 - protein, 73 aa, Zea Mays
MGTVLPLYLLVYIVGIIKRFLTTVWHIYVLTNNDPCSHNRRIDPNRNAYIWFIRYWYGKKRCILQTREGLSKS

SEQ ID NO: 198425 - protein, 67 aa, Zea Mays
MSCDPCPSYDVGWLLVPRCLVGHEKKTTQFLFGNKTGDLPGFIVCRCKRDVPELGTRTKVPYLPWPS

SEQ ID NO: 198426 - protein, 168 aa, Zea Mays
MKVHTKLVVRHNGIFLRLVDCCFRGRFPCHPRSRGEVRRPWAVEGQVPLATSAPANARSRRPSRKSLTRPQAGGRRRRMASTRGACATRRRSGRRATTATRRTSSGRATRASPTTVGASTTGRRARRWASTACATRSWWPTAPRPRSGRRFGSRSKTRGIWKNEDAYL

SEQ ID NO: 198427 - protein, 96 aa, Zea Mays
MCKRGYQPIVLNRQQMQFGDMSSKQRLERQQRKITEETDGKNTGGGEPQEEELEGRRPAELGLEGADDVVVAAAAGEGKTQTRDLRERSVVGRKKE

SEQ ID NO: 198428 - protein, 81 aa, Zea Mays
MQFGDMSSKQRLERQQRKITEETDGKNTGGGEPQEEELEGRRPAELGLEGADDVVVAAAAGEGKTQTRDLRERSVVGRKKE

SEQ ID NO: 198429 - protein, 76 aa, Zea Mays
MNYSLLCEQYKSSQSLSRTSPNEIYLKKMVSIGYHQCKKLPNYDYILGPVWKYFCCFKKIYHDFVNCFGFENWRLS

SEQ ID NO: 198430 - protein, 78 aa, Zea Mays
MICGSTSSWSYASPSVEPMIILRRFFKSKSTPLSQNWNRKSMISLISHVSLFPEIILAPATYKNNYIHCFSYFSQIFI

SEQ ID NO: 198431 - protein, 118 aa, Zea Mays
MTTGMACASLQDSQNFGLSLPSKTSLFTKQERQPRMRCSTLLCLLKLLSSFMLYKTYWQIFRNMIREANGSAMVPLACFPHRRPILTCLATSGPTCLATSGPTSSSPGCGKQNVSLNT

SEQ ID NO: 198432 - protein, 653 aa, Zea Mays
MPFGLTNAPAAFQCAMNLVLAPFLRKFVMVFIDDILIYSPTWHSHLEHLRLVFATLRDHKFYLKERKCVFGKKELIYLGHVISGEGVATNPQKTEAMLKWPTPMTVTDLRGFLGLTGYYRRFVQGYGIIARPLTKLLQKGAFKWTPEAEVAFQRLKQAMVSTPVLALPDFNIPFAVETDACDDGVGAVLMQQGRPITFLSKALGVSNQKLSIYEKEFIALIMAVDRWRHYLQRSEFEIRTNHKALSFLGSQELHSELQRKAMAKLMGMQFKVIYKPGKEKKVADALSRVGCVMALTAVIEVQPRWIQEVTNSYVTDSDAQSLLTRLCVHSPDEYGYSLSQGVIRKGNLIWVGHNSALRTKLVAALHDSTMGGHSGVHATYHRLKKLFVWKGMKTDVEDFVKQCQICQKAKGERVHPAGLLQPLSVPQGAWQDIAMDFIEKLPKSSGYDTILVVVDRFSKYAHFIALKHPFTAAQVAQVVLDQVVRLHGLPRSIVSDRDKIFTSIFWSQLFKLLGTKLNLSTAYHPQTNGQSERVNQCVEMYLRCAVHAQPSKWKNWLPLAEFWYNTTYHTSLACSPFKVLYGYDPPFAAAPHIPSDAIVDVAQLLEERAQFTSMLREQLAAAQNRIKLKADRLRTERQFNVGDMVLLKLQSYT

SEQ ID NO: 198433 - protein, 173 aa, Zea Mays
MKKAGLASFDENKMESGLASVAQGMEGCVISNKETGAYGMPSATNNPDASGQSFSEALRSSRKHPLQYDASESADGGLGGKCAKKKTKKSKEHKIGGGGQCHAAAGTMRHDKGGKCHALCYGASRLSVSSSASCSILSSREQPSSARRNSAPSYATATIPMLPIQLLSGGRTS

SEQ ID NO: 198434 - protein, 257 aa, Zea Mays
MIFRGASPPAASIGSDGVYRRTSSGLQSVDPQPQFFVLPAHAPPVPCQLRPRRSLIVSPPRLEAITGAGAEVGLWVPRLHRVLPAERHPQCREPGSLGDRVAREQSATVVRDVARELLCGVVRREDGEDGVHGHQWWLLLGVNCGHEYIHGRKHRLVERSEVDDAADRLHLGHLVEHPHQGKPELPSHGHHPHPKNCAFVVGACGANHDKRSADSPLEEQHEDAHPENYHEPANTVVFICLGVIKEMRGIRIPLLLK

SEQ ID NO: 198435 - protein, 97 aa, Zea Mays
MFGGIGSTIAQGMAFGTGSAMAHRAVDAVLGPRTIQHETVASEAAAAAPAPPVMNADACSIHSKAFQDCLNNYGSEISKCQFYLDMLNECRRGGVSA

SEQ ID NO: 198436 - protein, 351 aa, Zea Mays
MSSSSGTTMPLAYQTSASSPEWLNKGDNAWQLTAATLVGLQSFPGLVVLYGGVVKKKWAVNSAFMALYAFAAVWICWVTWAYNMSFGDRLLPLWGKARPALSQGGLVGQAGLPATAHHFASGALETPAAEPLYPMATVVYFQCVFAAITLVLVAGSLLGRMSFAAWMLFVPLWLTFSYTVGAFSVWGGGFLFQWGVIDYCGGYVIHLSAGFAGFTAAYWVGPRAQKDRERFPPNNILFTLTGAGLLWMGWAGFNGGGPYAANVVASMSVLNTNICTAMSLLVWTCLDVVFFKKPSVVGAVQGMITGLVCITPAAGHHACIMRRFSRFLVKKFHLLDQSPARLVYLLSVHVR

SEQ ID NO: 198437 - protein, 60 aa, Zea Mays
MDHHTRTFPRVVAHRHTLLFHVRQHLNCISVMGYDKSISTWSRYYSAADSHRRPGHNTSM

SEQ ID NO: 198438 - protein, 69 aa, Zea Mays
MLMGLPGPLDVLIPQTLNSKPPQPLSRPQPHSRRPLRSPLPSSRLQSCQVRRRSPAPLLPLTSAHSSKI

SEQ ID NO: 198439 - protein, 52 aa, Zea Mays
MKNEILTWTIALRNPLFSTSKYIKSRTRVEQQFREGTQGVFARLLGQLGSFN

SEQ ID NO: 198440 - protein, 222 aa, Zea Mays
MAIISPNTGLIAASFAVSPSTFPRRRFVPKPYSLQNAAAPKLKSVNRAPRRRENSNSAGLVRNRRGAAERWSEREIEIIRFAMSSRAGGGKPLWSASTIVAKVASGYHILRIDGYSRTMETPTGESIASLPFSVGGRCWRIRYYPNGDKLENKEYISLYLNLHDRSVEAEKAQLMFRFVGDVAEQPLILGRLHTFEKQDAMWPCASTMSAWRRRRKPLLQQL

SEQ ID NO: 198441 - protein, 62 aa, Zea Mays
MVAREISIFSYEAISICRSWKNKYGSSRQTTCDVFIYSSKDYCIHANCSSFMQTSTSSAMYS

SEQ ID NO: 198442 - protein, 63 aa, Zea Mays
MHGVTDRVVALHSAAAHGSPPRVVGGCQCAPCWSLELDLRSSCWLAALVKNRQRLIATVLVAP

SEQ ID NO: 198443 - protein, 165 aa, Zea Mays
MGTGVAKVPTSTRALRLSSVSGTSRSGDFWTRSRTSTKSSSRSPGMRWRLPLMCSSTISSQTARRSARQLLSRRRRPVTVLATGSSSGKKSPTVKPAKRSCASARTSPSLSPLPCGNRRPNATRQSTSLARFRKHSLRSTGCCAGEVFLVRRARRRRSSFTRTAP

SEQ ID NO: 198444 - protein, 68 aa, Zea Mays
MTSFKCVFQVMFANNLHQITDVLSTACKTSTMSMKCPGHRYRETERSIFLFIIIVESIASRLNQIGVM

SEQ ID NO: 198445 - protein, 81 aa, Zea Mays
MRARSAQRSGTPILAHRTLNTTCPVGTGHPGGPRRQKLQRSESNGIGDVAGAPDMSGVHRTVRCTIRQTASTNGQVWWLGL

SEQ ID NO: 198446 - protein, 315 aa, Zea Mays
MREWRREWRMVRQRDELHTSHSETTRRADEMPRRAAKQETATGGSRASARVVASTGPSGKQNSGAPDRAAGARSDGACRVRGSERLERRQERPAAERAAGSLRAAGDLQALGSVAGLRGRPASEPGRTTCTSTPGSRACACTPACRRRAGQRCCREGTGRGRTVGGVGQRHKRPERHDGSGGSGRGAGRGSAGRSPSSSTRRWTASPARRARSSTGTGRSVARARSEEDERPRKTTSRARGRQAGRRTERCAAHQSSRHPPGKRPQPNRDWARPRQPWRRSAVGEERAGGWRLGGRDAVGWGPAAGREEGGKNLI

SEQ ID NO: 198447 - protein, 683 aa, Zea Mays
MNSNRNIVIVSWNVRGLGHEDKCAAVRDVFATCHPSIACVQETKLSDIPPKKFKSFLPTSLSAHTFLPANGSRGGIATAWNASHFSLVSVSNATYTLSTVLSYNFSDITFTLTNVYAPADHLYTAAFLDELRSLANSISGPWMITGDFNLIRDPSDKNNDNFDVSLASAFNSTIHDLSLVELPLLDRLFTWSNKRTSPVLARLDHTFFNGEFESTAPNTSLTSLSHATSDHTPLKITIDTSIPKTRCFRFENAWLHNPSFLPVIEPVWTTVTNHAGCATGAFVARLKDTRRVAKVWSKHNHTPLLINNCKFIIKLLDLLEERRLLSTGEMVLRAHCREKLLQLIKARAAYWKQRGKIKVVKEADENTKFHHAYASHRMRQNQIRVLELDGVRCTSHVDKALILDNHFSALLGANIEPVWDFDVFAMYSTLPRVDPEPLIAPFTEAEAHAAVKAMNSNSAPGPDGFGPSFYRHAWHFVKPTVMKFLDSFHGGVADLERINRAYIVLLPKTAGAVAPGSFRPISLQGCPVKIVGKIMTSRLQQQVSSLVDMDQTGFLKGRSISENFVYATELVQCCHKRRTPTVVLKLDFAKAFDSVSWNGLLAVLRARGFPTLWCEWVKQLQVTAKSAVLLNGVPGKWISCKKGLRQGDPLSPYLFILVADVLQQLLTRDCVIRHPLAADRPCT

SEQ ID NO: 198448 - protein, 115 aa, Zea Mays
MDRESSRLTTPPGPTTKQPEWPEQSLELLLAGEAVRMQLLSPLREEAAAAMPRPHFASRLPRDSESEHCSDASSSFVAALLDWGRPSFPSSLLESSPSCCFSAEPRRCASGRRTC

SEQ ID NO: 198449 - protein, 1743 aa, Zea Mays
MRVRLQVRHMWEAVRYDDVDYHEDRRALDALIAAVPPEMQFSLSQKRTAKEAWDAIAATRIGSDRARKTTLQALRKEWENLAFKPGEDVDDFALRLNTLLQKMVQFGDDTYDEERAVEKLFRCIPEKYRQIARSIESLLDLSTMTIEEAIGRLKVVDGDEPQALSGPITIGGKLHLTREQWEACQGDKKGESSSTRDRKRGKPRKARGGAQAGARGHAEGGARGGAQGGAVGNKKSARDDGCHNCGKLGHWARDCRQPRRGQANVAQAEAEEETQLLAHASIEPSPAAPAAAALLHLDESKARAFLGDGSNKDMIEGWCLDTGATHHMTGQREFFTELDSSVRGSVKFGDASGVEIKGAGSVVFTAASGEHRLLTGVYYIPALRNSIISLGHLDENGSRVEVENGVMRIWDPSRRLLAKVHRSPNRLYILNVKVAQPCCLAARRDDGAWQWHERFGHLNFEALKRLGAKEMVRGLPCLDHVEQFCDVCVLTKQRRLPFPQQSSFRAKERLELVHGDLCGLVTPATPGGRRYFLSLVDDLSLYMWVMILGSKGEAVNAIRRVQVAAEAECGRKLRVLRTDNGGEFTAAEFASYCADEGVQRHYSAPYSPQQNGVVERRNQTVVGMARALLKQRGMPAVFWGDAVVTAVYILNRSPTKALNGMTPYEAWHGRKPAVYHLRVFGCFAFTKELGHISKLDDRSTPGLPMSISKMKTKKPIGTPTSSKLMASAFKVTSSKDELMVLMQKSAEVVQPAIASATASVNASASSSVRASASASIPASAQASVGNDEKQVDGQIGKRLTSWVWQHFTRYEIDVEQPDGSNVKQKWAKCLRCSHKAKVDASNGTKAFSNHLKLKHCLVKGQQQLSQSGNDIATYKYDEKANEDGSQRNNVEVLFPGSRLSQPQGDGTATDHAATRESVASASSDVAAAAGSTIKDKAIAALPAVLAEMAKDTKRKARSSDPGLNLLRGYGRLGLQLICLYRSISSSLHNKIMMATSWIGGLSWLSEVRARGAVMTVTLPLPPSGLPPPDASFPPPTGPSPAPIPSPATTPLPSPASQDPSPGVQRGGRPEVLRYAPCPPSSGLSPALTPRPATTQLPSPASEDYPLGVVRGGRSKEQRWLEDGGACASSAASLVRGDVGKKSYREALFSPRPAASRDVDGWVTVVRRRPNTLKSLPRPVPVDLRGRCFNCFSSEHRAAVCRNRVRCFFCRLPGHRVGVCPRRRTDPPIPGRTLVWRPVAMRPSEKNVCDRDMAVAGGSGPVTTTGEGARKRTRRGQRKRRSGAGEQLPPPPAFGLDKPVSFVGRCGRIDRAEEELRRALIVSVVGREDSGCAVEVRDAIASRFCLEAGSLRIRRAAPNSFLVFFPSVAVADRVIGEGQSLHVPPLRLHIRRWSRQAFASGGGKPLVPVGVELRGIPAHLWGIEAVLGAFCLIQGFLPGLVMEEDMSVLRLKVWCRSPVLLPAVVDLLAEEPMVCGEDGSWVPSTLVFPVSVVVLHSDGSSASGVDPPAPSPSGFVDEDSDHEHHMERPGRPTSSVRVPIHLRLGQRSRSGLMDDMSVMAVHQDLEREAPGHPPDLGSVDALALPEVSVAELEAPGHPPVLALDLAEDLEFSCQEGWSSHVVISPARPCLDNPLVGDLMTGLAEVVTAGQHGSGFSYLLTDGVSANVEEAVTAGQHGSGVSPIGGCWFSCCCLCQGAEMEIKATRVQSLFQKKIISGSGGPGRPFTAICGGIGSTFGGVQVCGY

SEQ ID NO: 198450 - protein, 98 aa, Zea Mays
MVTCSCTNKSQCNQIEQNENVQPLQQTVTRNIHENRHCNHLRITSDFYDLTTRQIALDDVELAQWACSIYVKPLVYTAAVKMVVARELTQFHAIFVRA

SEQ ID NO: 198451 - protein, 198 aa, Zea Mays
MMVMEPRPGVCRRVKPATALPEMPGWSADTRGAHANSPTGCRTGRAGRIRTRALMSASVAPPSRPSGFSSANGRTTTTPAPFRRLPPPLSADACSDSSRVAARFREGPQVLGSGGARAGPRAAPRPGSGRPVPAPAARGSPRQLEEDELGRGSASVAGACCWNAALSAAGAGPAEKIELKAWSSSSPARQQERFIGRV

SEQ ID NO: 198452 - protein, 163 aa, Zea Mays
MMHEGAIKRPFPYNPQLPLWPYPVSPFAVKVLDSPLPALKRRYLGASSSPPPPSRALPSVGAHRHLAVLYRVALYRAAVPPPRLLAVNKHDLLAHIASFDYRPGMMAELDAQMGFVVGGTILMLLTVVFFEIQMFAKPPKKLCNNKFIFVHQHLFIIILVTNK

SEQ ID NO: 198453 - protein, 329 aa, Zea Mays
MTKHTAFAGADGGTTAAAAVTLCAPPRARGARRVAAGSLPELVRRHADLDDWMEKHPSALAGFESVLAAAEGKQVVMFLDYDGTLSPIVKDPDSAVMSEEMRDAVRGVAEHFPTAIVSGRCRDKVFNFVKLAELYYAGSHGMDIKGPTAQSKHTKAKAEAVLCQPASAFLPVIDEAYRALTARTAPIPGATVENNKFCLSVHFRCVQEEKWRALEEQVRSVLKEYPDLRLTKGRKVLEVRPSIKWDKGNAIQFLLECLGFADSNNVFPIYIGDDRTDEDAFKVLRGMGQGIGILVSKIPKETSASYSLREPSEVKEFLHMLVRSKQRRD

SEQ ID NO: 198454 - protein, 499 aa, Zea Mays
MLIKEPGLGAREMQYRLEDQFTVTLSYNKVWEGRKLALKELHGTWEDSFKLLWNWKAAVEATCPGSLIEIDCKKVKGQMHFSKMFVALRPCVNGFLMGCRPYLGVDSTHLTGKYLGQLASATAIDGHNWMYPVAYAIFDKETNLNWKWFMTLLKRAIGTPPGLTIHTDACKGLAYGVSQVFGDAAEHRECFRHLMANFRRKYNGEVLKYMWPCAWACTHERHQVLMDKISETCPNAVAYLRYDHPHLWTRAKFNKICKVDYVNNNISECFNNWIKNVKELPAVDLMDMLRVMIMEKIATRQSIANKMQGHILPSVVNDLHEKSRNLRYTITKSGYMKGEVSGASRDGVAWRYGVNLVTQACSCGQWDVTGKPCTHAIAFITSQRNLRIEDYVGECYSVQRFKDAYQFEVYPMGDRLQWPKLDPGFEMRPPKLEGRPAGRPRKKRIKSAGEPGKRGPYQCKRCFQYGHIEKGCKNPVVEPHEDLPDNHLQRKTKKGTKKR

SEQ ID NO: 198455 - protein, 171 aa, Zea Mays
MECGKGNGPLDESLHVAIAGAEATQKVQHQGPVTRQARRGHGESLPCPSSGGSTRPRRGPLREQVELGVEVQGASVPIPEELFFESEPRLTAHVLLVADDVLELNGDGSVEPVEDHGVHQGPSSGRQGGDVVEDVVVEGVAPQGEKDLPPPARIVGGRQVQNDGHEGPNVL

SEQ ID NO: 198456 - protein, 148 aa, Zea Mays
MAGRVQGGRRKRQRSSSKAAAAAPSSSSSPSPPREEEERPRTTTLVTPGWISTACARAPARENSSAAATNRSAAASSSTDTSASAANGSSSTLSNMCGRRRSFFPPSAPAAAEAQRCTAMVRFRGAGWTLMAGGLLAASGGAEESDRR

SEQ ID NO: 198457 - protein, 727 aa, Zea Mays
MAPAAGTATGSASGGSAVHDDAEAVELGHNNLIRRRHPGADVEDEADDRNVGASAAAGKELAPSSVEQAFADQPVPSWREQLTVRAFVVGALLSVVFNVILMKIDLTTGINPSLNVCASLLSYFLLRTWTRAIGCMGLLRQPFTRQENTMIQTCVVSAYGITFTGGFSSYLFGMSAKIANKTEVNDPQDIKDPHLGWMMGFMFLVSFLGLFALVPLRKVMIVDYKLTYPSGAATAYLINGFHAPEGSERAKKQVRTLGKYFSLSFLWAFFQWFYTAGNHCGFGSFPTLGLEAYKNRFFFDFSPTYIGVGMICPYIVNVSLLLGGIMSWGIMWPLISTKKGSWYPETLPDSSLHGLHGYRVFLTISVILGDGLYNILKVLYSTIEAFVSRYRNRKANTLPVSNDGTPADATTETESFDDKRRLELFTKDQIPKTVALGGYVVLAAITIGCLPLIIPQLKWYHILVAYIVSPALAFCNAYGCGLTNWSFASAYGKLAIFSFGAWAGASHSGVIVALAACGVMMSIVGTAADLMQDFKTGYLTLASPRSMFISQVIGTAMGCVIAPCVFWLFYKSFDVGATNGAYPAPYTFMYRNMAIMGVDGLSLPKHCLTLSYIFFAAAFAVNMVKDLVPKKVAKFIPIPMAVAIPFYVGAYFTIDMFLGCTILFIWEMRNKAEADSFGPAVASGCMCGDGLWALPEAILSLANVKPPICMKFLSRSVNARVDSFLGN

SEQ ID NO: 198458 - protein, 638 aa, Zea Mays
MLSTTWASPKATPIPSSPASQTATRLHPASSSNRTLRLVALPSPSAPRRRRRPGLPPPARAGLVATAAMPAPEPKARVLVAGGGIGGLAFALAAKRKGFEVLVLERDMSAVRGEGRYRGPIQLQSNALAALEAVDAAAADEIMDSGCVTGDRVNGIVDGVSGSWYIKFDTFTPAAERGLPVTRVISRMTLQQILARAVGDDAILNGSHVVDFIDDGSKVTAILEDGRKFEGDLLVGADGIWSKVRKTLFGHSDATYSGYTCYTGIADFVPPDIDTVGYRVFLGHKQYFVSSDVGAGKMQWYAFHNEEAGGTDPENEAVLRRDIYDRPPTMNWGKGRVTLLGDSVHAMQPNLGQGGCMAIEDGYQLAVELENAWQESVKTETPIDIVSSLRRYEKERRLRVAIIHGLARMAAIMATTYRPYLGVGLGPLSFLTKLRIPHPGRVGGRFFIKYGMPTMLSWVLGGNSSKLEGRLLSCRLSDKANDQLYQWFEDDDALEEAMGGEWYLIATSEGNCNSLQPIHLIRDEQRSLFVGSRSDPNDSASSLSLSSPQISERHATITCKNKAFYLTDLGSEHGTWITDNEGRRYRVPPNFPVRFHPSDVIEFGSDKKAMFRVKVLNTLPYESARSGNRQQQQVLQAA

SEQ ID NO: 198459 - protein, 154 aa, Zea Mays
MAPLSVDTGTQFLQVAAHLVRRSSQVHTPDQLVHSPHQHCFFVVGPARSSMMRTCFISSHPAHIYIREDELYTNELAASNQASSQLDEISASTTYLQVLWPRPQRPEGPGELGSPTECCSSSSRPLALPPLAADLYYKNASFEFVTAEMRSTRN

SEQ ID NO: 198460 - protein, 101 aa, Zea Mays
MGFCSSCCMPCPFLTLDMKLKETAQRLQAWSEKEVSHVRTQLALAKELLHRLEIAQDDRALNLAELWLKTRLKKHSLLLSSFKRTMARLRSKNFMAQRRRC

SEQ ID NO: 198461 - protein, 145 aa, Zea Mays
MSSAADEDALSSDKGKKREEDGTDGRSQRQEGVEVADGKVDLGDLYGAAAGWVEARTSCPHIGTMPPAGADDLARVPSPDSPCSRCNHPAENWLCFICKDVLCSRFINKHMLCHHQETGHCLALSFRLSGTSHRKPHIVFRERRR

SEQ ID NO: 198462 - protein, 89 aa, Zea Mays
MMASTSMGGSDANISFGLWGKAMSSEAVGEVVRAPSMEMVEGSGCARGEGQDSGAGGVWKGHRGWGKRRAEAWPRSRMRMASVIGPACC

SEQ ID NO: 198463 - protein, 140 aa, Zea Mays
MGAILTYRDRAKHPCTPLESRRLLFSSKLHCIETVHVSKTERPPRRRPTRGDSGGNPSCRTLSRFLPSPAAPRPEQAADRAVRPARKLAAGLAAAEAFPRRSSAGADPWGGVRYDGRGARRWHDCRGPRGARHRCAAAGV

SEQ ID NO: 198464 - protein, 666 aa, Zea Mays
MCSLLPIYALLKRSSVQRHHLLPSRSIGLDYRQPPSSSSQSDMPLLVLRVPLASTNNTSTCSGAAPPVAVAPAAEHSDGLLFDGLALGHGDDVDDKAEADGDDAATVKLEWLRSQIIGAEAEFASPFGTRRITYADHTASGRCLRFVEEFVLRNVLPFYGNTHTTDSYVGMHTSKLAGDAARYVKRSLGAGPRDMLLFCGTGCTAAIKRLQEVTGMAVAPTLRAAVLAALPPSDRWVVFVGPYEHHSNLLTWRESLAEVVEVGLRAADGLLDLAALESELAARAPSGRPMLGAFSACSNVTGLRTDTRAVAALLRRHGAHACFDFACSAPYVRVDMRSGDADGYDAVFLSPHKFLGGPGSPGVLLMASRLYRLRATAPSTCGGGTVRYVSAYGDTVYSDDAEEREDAGTPAIIQKVRAALSFRVKEWVGEACIEAQEARMLALALRRVRAGANPSLRLLQGADAAASAPRLPVLSFVVYAPPRDGTEPEGRLQLHCRFVTKLLNDLFGVQARAGCACAGPYAHRLLGISPARAKAIRSAVEQGYHGVLPGWTRVSLAYYTSMQEAEFVLDAVAFVASFGHRFLPLYTFDWKTGDWHYDHSCARGLVPNIVGGNPSGRVKAENCYQSYMAFAHCLAESLATTCTGLSSDPAIRIPKSVDPQLVYFLV

SEQ ID NO: 198465 - protein, 131 aa, Zea Mays
MNLRSLRSLVMTSMATWLACPLCLQTGKKGHFMKGDAVIVIKGDLKNLEGWVEKVEDETVHIRPKISDLSKTLAFNEKELCKYFKPGDHVKVISGVQEGATGMVVKVEGHVLIILSDTTKEHVSNCFIKIM

SEQ ID NO: 198466 - protein, 79 aa, Zea Mays
MDHGWCSRLARSSSLHCDMIWFMHRTSVDMKCYKQDGLISFFSVDSNACIFKTWFTMIYYAFTMVVYKPHTVSRRNVRT

SEQ ID NO: 198467 - protein, 197 aa, Zea Mays
MLFVALYVALLQLRNVTSTCTSSTWIGILDGSPASGSGANGGGRRHGRAGRHTSRAVRLLCRCRVRRRRHRRDHGRGRAGPHRQAAGPAPSQLLYVLRLRHRRRRRGSGALLLAHGGLRRAGGLRAARALAQRRARVLLSWLRRYGGARRLPRQPRRRHALLESLRLEQCGECAVLGLAGRRWLLLHQHHRRPVRCW

SEQ ID NO: 198468 - protein, 85 aa, Zea Mays
MLYPKVAPSTAGQHLQVQQMVLSNLSLDNKTHLATKEHSVTLNNIWTCLEFMPEIWMECDVIVEELCSKECSSSSNMMGLELKPK

SEQ ID NO: 198469 - protein, 69 aa, Zea Mays
MASLPPASPLLRSGAIDRIGILPSNHARSSPREINLCLGLRVRFVFCPRSLWFQLGSPVTRVPGQVRAC

SEQ ID NO: 198470 - protein, 133 aa, Zea Mays
MQRRGKEGDEGGGARTEVRVDGVHVGVVPLAGAGVAGAVAVCEQRRGVVGDEREEQHDDGSGHPAELRDGPPQREHPGADHRRDDVRARRPHRPCSTCMQPNTSECTSALNVNTAASGKKNHGPSQGVHPLDA

SEQ ID NO: 198471 - protein, 296 aa, Zea Mays
MGPATDPSPFISGPPSASLVVAGSAKGRSVYGFSVRVRRLERDRDMRGRWTFTRGHDGRSDRGGAPVGVRGLDERGGGGGVRARHGRPRHDVVLHHAVVAVEFRRRRRPAPRRQDVQPRRRDVRLHRGQTAKKKKQRVLITRQFLVSFIVCAASAHVRTYVQYLENAGLQDVGATRRELRHHRRRPDVHHGPGGVQHGGRAGAGVDVAEDGVGVGCGDRGAREDVRVDGDFGAGGRWVAEQNGRAARALHLQALPHPQPSAPQAHDDLASHLVAGQGVGQALAASIVDGGTRATTT

SEQ ID NO: 198472 - protein, 172 aa, Zea Mays
MESCSSSVMTAFVLLMEAWRVGQNMSAGHTDSIDAPSSSRGSRSGRSSRCRAGDWRGRRWEHGLDQRRRWVVGARAGRESATGARAGWTRGGSGLDRATVDWTGRRSAGAQDGHATAAVSRSGRAKEQDGHAAAVSRSATGEQDSASAPTVVKTAAKENRRWIGDFFRWFHR

SEQ ID NO: 198473 - protein, 209 aa, Zea Mays
MMARLGRTAKVLRRFTTSLLLMTSVVHGGAWTQNTTNCWRRLRCDERRWRCSTTAIRPRWPRLAGPRDARGGRPSCTPRAAPAARRALRRDAGLSWRRGTTGSGGLRVVPDCDLQRTSSGRARPWLQHDCAPRAGPGVGRARNGEDKEARGPRPGEVEGDGRRRGWPGSFFGGVGAGNRVFGEEDVQRRLKRGWELGEACRRAWASRVR

SEQ ID NO: 198474 - protein, 113 aa, Zea Mays
MGSDAGSQGGSESQRKSDGEQRERGRADDTRFDRRFVWSKSAETTMGMKTRRFSWRSSPCGSYHPREFWRHRVVCTVWSGGNETTRSRRCVRVSIDCRAMFRKAAGSRGCSAQ

SEQ ID NO: 198475 - protein, 86 aa, Zea Mays
MSTAAWYSARVRIFGESMETTSSARNPSWSRRSSSLPWQTSSGRTSVLCRPGSSRSRSVSPLSPTSTATLDRSMPHCIDRYLQTQH

SEQ ID NO: 198476 - protein, 1403 aa, Zea Mays
MATLSSTTSSLTSSSASTIQSTPAPLHQIVTIKLTKKNFLLWRAQLLPYLRSNKLMRFLDGSQPIPPAMVPASTSAGAELIVNPTYETWYDQDQQLLGGLLSSMTEEVLADVQSATTAKEAWDSLLRIYASSTRARTVQIRVELANIKKRDLTAATYFAKVKALAAEMAAAGAPLGDEDIISYLLAGLATDYDAFVTSITTRSDRLSLDEVYSHLMVFEARLQRNQAEMQMHLNSSANYARRGGNNLRGRGGPRGRGGRGNYSHGGSSSRPTDPPGARRPATTNNNSRPLCQICGKIGHTAVRCWYRHDDSYNEDPPMANVASTLPSYKLDNWYGDTGATDHITNELDRLAVRERYNGNEQVQVGNGDRQTRRCLLEGQCEGGLYPLTISSAQDLTHALAARKINRDQWHARLGHPASQTVQSILRINNIMCSSESFSSVCNACQMAKSHQLPYSRSMNNASAPLELIHSDVWGPAATSVGGYRYYISFLDDFSKFSWIYLLHDRSEAPQIFLQFQAHVERLLDSKIKCVQSDWGGEYQKTHNTFFKKLGIAHRVSCPHTHQQNGAAERKHRHIVETGLALLAHASMPLKFWDEAFLTATFLINRLPTRVIDNKSPLERLFNISPDYSTLRVFGCACWPHLRPYNKHKLSFRSKECVFLGYSPLHKGYKCLDLSSGRVYISRDVIFDESIFPFAKQLTTSSHIDSSGSSVNSSVDRLCYSLPTHLLSTENSPAAEPSSGSTLVLLPRGLPSDFELQLPPTNPATSGVVHATAGTALETASDSLAPSSTPESLPDGRIHEEARTAAPTGTAGPDSSSAPTTAAASSDPVHGAVSDHVLVPSSTANGATNEDNSHHYGTRLKNNIRKPKIRTDGTVGYSAIVTYSVTRTANLEPSSHVTALKDPNWKQAMVDEYNALMFNKTWHLIPPDPSLNVIDCKWVFRIKEKPDGSIDRHKARLVAKGFTQEYGIDYEETFSPVVKHTTIRILLSLAVIRGWSIRQIDIQNAFLHGFLEEDVYMHQPPGFIDFQHPDYLCKLDKALYGLKQAPRAWFSRLSNKLLELGFSPSKADVSLFIFHKEGLCIYMLIYVDDIIIISSSAPATDKLIAQLRDDFAVKDLGQLHYFLGIQVHHTSDGLYLTQKKYIHDLLCRTNMLEAKGVSTPMVSAEKLVKTGGILLSSEDATRYRSVVGALQYLSLTRPDISFCVNRVCQFMASPTVDHWTAVKRILRYLRATMDMGLWFTRSSSFLLSAFSDADWAGNLDDRRSTGGYIIFLGGNPVSWSSRKQSTVSRSSTEAEYKAVADATAELIWIQVLMRELGITLSRAPSLWCDNIGATYLCANPIFHRRMKHVEVDYHFVRERVTRRQLEVRSISSKDQLADIMTKSLSSTPFQVMRDNLQLAPLPPD

SEQ ID NO: 198477 - protein, 99 aa, Zea Mays
MLHNLGLLAIVPQHGCTRFSNWWCQSIKKVEKSLRKGLNSLIILVAWEIWKHRNACVFEGVVPCTQRVQSAVIEEGNVWCLAGASALQDLLLRQLPRGP

SEQ ID NO: 198478 - protein, 109 aa, Zea Mays
MPPKKLSMSAELLTHVRSFMDILHCSTTIYLRIVLADVCLCGDDSRSLRLYGFAADALHPRSCHSIPLSHLPSVLVLHTWFFCLLLSLSSALVNPHRSYSLCCFRRQLQ

SEQ ID NO: 198479 - protein, 408 aa, Zea Mays
MAAPQPVAQAPEAPPSAQVVGNAFVQQYYLVLHQSPDLVYRFYQEASRLGRPASAAGAAGMDSVTTMEAIGEKIMEMDVSKAEIRTVDSQESLGGGVTVLVTGHLTGRDGVRREFSQSFFLAPQEKGYFVLNDMFRFVGEIPAPTAVEAQPEADAVVLSVAANGTSTLAVEPATPDDHAVPQQEHHVVDRSPPQPEEEEEAEVYDPPPEEVVDEEQPVPEVINEVPNNVAAVLATTVAPVLQEEAPKKSYASIVKVMKEVSLPAPAPPTRTAPPKPEKQSPALAPVKDVLPFSSNPENGNIQEPEDDAHAIYVRNLPLNATETQLEDEFKKFGTIKQNGIQVRSNKIQGFCYGFVEFEDSTSVQSAIEASPVMIGGRQCYIEEKRTPGSRGQSIYKLILNLMQCLCQS

SEQ ID NO: 198480 - protein, 288 aa, Zea Mays
MGMAPMPWPHGPSSTRKTRTAELEASALLPSQSIPSLPFRFPHATRLLRRLVAGSRWKSPPLIAHPGDPPRPQTKPSSSSAAAFPLTPASTNPPSHTHHTHKTKKSAFERRATSGAWCRRDALVSERARAFVLWGLGRAEERGGSAIESGSAGGGRADGKGTLLRQEQGPQEGALDAGGGQAPRRLHPDQRPWQLAPAPQARRAEPVRQELPTAVDQLPPAGHQARALHSRGGEVHRPAPRHRRQQVRKLFCRAEVATACPSHSICGTGREQHVSSLVMLSSHSLIIA

SEQ ID NO: 198481 - protein, 163 aa, Zea Mays
MAPCCGSARDGSGFDPLTSHPSAKKAAPARMAVPQAWEYQRLYCRTANRHWSRRVAASGIAASGGFGYPALPGCALPTPGKRGRATLPSAGWGGGDVVGFSWWFAIPALWIDHPQPLDEERRQERRAILCTRTSLKQASAWRPNLRTGIEGRCTENVLHYRSR

SEQ ID NO: 198482 - protein, 90 aa, Zea Mays
MKAQIVLLPWIGAVDGEGRRAAGLPNGWSGQRYFSANTQIVLLPWIGAVDGEGRRAAVLPSGWNGQRYYSADGVGGATGMKGVDGGGRWG

SEQ ID NO: 198483 - protein, 308 aa, Zea Mays
MKAAASALFGLPDSLYARPNTFGELMRAIISPSSKVQEAVDWALKGVNPDIVLHMRMMANRPVRARKAAVLCIKKALQFSHIKGTALVALVSDTPAFVKEIKSDISEFAEVLNFDYKLFAKTSSLEIVGNDKPLDFRSRDWGSAPRWVAFVDFFIAAQARYAVVTGAHRRVGTTYAQLITALAAANRHGREPSGTNFTFLSSVHSNLLVEGLSTQVGWGHIWNRYAGPLSCRRQPHQCALTPLLPPAWWDGRWQSPIPRDVRRLLEYGVRLSDTGEVDERHLLSYCRSRKDHVKRFHVLPPYKNPARL

SEQ ID NO: 198484 - protein, 290 aa, Zea Mays
MYSLGNVPFQPRSGAFPVNSLANRPKRNPNPTQISREWYDRIQIYRNAPTKKKGTAFFLVFPTTNTKHIPKSYLKNEKFVAPIIVNTTTLQAQDSRDNTIPATRLNPTKIRESTPGEGRKFSEEANGEGKAELTSNDVHAAEDDYAGAQEREERSEDTPLRRRRHRPVGPGSRRTAAAAAATSSRRTALTTPEPAQLPLLRRYRHRRRQSQPPLPLRQQPRSQSGGSEPHRPTASATRYGESGSIGAPPISRRLVGCRGRGREKAKRRRGPANPERSVAFARKEACFADS

SEQ ID NO: 198485 - protein, 428 aa, Zea Mays
MAAAGEQAASKQAAAGEQAAADDQATDQRARAGIVRAARHELAGAERATPGEFAAGRASSELVATGLLATAGQHAAPGIGLSDASVALDEEEPVGIDWSYNDTHWLGMDEHTGLAGIDLSALPLVDWDSLEIQEEKEEEGIIEICNEQQLYGLLGLKKDGGSTTQMVTESFSNSRAATTDASGMLNMQITQAVAIDVTDHISEERTIAYDEDSPCMKLGTPYPSMEKFRLAMRQYGINKEFELGIEATCPNRYRGFCKSDGCPWTIVGHKQADNITVMVTVLNDVHTCTSSSRRKTTTPTCKWVASKAVVILRENPQMRCVELQKKLEKDYKCKIGYDTVWRGREKALDLLCGSWKAEILKRSPDSVVEIDCKVVSGRVYFHRFFCALGPCIEGFKSGCRPWLGIDSTALNGRWNGHLAAATGVDGHN

SEQ ID NO: 198486 - protein, 280 aa, Zea Mays
MVSASAPPPPPQAQSDAAGSGEEASKKVRKPYTITKSRESWTEQEHDKFLEALQLFDRDWKKIEAFVGSKTVIQIRSHAQKYFLKVQKNGTSEHVPPPRPKRKAAHPYPQKASKNDSSSIHRNSGMNVSVSSWPHRSIPQAVASSMVKEDLGAGTLGPNNFCSSSTEGPPRTWQPGETNGPINQIPSLRLMPDFAGVYSFLGSVFDPSTSDHLQKLKEMNPIDVETALLLMRNLSINLTSPDFEDQRKLLSLYSASDGPELGSSRSSALATSAPFMIKGG

SEQ ID NO: 198487 - protein, 91 aa, Zea Mays
MRSTGIRVRCRMMREGDRREDDDDDNDPAGSIPSIGLQVYTARGEGGDRSYQTHCSSMIDVSVAPCAGRRQHGPDMGRDRGREAGGEDHRR

SEQ ID NO: 198488 - protein, 232 aa, Zea Mays
MGKAEARSRGRGGGGGGGGASGNPGKIFVGGLPRDTTDATFVRHFGQYGEIVDSVIMKDRHTSQPRGFGFITYSDPAVVDKVIEDNHVINGKQVEIKRTIPKGSVQSSSKDFKTKKIFVGGLPSTLTEDEFKSFFARYGTVVDHQIMFDHETKRSRGFGFIVFASEQVVDDLLANGNMVDLAGSKVSLKFIIEMTPMVVSSIVDLWCKICKVVFCILLFQVICCANFMEHHA

SEQ ID NO: 198489 - protein, 105 aa, Zea Mays
MHMIQVRRGSGDLDLESRKWLFFLSENGSKRICKRVLVATEQNRRRYRCTGWWAPTGPGPRRPQLGPRGWMRRRIARSGGGSNGTAGEEREVEGGGRGGGAPWLN

SEQ ID NO: 198490 - protein, 205 aa, Zea Mays
MRGRNILEGVAILHETIHELHRKRLSGVILKIYFEKAYNKVKWPFLFQTLRMKGFAPKWISWVRSFIMGGSVAVNVNDDVGKFFQTKKGLRQVDPLPPILFNIVADMLAILINRAKEHGQVSGVVPHLIDGGLSILQYADDTIIFMENDLEKARNMKLLLGAFEQISGLKINFHKSEVLCFGDAQDSLESYLELFGCKHGDFPLK

SEQ ID NO: 198491 - protein, 103 aa, Zea Mays
MQVLILTNCLLIGVIPPWLQSLGSLNVLEISCNKLDGNIPPWLGKLDNCFNIDLSNNSFSGKLPVSFTQMRSLNSNNGSSKQSPTEGSHCSAIKANPPSSPLD

SEQ ID NO: 198492 - protein, 218 aa, Zea Mays
MRAAVPLVAAATAGGRRTRCPLWRPWGPRRRRLTGSRCAAAGRGRGRTRAWSRTRTRTRMQGRRCGVVRTPRCSCWKRWRKRRTRTLRGRPSARRPRTATTRRRRRWLAAGRRAPAPRSRAWTWAPSTTRSPSRGACPTSSPASRGRSSRTCGTRRRRGAAPGAWPSRRTRSTSGGGCCATAPPAGGPRVRLARRRRRRRRRQRLWLALKKTCTRTQR

SEQ ID NO: 198493 - protein, 243 aa, Zea Mays
MVRSSVRPIVRSFVRSFVQIIFFLPLCCRNSDRSFVRSFDRSSDRSWFVRPFVRSFVRSFVQIIFFLLCCRNSDRSFVRSFDRSSFVHSSYPSFIVRSYELFTITIYRYFLPLLFIVTFYRYFLPLLFTVTFYRYFLPLLFTVTFYRYYLPILFTVTFYRYYLPLLFTVTFYRYYLPLLFTVTFYRYYLPLLFTVTFYRYFLPLLFTVTFYRYYLPLVFTVTIHRSSDHPKFQLLIHHVVQST

SEQ ID NO: 198494 - protein, 271 aa, Zea Mays
MRSSPANRTQLLPPLQEHSLRSRTSDHNEQSTVLESEFLSDKRLRPLENTTMRKIRSNLFQELGVAYTSTDFGERGLWTGAPAAGAEGTLGLMPRVQWRRFLALPCDRPVAPTFRTSRHERRPHATPIPVEPWAYRLWSAMVQDDPTQTQEPYGWSSLGYQTTPGGMTVLQDMIDVLARFEYRNRDTRGRLLDKNDNDETITSILNAIVIFVEAFRFRSIYLAVRQSIRDDENSSEVKEAFGRALRAPLPTRTTPAEPNDKNLNCFMVRVE

SEQ ID NO: 198495 - protein, 362 aa, Zea Mays
MPPDLRQRQTRRKRRSAAPKAEPMAIPAMAPPESFLPLWPFSTPLPPLVPPPPPLPLGTGVGDGVCPAGAGDGGTSPGQGPKGPPHKPVPRNAERGCDRSEAGMDPFSWLNETLNCCSGGSFTSEISPEKRLFSRSRTLRCVRLPSSVGMGPDRSFPPSESLTSPGRARIACGNPPDSLFPLRKTLRSAAAEDRSAGSAPESPLRRRLSVCSAVRFPSVPAGTVPESVAPGSRSTATRPCSQVTPVHEHAPATSEAFHARRRPTASRNATSARASLARSSAPASDATTRSMGNAKRMRRSRHGGGEGDRIAAAAEVARAGPVRNEPRLRVVSSVSSFLASGVRGEKNPKTPVRISWNGPRGV

SEQ ID NO: 198496 - protein, 390 aa, Zea Mays
MGEAEERCSAGAGCSFSLTCLEDGADLDTGGSAAESADGGKLAASLYGDAEEDQEYIDHLVSKESSFCRSPSSSLCSPVVSDVSDAGAETCPCPSSMAASSHEWFRCARRATVEWVFEVTDGSVQHSTDAGLLRLLPPHGVPGRLLHGPLLPPPVHGQVSDALGGAAAGGGVRVPGGEDGGVPRAGAAGVPRRRRVRLQQRLHPAHGAAGAVHAGVAHGRRHAAGLPSLPLLQQATPGRRWRPRRRQGRRAYLLHRGSRQRARLPAVHRCRRRRPGGSPRCRDKGSAGVQDEQPVSVQPARQGRRARLLQHDDAERELVGDAEQAVGGQETGAISLRLHRRRQSIRVRRRGLLLVRGRGGQQQEGAAGGAAGRRPMRSTAGQCSLRFFQL

SEQ ID NO: 198497 - protein, 60 aa, Zea Mays
MSIICFFWHPFGPLFTIQDFGFYYLSVSFMQSLSQWQHTLIALPMVRIVSKFGGNFYIQN

SEQ ID NO: 198498 - protein, 174 aa, Zea Mays
MQKCSNASLKSGMYGFTFFILSSFLATSVAMNSSCSDSGSTSGPSVVMFVLSASPATAIRSLDSDTPTTPSPSSSCVTQPKHRSSAPLCVRTVCTSSYLARRRSDRRFESSTAAPPIRNRQLDTSLERSFPEYQLSVMFSVLMTSAYDPGCVCSRSLARSTDSSPALHPIPPRL

SEQ ID NO: 198499 - protein, 96 aa, Zea Mays
MGFHFGTALIAQNYMDHPLRSIPNLLQTEKSAGLNFYLSLIFQTEHCIFRLLFLQVPYRFRASILNKSCSPIVNLQVYYSNLLPKAPRLKHTGVQK

SEQ ID NO: 198500 - protein, 68 aa, Zea Mays
MRMLASDMIPATAHARWESILYIFSAEREVWRSLEVTFFSPTRTTPSAARIPRADPALPIASIAYSTW

SEQ ID NO: 198501 - protein, 736 aa, Zea Mays
MSDIAPSPSSSPSSGGNGGGNNSTAPAPRGSSSSSSPPKPRNGWPSSSPPPTPSSDSEGSRSTPPSDWQDPSSSSSSPPPSRSSPPPPSSQPPPSPPPSPSSWSGGGNSTSSSPPTPPSQPSPPPSGRSSSPPQRSSEGSSPSPQSSSSNQAPPAPSGWSPSPSRESPPQSSSQSPPPQSDVDQPNSQPSNTPQSPPPPPSPPSSSPPAPPTNQSVVIIPVPVPSNNSPPGALPPPGLVPTAPGATVMSSTSVPGSAASSSSQEASTGASNGGGGSTSTRVVGSSHVAAAIAGAAITGLMFALLAVFLVSKRRKKKTDGSNYNMASGQFMGSNNPSYTQPAAGESADMGGGGGYYHYQNQSGSMDAAAAPGSMASFSYEELTSITSNFSRDNVIGEGGFGCVYKGWLGDGKCVAVKQLKAGSGQGEREFQAEVEIISRVHHRHLVSLVGYCVAQHHRMLIYEFVPNGTLEHHLHGRGMPVMDWPTRLKIAIGAAKGLAYLHEDCMHAAILLATTSHPRIIHRDIKSANILLDYSFQAQVADFGLAKLTNDTNTHVSTRIMGTFGYLAPEYASSGKLTDRSDVFSFGVVLLELITGRKPVDQARQGEESLVEWARPVLVDAIETGDLGAVVDPRLVDGGAAYDRGQMMVMVEAASACVRHSAPKRPRMVQVMRALDDEGGMSDLSNGVKVGQSRNFDSGHQQAAAIQQLRATAFASEEYTGEFEQSSGMDYLKSGVP

SEQ ID NO: 198502 - protein, 80 aa, Zea Mays
MQDMYFHGKWTLHNMRCYLLRMLNNMNQSKSLIKHPAMRILQYTFMFRASLGTLFFQGITIFPRENELIFFAKMRIPWKN

SEQ ID NO: 198503 - protein, 55 aa, Zea Mays
MDILGSTIPSAQFAANGLRFADEYFPFPHHLIFFSNVLDGLPYHIYWRLVFGFCF

SEQ ID NO: 198504 - protein, 336 aa, Zea Mays
MNDLHGTWEGSFTMLWRFKSALEESCPGSIIEIDCQKVNGRMHFSRMFVCIRACVDGFLAGCRPYLGVDSTHLTGKYKGLAAATAIDGHNWMYPVAYAIFFKETNDNWAWFMANLKKAIGTPPGLTIHSDACKGLAYGVKKIFKADAEHRECFRHLMTNFRKKYKGDVLKFMWPCAWACTTRRHDYLVENITAAAPKAIPWLNKHHKLIWSRSKFSKKCKVDYVNNNISECFNNWIKDYKDLPVVDLMDKIREKIMEKIATRQDIANRLEGHILPSVLHELNMKSRGLNYDFSKSGLLAAEISGTTNEGKTWRYGVDLNKRTCGCGQWEVSGKPCT

SEQ ID NO: 198505 - protein, 920 aa, Zea Mays
MRDRSMAGAGAGARSSRAGGGKRGAASSSAAAASACVYYATTALLVALCVAGAYFLTSTSSADGDAATVTAYRHTTRSSFAYELTRERAAPRGEEASEARDTPAAVKAVGAEEEPRPDRSAGAALGDPHARPDEERVSDEAAAGVEEEHEAAAVAMEDVKAEDGGGHVAAGDDEAASARGGEVEEEKERETAVLEESSREQREQEQEQEPQLEMPHERPRGAAAAVEEKNLDGGIEEESNAGQRQREAEQSALEEQQAAAGSQLRREAQEDPQADDGADEGTEEERGREQSQGEEEARSSSVSGSSGDADSGEAVSESEHTGTGRADGNASQDDGRSVEVEDSLAAEGRTEEQKAWATQADESHRETDRRDEGGDIDGNGAENAGGEEREWRVCNVKAGADYIPCLDNEKAIKKLRPENFRRYEHRERHCPDEGPTCLVALPSGYRRPIEWPKSRDRVWYSNVPHTKLVEVKGHQNWVKVSGQYLTFPGGGTQFIHGALHYIDFLQQSVRAISWGKHTRVVLDVGCGVASFGGYLFERDVATMSFAPKDEHEAQVQMALERGIPAISAVMGSKRLPFPSKSFDLVHCARCRVPWHTDGGALLLELNRVLRPGGFFVWSATPVYQKLTEDVEIWKAMTSLTKSMCWELASIKKDRLNGVGVAFYRKPTSNECYESRRRQQPPMCADDDDADAAWYVRLNPCVHRVPTAPSERGARWPSEWPRRVRLPPYWLNGSQAGVYGRPAPEDFAVDYDHWRRVVDGSYLNGLGIDWSRVRNVMDMRAAYGGFAAALWEKKIWVMNVVNVDAPDTLPVIFERGLLGIYHDWCESFSTYPRSYDLLHADHLFSKIKDRCAVLPVVVEVDRIVRPGGSIVVRDEAGAVGEVEKLLRSLHWDVRLTFSKNDEGVMYAEKSGWRPELVEEPS

SEQ ID NO: 198506 - protein, 70 aa, Zea Mays
MTTQRCFSSFPMSAERSRGGRRARKDRGASFSAMSLLLLPFFCARMKNNYHARRKHMQEWVWSSHRIDYP

SEQ ID NO: 198507 - protein, 1187 aa, Zea Mays
MTQVTSIKKTVITHKNEDGSHRAPRENDAYGDPRHSDHRPLIIDTGGRGKSLNGRSYESYLKFEAKWLEEEDCLERVKKAWVGAMDSGADRVVEAQKILLRELHDWDRNVLGMLEKRICKVKKELERCRRQQICQESVSREHLLRYKMERLQDQLNIYWKQRSHTAWLTKGDRNTQYFHAAASERRRRNAIKKLRKDDGAEVEGSRLKEFIANHYQNLFLSSAGHSTVEVLRSISPRITDEMNEALIKPFSQEEIWEALQSIGDLKAPGPDGIPSIFYKRFWSIVGEQVKKEVLAVLNGGQMPRGWNDTIIVLIPKVKSPEKVKDLRPISLCNVLYKLIAKVLANRLKSILPEIIAPSQSAFVPGRLITDNVLLAYELTHHLRNKREGNYGLAAFKLDMSKAYDRVEWSFLERIMRRMGFSEKWISLIMLCVTTVSYKIRVNGEFTRTIWPQRGLRRGDPLSPYLFIICAEAFSALMENAGRRGQLEGVRICPGAPRVSHLFFADDSLIFIKASVSGAAHLQQILSLYENASGQVINKDKTAVFFSKNTPPPIRAQMMAELGITQIASNDKYLGLPVHIGKSRKSAFEYIKQRVWAKIQGWQQKLLSKAGKEILIKAVAQAIPTYAMSCFDLTKGLCDELSSMIGKYWWSNQDKVNKIHWIGWQKLTRSKSLGGLGFRDLYAFNMAMLARQGWRLITQNNSLCARVLRAKYFPSSNVLEARAKKGISYTWRSVLKGLHLLKEGLIWRIGDGNQVNIWVDPWIPRGETRRVITPRNGSLLHKVAELIDPITGSWDCRLVRDTFLQEDADCILAIPIQEGMEDTLAWHGDPKGNFSVKSAYALASRRRDHHNNADASSSISGRGENVWKSIWNVNVTNKIKMFLWRLAHNSHPVRVNIARRGIKIETLCPMCFRLDEDGGHLFLKCKKVKQVWRCLCLEDTRTLLASKASALEVIESILTLREETKIKVVLLLWCWWSARNKAIQGERCGSTEEVCNTVAYHLMNMEKLQIGKSARAPPMNLKWQPPPAGFYKINCDGSYRAKSGLGGWGCIIRGHDGGFLAAGAGALTGISSALHAESVACMKGLELAVFLGMQNVMIETDAAILKTALTSQEYDLSALGVVFKEIRSRMFSEFACCIVSKCQRTCNLVADCLAAHGANSGDVDSSLWLDHAPDFICNLVSGDVPGAA

SEQ ID NO: 198508 - protein, 87 aa, Zea Mays
MTRCRTSIRISSALPPQELLWSGGLRHHRCLAVHELLRVSVLWRLCRVLGLREKRGSMHGESGNSYWWAELYRNDISNKRKENLNCC

SEQ ID NO: 198509 - protein, 161 aa, Zea Mays
MANSFILQQNISTDLKLVTLCHLGQRTLKIKILPPELVKSCTASPCLFMWLLNRIILTKKTPYQSLGHALLRQSNLTCEEFEAHLTGVHADRGIQWLMPAGLTGGDPATRQLRLAREGCHRQRQDEGCVCACVGRSARQAQWRAKTRHGPQGSSSTSVSSS

SEQ ID NO: 198510 - protein, 71 aa, Zea Mays
MKPQFPTTTAQNHLRRRLFSSWCSAQLSSYGPRPSKSGEFQPAGSGSQRARVHTRPCASPICAGAGAAARF

SEQ ID NO: 198511 - protein, 322 aa, Zea Mays
MRTVSSMALFLSISTHLTNMLVLDGPVISCQKQQMYIQSSRGMVECSHRDPNITCWKHQFELAGSAFQPEPWFESELLAPNKTSLIVKLRMGELGLDVFLGKETVWLHGLNLFAVSSSNMALKVLEEDKYDYCSEFFELATEFFSSGNAEEGANILMNCKTLIMSVSSILLEDTLNKSQLSDSDFNWDCNTQDVEKLLPLTLPWNLVTYDQLETNLPHSLSYGIISVAVRKLVCLAALHDYSGSMSDATMTYFDMLATVFCTTEEIKSSIIVYIISGLRASHISSGGECQQQYKEHVEKLRMKHGVRKQKTSTRAGTHVNGL

SEQ ID NO: 198512 - protein, 66 aa, Zea Mays
MPLVPQQKGKSKINGMVLMQKRSEGSIFFLMLLAGAVHPKCISEGSSTGDRAVHLTRSQPPMIYLR

SEQ ID NO: 198513 - protein, 151 aa, Zea Mays
MYDVAIARNENASTIGPTIPLLDLSSSKGSETVLLPARSGSVPKITPSHTRNRARGMAVPATIAVRTFDRSPSKFVQRTGTTFWYTNERAIIGILCGAAAKFASRRELHCRFPLATTTREVKDARMPTTRTPFTAPINRWLRSSIIQYNLF

SEQ ID NO: 198514 - protein, 489 aa, Zea Mays
MVSLDDVEDLDQKRHPGHRDQVRRRSEMVSSKKVCVVGAGVSGLACARELLREGHDVTVMEQSGGVGGQWLYDPRADGGDPLGAAGAHSSMYASVRLISPRELTGFSDFPFFPRDDGTGDSRRYPGHAEFLRYIRDFCDAFGLMDVVRLNTKVLRVGLAAPRAADDGDGIKRWTVSWSRHRGCDGEVVTTEEEVFDAVVVAVGQYTQPRLPTIRGMDKWSRRQLHSHSYRVPDSFHGEVVVIVGFRHSGVDIALELSKLAREVHVSVKSMEALTPAVSKAVARHSDLHLHLQIECLREDGQVTFADGSRVAADSIIYCTGYDCSFPFLDTGGLVTVDDSRVGPLYEHTFPPALAPSLSFVGLPRMVLVPRFYEAQARWVAQALSGWRPLPPSEEMARSAEEYHRAREAAGVPRRLSHALFFDMDYCDEFGAKHCGFPPVEGWKRDLLSLSLASASDGAVESYRDSYHDSDLVREGLRSEGWWPWLPDPQ

SEQ ID NO: 198515 - protein, 730 aa, Zea Mays
MTLPLPPPRLPPPSFRLPALADAPASSSTSPMPVLILRPAATALSSPASAAAPVSPLPSPGGRTKAQRWSDEGGHSSAVALVHGASRHSYKEVLLAAEFPASGGAAGVVVGDGWIRVEGRRARRATTGTSKPLPRPVPLSSLVLLPAAWSPGALVPYPVVASIPLSTCSGVAPGQQGVASLPGRARVWRPVSRGAASLPGRAQVWRPISRESSSVATPPGAMEAVLSGGLKKRTRRGQRRRKVAGDMQVDSVVSGQVASDHSPRGPARIVKFLRRSREVEHAEADLRRVLIVTILGPGSSDCAAVVLEQLASRVSLEADALHLRRAASNSFLVFFPSEELASRAINVGQSLFVPPVRLHLRRWSRQALASGGSSLPLLMDIELEGVPAHLWGVGTAELLLDGLCMVQGLHPDSIDSVDMSVLKLRAWCFSPDSLPAQRRRLLGHDHSARPSVHSRLGPRTSSSSAAEPVDDALPPVVLADELAVPGSDALADAEFFPCALVEELLAPGPAEPVDATILPNDLDGSAEPFIPGVAVVELTAPGSANPVEAVILPSDLVAVDSNLCSADIRVADVNIVESSSSFINLLGRPGPSLNCWLSTKPWCFKVYSRKKKTLVVEESVMSPQLLEFRNDLVLPMAQLFPTPLIAKRKKLMPSNFKPQRSRRVAKFPPELGSESAAKVCRFLGFCDEQENISFQDARKYASLFDAALSSDHIAALAALFGWEVPQVVQA

SEQ ID NO: 198516 - protein, 141 aa, Zea Mays
MAAVNPIPRVLNHLRCGRRGDLRPPRRSCCQGDPAIGWTEKQSAIRPSPSPAIIPFVIIARYPLLPLALGGGARAVGGSCSILRAVRSARARAHTQSDQSRAPIQSVLSDPPAGQDHTTEQNYAVISITHSFVSRGGGGAS

SEQ ID NO: 198517 - protein, 89 aa, Zea Mays
MGRETGLLQLLAPLLLTGGKGADLVIRGNVVLNTLSARSTSTLLRDQICINSSSSRQVLRPSRTVPRDRLQFLLYAIERVVCLNWIYYS

SEQ ID NO: 198518 - protein, 251 aa, Zea Mays
MKTDTSTPWAGLNLQILRQVRALFDMATEVIVGNGENTKFWTDWWLHGKRVADMVPNLFRAIPIRMAKRRTVSQAVHNRSWVSDIMGALTVQVLFEYLHIWELLEEVIIQPDTLDTLVWRLSSSGCYSSKSAYETMFVGTIKFSPWKRVWKAWAPGKCKFFMWLALNNRCWTSDCLAKRGLFHQSACLLCDQAIESINHVLSSCVLAREVWTLVLFENIKPNAQLVVQAVATEGCLAGAKALQDFVLRVGS

SEQ ID NO: 198519 - protein, 68 aa, Zea Mays
MTKPICFQPANLLVFDDRGKTQTDRFDQGISQMNTIVHHSLKVGRREFIEARTHGHGTAFGARRRCVV

SEQ ID NO: 198520 - protein, 248 aa, Zea Mays
MMDHQLFDDPFGSSISSLEAEIFSAAAQLPPSPPWPDIDLDDDYDIHDLSAPAANAATSSGGGYGSGGSGGHRKLSHNAYERGRRKQLNELYSSLRSLLPDADQTKKLSIPTTVSRVLKYIPELQKQVDNLERRKKELTNANCKPGVLKTTKAVTPIVSATCLNDTEIMVQVSLHSDVAATALPLSKCIKVLENEGLHLVSSSTYSSAFENKTFYSLHLQFQAPNPQARGVTGSLSISRIRERPQQTK

SEQ ID NO: 198521 - protein, 87 aa, Zea Mays
MVIINQLLLYWVGILACSGYLFFQCYNPSDLLAELEWLFVRVSKEPFPSSLFNIKYTVLMHVQKNINQLLKLYLVSISHKTEILTNV

SEQ ID NO: 198522 - protein, 78 aa, Zea Mays
MHLVSCASRLRSFRHTRCPHHPTSRDRTSWARRTTAGAPRCLAERGHGATEEEEEDEEEAMRPGRLTEWGGAGRSVVL

SEQ ID NO: 198523 - protein, 270 aa, Zea Mays
MLRHCTHKQHRHSHQQSVVAAAAAPATMAAASPAFSLFFPLPNTKAFQFDDDSHSSVTTCPSSPSSSSSSTGTVDCTLSLGTPSSRRAAAKPRPPCLALPSRSAVSCDVAAPADQSCCCRCCSCPGGRRPSPAAANKRAAAAHGHGQDPAPLVDHRCASCGTTSTPLWRNGPRGPKSLCNACGIRFRKKERRAATGTTTADMDQGGCYLAQRAQYGAATSGRAYYGGGDGDIADAEAVPAQFLAWRPSVVEAAEFAAVWPEPATLFQYIN

SEQ ID NO: 198524 - protein, 119 aa, Zea Mays
MINSKCVIVMGSKLASVCSYKYDYSFVFYTSSLVNCYTSSLVNFQRSSELFRVPCLFTNHPLCQSSLKICFPHRLPFVSKSALLGDSEFVLDAKVPCWLWRGQLKVGGLTMFVVFDMLY

SEQ ID NO: 198525 - protein, 83 aa, Zea Mays
MERFGLSRTREGAGCRCRLLPRGTEQGEGSRRRLFAEGSNCIAFWLEGVESVRAMQGSGRIGLPRRFACALSVGPLPAGMVVD

SEQ ID NO: 198526 - protein, 131 aa, Zea Mays
MTLNVCCCVLPMMAVLSVGANARHVVESSTSMSTFRVVSFMEAPPANAMTTVGTRSCDAWPSKHVSRMEKAGARCAPAMAWATALLSAVCTAVGRRVITVPESMIVGRLLYSDGETASGLPPTDIPDRVMK

SEQ ID NO: 198527 - protein, 86 aa, Zea Mays
MMTISRAAMAICLWMLKYGRTVNHRRGGDHRGDRLYWCVDVECCSSCSHAAPVLLVAKLIAVKIMILVKVEMRCMHFLLVPHRNLN

SEQ ID NO: 198528 - protein, 72 aa, Zea Mays
MIRSSPACSKKKYTTKISVTHIKHTLIPKLPQLPGNEDDDSIHPFSLGNTLIILPHQDAKQLYVAWGAKTAK

SEQ ID NO: 198529 - protein, 520 aa, Zea Mays
MRVSDCARLCSQGAMSNVFDMKGRDMNGADAQSCNAARARLKSASLHHVDLPSNRQKDDTRQYQMFVATWNVGGKTPSNRLNLQDFLQVEESPDIYVLGFQEIVPLTAGNVLVVEDNEPASRWLGLIHQALNETQEQPDDDDDPPPPEPPADSRRHHRRRDSSLFFQTPSLKVLSNSYRVDSALVKTCNCSTEPSSMRRRAAEIRASVYRADAEAEAAAGDGETSTSGCNNDTEAASHGGGAGTPTAQCEPGCGGGGSISYCLIGSKQMVGLFLSVWVKRELVEHVGHLRVDCVGRGIMGWLGNKGCIAISMTLHRTSLCFVCSHLASGEKEGDELRRNADVAEILRSAHFPRACKLPASHRVPEKILEHDRMIWLGDLNYRVSLSYEETRTLLEENDWDELLKKDQLIIEREAGRVFSGWNEGKICFAPTYKYTHNSDAYAGETAKSKKKRRTPAWCDRILWRGDGIEQLQYLRGESRFSDHRPVCGVFAVELDADDGSKIRRAYYSVNARIGYDKTAA

SEQ ID NO: 198530 - protein, 154 aa, Zea Mays
MSNLSASYVHLQICNGTHALLRVGGLSGLFTALAYRLRSGLSAWTADMTCLLPCLPAASASALSSPATPACAGAASASAAAPPTVNTNGPMGTSSSSASSGSSASTTCRMVGRALGTLCRHWCATPAAFSAARAEYCISSPGSMKRCRRSARRR

SEQ ID NO: 198531 - protein, 116 aa, Zea Mays
MTRWTGPRGALALTALNWVQDIQGNLSLIGIEQYFQLWEVLGGFQLQNNNDNHVWRFSSNGLFSSKSAYRAFFIGAETFEPWKRVWKSWEPLSVRSSFGLLSTINVGQQTGCKREV

SEQ ID NO: 198532 - protein, 397 aa, Zea Mays
MIEQGIVRRSDSPFSSPVLVKKPDGSWRFCVDYCALNAVTIKDAFPIPVVDELLNELHGARFFSKLDLRSGYHQVRMRLEDVHKTAFRTHDGLYEFLVMAFRLCNAPATFQALMNDVLRLFLRRFVLVFFDDILIYSKNWEEHLHHLRMVLEELQRHQLFVKCSKCAFGAPSVAYLGHVISAAGVAMDPAKVQAIFDWPVPRSARAVRGFLGLTGYYRKFVPNYGTVAAPLTTLLKKDAFAWDDKAAAAFGALKVAVTSAPVLTMPDFTKTFVVECDASSHGFGAVLTQEGHLVAFFSRPIAPRHRALAAYERELIGLVQAVRHWRPYLWGRCFVVKTDHYSLKYLLDQRLSTIPQHHWVGKLLGFAFTVEYRSGATNVVADALSRRDTEEFDDFRA

SEQ ID NO: 198533 - protein, 271 aa, Zea Mays
MKPVAALLLCAAAALSSLSLPHGAPCPWRKRARRTSASGVPPHVARLPTPAPPRTAPTWRAGPSASRRRDPAAPTGSKGPDAGGPRPRSNPSHRGGADPGPVGGGAHEAATPTCDVEVVWPFFSSSCRSTAGWPHVVGFWLLVGPGPRHVNGQRHGTDPLLLLLPPRAHAARSAPAGGRCTGVSASARGAGEPCARVDSGRSAPASRAALNVSRTLACTNTMHRSLLARASGHEADVEAQARGGRNATGRAGESVTRQPDSIAGVKTDRGA

SEQ ID NO: 198534 - protein, 862 aa, Zea Mays
MRTRWSWRTMRWPSPPTTTRTVAAGTPSSSPTRWRRPSCRGLAWCSTPWTRPSRYTRPTPTARGSMPCAALATTTKVESVDLEHNHPCTPDMVRFLKAYREMPEPTKKKAKITDEMDEMVEKSLSEIAETRKFPTRPKRGANVGSAVGSQRLSRLESFMQRFGEDDLNSLKKFIDKMQHRKPNFIHSWDLDPESHVKNFFWTDSRAQAQYRYFGDVITFDVMYLQHSRASRPLATLLGVNNHGHLVLLGCGLLSGDSKENYVWLLKRWLSCMNGKSPEAITTGYSDVITEAVAEVFPNARHRFCFWHILKKLLENVGRTHEKEAISSRFKEVVYDSVTLTDFEKEWGAMVDQYSLKDNKWFSALYSCRKQWAPGYVNHSFWAGTSAIRKAEKTDPYFDSVVSKTTLPVFLEQYETTLKEKLEREAYDDLRSYYSRLTLLSGLPFEEQLVELYTVTMFQTFQDEIKQLMHVICKEVDRSGNSITYMVSELIQGKKVDYTVVYDNSDKDVWCICRSFPSRGILCSHALAVLKQENVLMLPPKYILNRWRKDFRILNSSANVNCMESDRNLGFYDDLYFRAHEYFEDVIDIGAREPELKEFVLSAMKEAKDRLIRPDHSQQSDQRFDVNMTVIGQVSADTGVDMNMASHTSASIHGDRRVDADIAPNAPALVHGDTMTSNTTALIHRDRRVEIKMPMTHLIHGEGRLDMNMTSPHLMQRERRVDMNMASPHLIQGGRRIDMNLSSPHFIHGDRRVDMNLASPHLIHGDRRVDMNITSPHLIQSDARVDMNMVSTSQNGMHTFDLVDINLESGSMPMAATDFMQMHPHPAVYHPKQLVMRDQVIDANKRPNMESDTYFMGGSMHVG

SEQ ID NO: 198535 - protein, 192 aa, Zea Mays
MECASMRTRSAPSPTSLTRGRFAVLSTTTRPPPGMSTSSGASRQLSATPSRSCAEGAGSGDEALTMPDAGWLDTSAAAFASGRSHARDTNSVEKPVKMPLAPVSWKLVNCPGLWPLEVSPRKRTVSWVGAAGPLCHHVTTPKGSARASPSFTASTFSLVASGRTMPQVPVPVVRFVQASADSDIFRYLSDYQ

SEQ ID NO: 198536 - protein, 101 aa, Zea Mays
MAFDMRYGESSHPHQLQHSLRRSPCNDHSMQVQRRETHPVRAQTRERSTRAMKPDGYQARREGPGPGHCVEAAHILSGPPSLWMAWTKQWCRSGVHLRRGT

SEQ ID NO: 198537 - protein, 109 aa, Zea Mays
MRESLLRQILFASEMIFSSSSEYSSLLVVLSHLHLKLRLPFSFSDLRQFYSVVRSQGIQNPRRPALDSIFASVGYRKPQSSADLLFWSNYRVFHCTLFQLCPATLGKVF

SEQ ID NO: 198538 - protein, 102 aa, Zea Mays
MAAFFPFFLLSTNLMVSFSHREVMILARVLFFSSRSYLGLCLTGMVSELLLVSKEDRDPLGKARKVIRYQPSTRRSHYFDSFYAIMNETFSIPMQLILLELT

SEQ ID NO: 198539 - DNA, 1593 bp, Zea Mays
caaaaacccagaaggaagtagaggcccccttcttgccccctacgcagccgtgtgccgtacaccgtgcacgcacgccgctcctcgcctccctgcaccatggacgccggcgagtgctccacctccaaaccccctcagccctctgccgcctccccgccctgcggcggggaggaggtcgcgtggtgcgagatcaggcggaatgccggggacgcgtcgtccgccactattcggaaccttagctcggatgcaattattgttgatggaagaattgtcgaacaagaatgcgtagacatcaaaccaggcagtgagattgtctctggaccccagaaagaagggcatttaatatatacatttgaaattacagaggcagaggatcatgaaaaaaaaaatgtcaagattgttctagatatcgagaatgcaaaatgcagcatatgcctgaatttgtggcatgatgttgttactgttgctccatgcctgcacaacttctgcaatggatgtttctcagagtggttaaggaggtcttcatctaattcacgtgataaaagccagagcgctgcatgcccacaatgtaggacaacagttcaatcagttggaaggaatcacttcctgcataatattgaagaggctatattgcaagctttttcctcactacagagatctgatgaggagattgcgttgttagagtcgtatgcttcagttaagtcgaatatgaaaaaccaatcaaggaaaagacgtttttcacgttctagtgatgataccgacaattcagatctaccatgtcctcaatgccgtaatgaatttggtggatttagatgcagcccaggatctgtgcacttgcaatgcagtggatgtggaggaatgatgccagccagatctaacatcagtataccacaaaaatgcttggggtgtgataaagcgttttgtggggcttattggtattcgcaaggtgtgagttcaagtcattgcaatctgatctgcaaccaggatactttgaagagtatttatcagcgacatatctctgcacttcctgacacaattcatgggggcaatccatatgaaaaagatattacagaaagatgtatacagcaatcaggcaaaacattgcaagttgtaatctcagagtggatatcaaaatttgacaacatggaaattgatcgttcaaggttgcaattgaataatgtggatgcaattacttccaggacatatatctgcaaccattgctacagcaagtttgttgatttcctgctctactggttccgtgtatcattgccccaaaatcttcttccacgtgatgctgcggagagggagagctgctggtacggtttcatgtgccgcacccagcaccatcggcctgaccacgccaagaagctgaaccacgtgtgtcgcccgacaagaggcaaccagccctagtgagacttgactgtttctgtcaccattgtcatcaccatccattgtatgtgtgtgtcatcaaaatggtcaggaagtgtggcgcgtccatgtttggaaccctttttggtttgatcctggctggacctgacaaggaaattatattgctgctggtgccggaaccgccgctctgtcggcaggtccgggggg

SEQ ID NO: 198540 - DNA, 1551 bp, Zea Mays
ccttcttgccccctacgcagccgtgtgccgtacaccgtgcacgcacgccgctcctcgcctccctgcaccatggacgccggcgagtgctccacctccaaaccccctcagccctctgccgcctccccgccctgcggcggggaggaggtcgcgtggtgcgagatcaggcggaatgccggggacgcgtcgtccgccactattcggaaccttagctcggatgcaattattgttgatggaagaattgtcgaacaagaatgcgtagacatcaaaccaggcagtgagattgtctctggaccccagaaagaagaggcagaggatcatgaaaaaaaaaatgtcaagattgttctagatatcgagaatgcaaaatgcagcatatgcctgaatttgtggcatgatgttgttactgttgctccatgcctgcacaacttctgcaatggatgtttctcagagtggttaaggaggtcttcatctaattcacgtgataaaagccagagcgctgcatgcccacaatgtaggacaacagttcaatcagttggaaggaatcacttcctgcataatattgaagaggctatattgcaagctttttcctcactacagagatctgatgaggagattgcgttgttagagtcgtatgcttcagttaagtcgaatatggttttgggtcaacagaaaaaccaatcaaggaaaagacgtttttcacgttctagtgatgataccgacaattcagatctaccatgtcctcaatgccgtaatgaatttggtggatttagatgcagcccaggatctgtgcacttgcaatgcagtggatgtggaggaatgatgccagccagatctaacatcagtataccacaaaaatgcttggggtgtgataaagcgttttgtggggcttattggtattcgcaaggtgtgagttcaagtcattgcaatctgatctgcaaccaggatactttgaagagtatttatcagcgacatatctctgcacttcctgacacaattcatgggggcaatccatatgaaaaagatattacagaaagatgtatacagcaatcaggcaaaacattgcaagttgtaatctcagagtggatatcaaaatttgacaacatggaaattgatcgttcaaggttgcaattgaataatgtggatgcaattacttccaggacatatatctgcaaccattgctacagcaagtttgttgatttcctgctctactggttccgtgtatcattgccccaaaatcttcttccacgtgatgctgcggagagggagagctgctggtacggtttcatgtgccgcacccagcaccatcggcctgaccacgccaagaagctgaaccacgtgtgtcgcccgacaagaggcaaccagccctagtgagacttgactgtttctgtcaccattgtcatcaccatccattgtatgtgtgtgtcatcaaaatggtcaggaagtgtggcgcgtccatgtttggaaccctttttggtttgatcctggctggacctgacaaggaaattatattgctgctggtgccggaaccgccgctctgtcggcaggtccgggggg

SEQ ID NO: 198541 - DNA, 1649 bp, Zea Mays
ttcttgccccctacgcagccgtgtgccgtacaccgtgcacgcacgccgctcctcgcctccctgcaccatggacgccggcgagtgctccacctccaaaccccctcagccctctgccgcctccccgtcctcccccaccgtatgggctaggctggtgcccgccgattccgcgtgcccgacggtggaggtggccgaagacgactccgtggtctgctccctcgttgcgccgccctgcggcggggaggaggtcgcgtggtgcgagatcaggcggaatgccggggacgcgtcgtccgccactattcggaaccttagctcggatgcaattattgttgatggaagaattgtcgaacaagaatgcgtagacatcaaaccaggcagtgagattgtctctggaccccagaaagaagggcatttaatatatacatttgaaattacagaggcagaggatcatgaaaaaaaaaatgtcaagattgttctagatatcgagaatgcaaaatgcagcatatgcctgaatttgtggcatgatgttgttactgttgctccatgcctgcacaacttctgagtggttaaggaggtcttcatctaattcacgtgataaaagccagagcgctgcatgcccacaatgtaggacaacagttcaatcagttggaaggaatcacttcctgcataatattgaagaggctatattgcaagctttttcctcactacagagatctgatgaggagattgcgttgttagagtcgtatgcttcagttttgggtcaacagaaaaaccaatcaaggaaaagacgtttttcacgttctagtgatgataccgacaattcagatctaccatgtcctcaatgccgtaatgaatttggtggatttagatgcagcccaggatctgtgcacttgcaatgcagtggatgtggaggaatgatgccagccagatctaacatcagtataccacaaaaatgcttggggtgtgataaagcgttttgtggggcttattggtattcgcaaggtgtgagttcaagtcattgcaatctgatctgcaaccaggatactttgaagagtatttatcagcgacatatctctgcacttcctgacacaattcatgggggcaatccatatgaaaaagatattacagaaagatgtatacagcaatcaggcaaaacattgcaagttgtaatctcagagtggatatcaaaatttgacaacatggaaattgatcgttcaaggttgcaattgaataatgtggatgcaattacttccaggacatatatctgcaaccattgctacagcaagtttgttgatttcctgctctactggttccgtgtatcattgccccaaaatcttcttccacgtgatgctgcggagagggagagctgctggtacggtttcatgtgccgcacccagcaccatcggcctgaccacgccaagaagctgaaccacgtgtgtcgcccgacaagaggcaaccagccctagtgagacttgactgtttctgtcaccattgtcatcaccatccattgtatgtgtgtgtcatcaaaatggtcaggaagtgtggcgcgtccatgtttggaaccctttttggtttgatcctggctggacctgacaaggaaattatattgctgctggtgccggaaccgccgctctgtcggcaggtccgggggg

SEQ ID NO: 198542 - DNA, 1001 bp, Zea Mays
gacaattgttaggtgctcaggttttgggtcaacagaaaaaccaatcaaggaaaagacgtttttcacgttctagtgatgataccgacaattcagatctaccatgtcctcaatgccgtaatgaatttggtggatttagatgcagcccaggatctgtgcacttgcaatgcagtggatgtggaggaatgatgccagccagatctaacatcagtataccacaaaaatgcttggggtgtgataaagcgttttgtggggcttattggtattcgcaaggtgtgagttcaagtcattgcaatctgatctgcaaccaggatactttgaagagtatttatcagcgacatatctctgcacttcctgacacaattcatgggggcaatccatatgaaaaagatgtagggatattctagcattatcatatccctggccagtatggtaatttcaaatattatggtttctcctcttctgttttctagattacagaaagatgtatacagcaatcaggcaaaacattgcaagttgtaatctcagagtggatatcaaaatttgacaacatggaaattgatcgttcaaggttgcaattgaataatgtggatgcaattacttccaggacatatatctgcaaccattgctacagcaagtttgttgatttcctgctctactggttccgtgtatcattgccccaaaatcttcttccacgtgatgctgcggagagggagagctgctggtacggtttcatgtgccgcacccagcaccatcggcctgaccacgccaagaagctgaaccacgtgtgtcgcccgacaagaggcaaccagccctagtgagacttgactgtttctgtcaccattgtcatcaccatccattgtatgtgtgtgtcatcaaaatggtcaggaagtgtggcgcgtccatgtttggaaccctttttggtttgatcctggctggacctgacaaggaaattatattgctgctggtgccggaaccgccgctctgtcggcaggtccgggggg

SEQ ID NO: 198543 - DNA, 2188 bp, Zea Mays
cactgagtttatcagaaagcaattgcttctcttactgtgaaaggccttgcgtataccattctattggttgtgggtaaaacagcactgctgcttgccattgccaggattctcctgaggttcatgcaaatgctgctgaaatcctttgtgcagtaactagatatgcccctccagcacttgctgcaaagatttccagtccaagctttgtggggagattatttcaacatgcttttgaagattcaaggccaaaatcggtgctggtccactcattatcagtgtgcatatcgttgttagatcctaagagacttgtatcggcttcctatcaggctttccgtagtcagttgagccatggaacacttgtcaccgcaagtccagagacagtaaatggcatgctggatagcctaggggatttattgaagctgctggatgtttcatctgctgaaaatgttctgccaacaacatacggtagcttacaacctccactcgggaaacatcgcttgaagattgttgagttcatctctgttcttctatcaattggtagtgcagctgccgaaacacgactgattcaactaggagcaatcaagcatgctatagatctattttttgagtacccgtttaacaacttcttgcaccaccatgtcgagaatatcatcggctcatgtttggagagtaagcaggatcgactgattggccatgtccttgatgactgtaaacttgttacaagaattctggaagcagagaagaactctgctctgtcgtcagatttaactaagcatactatgtcttcagagggaagatctcccccaaggataggaattgttggtcatatgacacggatagctaacaggctccttcagctggtcaacacaaacatcatggttcaatcacatttgcaggcttaatttgattgcagcaaaattctgattggattgagtggcatgccagtaccctgacgaagcgtaatgcattagaaaatgtttaccagtgggcttgcggtcgaccaacatcactgcaggatcgtggtagggatagcgatgatgaagacttccgagatagggactacgatgtggctgcacttgctagcaatttaagccaagcatttaaatatggtatttacagtagtgaggatattgacgaggctcaagcatcacttgagcgggatgatgaggatgtatattttgatgatgaatctgcagaggttgtaatctcctcccttcgccttggagacgaccaagaaagtggttcgctctttacaaattccaattggtttgcatttgacgaggacaaggcactgaatgatggtttggttagctcagaagcatccccatctccaaattcggaaatatccgcactaaaagaggatgatgaacatgatgaagtcattcttggcgaaattatagatgaaataaaaggttctgaaccaactctaccagtcttcaacaaagatgcaaacaaagaatctggttccaccggcttggcaaatggtaccgttgacaaattcgaagatgatatcagaccaccaactccggatgtaaaagagagtcaacctgagtttgttgaatggaaggaggaagaagctgaacctggtgatattgccgagaaggataccgcagttcctgatattgaggttgaaaatgagaagcagctggattccatggatgatgttatgctttgcgatgcaaagttaggagaggaaaagaagagtgatgagcttggcatatgaagtgaatttcagaggagcagaatttcagaggaagcacttggaactggtcagaccattattgcacaagcagtctgaggatcatatgtgagttctctgttgtacacttgaaggtggtcccggaccgtgcatctgatggagcctcaaagattcaacttgtctgatggatagatgtgtaacatgatttggtggtggttattgttatgtgcctatagtctgggctacatcgagacgcaaaattctgaaagtagtcttccttgtcctttcggggttctagttgtgacccaggtaaataactgataggtgaataggtgatgctatttgtacgaaaattttggctcaaatgcagtcgattgttggcatatttagaacttgtttcaaatttgtgtaaactaaagaatatagtttctatttttttccaggtacttaatgcataattcatttgttataatataaacgacctttggtaca

SEQ ID NO: 198544 - DNA, 2880 bp, Zea Mays
ggaagctcacaatgggggatttcgattcggtgcctgactggatgataccagctcatgatgtggaaatctcagctctaaatccgcttgggttgtgatatcgtgacagtgtgggtactgacataactggcactgtgcaagatgttttggcatgtgccgggactctccgctgcatcaccggttgatactattttggacaaggaaaattttaagttggaatgtcttcttgatgaggatgaaataattcaggagtgcaaagcactgaatacccgcttaatcaattttttgcgggacaaggttcaagtggaacaattactccgctacattgtagaggaggctcctgaagatgcagaaaagaaaaggatatttagatttccgtttatagcttgtgaaatatttacatgtgaagtggatgtcatcatgaagacattagtggaggatgaagatcttatgaatttacttttctccttcctgaaacctgaccacccccatgggacattgtcggctggttactttgccaaggtagtgatttgcttgatgatcaggaagacactcccactagttagttatgtgcagggccatcctgaaatagttagccaacttgtcgatcttattgggattacttctatcatggaggttttgattcgcttaatcggtgcagatgaaactatgtattcaagctatgcagattctatgcaatggttagatgacatacaagtccttgagatgattgttgacaagttcagcacatcagattctcctgaggttcatgcaaatgctgctgaaatcctttgtgcagtaactagatatgcccctccagcacttgctgcaaagatttccagtccaagctttgtggggagattatttcaacatgcttttgaagattcaaggccaaaatcggtgctggtccactcattatcagtgtgcatatcgttgttagatcctaagagacttgtatcggcttcctatcaggctttccgtagtcagttgagccatggaacacttgtcaccgcaagtccagagacagtaaatggcatgctggatagcctaggggatttattgaagctgctggatgtttcatctgctgaaaatgttctgccaacaacatacggtagcttacaacctccactcgggaaacatcgcttgaagattgttgagttcatctctgttcttctatcaattggtagtgcagctgccgaaacacgactgattcaactaggagcaatcaagcatgctatagatctattttttgagtaagttagatattggaatctgcatataaaaattattgaaatcctgacagatttcatcattaggtacccgtttaacaacttcttgcaccaccatgtcgagaatatcatcggctcatgtttggagagtaagcaggatcgactgattggccatgtccttgatgactgtaaacttgttacaagaattctggaagcagagaagaactctgctctgtcgtcagatttaactaagcatactatgtcttcagagggaagatctcccccaaggataggaattgttggtcatatgacacggatagctaacaggctccttcagctggtcaacacaaacatcatggttcaatcacatttgcagcaaaattctgattggattgagtggcatgccagtaccctgacgaagcgtaatgcattagaaaatgtttaccagtgggcttgcggtcgaccaacatcactgcaggatcgtggtagggatagcgatgatgaagacttccgagatagggactacgatgtggctgcacttgctagcaatttaagccaagcatttaaatatggtatttacagtagtgaggatattgacgaggctcaagcatcacttgagcgggatgatgaggatgtatattttgatgatgaatctgcagaggttgtaatctcctcccttcgccttggagacgaccaagaaagtggttcgctctttacaaattccaattggtttgcatttgacgaggacaaggcactgaatgatggtttggttagctcagaagcatccccatctccaaattcggaaatatccgcactaaaagaggatgatgaacatgatgaagtcattcttggcgaaattatagatgaaataaaaggttctgaaccaactctaccagtcttcaacaaagatgcaaacaaagaatctggttccaccggcttggcaaatggtaccgttgacaaattcgaagatgatatcagaccaccaactccggatgtaaaagagagtcaacctgagtttgttgaatggaaggaggaagaagctgaacctggtgatattgccgagaaggataccgcagttcctgatattgaggttgaaaatgagaagcagctggattccatggatgatgttatgctttgcgatgcaaagttaggagaggaaaagaagagtgatgagcttggcatatgaagtgaatttcagaggagcagaatttcagaggaagcacttggaactggtcagaccattattgcacaagcagtctgaggatcatatgtgagttctctgttgtacacttgaaggtggtcccggaccgtgcatctgatggagcctcaaagattcaacttgtctgatggatagatgtgtaacatgatttggtggtggttattgttatgtgcctatagtctgggctacatcgagacgcaaaattctgaaagtagtcttccttgtcctttcggggttctagttgtgacccaggtaaataactgataggtgaataggtgatgctatttgtacgaaaattttggctcaaatgcagtcgattgttggcatatttagaacttgtttcaaatttgtgtaaactaaagaatatagtttctatttttttccaggtacttaatgcataattcatttgttataatataaacgacctttggtaca

SEQ ID NO: 198545 - DNA, 2800 bp, Zea Mays
ctcaattgttgcttctgagtgtagccgataccagctcatgatgtggaaatctcagctctaaatccgcttgggttgtgatatcgtgacagtgtgggtactgacataactggcactgtgcaagatgttttggcatgtgccgggactctccgctgcatcaccggttgatactattttggacaaggaaaattttaagttggaatgtcttcttgatgaggatgaaataattcaggagtgcaaagcactgaatacccgcttaatcaattttttgcgggacaaggttcaagtggaacaattactccgctacattgtagaggaggctcctgaagatgcagaaaagaaaaggatatttagatttccgtttatagcttgtgaaatatttacatgtgaagtggatgtcatcatgaagacattagtggaggatgaagatcttatgaatttacttttctccttcctgaaacctgaccacccccatgggacattgtcggctggttactttgccaaggtagtgatttgcttgatgatcaggaagacactcccactagttagttatgtgcagggccatcctgaaatagttagccaacttgtcgatcttattgggattacttctatcatggaggttttgattcgcttaatcggtgcagatgaaactatgtattcaagctatgcagattctatgcaatggttagatgacatacaagtccttgagatgattgttgacaagttcagcacatcagattctcctgaggttcatgcaaatgctgctgaaatcctttgtgcagtaactagatatgcccctccagcacttgctgcaaagatttccagtccaagctttgtggggagattatttcaacatgcttttgaagattcaaggccaaaatcggtgctggtccactcattatcagtgtgcatatcgttgttagatcctaagagacttgtatcggcttcctatcaggctttccgtagtcagttgagccatggaacacttgtcaccgcaagtccagagacagtaaatggcatgctggatagcctaggggatttattgaagctgctggatgtttcatctgctgaaaatgttctgccaacaacatacggtagcttacaacctccactcgggaaacatcgcttgaagattgttgagttcatctctgttcttctatcaattggtagtgcagctgccgaaacacgactgattcaactaggagcaatcaagcatgctatagatctattttttgagtacccgtttaacaacttcttgcaccaccatgtcgagaatatcatcggctcatgtttggagagtaagcaggatcgactgattggccatgtccttgatgactgtaaacttgttacaagaattctggaagcagagaagaactctgctctgtcgtcagatttaactaagcatactatgtcttcagagggaagatctcccccaaggataggaattgttggtcatatgacacggatagctaacaggctccttcagctggtcaacacaaacatcatggttcaatcacatttgcagcaaaattctgattggattgagtggcatgccagtaccctgacgaagcgtaatgcattagaaaatgtttaccagtgggcttgcggtcgaccaacatcactgcaggatcgtggtagggatagcgatgatgaagacttccgagatagggactacgatgtggctgcacttgctagcaatttaagccaagcatttaaatatggtatttacagtagtgaggatattgacgaggctcaagcatcacttgagcgggatgatgaggatgtatattttgatgatgaatctgcagaggttgtaatctcctcccttcgccttggagacgaccaagaaagtggttcgctctttacaaattccaattggtttgcatttgacgaggacaaggcactgaatgatggtttggttagctcagaagcatccccatctccaaattcggaaatatccgcactaaaagaggatgatgaacatgatgaagtcattcttggcgaaattatagatgaaataaaaggttctgaaccaactctaccagtcttcaacaaagatgcaaacaaagaatctggttccaccggcttggcaaatggtaccgttgacaaattcgaagatgatatcagaccaccaactccggatgtaaaagagagtcaacctgagtttgttgaatggaaggaggaagaagctgaacctggtgatattgccgagaaggataccgcagttcctgatattgaggttgaaaatgagaagcagctggattccatggatgatgttatgctttgcgatgcaaagttaggagaggaaaagaagagtgatgagcttggcatatgaagtgaatttcagaggagcagaatttcagaggaagcacttggaactggtcagaccattattgcacaagcagtctgaggatcatatgtgagttctctgttgtacacttgaaggtggtcccggaccgtgcatctgatggagcctcaaagattcaacttgtctgatggatagatgtgtaacatgatttggtggtggttattgttatgtgcctatagtctgggctacatcgagacgcaaaattctgaaagtagtcttccttgtcctttcggggttctagttgtgacccaggtaaataactgataggtgaataggtgatgctatttgtacgaaaattttggctcaaatgcagtcgattgttggcatatttagaacttgtttcaaatttgtgtaaactaaagaatatagtttctatttttttccaggtacttaatgcataattcatttgttataatataaacgacctttggtaca

SEQ ID NO: 198546 - DNA, 3059 bp, Zea Mays
gtcgcatctagacgaagccttctcgttagattattctccccaaagtcgctccctgcctctcctccatctcagcctcgcgatcgaaccctcgccctcttgcttcccttcccccacctccgcctccgcgccgttccgtcctcccactcctcatctcgcgattggcaaattctagggtttcgcggcggccacccggatccagctcggcttcgcgagcgcctctaaagcttcaggtcacgagagggcgctttgctctctccctgtcccgccctcaccgcggccgccgccacgacgacgacgacctgcggtgcgcctgtgcctgggttcggatcgtccggcgcctctccgttggccactggataccagctcatgatgtggaaatctcagctctaaatccgcttgggttgtgatatcgtgacagtgtgggtactgacataactggcactgtgcaagatgttttggcatgtgccgggactctccgctgcatcaccggttgatactattttggacaaggaaaattttaagttggaatgtcttcttgatgaggatgaaataattcaggagtgcaaagcactgaatacccgcttaatcaattttttgcgggacaaggttcaagtggaacaattactccgctacattgtagaggaggctcctgaagatgcagaaaagaaaaggatatttagatttccgtttatagcttgtgaaatatttacatgtgaagtggatgtcatcatgaagacattagtggaggatgaagatcttatgaatttacttttctccttcctgaaacctgaccacccccatgggacattgtcggctggttactttgccaaggtagtgatttgcttgatgatcaggaagacactcccactagttagttatgtgcagggccatcctgaaatagttagccaacttgtcgatcttattgggattacttctatcatggaggttttgattcgcttaatcggtgcagatgaaactatgtattcaagctatgcagattctatgcaatggttagatgacatacaagtccttgagatgattgttgacaagttcagcacatcagattctcctgaggttcatgcaaatgctgctgaaatcctttgtgcagtaactagatatgcccctccagcacttgctgcaaagatttccagtccaagctttgtggggagattatttcaacatgcttttgaagattcaaggccaaaatcggtgctggtccactcattatcagtgtgcatatcgttgttagatcctaagagacttgtatcggcttcctatcaggctttccgtagtcagttgagccatggaacacttgtcaccgcaagtccagagacagtaaatggcatgctggatagcctaggggatttattgaagctgctggatgtttcatctgctgaaaatgttctgccaacaacatacggtagcttacaacctccactcgggaaacatcgcttgaagattgttgagttcatctctgttcttctatcaattggtagtgcagctgccgaaacacgactgattcaactaggagcaatcaagcatgctatagatctattttttgagatcgactgattggccatgtccttgatgactgtaaacttgttacaagaattctggaagcagagaagaactctgctctgtcgtcagatttaactaagcatactatgtcttcagagggaagatctcccccaaggataggaattgttggtcatatgacacggatagctaacaggctccttcagctggtcaacacaaacatcatggttcaatcacatttgcagcaaaattctgattggattgagtggcatgccagtaccctgacgaagcgtaatgcattagaaaatgtttaccagtgggcttgcggtcgaccaacatcactgcaggatcgtggtagggatagcgatgatgaagacttccgagatagggactacgatgtggctgcacttgctagcaatttaagccaagcatttaaatatggtatttacagtagtgaggatattgacgaggctcaagcatcacttgagcgggatgatgaggatgtatattttgatgatgaatctgcagaggttgtaatctcctcccttcgccttggagacgaccaagaaagtggttcgctctttacaaattccaattggtttgcatttgacgaggacaaggcactgaatgatggtttggttagctcagaagcatccccatctccaaattcggaaatatccgcactaaaagaggatgatgaacatgatgaagtcattcttggcgaaattatagatgaaataaaaggttctgaaccaactctaccagtcttcaacaaagatgcaaacaaagaatctggttccaccggcttggcaaatggtaccgttgacaaattcgaagatgatatcagaccaccaactccggatgtaaaagagagtcaacctgagtttgttgaatggaaggaggaagaagctgaacctggtgatattgccgagaaggataccgcagttcctgatattgaggttgaaaatgagaagcagctggattccatggatgatgttatgctttgcgatgcaaagttaggagaggaaaagaagagtgatgagcttggcatatgaagtgaatttcagaggagcagaatttcagaggaagcacttggaactggtcagaccattattgcacaagcagtctgaggatcatatgtgagttctctgttgtacacttgaaggtggtcccggaccgtgcatctgatggagcctcaaagattcaacttgtctgatggatagatgtgtaacatgatttggtggtggttattgttatgtgcctatagtctgggctacatcgagacgcaaaattctgaaagtagtcttccttgtcctttcggggttctagttgtgacccaggtaaataactgataggtgaataggtgatgctatttgtacgaaaattttggctcaaatgcagtcgattgttggcatatttagaacttgtttcaaatttgtgtaaactaaagaatatagtttctatttttttccaggtacttaatgcataattcatttgttataatataaacgacctttggtaca

SEQ ID NO: 198547 - DNA, 1713 bp, Zea Mays
ctcatgtcatgatatttcatcgttgcaagtacggcacaagtaaagttggcttcaccttttctcccatcatgctcgtctggttcgcgttgatcgcgtccactggactgtacaacatcatcaagcactatccaccgattctgaaagccatatcgccgcattacatataccttttcttcgcgaggaacaaaagggttggatgggagcaatttggaacagttgttctgtgcataacaggtgtcgaggctatgtttgctgacttgggtcatttcaacaagaaatcaatccaaatggcatactcgtgtctggtctatccatcactgatactcgcatacgctggccaggcagcatttctgatcaagaacccatcgaagctcagcacaacgttctacagcagcgtcccagagccactgttttggccaatgttcgtcgtggccactttggctgccatcgttgcgagccaggcactgatatctgccagcttctccatcgtcaggcagtcggttgctctaggttgctttcctagagttaccatgaagcatacctcaaagaagtacgagggccgagtgtactctccagagatcaactacttcttgatgattgcctgtgtattgatcactgttggcttcaagggtggaccagagattgggcaagcctatggtgttgccgtgatatgggttatgcttatcacaacccatctgatcacagtggtcatggtaataatatggcaggtccattatgcaatagccgggacattttatgccatcttcgctgccatcgaaggtcttatgacgatctcactcctgtataagatcgcacagggtggctgggttccgtttgcgataactgcattcttccttataattacactttcttggacctacgggcgaagcaagaagcacgagtacgaggtgagcaacctgatggacaggcaggatttcatcaagatagtgaatatgagcaatagagtacctggaatatgcatcttctgcacagacctgatgaacggcatcccgcccattgtgcggcactacgtccagcacatgggctgccttcgcgaactgatggtgttcgtcactgtgaggcacctacctgtgacgtctgtgctacctgaagagcgcttcctcttcgacaggctggagccttttggtgtctacaggtgcatagtccagtatggttacatggacacccagaacatggaggaccacgagtacgttgtatcgatcattgcatccctcaaggaaattgctcagagcggtgatgagatcctgatgatggattctgctctagcgaacgggacgacctttgtgcttggaagggtcatcttaaacatgagccctgagcgggggaactgcttcaagcgctttgttatcaacaacctttacaggttcctgcaaaagaacttcaggtccaacatttccaatctgaagatagctcctagcaaaaccttgcaggttggaatgcagtatgagatttgagtagaggggcgttgaaagatgggcatgagattctagaacatgcagatgtgggtcgatagttttgattttttttttttgcaactaatttaggtggcagaaatattatattgtataagcaagtaatttgtaaatagtgcaagtaatataattacataaaagatagaacaactgggtaaatatttgttggatcagttggaacaaaaaaattcatccaaaaataaatagtacattacaggtg

SEQ ID NO: 198548 - DNA, 2684 bp, Zea Mays
attctacccaatcgccgcacccgcaccacatcgccccgaccaaagcttccccagacggcaggagacagcagcaggccggacgccggactcctcctccctcccccgtacgcatccactgagatccttcctgtgcgaaggaaatctccagttcttcggccccggccaggttttcaagtgttgcttgccccgccggagttttcctctaacccgcaagtccaattggctaagaagttgatgggatcggggggacactggaaggctgtgtgagatcgcgaaggggaccgtgaattccttgcagggctgcggcgattcggctgcgctgctgtatgaactgtttcgtgaacctgggactcaactcgaactcgaaccactacgtcgcctgcctcctcatcttcctgctgcatttctccccccagttgttaaatccatccaattctaattcaaatagtaattgtgaaggagttcaacagagctgcacagatggcgaacaacatgttggaggagtcaagagtgaactgtcttctgccagagcatctgcgattaatacagaccaaggacactacattggcccaaatttagttgttgagaggctaactgaaaatcttaaactgtcctgtcttacctcaccatcattgttctgagacaggggaacatgcctcactactaaccctccatggtggagggggtagaggagggttgatgtgagaacaacaggcgatctcggcaatttcacaacttggctcatatggtgaaaatgctaggagaaagccacacacaccatctgctattgttattggtggtgggtttgctggtcttgctgctgctgatgctctcagaaatgcatccttccaggttattctactggaatcccgtgataggattggtggcagagttcacactgactactcttttgggtttccggtcgatttgggagcatcttggcttcatggggtctgtgaagaaaatcccttggcaccaataattggaaggcttggacttccactgtaccgcacaagtggtgatgattctgtgctgtttgatcatgatctagagagttatgcactctatgacactaacggacgccaagtaccacaagagttggtagaaaagcttgggaaggtgtttgagaagatactggaagagactggcaaattgagggaagaaatcaatgaagatatgtctatcgcaaaagccatcgcaattgttatggctagaaatccgcacttgaggcaagaagggattgctcatgaggttcttcagtggtatttgtgccgtatggagggttggtttgccaccgacgctgattcaatttcactacagggttgggatcaggaggtgctgcttccaggtggccatggcctcatggttcgtgggtatcgtccggttataaatactctcgcaaaaggcttagatatacgcctcaaccataaggttgtggaaattgttcgccataggaacagggtagaggttaccgtaagcagcggccaaacgtttgttgcggatgctgctgtggtcactgttccgttgggtgtcctgaaagcgaaaaccattaaattcgagccgaggctgccagagtggaaagaggaagcgatcagagaacttacggttggagttgagaacaagatcgttcttcacttcgggcaggttttctggcctaacgtggagttcctcggcgtcgtttcctctagcacctacggttgcagctatttcctcaaccttcacaaggcaacaggccacccagtccttgtctacatgcccgccggccgccttgctcgtgacatcgagaagacgtcggacgaggctgctgcccagttcgccttttctcagctgaagaagatccttcccaatgcagctgagccgataaactacctggtgtcgcgctggggctcggacgagaacacgcttggttcgtacacgttcgatggggtgaacaaaccccgtgacctgtacgagaagctgcgcatccccgtggacaacctgttcttcgcgggagaggccacgagcgtcaagtacacgggcacggtgcacggcgccttctccacgggtgtcatggcggccgaggagtgcaagatgcgggttctggagcggttcagggagctcgacatgctggagatgtgccaccctgccatgggcgaggacagccctgtgtctgtcccgctgctcatctctcggctctaaaagcagacgagtagtagttgtgtatgggatggatcggcacctgagagtaggctgggacatcccactgattgccggagggaagcagggaggaagaagctcccctcgcttcgcttctcctcggcatgaggcatgtgcctggcgttacttgtggcgtgccaagtgccatatttccctaaacttattctgcgtgggaaccctctattatgtatgtatactgtgaatttgtgactgttcaggtaacacgagttatcgtgacatcttcgtagagaaagataccgtatgtatgatgtatgtatgatatacatatgatattatgatcaacaattgtagtagtagtaataataaataatacatatatgtgacttaactgtttggagtattgagtgattgtgacatgtaacacccttacatctaagcaagtataaagcaagtagtataagagcatctccaataaattagttaaatggctcgccgagccaaatttttgctactcaacaaaaaaataa

SEQ ID NO: 198549 - DNA, 929 bp, Zea Mays
cattggtgtaacggagcgacaggaaaccactgacatggttatctgtgcaagctaacggtgcagttatcccgaaaggttttgttcataaggacctggcgaagaaagacacctggttaaaagctttaatagcgatccctgacatccagccaagatatgcttttgcaatctggaagaagtatccctgcatgagatcccttctaaatgaatatatggatggcagtaaaaccgttgccgagaaggaacttctgcttagcgacttgaagtgggaagatcgactgggtgacgaaggcaaaaggctggggaacaaatgctctagaagggtgtacagaatgctcatggcacagaatggagacctggatgcagatgaccccgaagctggcggtagatcttagtgcctaatcatctggaccttgggccatcaatatatgcatgcccgccctcttgctgaccggtttgtgtacatatcgtccttttgaccatgcttgcactgtcagtgtcatggtgaaagagtcgcgcattagctcgtgcgatgtttggtgccgaaagcatggcctgcaatgctacacacgatggcacatggtgtgtgtgttttatttattaggtacctgtgaaaagcatttggtcgaagtcgaatgctaggaaactgggcattcgttgtgcgtagctagcttactgcctctatagagccccccaacaggctactccaacttttgagaacctataatatattatactagtagttcagaaaggcacgaggaaatgtttgtattgaatccatgctgccgtgctgtgtacggtaacccgcattgatccactgaaagatcccatgtatcgccgtttgtggaggacagctaccagtgaagtgacccttgcgcagctagttttgctcgtccgaatatgctctgtggaatgcatctggtacctgggca

SEQ ID NO: 198550 - DNA, 1118 bp, Zea Mays
ggcgttttggattgtgaggaatgtgcaatgcatgtgagcaaagtcaatacaagaacccttcaaatacttggagacgtccgccagtggaagaggttttatgcaaactggcaacacactatattaacgttcactcaaggcaatgcatagatgaagctgaagtagtagagcaccttgttggcctgacgtctagtcttgcaaaatgcaaattcaggaaaccactgacatggttatctgtgcaagctaacggtgcagttatcccgaaaggttttgttcataaggacctggcgaagaaagacacctggttaaaagctttaatagcgatccctgacatccagccaagatatgcttttgcaatctggaagaagtatccctgcatgagatcccttctaaatgaatatatggatggcagtaaaaccgttgccgagaaggaacttctgcttagcgacttgaagtgggaagatcgactgggtgacgaaggcaaaaggctggggaacaaatgctctagaagggtgtacagaatgctcatggcacagaatggagacctggatgcagatgaccccgaagctggcggtagatcttagtgcctaatcatctggaccttgggccatcaatatatgcatgcccgccctcttgctgaccggtttgtgtacatatcgtccttttgaccatgcttgcactgtcagtgtcatggtgaaagagtcgcgcattagctcgtgcgatgtttggtgccgaaagcatggcctgcaatgctacacacgatggcacatggtgtgtgtgttttatttattaggtacctgtgaaaagcatttggtcgaagtcgaatgctaggaaactgggcattcgttgtgcgtagctagcttactgcctctatagagccccccaacaggctactccaacttttgagaacctataatatattatactagtagttcagaaaggcacgaggaaatgtttgtattgaatccatgctgccgtgctgtgtacggtaacccgcattgatccactgaaagatcccatgtatcgccgtttgtggaggacagctaccagtgaagtgacccttgcgcagctagttttgctcgtccgaatatgctctgtggaatgcatctggtacctgggca

SEQ ID NO: 198551 - DNA, 1434 bp, Zea Mays
caagtgtttcatatgcttatccatggataaggtcctcttctttcaagtttgacagagaatggtctttcctatgaacctaccaagaatagaatcagcggttcaattttatggaagttggatgttcctgatgatattgctcaggcgttttccgaccttaacaatagctgtgatatgaaccaaaatccattgtcacaagtgaaatatgtagcaattgtgcttgaagctgaggaattttgtaaccttataagcaatggatcgttctttgatcatgtccaaagagtttgtgatggatacccaggattcaccatttgctacatcattaataaattgatgaactacatcaacaaatgtgagcaaagtcaatacaagaacccttcaaatacttggagacgtccgccagtggaagaggttttatgcaaactggcaacacactatattaacgttcactcaaggcaatgcatagatgaagctgaagtagtagagcaccttgttggcctgacgtctagtcttgcaaaatgcaaattcaggaaaccactgacatggttatctgtgcaagctaacggtgcagttatcccgaaaggttttgttcataaggacctggcgaagaaagacacctggttaaaagctttaatagcgatccctgacatccagccaagatatgcttttgcaatctggaagaagtatccctgcatgagatcccttctaaatgaatatatggatggcagtaaaaccgttgccgagaaggaacttctgcttagcgacttgaagtgggaagatcgactgggtgacgaaggcaaaaggctggggaacaaatgctctagaagggtgtacagaatgctcatggcacagaatggagacctggatgcagatgaccccgaagctggcggtagatcttagtgcctaatcatctggaccttgggccatcaatatatgcatgcccgccctcttgctgaccggtttgtgtacatatcgtccttttgaccatgcttgcactgtcagtgtcatggtgaaagagtcgcgcattagctcgtgcgatgtttggtgccgaaagcatggcctgcaatgctacacacgatggcacatggtgtgtgtgttttatttattaggtacctgtgaaaagcatttggtcgaagtcgaatgctaggaaactgggcattcgttgtgcgtagctagcttactgcctctatagagccccccaacaggctactccaacttttgagaacctataatatattatactagtagttcagaaaggcacgaggaaatgtttgtattgaatccatgctgccgtgctgtgtacggtaacccgcattgatccactgaaagatcccatgtatcgccgtttgtggaggacagctaccagtgaagtgacccttgcgcagctagttttgctcgtccgaatatgctctgtggaatgcatctggtacctgggca

SEQ ID NO: 198552 - DNA, 1817 bp, Zea Mays
cttctcacccagcggggacttggtcgaggaagcgatgatgtgccaaaaggacggtaccgagcaggttcatgagaagcagaaaagacaaccggcagggaagaaactgacgaaggaggagaaagacaagctgatgcaagaaagaaaacaaaaacggcaggaagataaactactgaagcaagccttgaaagatgaactagctaagaagaagaaaatggaaaaagcaattcagaaatgggaatcaggaaaatttgctttagaatgtataactgttgagattgacaacagtgttatccaaaggggctctattggaggtcctcttctttcaagtttgacagagaatggtctttcctatgaacctaccaagaatagaatcagcggttcaattttatggaagttggatgttcctgatgatattgctcaggcgttttccgaccttaacaatagctgtgatatggtgctacatgtttcctttattcctctctaaccttttagcatcatatcttctattttacagtaaccacacagtcctaaaattgtagcatgacatctttctacagaaccaaaatccattgtcacaagtgaaatatgtagcaattgtgcttgaagctgaggaattttgtaaccttataagcaatggatcgttctttgatcatgtccaaagagtttgtgatggatacccaggattcaccatttgctacatcattaataaattgatgaactacatcaacaaatgtgagcaaagtcaatacaagaacccttcaaatacttggagacgtccgccagtggaagaggttttatgcaaactggcaacacactatattaacgttcactcaaggcaatgcatagatgaagctgaagtagtagagcaccttgttggcctgacgtctagtcttgcaaaatgcaaattcaggaaaccactgacatggttatctgtgcaagctaacggtgcagttatcccgaaaggttttgttcataaggacctggcgaagaaagacacctggttaaaagctttaatagcgatccctgacatccagccaagatatgcttttgcaatctggaagaagtatccctgcatgagatcccttctaaatgaatatatggatggcagtaaaaccgttgccgagaaggaacttctgcttagcgacttgaagtgggaagatcgactgggtgacgaaggcaaaaggctggggaacaaatgctctagaagggtgtacagaatgctcatggcacagaatggagacctggatgcagatgaccccgaagctggcggtagatcttagtgcctaatcatctggaccttgggccatcaatatatgcatgcccgccctcttgctgaccggtttgtgtacatatcgtccttttgaccatgcttgcactgtcagtgtcatggtgaaagagtcgcgcattagctcgtgcgatgtttggtgccgaaagcatggcctgcaatgctacacacgatggcacatggtgtgtgtgttttatttattaggtacctgtgaaaagcatttggtcgaagtcgaatgctaggaaactgggcattcgttgtgcgtagctagcttactgcctctatagagccccccaacaggctactccaacttttgagaacctataatatattatactagtagttcagaaaggcacgaggaaatgtttgtattgaatccatgctgccgtgctgtgtacggtaacccgcattgatccactgaaagatcccatgtatcgccgtttgtggaggacagctaccagtgaagtgacccttgcgcagctagttttgctcgtccgaatatgctctgtggaatgcatctggtacctgggca

SEQ ID NO: 198553 - DNA, 690 bp, Zea Mays
ctcggtattctgtacttctacgtattattttttggggatgcaatggatatactggtcacacgtttgccattcgtgttttttgttagtttgggttcttcaaatgtttagtagatcacgatgatatggaccttcttcgatgaaaaaacacatggtagtaaagaacttgctatccaactttgcaacggtttaacagaaaacatatcgctcaaagaaacacaaaacatactcgtcctctcgcaatagttcattgcatatagcatcaagtcctggcaagagttcagcttttgaatgggacattatacaagcgaccgattgatcacatttctagaacaagaaaaaattgagcaagcccaccttttttacatctcagggttaaacacactgagtgccaagatattgcgttaaacaactatctagaaggacaactttgtccaggcttttcactggtcttcctccggttatctcataagacaaagttatccttggccttgactttttttcagatttcaagaggcagaaatgctttaaggagctgcagtgatttttgtggacatgttccagtctgatattgattcaggattctgcaatgggactgctaggggtcatcaggttcagggacaagccaaaagtagaatatgttgggccttaccttcatcacggtcccctcagaggtgccatcatgtaatggct

SEQ ID NO: 198554 - DNA, 865 bp, Zea Mays
gacttttgttagttggtttgtatagagtttgaacgggtaagtcgccttatttagagtccttaaaagatacgcctagaagcgtggcgtcatcgcttttttagaaagaaccttgtgtatttttaaaatgaaccagcagtctagatggcctcggacgcggcctccagctccacgcactccgacctcctccaggtacgcccgccaggccccatcctcctaacccgatcgctactctcctgaaccctgtgtcgtcacaagagcgcgaggaggtcgtggcggagcgcgctctacactgtgtgtatgcggaggcggtggccatggcagaggagaaccatgttgttgccggcgccggccagaagctctactggtcccggcaaaccagagccactgcggttcaacgcctgcgtttcgcggctcattgctgcctgcacgctctgacatgtaccctcccaaaaaagagggatgaaaacaaccacacactgtgggactcctgaagacgacatttgggttgatggtgaattcagttgtatgagccagagaaccaaacattatgggaggagaaccagtttctaaaaatggtatctaaaaggatgactcggggttgaaggagcttcatataactaaacctagcatggctgtttaggaaaagatggaatggaactcaaatttttgtggccgcacaagtgtggagacttgaattcatatatacttatttatgctcaacgttagcacaaacagttaatgactaagtttttcaattagtatttcattttggatttagaggacacttgtgtatgagttattttacaatgcttatttatgagatatgagtgacacttatctatattatattaattataatgttatt

SEQ ID NO: 198555 - DNA, 876 bp, Zea Mays
gacttttgttagttggtttgtatagagtttgaacgggtaagtcgccttatttagagtccttaaaagatacgcctagaagcgtggcgtcatcgcttttttagaaagaaccttgtgtatttttaaaatgaaccagcagtctagatggcctcggacgcggcctccagctccacgcactccgacctcctccaggtacgcccgccaggccccatcctcctaacccgatcgctactctcctgaaccctgtgtcgtcacaagagcgcgaggaggtcgtggcggagcgcgctctacactgtgtgtatgcggaggcggtggccatggcagaggagaaccatgttgttgccggcgccggccagaagctctactggtcccggcaaaccagagccactgcggttcaacgcctgcgtttcgcggctcattgctgcctgcacgctctgacatgtaccctcccaaaaaagagggatgaaaacaaccacacactgtgggactcctgaagacgacatttgggttgatggtgaattcagttgtatgagccagagaaccaaacattatgggaggagaaccagtttctaaaaatggtatctaaaaggatgactcggggttgaaggagcttcatataactaaacctagcatggctgtttagtttttgtacaggaaaagatggaatggaactcaaatttttgtggccgcacaagtgtggagacttgaattcatatatacttatttatgctcaacgttagcacaaacagttaatgactaagtttttcaattagtatttcattttggatttagaggacacttgtgtatgagttattttacaatgcttatttatgagatatgagtgacacttatctatattatattaattataatgttatt

SEQ ID NO: 198556 - DNA, 1573 bp, Zea Mays
gacttttgttagttggtttgtatagagtttgaacgggtaagtcgccttatttagagtccttaaaagatacgcctagaagcgtggcgtcatcgcttttttagaaagaaccttgtgtatttttaaaatgaaccagcagtctagatggcctcggacgcggcctccagctccacgcactccgacctcctccaggtacgcccgccaggccccatcctcctaacccgatcgctactctcctgaaccctgtgtcgtcacaagagcgcgaggaggtcgtggcggagcgcgctctacactgtgtgtatgcggaggcggtggccatggcagaggagaaccatgttgttgccggcgccggccagaagctctactggtcccggcaaaccagagccactgcggttcaacgcctgcgtttcgcggctcattgctgcctgcacgctctgacatgtaccctcccagtaagtttctatggcctaggcatccttgtttgtgaacaagcgtctagctgtgaaaagttttagaaatttagcagtatagcagttacagttttaccttaattcctatgccactgagagctacaaactcaaagatacatcacctactgtatatttgagaattctcaatggtaacttttgatgtttcagctacggagaaacatgtttattgacaaatattctataccttgatttatcgcattatagggtagcataaagcatggaaaagaaatatgaaaaaacaaatagttcatcattagtttcaaattagctaatatctagcttgccccaaattcacattcaagcttgtcatctgacaaaccatatacccttgacggctgaaagtaccaaccttatcgctccaaatctgtttgttcagatatgcatgtcttgacttattccttcacaaatagtagactactgttacttattgtcttaaacaagaaccttcagcaactcccttcattctacgttgcaccttatgtatatgtctttgcttggttatggtcgtaagctttgatctaatttcttccaaatgaataaaaaaagtgtgttgatatttgacggtttgggctccactttggcaatcatgcctgcttgcagtgtcaaacaacaaagtcgcagtaattgtgttcagcttgtttgttcttgccgtatgtagaaaaagagggatgaaaacaaccacacactgtgggactcctgaagacgacatttgggttgatggtgaattcagttgtatgagccagagaaccaaacattatgggaggagaaccagtttctaaaaatggtatctaaaaggatgactcggggttgaaggagcttcatataactaaacctagcatggctgtttagtttttgtacaggaaaagatggaatggaactcaaatttttgtggccgcacaagtgtggagacttgaattcatatatacttatttatgctcaacgttagcacaaacagttaatgactaagtttttcaattagtatttcattttggatttagaggacacttgtgtatgagttattttacaatgcttatttatgagatatgagtgacacttatctatattatattaattataatgttatt

SEQ ID NO: 198557 - DNA, 1872 bp, Zea Mays
gacttttgttagttggtttgtatagagtttgaacgggtaagtcgccttatttagagtccttaaaagatacgcctagaagcgtggcgtcatcgcttttttagaaagaaccttgtgtatttttaaaatgaaccagcagtctagatggcctcggacgcggcctccagctccacgcactccgacctcctccaggtacgcccgccaggccccatcctcctaacccgatcgctactctcctgaaccctgtgtcgtcacaagagcgcgaggaggtcgtggcggagcgcgctctacactgtgtgtatgcggaggcggtggccatggcagaggagaaccatgttgttgccggcgccggccagaagctctactggtcccggcaaaccagagccactgcggttcaacgcctgcgtttcgcggctcattgctgcctgcacgctctgacatgtaccctcccaaaaaagagggatgaaaacaaccacacactgtgggactcctgaagacgacatttgggttgatggtgaattcagttgtatgagccagagaaccaaacattatgggaggagaaccagtttctaaaaatggtatctaaaaggatgactcgggcaacatgtcaggcgattaggcatgtgtgctatatggggctgagtgttggcctactaagagacgacatatccaacaactaagtgcttaccctaacttgcttgggactaaaagactatgttgatattgatgttgtgatggtgtggaggcaacacaacaagagtggacccaacatatgactttagtgatgtttgtttagtggccagaagactgtgcaggtctatattccttgttgataagttcccttctgtgaagcagactgatctatcatgcctaaccactcgccttctccatcgcagcttgttatatttctgcttgctttagtgtctgtaccttggatgttgattccaaaacctcttcttttgaagaaacaaaatcagcatagtactcgtatatttttattactattatactatttacagggtagccgtggaatatgtgttgcaattttcctgtagcattggaagaggagcattttggtgcttctgccggtttctagttgttggtttgcaaccaaccggtaacttttattgtcacctattttacccaaaatagcttgacatgtcatttgatggttttcaagaaatgtgttgtggtttcgaaagaatgataatgtcatataaaaaaatcacatatctatgatttttagtccggatagctgccttcctagcattacctatttattgaaaaattatagcagtctttcaaattcacatgataataacaaagtagtatcaatgaactaaataatgtgtccacctgtaagcaaaagatgtctggtttgctggagcacttgtctcgggatacacagaggcaaagtttggatcatgatattggtccaactattgctcatttcttgaaatgtttcatgggaacatttcttggaaagtttggatcatgatattggtccagctattgtttgatgagatagcaaatgttcgagaacggttgttcgacttcttggtgaatgagatgatagacattggtggatcatgcagggttgaaggagcttcatataactaaacctagcatggctgtttagtttttgtacaggaaaagatggaatggaactcaaatttttgtggccgcacaagtgtggagacttgaattcatatatacttatttatgctcaacgttagcacaaacagttaatgactaagtttttcaattagtatttcattttggatttagaggacacttgtgtatgagttattttacaatgcttatttatgagatatgagtgacacttatctatattatattaattataatgttatt

SEQ ID NO: 198558 - DNA, 581 bp, Zea Mays
gaaggacgaaggcgaggctgaacaaactgatgcttaacctcagcagtgcattacgtatgtatgactatgagtggccaggaagttttagcatggagggtccttgcatgaagcaatgtctcccacttcagaagttgttacatgcgggtctacgatgtacttcttttatttatttgtcgcagtttagttcaaaaatgaactcgcaggaagtttttatgccgttatattgttgttaaggacttgtggttgaacttcgaaacagctgaactgttgagtatcgaaggcgaactagcgataaaataaaatgatgaagtatcgtacaagcttactcctacagaaacgtttggaaagattttgagggcctgtttggtaaatgtttcttaaaaccatgattttacaatactacacttgcaattgcaattgtcatgacaatattatagttttagtcagctacaaaactaatagctattatttagatacaacattgtagtttatggtatttagataaaagctaggcatactattcaaactttaagttggagccgagtcttcaatactccaaagatactatggtatctaaaata

SEQ ID NO: 198559 - DNA, 4659 bp, Zea Mays
atggcctcacccacggtcgcctccccgatccgggcgagccccgtcgacaaccccaccgtcgcgccctcactggcctcctgccgctgcgccttatcgctagatgctcgacatccccatccgcgcgctcgaggcagaggccagggacaccaagatgagcccgaccgcgaccgcctagccatcagctccaaagaagaagccaggggaccgatggacgtcagtgttccgtcgtggtggcccgctagatccatattcagcaagaaagatatctcgccatgccggcccagggccgcagcccgtcaccttcctccccccgcacccgccgtgacagccgcctccccacgcccgcttacccgactggccgcacaagatgcccacagtggcccccatcgcgcccacccgctccccccatccaccgcgacctcagccgccacgccgacgccatccccgtcctctagcgcgttgtcgccgtcgtcacaccgccaaaggtgcctgccccctgctaccgaggtcgacgaccagcagcggcaagctgccgagctcgacgacacgcacgccatgcttggccatatggacgagtccatcgcctgctacgagaaggggctccagatccagatgtccgcgctcgatgagcgcaatccctgcctccctgagacctgcaggtaggtgacaatgtcatcaagggcccctccccctttgtcgcttctcgatctagatctcgcctctccctaaagcacgggttgcacctccccccgtcacccactccttccttggcttctcccgggaaacgaccttcagtctttacaggtatgaggtcttattgtgtgccatcattttcttttgctattcattcccgaatccccactgtgccctccagtgatgatggggtatgagctctgaataacaaacaaggtaaatgtttactcttttgagtagctgaattttgctatgatgtagtaaattatactagtaaattatacttgtactgaatatgaatataagaaaaaaatactgcactaattatttttctacgctctatattgtaaaataataggaatataataaaaagctgacataaaagctaatttacaacatccctttattttactatgttttatgataaataccttgattttccttgtaagttgtatcttttagtgattttcaaagaaactcctatttgcttggtgctttttctgtaagcatatgttgattaaatctttgtgtattctttctgtacactaatttaacttatcattattctgtcatccagtatgttgtcttatttgaatggttcatttccttctttaggtgattgacaaggtttaggaggaaacttccaaaagccggtcaagtatggagtgcttaacatcactttggcaacttatatttttttacatgtttgctttgtttgttaacaacataatttatgggctgacaatgtgatcatgtattctttctggtagtcttcgtgtcactgcttgcagttgcaggggagggatcatggctttcttttattttccatgtgcaatgtttaatttaggtgatgaactccaaagcttatcccattgttttctagcaagagctaagcaatactggatggagaacatttatctttttaataacgagtaaaagcataatggcatgcttgtgtttagttctctgtttgttgaccaatcgctatatttaatcttgattttttttatctataacttgaatttcaaagattcaatattttttattcagacattttctcttctctagatattcttttatgcaaataacgcggttacactagatcagccaacattctgggaaataagctatatggtcagagtaagaggttcaagagttgatagttcaacaactttaactgagagcaaatctacaagaaaaaggaaacaagcaacctggaacctacaactgcaggagcttgcttgaaagtgaacaatcaaggttgtgtgtatatattatgcccgacatttttgaaggatattgcgagggccattgtatctgctggaaaaatcatttcaacttgtcgaacatggtattaggatacgaattggagtggtcaacagaaattctggacagatatgtcaaatttcagaatccacgatggtcctccaagaaataaagatgctcttgatcatctattgagaagtggaatactaattttttgctgcagcgtgatggataaaggtttttgcgtattcttgggtttttttcctttcctttttggctacacacaactctttttaaatatacattcagtaggtggcaatgcctcctatttccctaaaaatatagcgccaaagagttcaaaattgaattctcataatctgctattaggaaaagaggtcaacttctatattttttacatcaggtaatttggctataatacaacggcatgctgaggtcaacttctgtatttttttctgcaagtaacttggctataatacagcggcatgctccattctgaagctggtcaagaaataaatatagcacttgcaatattttccagtagtcaaacctctccattacttcaattctcgttctcatttttgactatgttcttcatgtcagttcaacataataattaagaggtcgcttgcccctgagacggcttcatggtattttatttgttttttacaaagtattttttaagcgctaaacttacagtgcactttctctattcgttttggtgctgcttataagtcttttgtgttttagatccatcgaagatggcgcttaatctcgagagctagggagatgaaatgccttttgtacatgatggaaggaaacaaattacgtacatgtatatgtggatcgaattgactgttgcattctgcctgtatttaagcaacggtttccacccaaaacgtctataatttggtccttcctagatgtgtcaaatgtgtttactgcactgcgtttgcttttgtggcagcgccctaatagttgtttataaagtctgatgttaacaaactattgtcatgctatgtaatatatagtcttaacatgttggtttgttgagtgttcgaatatcagttttatattattatgtcaggtgttattagtgttcaattttttaagttcttgttgtacatcctatcattacatgagacaatgttgtgatgtttacaatattgtgttatgtatgttatatcattttggtattatagtataatttaatttgtatcagtttagttctgtattggttgttgccaaaaaaaattatgagatattaaggtcgataataatgttcgtttttatataatcgttttgcactaatattttgttaatttttttgtataccgttgcaacgcacgggcacctaactagtatgagactatgagtacatcaagtgcattcccttagaactcttgttgtgtaaaaaaatgtgtaacatgtcttggtacagagattaatttggtttgtgttttttagactgcaattatatctgggttctcagccttgccatggttagtcaagcccctctatgattttatcagttgattcaggtggttgattatatggtggttcagagagctcgaggtgaatcacagagtacatatagatctctccactccagtcactatgttgggaatcctcagcctttggaggaatcatgagtgcatacttcagtggttctccagtcacttatggcgtaagatttgtctttggtgttacagcacttttgccactgttccgagtagcagagaaggacaactctggcaaactgtgaagaaaataaaagattttcacaagcggaatcttcagaatctgaataaaggagttcgtgggaatcagttgtaccaaaaactggttcagttttcgtattccaagcatactactggaagttcacactgatcggcgacaaactctcgcccaaggagaagttgaaggaggatcagcgtgaacacccactgaaagagagatggagttgaatgagaaatctgaaaagaatacgcaagaggtagatgagaagttccaaaacacaaacttgtatctcaagaacttagagatggagcttcgggagttacaagtgcttcataagcaatcagatagatctgaaagttttactgtgccaacacatgcacacactggtggtgcctgcatctagctattcagatcaaagcctgacaggtaccatagggcaaagtgaagaagaaacagaagagttgagcaagatcacgctagagaataaggatattcagcttgatatcaatataagagtgtttgatggagccgaccctatggagctgcatgtttatgattttaaaggacctggtgtaaccttatcaatgtacaatagcgatgagtttattaggccttttgctaagtcctccatggatatggctctttcaaaaaagtcgtctcttcatctcagcaccaagaatacaatcatcaagaagtatgacgacaggcatggatcatctatgtttctacaagctcgcggtcacatttattaggccttttgctaagttcatggatatggctctttcaaaaaagtcgtctcttcatctcagcaccaagaatacaatcatcaagaagtatgacgacatgcatggatcatctatgtttctacaagctcgcgcgaagcgatggcgatggtgggttttgatgttcaggacagaatcaatggccgcaccttcattgttt

SEQ ID NO: 198560 - DNA, 4718 bp, Zea Mays
atggcctcacccacggtcgcctccccgatccgggcgagccccgtcgacaaccccaccgtcgcgccctcactggcctcctgccgctgcgccttatcgctagatgctcgacatccccatccgcgcgctcgaggcagaggccagggacaccaagatgagcccgaccgcgaccgcctagccatcagctccaaagaagaagccaggggaccgatggacgtcagtgttccgtcgtggtggcccgctagatccatattcagcaagaaagatatctcgccatgccggcccagggccgcagcccgtcaccttcctccccccgcacccgccgtgacagccgcctccccacgcccgcttacccgactggccgcacaagatgcccacagtggcccccatcgcgcccacccgctccccccatccaccgcgacctcagccgccacgccgacgccatccccgtcctctagcgcgttgtcgccgtcgtcacaccgccaaaggtgcctgccccctgctaccgaggtcgacgaccagcagcggcaagctgccgagctcgacgacacgcacgccatgcttggccatatggacgagtccatcgcctgctacgagaaggggctccagatccagatgtccgcgctcgatgagcgcaatccctgcctccctgagacctgcaggtaggtgacaatgtcatcaagggcccctccccctttgtcgcttctcgatctagatctcgcctctccctaaagcacgggttgcacctccccccgtcacccactccttccttggcttctcccgggaaacgaccttcagtctttacaggtatgaggtcttattgtgtgccatcattttcttttgctattcattcccgaatccccactgtgccctccagtgatgatggggtatgagctctgaataacaaacaaggtaaatgtttactcttttgagtagctgaattttgctatgatgtagtaaattatactagtaaattatacttgtactgaatatgaatataagaaaaaaatactgcactaattatttttctacgctctatattgtaaaataataggaatataataaaaagctgacataaaagctaatttacaacatccctttattttactatgttttatgataaataccttgattttccttgtaagttgtatcttttagtgattttcaaagaaactcctatttgcttggtgctttttctgtaagcatatgttgattaaatctttgtgtattctttctgtacactaatttaacttatcattattctgtcatccagtatgttgtcttatttgaatggttcatttccttctttaggtgattgacaaggtttaggaggaaacttccaaaagccggtcaagtatggagtgcttaacatcactttggcaacttatatttttttacatgtttgctttgtttgttaacaacataatttatgggctgacaatgtgatcatgtattctttctggtagtcttcgtgtcactgcttgcagttgcaggggagggatcatggctttcttttattttccatgtgcaatgtttaatttaggtgatgaactccaaagcttatcccattgttttctagcaagagctaagcaatactggatggagaacatttatctttttaataacgagtaaaagcataatggcatgcttgtgtttagttctctgtttgttgaccaatcgctatatttaatcttgattttttttatctataacttgaatttcaaagattcaatattttttattcagacattttctcttctctagatattcttttatgcaaataacgcggttacactagatcagccaacattctgggaaataagctatatggtcagagtaagaggttcaagagttgatagttcaacaactttaactgagagcaaatctacaagaaaaaggaaacaagcaacctggaacctacaactgcaggagcttgcttgaaagtgaacaatcaaggttgtgtgtatatattatgcccgacatttttgaaggatattgcgagggccattgtatctgctggaaaaatcatttcaacttgtcgaacatggtattaggatacgaattggagtggtcaacagaaattctggacagatatgtcaaatttcagaatccacgatggtcctccaagaaataaagatgctcttgatcatctattgagaagtggaatactaattttttgctgcagcgtgatggataaaggtttttgcgtattcttgggtttttttcctttcctttttggctacacacaactctttttaaatatacattcagtaggtggcaatgcctcctatttccctaaaaatatagcgccaaagagttcaaaattgaattctcataatctgctattaggaaaagaggtcaacttctatattttttacatcaggtaatttggctataatacaacggcatgctgaggtcaacttctgtatttttttctgcaagtaacttggctataatacagcggcatgctccattctgaagctggtcaagaaataaatatagcacttgcaatattttccagtagtcaaacctctccattacttcaattctcgttctcatttttgactatgttcttcatgtcagttcaacataataattaagaggtcgcttgcccctgagacggcttcatgatccatcgaagatggcgcttaatctcgagagctagggagatgaaatgccttttgtacatgatggaaggaaacaaattacgtacatgtatatgtggatcgaattgactgttgcattctgcctgtatttaagcaacggtttccacccaaaacgtctataatttggtccttcctagatgtgtcaaatgtgtttactgcactgcgtttgcttttgtggcagcgccctaatagttgtttataaagtctgatgttaacaaactattgtcatgctatgtaatatatagtcttaacatgttggtttgttgagtgttcgaatatcagttttatattattatgtcaggtgttattagtgttcaattttttaagttcttgttgtacatcctatcattacatgagacaatgttgtgatgtttacaatattgtgttatgtatgttatatcattttggtattatagtataatttaatttgtatcagtttagttctgtattggttgttgccaaaaaaaattatgagatattaaggtcgataataatgttcgtttttatataatcgttttgcactaatattttgttaatttttttgtataccgttgcaacgcacgggcacctaactagtatgagactatgagtacatcaagtgcattcccttagaactcttgttgtgtaaaaaaatgtgtaacatgtcttggtacagagattaatttggtttgtgttttttagactgcaattatatctgggttctcagccttgccatggttagtcaagcccctctatgattttatcaggtttcaccaaaatactgaatagccttcctatcatccctttctttctgtatatgatatatgcatttaattgcaatgatgtactgttgctatttccgtacacagttgattcaggtggttgattatatggtggttcagagagctcgaggtgaatcacagagtacatatagatctctccactccagtcactatgttgggaatcctcagcctttggaggaatcatgagtgcatacttcagtggttctccagtcacttatggcgtaagatttgtctttggtgttacagcacttttgccactgttccgagtagcagagaaggacaactctggcaaactgtgaagaaaataaaagattttcacaagcggaatcttcagaatctgaataaaggagttcgtgggaatcagttgtaccaaaaactggttcagttttcgtattccaagcatactactggaagttcacactgatcggcgacaaactctcgcccaaggagaagttgaaggaggatcagcgtgaacacccactgaaagagagatggagttgaatgagaaatctgaaaagaatacgcaagaggtagatgagaagttccaaaacacaaacttgtatctcaagaacttagagatggagcttcgggagttacaagtgcttcataagcaatcagatagatctgaaagttttactgtgccaacacatgcacacactggtggtgcctgcatctagctattcagatcaaagcctgacaggtaccatagggcaaagtgaagaagaaacagaagagttgagcaagatcacgctagagaataaggatattcagcttgatatcaatataagagaagaatcttggagctcttcacaacaagtgaacttttacacagaaagtaccagctccagtgaggcttgtttgatggagccgaccctatggagctgcatgtttatgattttaaaggacctggtgtaaccttatcaatgtacaatagcgatgaggccttttgctaagtcctccatggatatggctctttcaaaaaagtcgtctcttcatctcagcaccaagaatacaatcatcaagaagtatgacgacaggcatggatcatctatgtttctacaagctcgcggtcacatttattaggccttttgctaagttcatggatatggctctttcaaaaaagtcgtctcttcatctcagcaccaagaatacaatcatcaagaagtatgacgacatgcatggatcatctatgtttctacaagctcgcgcgaagcgatggcgatggtgggttttgatgttcaggacagaatcaatggccgcaccttcattgttt

SEQ ID NO: 198561 - DNA, 3975 bp, Zea Mays
atggcctcacccacggtcgcctccccgatccgggcgagccccgtcgacaaccccaccgtcgcgccctcactggcctcctgccgctgcgccttatcgctagatgctcgacatccccatccgcgcgctcgaggcagaggccagggacaccaagatgagcccgaccgcgaccgcctagccatcagctccaaagaagaagccaggggaccgatggacgtcagtgttccgtcgtggtggcccgctagatccatattcagcaagaaagatatctcgccatgccggcccagggccgcagcccgtcaccttcctccccccgcacccgccgtgacagccgcctccccacgcccgcttacccgactggccgcacaagatgcccacagtggcccccatcgcgcccacccgctccccccatccaccgcgacctcagccgccacgccgacgccatccccgtcctctagcgcgttgtcgccgtcgtcacaccgccaaaggtgcctgccccctgctaccgaggtcgacgaccagcagcggcaagctgccgagctcgacgacacgcacgccatgcttggccatatggacgagtccatcgcctgctacgagaaggggctccagatccagatgtccgcgctcgatgagcgcaatccctgcctccctgagacctgcaggtgattgacaaggtttaggaggaaacttccaaaagccggtcaagtatggagtgcttaacatcactttggcaacttatatttttttacatgtttgctttgtttgttaacaacataatttatgggctgacaatgtgatcatgtattctttctggtagtcttcgtgtcactgcttgcagttgcaggggagggatcatggctttcttttattttccatgtgcaatgtttaatttaggtgatgaactccaaagcttatcccattgttttctagcaagagctaagcaatactggatggagaacatttatctttttaataacgagtaaaagcataatggcatgcttgtgtttagttctctgtttgttgaccaatcgctatatttaatcttgattttttttatctataacttgaatttcaaagattcaatattttttattcagacattttctcttctctagatattcttttatgcaaataacgcggttacactagatcagccaacattctgggaaataagctatatggtcagagtaagaggttcaagagttgatagttcaacaactttaactgagagcaaatctacaagaaaaaggaaacaagcaacctggaacctacaactgcaggagcttgcttgaaagtgaacaatcaaggttgtgtgtatatattatgcccgacatttttgaaggatattgcgagggccattgtatctgctggaaaaatcatttcaacttgtcgaacatggtattaggatacgaattggagtggtcaacagaaattctggacagatatgtcaaatttcagaatccacgatggtcctccaagaaataaagatgctcttgatcatctattgagaagtggaatactaattttttgctgcagcgtgatggataaaggtttttgcgtattcttgggtttttttcctttcctttttggctacacacaactctttttaaatatacattcagtaggtggcaatgcctcctatttccctaaaaatatagcgccaaagagttcaaaattgaattctcataatctgctattaggaaaagaggtcaacttctatattttttacatcaggtaatttggctataatacaacggcatgctgaggtcaacttctgtatttttttctgcaagtaacttggctataatacagcggcatgctccattctgaagctggtcaagaaataaatatagcacttgcaatattttccagtagtcaaacctctccattacttcaattctcgttctcatttttgactatgttcttcatgtcagttcaacataataattaagaggtcgcttgcccctgagacggcttcatgatccatcgaagatggcgcttaatctcgagagctagggagatgaaatgccttttgtacatgatggaaggaaacaaattacgtacatgtatatgtggatcgaattgactgttgcattctgcctgtatttaagcaacggtttccacccaaaacgtctataatttggtccttcctagatgtgtcaaatgtgtttactgcactgcgtttgcttttgtggcagcgccctaatagttgtttataaagtctgatgttaacaaactattgtcatgctatgtaatatatagtcttaacatgttggtttgttgagtgttcgaatatcagttttatattattatgtcaggtgttattagtgttcaattttttaagttcttgttgtacatcctatcattacatgagacaatgttgtgatgtttacaatattgtgttatgtatgttatatcattttggtattatagtataatttaatttgtatcagtttagttctgtattggttgttgccaaaaaaaattatgagatattaaggtcgataataatgttcgtttttatataatcgttttgcactaatattttgttaatttttttgtataccgttgcaacgcacgggcacctaactagtatgagactatgagtacatcaagtgcattcccttagaactcttgttgtgtaaaaaaatgtgtaacatgtcttggtacagagattaatttggtttgtgttttttagactgcaattatatctgggttctcagccttgccatggttagtcaagcccctctatgattttatcagttgattcaggtggttgattatatggtggttcagagagctcgaggtgaatcacagagtacatatagatctctccactccagtcactatgttgggaatcctcagcctttggaggaatcatgagtgcatacttcagtggttctccagtcacttatggcgtaagatttgtctttggtgttacagcacttttgccactgttccgagtagcagagaaggacaactctggcaaactgtgaagaaaataaaagattttcacaagcggaatcttcagaatctgaataaaggagttcgtgggaatcagttgtaccaaaaactggttcagttttcgtattccaagcatactactggaagttcacactgatcggcgacaaactctcgcccaaggagaagttgaaggaggatcagcgtgaacacccactgaaagagagatggagttgaatgagaaatctgaaaagaatacgcaagaggtagatgagaagttccaaaacacaaacttgtatctcaagaacttagagatggagcttcgggagttacaagtgcttcataagcaatcagatagatctgaaagttttactgtgccaacacatgcacacactggtggtgcctgcatctagctattcagatcaaagcctgacaggtaccatagggcaaagtgaagaagaaacagaagagttgagcaagatcacgctagagaataaggatattcagcttgatatcaatataagagaagaatcttggagctcttcacaacaagtgaacttttacacagaaagtaccagctccagtgaggcttgtttgatggagccgaccctatggagctgcatgtttatgattttaaaggacctggtgtaaccttatcaatgtacaatagcgatgagtttattaggccttttgctaagtcctccatggatatggctctttcaaaaaagtcgtctcttcatctcagcaccaagaatacaatcatcaagaagtatgacgacaggcatggatcatctatgtttctacaagctcgcggtcacatttattaggccttttgctaagttcatggatatggctctttcaaaaaagtcgtctcttcatctcagcaccaagaatacaatcatcaagaagtatgacgacatgcatggatcatctatgtttctacaagctcgcgcgaagcgatggcgatggtgggttttgatgttcaggacagaatcaatggccgcaccttcattgttt

SEQ ID NO: 198562 - DNA, 4322 bp, Zea Mays
atggcctcacccacggtcgcctccccgatccgggcgagccccgtcgacaaccccaccgtcgcgccctcactggcctcctgccgctgcgccttatcgctagatgctcgacatccccatccgcgcgctcgaggcagaggccagggacaccaagatgagcccgaccgcgaccgcctagccatcagctccaaagaagaagccaggggaccgatggacgtcagtgttccgtcgtggtggcccgctagatccatattcagcaagaaagatatctcgccatgccggcccagggccgcagcccgtcaccttcctccccccgcacccgccgtgacagccgcctccccacgcccgcttacccgactggccgcacaagatgcccacagtggcccccatcgcgcccacccgctccccccatccaccgcgacctcagccgccacgccgacgccatccccgtcctctagcgcgttgtcgccgtcgtcacaccgccaaaggtgcctgccccctgctaccgaggtcgacgaccagcagcggcaagctgccgagctcgacgacacgcacgccatgcttggccatatggacgagtccatcgcctgctacgagaaggggctccagatccagatgtccgcgctcgatgagcgcaatccctgcctccctgagacctgcaggtaggtgacaatgtcatcaagggcccctccccctttgtcgcttctcgatctagatctcgcctctccctaaagcacgggttgcacctccccccgtcacccactccttccttggcttctcccgggaaacgaccttcagtctttacaggtgattgacaaggtttaggaggaaacttccaaaagccggtcaagtatggagtgcttaacatcactttggcaacttatatttttttacatgtttgctttgtttgttaacaacataatttatgggctgacaatgtgatcatgtattctttctggtagtcttcgtgtcactgcttgcagttgcaggggagggatcatggctttcttttattttccatgtgcaatgtttaatttaggtgatgaactccaaagcttatcccattgttttctagcaagagctaagcaatactggatggagaacatttatctttttaataacgagtaaaagcataatggcatgcttgtgtttagttctctgtttgttgaccaatcgctatatttaatcttgattttttttatctataacttgaatttcaaagattcaatattttttattcagacattttctcttctctagatattcttttatgcaaataacgcggttacactagatcagccaacattctgggaaataagctatatggtcagagtaagaggttcaagagttgatagttcaacaactttaactgagagcaaatctacaagaaaaaggaaacaagcaacctggaacctacaactgcaggagcttgcttgaaagtgaacaatcaaggttgtgtgtatatattatgcccgacatttttgaaggatattgcgagggccattgtatctgctggaaaaatcatttcaacttgtcgaacatggtattaggatacgaattggagtggtcaacagaaattctggacagatatgtcaaatttcagaatccacgatggtcctccaagaaataaagatgctcttgatcatctattgagaagtggaatactaattttttgctgcagcgtgatggataaaggtttttgcgtattcttgggtttttttcctttcctttttggctacacacaactctttttaaatatacattcagtaggtggcaatgcctcctatttccctaaaaatatagcgccaaagagttcaaaattgaattctcataatctgctattaggaaaagaggtcaacttctatattttttacatcaggtaatttggctataatacaacggcatgctgaggtcaacttctgtatttttttctgcaagtaacttggctataatacagcggcatgctccattctgaagctggtcaagaaataaatatagcacttgcaatattttccagtagtcaaacctctccattacttcaattctcgttctcatttttgactatgttcttcatgtcagttcaacataataattaagaggtcgcttgcccctgagacggcttcatggtattttatttgttttttacaaagtattttttaagcgctaaacttacagtgcactttctctattcgttttggtgctgcttataagtcttttgtgttttagatccatcgaagatggcgcttaatctcgagagctagggagatgaaatgccttttgtacatgatggaaggaaacaaattacgtacatgtatatgtggatcgaattgactgttgcattctgcctgtatttaagcaacggtttccacccaaaacgtctataatttggtccttcctagatgtgtcaaatgtgtttactgcactgcgtttgcttttgtggcagcgccctaatagttgtttataaagtctgatgttaacaaactattgtcatgctatgtaatatatagtcttaacatgttggtttgttgagtgttcgaatatcagttttatattattatgtcaggtgttattagtgttcaattttttaagttcttgttgtacatcctatcattacatgagacaatgttgtgatgtttacaatattgtgttatgtatgttatatcattttggtattatagtataatttaatttgtatcagtttagttctgtattggttgttgccaaaaaaaattatgagatattaaggtcgataataatgttcgtttttatataatcgttttgcactaatattttgttaatttttttgtataccgttgcaacgcacgggcacctaactagtatgagactatgagtacatcaagtgcattcccttagaactcttgttgtgtaaaaaaatgtgtaacatgtcttggtacagagattaatttggtttgtgttttttagactgcaattatatctgggttctcagccttgccatggttagtcaagcccctctatgattttatcaggtttcaccaaaatactgaatagccttcctatcatccctttctttctgtatatgatatatgcatttaattgcaatgatgtactgttgctatttccgtacacagttgattcaggtggttgattatatggtggttcagagagctcgaggtgaatcacagagtacatatagatctctccactccagtcactatgttgggaatcctcagcctttggaggaatcatgagtgcatacttcagtggttctccagtcacttatggcgtaagatttgtctttggtgttacagcacttttgccactgttccgagtagcagagaaggacaactctggcaaactgtgaagaaaataaaagattttcacaagcggaatcttcagaatctgaataaaggagttcgtgggaatcagttgtaccaaaaactggttcagttttcgtattccaagcatactactggaagttcacactgatcggcgacaaactctcgcccaaggagaagttgaaggaggatcagcgtgaacacccactgaaagagagatggagttgaatgagaaatctgaaaagaatacgcaagaggtagatgagaagttccaaaacacaaacttgtatctcaagaacttagagatggagcttcgggagttacaagtgcttcataagcaatcagatagatctgaaagttttactgtgccaacacatgcacacactggtggtgcctgcatctagctattcagatcaaagcctgacaggtaccatagggcaaagtgaagaagaaacagaagagttgagcaagatcacgctagagaataaggatattcagcttgatatcaatataagagaagaatcttggagctcttcacaacaagtgaacttttacacagaaagtaccagctccagtgaggcttgtttgatggagccgaccctatggagctgcatgtttatgattttaaaggacctggtgtaaccttatcaatgtacaatagcgatgagtttattaggccttttgctaagtcctccatggatatggctctttcaaaaaagtcgtctcttcatctcagcaccaagaatacaatcatcaagaagtatgacgacaggcatggatcatctatgtttctacaagctcgcggtcacatttattaggccttttgctaagttcatggatatggctctttcaaaaaagtcgtctcttcatctcagcaccaagaatacaatcatcaagaagtatgacgacatgcatggatcatctatgtttctacaagctcgcgcgaagcgatggcgatggtgggttttgatgttcaggacagaatcaatggccgcaccttcattgttt

SEQ ID NO: 198563 - DNA, 5946 bp, Zea Mays
atggcctcacccacggtcgcctccccgatccgggcgagccccgtcgacaaccccaccgtcgcgccctcactggcctcctgccgctgcgccttatcgctagatgctcgacatccccatccgcgcgctcgaggcagaggccagggacaccaagatgagcccgaccgcgaccgcctagccatcagctccaaagaagaagccaggggaccgatggacgtcagtgttccgtcgtggtggcccgctagatccatattcagcaagaaagatatctcgccatgccggcccagggccgcagcccgtcaccttcctccccccgcacccgccgtgacagccgcctccccacgcccgcttacccgactggccgcacaagatgcccacagtggcccccatcgcgcccacccgctccccccatccaccgcgacctcagccgccacgccgacgccatccccgtcctctagcgcgttgtcgccgtcgtcacaccgccaaaggtgcctgccccctgctaccgaggtcgacgaccagcagcggcaagctgccgagctcgacgacacgcacgccatgcttggccatatggacgagtccatcgcctgctacgagaaggggctccagatccagatgtccgcgctcgatgagcgcaatccctgcctccctgagacctgcaggtgattgacaaggtttaggaggaaacttccaaaagccggtcaagtatggagtgcttaacatcactttggcaacttatatttttttacatgtttgctttgtttgttaacaacataatttatgggctgacaatgtgatcatgtattctttctggtagtcttcgtgtcactgcttgcagttgcaggggagggatcatggctttcttttattttccatgtgcaatgtttaatttaggtgatgaactccaaagcttatcccattgttttctagcaagagctaagcaatactggatggagaacatttatctttttaataacgagtaaaagcataatggcatgcttgtgtttagttctctgtttgttgaccaatcgctatatttaatcttgattttttttatctataacttgaatttcaaagattcaatattttttattcagacattttctcttctctagatattcttttatgcaaataacgcggttacactagatcagccaacattctgggaaataagctatatggtcagagtaagaggttcaagagttgatagttcaacaactttaactgagagcaaatctacaagaaaaaggaaacaagcaacctggaacctacaactgcaggagcttgcttgaaagtgaacaatcaaggttgtgtgtatatattatgcccgacatttttgaaggatattgcgagggccattgtatctgctggaaaaatcatttcaacttgtcgaacatggtattaggatacgaattggagtggtcaacagaaattctggacagatatgtcaaatttcagaatccacgatggtcctccaagaaataaagatgctcttgatcatctattgagaagtggaatactaattttttgctgcagcgtgatggataaaggtttttgcgtattcttgggtttttttcctttcctttttggctacacacaactctttttaaatatacattcagtaggtggcaatgcctcctatttccctaaaaatatagcgccaaagagttcaaaattgaattctcataatctgctattaggaaaagaggtcaacttctatattttttacatcaggtaatttggctataatacaacggcatgctgaggtcaacttctgtatttttttctgcaagtaacttggctataatacagcggcatgctccattctgaagctggtcaagaaataaatatagcacttgcaatattttccagtagtcaaacctctccattacttcaattctcgttctcatttttgactatgttcttcatgtcagttcaacataataattaagaggtcgcttgcccctgagacggcttcatggtattttatttgttttttacaaagtattttttaagcgctaaacttacagtgcactttctctattcgttttggtgctgcttataagtcttttgtgttttagatccatcgaagatggcgcttaatctcgagagctagggagatgaaatgccttttgtacatgatggaaggaaacaaattacgtacatgtatatgtggatcgaattgactgttgcattctgcctgtatttaagcaacggtttccacccaaaacgtctataatttggtccttcctagatgtgtcaaatgtgtttactgcactgcgtttgcttttgtggcagcgccctaatagttgtttataaagtctgatgttaacaaactattgtcatgctatgtaatatatagtcttaacatgttggtttgttgagtgttcgaatatcagttttatattattatgtcaggtgttattagtgttcaattttttaagttcttgttgtacatcctatcattacatgagacaatgttgtgatgtttacaatattgtgttatgtatgttatatcattttggtattatagtataatttaatttgtatcagtttagttctgtattggttgttgccaaaaaaaattatgagatattaaggtcgataataatgttcgtttttatataatcgttttgcactaatattttgttaatttttttgtataccgttgcaacgcacgggcacctaactagtatgagactatgagtacatcaagtgcattcccttagaactcttgttgtgtaaaaaaatgtgtaacatgtcttggtacagagattaatttggtttgtgttttttagactgcaattatatctgggttctcagccttgccatggttagtcaagcccctctatgattttatcagttgattcaggtggttgattatatggtggttcagagagctcgaggtgaatcacagagtacatatagatctctccactccagtcactatgttgggaatcctcagcctttggaggaatcatgagtgcatacttcagtggttctccagtcacttatggcgtaagatttgtctttggtgttacagcacttttgccactgttccgagtagcagagaaggacaactctggcaaactgtgaagaaaataaaagattttcacaagcggaatcttcagaatctgaataaaggagttcgtgggaatcagttgtaccaaaaactggttcagttttcgtattccaagcatactactggaagttcacactgatcggcgacaaactctcgcccaaggagaagttgaaggaggatcagcgtgaacacccactgaaagagagatggagttgaatgagaaatctgaaaagaatacgcaagaggtagatgagaagttccaaaacacaaacttgtatctcaagaacttagagatggagcttcgggagttacaagtgcttcataagcaatcagatagatctgaaagttttactgtgccaacacatgcacacactggtggtgcctgcatctagctattcagatcaaagcctgacaggtaccatagggcaaagtgaagaagaaacagaagagttgagcaagatcacgctagagaataaggatattcagcttgatatcaatataagagtgtttgatggagccgaccctatggagctgcatgtttatgattttaaaggacctggtgtaaccttatcaatgtacaatagcgatgagtttattaggccttttgctaagtcctccatggatatggctctttcaaaaaagtcgtctcttcatctcagcaccaagaatacaatcatcaagaagtatgacgacaggcatggatcatctatgtttctacaagctcgcggtcacatttattaggccttttgctaagttcatggatatggctctttcaaaaaagtcgtctcttcatctcagcaccaagaatacaatcatcaagaagtatgacgacatgcatggatcatctatgtttctacaagctcgcgttacaatggaatgctaagagacaaatagttaaagaactgctttaacctaccttgatggagaggggagaatgcatcgtgttagcaagggagcaccagagcagatccttcatcttgcccacaacaagtcagatattgaaagaagggtcagagctgtgattgacaaatttgctgagcgtggtctgtgagcacttggtgtggcttaccaggtgatcaacttgctattgggaaagaaactgcacgtcgtttgggaatgggtactaatatgtacccttcctctgctttactcagacagaataaggatgagtcaattgcttccttgccaattgatgaattgatcgagaaggctgatggctttgctggtgtctttccagaacacaagtatgagatcgtgaaaggcttgcaagcaagaaaacatatatgtggcatgactggggatggtgtaaatgatgccccagctttgaagaaggctgatattggtattgcagtagcagactctactgatgcaactcgtagtgcttctgacattgtcctaactgaacctggccttagtgtgattattagtgctgtgctgacgagtcgggcaattttccaaaggatgaagaattacacgatctatgctgtatcgattaccatccgtattgtgcttggttttatgcttcttgcgctgatatggaagtttgacttcccaccatttatggtcctgatcattgccatcctcaatgacggtaccattatgactatctcgaaggacagagtaaaaccatctccacaaccagacagttggaagttagctgagatttttgcaactggagtagttcttggtggttatttggccatgatgactgtcattttcttctgggctgcatacaagactgactttttcccgcggctgttccacgtcgaaagcctcgagaagaccgcccaggatgactttcagaagttcgcctctgccgtgtaccttcaagtcagcacggtcagtcaggcccttatcttcgtgacacggtcgcgcagctggtcgtttgtggagcgtcctgggttcttgctggtcttcgctttcttggtggctaagctgattgccactctgatcgctgtatatgccaactgggcgttcactgcgatcaagggcattggatggggctgggccggtgtcatctggctctataacatcgtcttctacttcccgctggacatcatcaagttcctcatccgctatgcgctgagtgggagggcatggaacctcgtccttgagcagaggattgcgttcacgagcaagaagaatttcggcacggaagaaagggagcgcaagtgggcgcatgcgcagaggactctccatgggctccagccgccagaagcatccatcttcgagaacaagacgacattcaatgagctgaaccagctcgcggaagaggcccgcaggagagccgagatggcgaggttgcgagaagtgagcaccctgaaggggaggatggagtcagtggtgaagcagaagggtctggacatctagaccatccagcagtcctacactgtgtgactgactgactgacgacgacggggtttatagaggtttcttcttatactatacaatctgtactaggtagcaataaggatcaaggaaggaacccctatatattggctgcggttcgcaggaaatgaatgatggtaatatttatgatgtcggtgtggtgcttctgtcgccaactctcgaccatactaccctcaactcacccccggcaccaccggcaggcattgatattcagagatgaggtatagtagtctgtagcctctagtagatgctgatgaattgatgatatagtacatttttgcttgctttcttgcttgtttgttgttttccttggttctgctctgggtgttttgatgcttgctggctttgtgctattcctgattcctctaaatctgaagtggtagcagcgatggcataatagctgcacaggcatgtatatgccatgagcatgtgcagtgtttaccgttgcggcatgggca

SEQ ID NO: 198564 - DNA, 5492 bp, Zea Mays
atggcctcacccacggtcgcctccccgatccgggcgagccccgtcgacaaccccaccgtcgcgccctcactggcctcctgccgctgcgccttatcgctagatgctcgacatccccatccgcgcgctcgaggcagaggccagggacaccaagatgagcccgaccgcgaccgcctagccatcagctccaaagaagaagccaggggaccgatggacgtcagtgttccgtcgtggtggcccgctagatccatattcagcaagaaagatatctcgccatgccggcccagggccgcagcccgtcaccttcctccccccgcacccgccgtgacagccgcctccccacgcccgcttacccgactggccgcacaagatgcccacagtggcccccatcgcgcccacccgctccccccatccaccgcgacctcagccgccacgccgacgccatccccgtcctctagcgcgttgtcgccgtcgtcacaccgccaaaggtgcctgccccctgctaccgaggtcgacgaccagcagcggcaagctgccgagctcgacgacacgcacgccatgcttggccatatggacgagtccatcgcctgctacgagaaggggctccagatccagatgtccgcgctcgatgagcgcaatccctgcctccctgagacctgcaggtaggtgacaatgtcatcaagggcccctccccctttgtcgcttctcgatctagatctcgcctctccctaaagcacgggttgcacctccccccgtcacccactccttccttggcttctcccgggaaacgaccttcagtctttacaggtatgaggtcttattgtgtgccatcattttcttttgctattcattcccgaatccccactgtgccctccagtgatgatggggtatgagctctgaataacaaacaaggtaaatgtttactcttttgagtagctgaattttgctatgatgtagtaaattatactagtaaattatacttgtactgaatatgaatataagaaaaaaatactgcactaattatttttctacgctctatattgtaaaataataggaatataataaaaagctgacataaaagctaatttacaacatccctttattttactatgttttatgataaataccttgattttccttgtaagttgtatcttttagtgattttcaaagaaactcctatttgcttggtgctttttctgtaagcatatgttgattaaatctttgtgtattctttctgtacactaatttaacttatcattattctgtcatccagtatgttgtcttatttgaatggttcatttccttctttaggtgattgacaaggtttaggaggaaacttccaaaagccggtcaagtatggagtgcttaacatcactttggcaacttatatttttttacatgtttgctttgtttgttaacaacataatttatgggctgacaatgtgatcatgtattctttctggtagtcttcgtgtcactgcttgcagttgcaggggagggatcatggctttcttttattttccatgtgcaatgtttaatttaggtgatgaactccaaagcttatcccattgttttctagcaagagctaagcaatactggatggagaacatttatctttttaataacgagtaaaagcataatggcatgcttgtgtttagttctctgtttgttgaccaatcgctatatttaatcttgattttttttatctataacttgaatttcaaagattcaatattttttattcagacattttctcttctctagatattcttttatgcaaataacgcggttacactagatcagccaacattctgggaaataagctatatggtcagagtaagaggttcaagagttgatagttcaacaactttaactgagagcaaatctacaagaaaaaggaaacaagcaacctggaacctacaactgcaggagcttgcttgaaagtgaacaatcaaggttgtgtgtatatattatgcccgacatttttgaaggatattgcgagggccattgtatctgctggaaaaatcatttcaacttgtcgaacatggtattaggatacgaattggagtggtcaacagaaattctggacagatatgtcaaatttcagaatccacgatggtcctccaagaaataaagatgctcttgatcatctattgagaagtggaatactaattttttgctgcagcgtgatggataaaggtttttgcgtattcttgggtttttttcctttcctttttggctacacacaactctttttaaatatacattcagtaggtggcaatgcctcctatttccctaaaaatatagcgccaaagagttcaaaattgaattctcataatctgctattaggaaaagaggtcaacttctatattttttacatcaggtaatttggctataatacaacggcatgctgaggtcaacttctgtatttttttctgcaagtaacttggctataatacagcggcatgctccattctgaagctggtcaagaaataaatatagcacttgcaatattttccagtagtcaaacctctccattacttcaattctcgttctcatttttgactatgttcttcatgtcagttcaacataataattaagaggtcgcttgcccctgagacggcttcatgatccatcgaagatggcgcttaatctcgagagctagggagatgaaatgccttttgtacatgatggaaggaaacaaattacgtacatactgcaattatatctgggttctcagccttgccatggttagtcaagcccctctatgattttatcagttgattcaggtggttgattatatggtggttcagagagctcgaggtgaatcacagagtacatatagatctctccactccagtcactatgttgggaatcctcagcctttggaggaatcatgagtgcatacttcagtggttctccagtcacttatggcgtaagatttgtctttggtgttacagcacttttgccactgttccgagtagcagagaaggacaactctggcaaactgtgaagaaaataaaagattttcacaagcggaatcttcagaatctgaataaaggagttcgtgggaatcagttgtaccaaaaactggttcagttttcgtattccaagcatactactggaagttcacactgatcggcgacaaactctcgcccaaggagaagttgaaggaggatcagcgtgaacacccactgaaagagagatggagttgaatgagaaatctgaaaagaatacgcaagaggtagatgagaagttccaaaacacaaacttgtatctcaagaacttagagatggagcttcgggagttacaagtgcttcataagcaatcagatagatctgaaagttttactgtgccaacacatgcacacactggtggtgcctgcatctagctattcagatcaaagcctgacaggtaccatagggcaaagtgaagaagaaacagaagagttgagcaagatcacgctagagaataaggatattcagcttgatatcaatataagagtgtttgatggagccgaccctatggagctgcatgtttatgattttaaaggacctggtgtaaccttatcaatgtacaatagcgatgagtttattaggccttttgctaagtcctccatggatatggctctttcaaaaaagtcgtctcttcatctcagcaccaagaatacaatcatcaagaagtatgacgacaggcatggatcatctatgtttctacaagctcgcggtcacatttattaggccttttgctaagttcatggatatggctctttcaaaaaagtcgtctcttcatctcagcaccaagaatacaatcatcaagaagtatgacgacatgcatggatcatctatgtttctacaagctcgcggtgatcaacttgctattgggaaagaaactgcacgtcgtttgggaatgggtactaatatgtacccttcctctgctttactcagacagaataaggatgagtcaattgcttccttgccaattgatgaattgatcgagaaggctgatggctttgctggtgtctttccagaacacaagtatgagatcgtgaaaggcttgcaagcaagaaaacatatatgtggcatgactggggatggtgtaaatgatgccccagctttgaagaaggctgatattggtattgcagtagcagactctactgatgcaactcgtagtgcttctgacattgtcctaactgaacctggccttagtgtgattattagtgctgtgctgacgagtcgggcaattttccaaaggatgaagaattacacgatctatgctgtatcgattaccatccgtattgtgcttggttttatgcttcttgcgctgatatggaagtttgacttcccaccatttatggtcctgatcattgccatcctcaatgacggtaccattatgactatctcgaaggacagagtaaaaccatctccacaaccagacagttggaagttagctgagatttttgcaactggagtagttcttggtggttatttggccatgatgactgtcattttcttctgggctgcatacaagactgactttttcccgcggctgttccacgtcgaaagcctcgagaagaccgcccaggatgactttcagaagttcgcctctgccgtgtaccttcaagtcagcacggtcagtcaggcccttatcttcgtgacacggtcgcgcagctggtcgtttgtggagcgtcctgggttcttgctggtcttcgctttcttggtggctaagctgattgccactctgatcgctgtatatgccaactgggcgttcactgcgatcaagggcattggatggggctgggccggtgtcatctggctctataacatcgtcttctacttcccgctggacatcatcaagttcctcatccgctatgcgctgagtgggagggcatggaacctcgtccttgagcagaggattgcgttcacgagcaagaagaatttcggcacggaagaaagggagcgcaagtgggcgcatgcgcagaggactctccatgggctccagccgccagaagcatccatcttcgagaacaagacgacattcaatgagctgaaccagctcgcggaagaggcccgcaggagagccgagatggcgaggttgcgagaagtgagcaccctgaaggggaggatggagtcagtggtgaagcagaagggtctggacatctagaccatccagcagtcctacactgtgtgactgactgactgacgacgacggggtttatagaggtttcttcttatactatacaatctgtactaggtagcaataaggatcaaggaaggaacccctatatattggctgcggttcgcaggaaatgaatgatggtaatatttatgatgtcggtgtggtgcttctgtcgccaactctcgaccatactaccctcaactcacccccggcaccaccggcaggcattgatattcagagatgagcgatggcataatagctgcacaggcatgtatatgccatgagcatgtgcagtgtttaccgttgcggcatgggca

SEQ ID NO: 198565 - DNA, 5834 bp, Zea Mays
atggcctcacccacggtcgcctccccgatccgggcgagccccgtcgacaaccccaccgtcgcgccctcactggcctcctgccgctgcgccttatcgctagatgctcgacatccccatccgcgcgctcgaggcagaggccagggacaccaagatgagcccgaccgcgaccgcctagccatcagctccaaagaagaagccaggggaccgatggacgtcagtgttccgtcgtggtggcccgctagatccatattcagcaagaaagatatctcgccatgccggcccagggccgcagcccgtcaccttcctccccccgcacccgccgtgacagccgcctccccacgcccgcttacccgactggccgcacaagatgcccacagtggcccccatcgcgcccacccgctccccccatccaccgcgacctcagccgccacgccgacgccatccccgtcctctagcgcgttgtcgccgtcgtcacaccgccaaaggtgcctgccccctgctaccgaggtcgacgaccagcagcggcaagctgccgagctcgacgacacgcacgccatgcttggccatatggacgagtccatcgcctgctacgagaaggggctccagatccagatgtccgcgctcgatgagcgcaatccctgcctccctgagacctgcaggtgattgacaaggtttaggaggaaacttccaaaagccggtcaagtatggagtgcttaacatcactttggcaacttatatttttttacatgtttgctttgtttgttaacaacataatttatgggctgacaatgtgatcatgtattctttctggtagtcttcgtgtcactgcttgcagttgcaggggagggatcatggctttcttttattttccatgtgcaatgtttaatttaggtgatgaactccaaagcttatcccattgttttctagcaagagctaagcaatactggatggagaacatttatctttttaataacgagtaaaagcataatggcatgcttgtgtttagttctctgtttgttgaccaatcgctatatttaatcttgattttttttatctataacttgaatttcaaagattcaatattttttattcagacattttctcttctctagatattcttttatgcaaataacgcggttacactagatcagccaacattctgggaaataagctatatggtcagagtaagaggttcaagagttgatagttcaacaactttaactgagagcaaatctacaagaaaaaggaaacaagcaacctggaacctacaactgcaggagcttgcttgaaagtgaacaatcaaggttgtgtgtatatattatgcccgacatttttgaaggatattgcgagggccattgtatctgctggaaaaatcatttcaacttgtcgaacatggtattaggatacgaattggagtggtcaacagaaattctggacagatatgtcaaatttcagaatccacgatggtcctccaagaaataaagatgctcttgatcatctattgagaagtggaatactaattttttgctgcagcgtgatggataaaggtttttgcgtattcttgggtttttttcctttcctttttggctacacacaactctttttaaatatacattcagtaggtggcaatgcctcctatttccctaaaaatatagcgccaaagagttcaaaattgaattctcataatctgctattaggaaaagaggtcaacttctatattttttacatcaggtaatttggctataatacaacggcatgctgaggtcaacttctgtatttttttctgcaagtaacttggctataatacagcggcatgctccattctgaagctggtcaagaaataaatatagcacttgcaatattttccagtagtcaaacctctccattacttcaattctcgttctcatttttgactatgttcttcatgtcagttcaacataataattaagaggtcgcttgcccctgagacggcttcatggtattttatttgttttttacaaagtattttttaagcgctaaacttacagtgcactttctctattcgttttggtgctgcttataagtcttttgtgttttagatccatcgaagatggcgcttaatctcgagagctagggagatgaaatgccttttgtacatgatggaaggaaacaaattacgtacatgtatatgtggatcgaattgactgttgcattctgcctgtatttaagcaacggtttccacccaaaacgtctataatttggtccttcctagatgtgtcaaatgtgtttactgcactgcgtttgcttttgtggcagcgccctaatagttgtttataaagtctgatgttaacaaactattgtcatgctatgtaatatatagtcttaacatgttggtttgttgagtgttcgaatatcagttttatattattatgtcaggtgttattagtgttcaattttttaagttcttgttgtacatcctatcattacatgagacaatgttgtgatgtttacaatattgtgttatgtatgttatatcattttggtattatagtataatttaatttgtatcagtttagttctgtattggttgttgccaaaaaaaattatgagatattaaggtcgataataatgttcgtttttatataatcgttttgcactaatattttgttaatttttttgtataccgttgcaacgcacgggcacctaactagtatgagactatgagtacatcaagtgcattcccttagaactcttgttgtgtaaaaaaatgtgtaacatgtcttggtacagagattaatttggtttgtgttttttagactgcaattatatctgggttctcagccttgccatggttagtcaagcccctctatgattttatcaggtttcaccaaaatactgaatagccttcctatcatccctttctttctgtatatgatatatgcatttaattgcaatgatgtactgttgctatttccgtacacagttgattcaggtggttgattatatggtggttcagagagctcgaggtgaatcacagagtacatatagatctctccactccagtcactatgttgggaatcctcagcctttggaggaatcatgagtgcatacttcagtggttctccagtcacttatggcgtaagatttgtctttggtgttacagcacttttgccactgttccgagtagcagagaaggacaactctggcaaactgtgaagaaaataaaagattttcacaagcggaatcttcagaatctgaataaaggagttcgtgggaatcagttgtaccaaaaactggttcagttttcgtattccaagcatactactggaagttcacactgatcggcgacaaactctcgcccaaggagaagttgaaggaggatcagcgtgaacacccactgaaagagagatggagttgaatgagaaatctgaaaagaatacgcaagaggtagatgagaagttccaaaacacaaacttgtatctcaagaacttagagatggagcttcgggagttacaagtgcttcataagcaatcagatagatctgaaagttttactgtgccaacacatgcacacactggtggtgcctgcatctagctattcagatcaaagcctgacaggtaccatagggcaaagtgaagaagaaacagaagagttgagcaagatcacgctagagaataaggatattcagcttgatatcaatataagagtgtttgatggagccgaccctatggagctgcatgtttatgattttaaaggacctggtgtaaccttatcaatgtacaatagcgatgaggccttttgctaagtcctccatggatatggctctttcaaaaaagtcgtctcttcatctcagcaccaagaatacaatcatcaagaagtatgacgacaggcatggatcatctatgtttctacaagctcgcggtcacatttattaggccttttgctaagttcatggatatggctctttcaaaaaagtcgtctcttcatctcagcaccaagaatacaatcatcaagaagtatgacgacatgcatggatcatctatgtttctacaagctcgcggtgatcaacttgctattgggaaagaaactgcacgtcgtttgggaatgggtactaatatgtacccttcctctgctttactcagacagaataaggatgagtcaattgcttccttgccaattgatgaattgatcgagaaggctgatggctttgctggtgtctttccagaacacaagtatgagatcgtgaaaggcttgcaagcaagaaaacatatatgtggcatgactggggatggtgtaaatgatgccccagctttgaagaaggctgatattggtattgcagtagcagactctactgatgcaactcgtagtgcttctgacattgtcctaactgaacctggccttagtgtgattattagtgctgtgctgacgagtcgggcaattttccaaaggatgaagaattacacgatctatgctgtatcgattaccatccgtattgtgcttggttttatgcttcttgcgctgatatggaagtttgacttcccaccatttatggtcctgatcattgccatcctcaatgacggtaccattatgactatctcgaaggacagagtaaaaccatctccacaaccagacagttggaagttagctgagatttttgcaactggagtagttcttggtggttatttggccatgatgactgtcattttcttctgggctgcatacaagactgactttttcccgcggctgttccacgtcgaaagcctcgagaagaccgcccaggatgactttcagaagttcgcctctgccgtgtaccttcaagtcagcacggtcagtcaggcccttatcttcgtgacacggtcgcgcagctggtcgtttgtggagcgtcctgggttcttgctggtcttcgctttcttggtggctaagctgattgccactctgatcgctgtatatgccaactgggcgttcactgcgatcaagggcattggatggggctgggccggtgtcatctggctctataacatcgtcttctacttcccgctggacatcatcaagttcctcatccgctatgcgctgagtgggagggcatggaacctcgtccttgagcagaggattgcgttcacgagcaagaagaatttcggcacggaagaaagggagcgcaagtgggcgcatgcgcagaggactctccatgggctccagccgccagaagcatccatcttcgagaacaagacgacattcaatgagctgaaccagctcgcggaagaggcccgcaggagagccgagatggcgaggttgcgagaagtgagcaccctgaaggggaggatggagtcagtggtgaagcagaagggtctggacatctagaccatccagcagtcctacactgtgtgactgactgactgacgacgacggggtttatagaggtttcttcttatactatacaatctgtactaggtagcaataaggatcaaggaaggaacccctatatattggctgcggttcgcaggaaatgaatgatggtaatatttatgatgtcggtgtggtgcttctgtcgccaactctcgaccatactaccctcaactcacccccggcaccaccggcaggcattgatattcagagatgaggtatagtagtctgtagcctctagtagatgctgatgaattgatgatatagtacatttttgcttgctttcttgcttgtttgttgttttccttggttctgctctgggtgttttgatgcttgctggctttgtgctattcctgattcctctaaatctgaagtggtagcagcgatggcataatagctgcacaggcatgtatatgccatgagcatgtgcagtgtttaccgttgcggcatgggca

SEQ ID NO: 198566 - DNA, 5475 bp, Zea Mays
atggcctcacccacggtcgcctccccgatccgggcgagccccgtcgacaaccccaccgtcgcgccctcactggcctcctgccgctgcgccttatcgctagatgctcgacatccccatccgcgcgctcgaggcagaggccagggacaccaagatgagcccgaccgcgaccgcctagccatcagctccaaagaagaagccaggggaccgatggacgtcagtgttccgtcgtggtggcccgctagatccatattcagcaagaaagatatctcgccatgccggcccagggccgcagcccgtcaccttcctccccccgcacccgccgtgacagccgcctccccacgcccgcttacccgactggccgcacaagatgcccacagtggcccccatcgcgcccacccgctccccccatccaccgcgacctcagccgccacgccgacgccatccccgtcctctagcgcgttgtcgccgtcgtcacaccgccaaaggtgcctgccccctgctaccgaggtcgacgaccagcagcggcaagctgccgagctcgacgacacgcacgccatgcttggccatatggacgagtccatcgcctgctacgagaaggggctccagatccagatgtccgcgctcgatgagcgcaatccctgcctccctgagacctgcaggtgattgacaaggtttaggaggaaacttccaaaagccggtcaagtatggagtgcttaacatcactttggcaacttatatttttttacatgtttgctttgtttgttaacaacataatttatgggctgacaatgtgatcatgtattctttctggtagtcttcgtgtcactgcttgcagttgcaggggagggatcatggctttcttttattttccatgtgcaatgtttaatttaggtgatgaactccaaagcttatcccattgttttctagcaagagctaagcaatactggatggagaacatttatctttttaataacgagtaaaagcataatggcatgcttgtgtttagttctctgtttgttgaccaatcgctatatttaatcttgattttttttatctataacttgaatttcaaagattcaatattttttattcagacattttctcttctctagatattcttttatgcaaataacgcggttacactagatcagccaacattctgggaaataagctatatggtcagagtaagaggttcaagagttgatagttcaacaactttaactgagagcaaatctacaagaaaaaggaaacaagcaacctggaacctacaactgcaggagcttgcttgaaagtgaacaatcaaggttgtgtgtatatattatgcccgacatttttgaaggatattgcgagggccattgtatctgctggaaaaatcatttcaacttgtcgaacatggtattaggatacgaattggagtggtcaacagaaattctggacagatatgtcaaatttcagaatccacgatggtcctccaagaaataaagatgctcttgatcatctattgagaagtggaatactaattttttgctgcagcgtgatggataaaggtttttgcgtattcttgggtttttttcctttcctttttggctacacacaactctttttaaatatacattcagtaggtggcaatgcctcctatttccctaaaaatatagcgccaaagagttcaaaattgaattctcataatctgctattaggaaaagaggtcaacttctatattttttacatcaggtaatttggctataatacaacggcatgctgaggtcaacttctgtatttttttctgcaagtaacttggctataatacagcggcatgctccattctgaagctggtcaagaaataaatatagcacttgcaatattttccagtagtcaaacctctccattacttcaattctcgttctcatttttgactatgttcttcatgtcagttcaacataataattaagaggtcgcttgcccctgagacggcttcatgatccatcgaagatggcgcttaatctcgagagctagggagatgaaatgccttttgtacatgatggaaggaaacaaattacgtacatgtatatgtggatcgaattgactgttgcattctgcctgtatttaagcaacggtttccacccaaaacgtctataatttggtccttcctagatgtgtcaaatgtgtttactgcactgcgtttgcttttgtggcagcgccctaatagttgtttataaagtctgatgttaacaaactattgtcatgctatgtaatatatagtcttaacatgttggtttgttgagtgttcgaatatcagttttatattattatgtcaggtgttattagtgttcaattttttaagttcttgttgtacatcctatcattacatgagacaatgttgtgatgtttacaatattgtgttatgtatgttatatcattttggtattatagtataatttaatttgtatcagtttagttctgtattggttgttgccaaaaaaaattatgagatattaaggtcgataataatgttcgtttttatataatcgttttgcactaatattttgttaatttttttgtataccgttgcaacgcacgggcacctaactagtatgagactatgagtacatcaagtgcattcccttagaactcttgttgtgtaaaaaaatgtgtaacatgtcttggtacagagattaatttggtttgtgttttttagactgcaattatatctgggttctcagccttgccatggttagtcaagcccctctatgattttatcagttgattcaggtggttgattatatggtggttcagagagctcgaggtgaatcacagagtacatatagatctctccactccagtcactatgttgggaatcctcagcctttggaggaatcatgagtgcatacttcagtggttctccagtcacttatggcgtaagatttgtctttggtgttacagcacttttgccactgttccgagtagcagagaaggacaactctggcaaactgtgaagaaaataaaagattttcacaagcggaatcttcagaatctgaataaaggagttcgtgggaatcagttgtaccaaaaactggttcagttttcgtattccaagcatactactggaagttcacactgatcggcgacaaactctcgcccaaggagaagttgaaggaggatcagcgtgaacacccactgaaagagagatggagttgaatgagaaatctgaaaagaatacgcaagaggtagatgagaagttccaaaacacaaacttgtatctcaagaacttagagatggagcttcgggagttacaagtgcttcataagcaatcagatagatctgaaagttttactgtgccaacacatgcacacactggtggtgcctgcatctagctattcagatcaaagcctgacaggtaccatagggcaaagtgaagaagaaacagaagagttgagcaagatcacgctagagaataaggatattcagcttgatatcaatataagagtgtttgatggagccgaccctatggagctgcatgtttatgattttaaaggacctggtgtaaccttatcaatgtacaatagcgatgagtttattaggccttttgctaagtcctccatggatatggctctttcaaaaaagtcgtctcttcatctcagcaccaagaatacaatcatcaagaagtatgacgacaggcatggatcatctatgtttctacaagctcgcggtcacatttattaggccttttgctaagttcatggatatggctctttcaaaaaagtcgtctcttcatctcagcaccaagaatacaatcatcaagaagtatgacgacatgcatggatcatctatgtttctacaagctcgcggtgatcaacttgctattgggaaagaaactgcacgtcgtttgggaatgggtactaatatgtacccttcctctgctttactcagacagaataaggatgagtcaattgcttccttgccaattgatgaattgatcgagaaggctgatggctttgctggtgtctttccagaacacaagtatgagatcgtgaaaggcttgcaagcaagaaaacatatatgtggcatgactggggatggtgtaaatgatgccccagctttgaagaaggctgatattggtattgcagtagcagactctactgatgcaactcgtagtgcttctgacattgtcctaactgaacctggccttagtgtgattattagtgctgtgctgacgagtcgggcaattttccaaaggatgaagaattacacgatctatgctgtatcgattaccatccgtattgtgcttggttttatgcttcttgcgctgatatggaagtttgacttcccaccatttatggtcctgatcattgccatcctcaatgacggtaccattatgactatctcgaaggacagagtaaaaccatctccacaaccagacagttggaagttagctgagatttttgcaactggagtagttcttggtggttatttggccatgatgactgtcattttcttctgggctgcatacaagactgactttttcccgcggctgttccacgtcgaaagcctcgagaagaccgcccaggatgactttcagaagttcgcctctgccgtgtaccttcaagtcagcacggtcagtcaggcccttatcttcgtgacacggtcgcgcagctggtcgtttgtggagcgtcctgggttcttgctggtcttcgctttcttggtggctaagctgattgccactctgatcgctgtatatgccaactgggcgttcactgcgatcaagggcattggatggggctgggccggtgtcatctggctctataacatcgtcttctacttcccgctggacatcatcaagttcctcatccgctatgcgctgagtgggagggcatggaacctcgtccttgagcagaggattgcgttcacgagcaagaagaatttcggcacggaagaaagggagcgcaagtgggcgcatgcgcagaggactctccatgggctccagccgccagaagcatccatcttcgagaacaagacgacattcaatgagctgaaccagctcgcggaagaggcccgcaggagagccgagatggcgaggttgcgagaagtgagcaccctgaaggggaggatggagtcagtggtgaagcagaagggtctggacatctagaccatccagcagtcctacactgtgtgactgactgactgacgacgacggggtttatagaggtttcttcttatactatacaatctgtactaggtagcaataaggatcaaggaaggaacccctatatattggctgcggttcgcaggaaatgaatgatggtaatatttatgatgtcggtgtggtgcttctgtcgccaactctcgaccatactaccctcaactcacccccggcaccaccggcaggcattgatattcagagatgagcgatggcataatagctgcacaggcatgtatatgccatgagcatgtgcagtgtttaccgttgcggcatgggca

SEQ ID NO: 198567 - DNA, 6495 bp, Zea Mays
atggcctcacccacggtcgcctccccgatccgggcgagccccgtcgacaaccccaccgtcgcgccctcactggcctcctgccgctgcgccttatcgctagatgctcgacatccccatccgcgcgctcgaggcagaggccagggacaccaagatgagcccgaccgcgaccgcctagccatcagctccaaagaagaagccaggggaccgatggacgtcagtgttccgtcgtggtggcccgctagatccatattcagcaagaaagatatctcgccatgccggcccagggccgcagcccgtcaccttcctccccccgcacccgccgtgacagccgcctccccacgcccgcttacccgactggccgcacaagatgcccacagtggcccccatcgcgcccacccgctccccccatccaccgcgacctcagccgccacgccgacgccatccccgtcctctagcgcgttgtcgccgtcgtcacaccgccaaaggtgcctgccccctgctaccgaggtcgacgaccagcagcggcaagctgccgagctcgacgacacgcacgccatgcttggccatatggacgagtccatcgcctgctacgagaaggggctccagatccagatgtccgcgctcgatgagcgcaatccctgcctccctgagacctgcaggtaggtgacaatgtcatcaagggcccctccccctttgtcgcttctcgatctagatctcgcctctccctaaagcacgggttgcacctccccccgtcacccactccttccttggcttctcccgggaaacgaccttcagtctttacaggtatgaggtcttattgtgtgccatcattttcttttgctattcattcccgaatccccactgtgccctccagtgatgatggggtatgagctctgaataacaaacaaggtaaatgtttactcttttgagtagctgaattttgctatgatgtagtaaattatactagtaaattatacttgtactgaatatgaatataagaaaaaaatactgcactaattatttttctacgctctatattgtaaaataataggaatataataaaaagctgacataaaagctaatttacaacatccctttattttactatgttttatgataaataccttgattttccttgtaagttgtatcttttagtgattttcaaagaaactcctatttgcttggtgctttttctgtaagcatatgttgattaaatctttgtgtattctttctgtacactaatttaacttatcattattctgtcatccagtatgttgtcttatttgaatggttcatttccttctttaggtgattgacaaggtttaggaggaaacttccaaaagccggtcaagtatggagtgcttaacatcactttggcaacttatatttttttacatgtttgctttgtttgttaacaacataatttatgggctgacaatgtgatcatgtattctttctggtagtcttcgtgtcactgcttgcagttgcaggggagggatcatggctttcttttattttccatgtgcaatgtttaatttaggtgatgaactccaaagcttatcccattgttttctagcaagagctaagcaatactggatggagaacatttatctttttaataacgagtaaaagcataatggcatgcttgtgtttagttctctgtttgttgaccaatcgctatatttaatcttgattttttttatctataacttgaatttcaaagattcaatattttttattcagacattttctcttctctagatattcttttatgcaaataacgcggttacactagatcagccaacattctgggaaataagctatatggtcagagtaagaggttcaagagttgatagttcaacaactttaactgagagcaaatctacaagaaaaaggaaacaagcaacctggaacctacaactgcaggagcttgcttgaaagtgaacaatcaaggttgtgtgtatatattatgcccgacatttttgaaggatattgcgagggccattgtatctgctggaaaaatcatttcaacttgtcgaacatggtattaggatacgaattggagtggtcaacagaaattctggacagatatgtcaaatttcagaatccacgatggtcctccaagaaataaagatgctcttgatcatctattgagaagtggaatactaattttttgctgcagcgtgatggataaaggtttttgcgtattcttgggtttttttcctttcctttttggctacacacaactctttttaaatatacattcagtaggtggcaatgcctcctatttccctaaaaatatagcgccaaagagttcaaaattgaattctcataatctgctattaggaaaagaggtcaacttctatattttttacatcaggtaatttggctataatacaacggcatgctgaggtcaacttctgtatttttttctgcaagtaacttggctataatacagcggcatgctccattctgaagctggtcaagaaataaatatagcacttgcaatattttccagtagtcaaacctctccattacttcaattctcgttctcatttttgactatgttcttcatgtcagttcaacataataattaagaggtcgcttgcccctgagacggcttcatgatccatcgaagatggcgcttaatctcgagagctagggagatgaaatgccttttgtacatgatggaaggaaacaaattacgtacatgtatatgtggatcgaattgactgttgcattctgcctgtatttaagcaacggtttccacccaaaacgtctataatttggtccttcctagatgtgtcaaatgtgtttactgcactgcgtttgcttttgtggcagcgccctaatagttgtttataaagtctgatgttaacaaactattgtcatgctatgtaatatatagtcttaacatgttggtttgttgagtgttcgaatatcagttttatattattatgtcaggtgttattagtgttcaattttttaagttcttgttgtacatcctatcattacatgagacaatgttgtgatgtttacaatattgtgttatgtatgttatatcattttggtattatagtataatttaatttgtatcagtttagttctgtattggttgttgccaaaaaaaattatgagatattaaggtcgataataatgttcgtttttatataatcgttttgcactaatattttgttaatttttttgtataccgttgcaacgcacgggcacctaactagtatgagactatgagtacatcaagtgcattcccttagaactcttgttgtgtaaaaaaatgtgtaacatgtcttggtacagagattaatttggtttgtgttttttagactgcaattatatctgggttctcagccttgccatggttagtcaagcccctctatgattttatcagttgattcaggtggttgattatatggtggttcagagagctcgaggtgaatcacagagtacatatagatctctccactccagtcactatgttgggaatcctcagcctttggaggaatcatgagtgcatacttcagtggttctccagtcacttatggcgtaagatttgtctttggtgttacagcacttttgccactgttccgagtagcagagaaggacaactctggcaaactgtgaagaaaataaaagattttcacaagcggaatcttcagaatctgaataaaggagttcgtgggaatcagttgtaccaaaaactggttcagttttcgtattccaagcatactactggaagttcacactgatcggcgacaaactctcgcccaaggagaagttgaaggaggatcagcgtgaacacccactgaaagagagatggagttgaatgagaaatctgaaaagaatacgcaagaggtagatgagaagttccaaaacacaaacttgtatctcaagaacttagagatggagcttcgggagttacaagtgcttcataagcaatcagatagatctgaaagttttactgtgccaacacatgcacacactggtggtgcctgcatctagctattcagatcaaagcctgacaggtaccatagggcaaagtgaagaagaaacagaagagttgagcaagatcacgctagagaataaggatattcagcttgatatcaatataagagtgtttgatggagccgaccctatggagctgcatgtttatgattttaaaggacctggtgtaaccttatcaatgtacaatagcgatgagtttattaggccttttgctaagtcctccatggatatggctctttcaaaaaagtcgtctcttcatctcagcaccaagaatacaatcatcaagaagtatgacgacaggcatggatcatctatgtttctacaagctcgcggtcacatttattaggccttttgctaagttcatggatatggctctttcaaaaaagtcgtctcttcatctcagcaccaagaatacaatcatcaagaagtatgacgacatgcatggatcatctatgtttctacaagctcgcgttacaatggaatgctaagagacaaatagttaaagaactgctttaacctaccttgatggagaggggagaatgcatcgtgttagcaagggagcaccagagcagatccttcatcttgcccacaacaagtcagatattgaaagaagggtcagagctgtgattgacaaatttgctgagcgtggtctgtgagcacttggtgtggcttaccaggtgatcaacttgctattgggaaagaaactgcacgtcgtttgggaatgggtactaatatgtacccttcctctgctttactcagacagaataaggatgagtcaattgcttccttgccaattgatgaattgatcgagaaggctgatggctttgctggtgtctttccagaacacaagtatgagatcgtgaaaggcttgcaagcaagaaaacatatatgtggcatgactggggatggtgtaaatgatgccccagctttgaagaaggctgatattggtattgcagtagcagactctactgatgcaactcgtagtgcttctgacattgtcctaactgaacctggccttagtgtgattattagtgctgtgctgacgagtcgggcaattttccaaaggatgaagaattacacgatctatgctgtatcgattaccatccgtattgtgcttggttttatgcttcttgcgctgatatggaagtttgacttcccaccatttatggtcctgatcattgccatcctcaatgacggtaccattatgactatctcgaaggacagagtaaaaccatctccacaaccagacagttggaagttagctgagatttttgcaactggagtagttcttggtggttatttggccatgatgactgtcattttcttctgggctgcatacaagactgactttttcccgcggctgttccacgtcgaaagcctcgagaagaccgcccaggatgactttcagaagttcgcctctgccgtgtaccttcaagtcagcacggtcagtcaggcccttatcttcgtgacacggtcgcgcagctggtcgtttgtggagcgtcctgggttcttgctggtcttcgctttcttggtggctaagctgattgccactctgatcgctgtatatgccaactgggcgttcactgcgatcaagggcattggatggggctgggccggtgtcatctggctctataacatcgtcttctacttcccgctggacatcatcaagttcctcatccgctatgcgctgagtgggagggcatggaacctcgtccttgagcagaggattgcgttcacgagcaagaagaatttcggcacggaagaaagggagcgcaagtgggcgcatgcgcagaggactctccatgggctccagccgccagaagcatccatcttcgagaacaagacgacattcaatgagctgaaccagctcgcggaagaggcccgcaggagagccgagatggcgaggttgcgagaagtgagcaccctgaaggggaggatggagtcagtggtgaagcagaagggtctggacatctagaccatccagcagtcctacactgtgtgactgactgactgacgacgacggggtttatagaggtttcttcttatactatacaatctgtactaggtagcaataaggatcaaggaaggaacccctatatattggctgcggttcgcaggaaatgaatgatggtaatatttatgatgtcggtgtggtgcttctgtcgccaactctcgaccatactaccctcaactcacccccggcaccaccggcaggcattgatattcagagatgaggtatagtagtctgtagcctctagtagatgctgatgaattgatgatatagtacatttttgcttgctttcttgcttgtttgttgttttccttggttctgctctgggtgttttgatgcttgctggctttgtgctattcctgattcctctaaatctgaagtggtagcagcgatggcataatagctgcacaggcatgtatatgccatgagcatgtgcagtgtttaccgttgcggcatgggca

SEQ ID NO: 198568 - DNA, 6162 bp, Zea Mays
atggcctcacccacggtcgcctccccgatccgggcgagccccgtcgacaaccccaccgtcgcgccctcactggcctcctgccgctgcgccttatcgctagatgctcgacatccccatccgcgcgctcgaggcagaggccagggacaccaagatgagcccgaccgcgaccgcctagccatcagctccaaagaagaagccaggggaccgatggacgtcagtgttccgtcgtggtggcccgctagatccatattcagcaagaaagatatctcgccatgccggcccagggccgcagcccgtcaccttcctccccccgcacccgccgtgacagccgcctccccacgcccgcttacccgactggccgcacaagatgcccacagtggcccccatcgcgcccacccgctccccccatccaccgcgacctcagccgccacgccgacgccatccccgtcctctagcgcgttgtcgccgtcgtcacaccgccaaaggtgcctgccccctgctaccgaggtcgacgaccagcagcggcaagctgccgagctcgacgacacgcacgccatgcttggccatatggacgagtccatcgcctgctacgagaaggggctccagatccagatgtccgcgctcgatgagcgcaatccctgcctccctgagacctgcaggtaggtgacaatgtcatcaagggcccctccccctttgtcgcttctcgatctagatctcgcctctccctaaagcacgggttgcacctccccccgtcacccactccttccttggcttctcccgggaaacgaccttcagtctttacaggtatgaggtcttattgtgtgccatcattttcttttgctattcattcccgaatccccactgtgccctccagtgatgatggggtatgagctctgaataacaaacaaggtaaatgtttactcttttgagtagctgaattttgctatgatgtagtaaattatactagtaaattatacttgtactgaatatgaatataagaaaaaaatactgcactaattatttttctacgctctatattgtaaaataataggaatataataaaaagctgacataaaagctaatttacaacatccctttattttactatgttttatgataaataccttgattttccttgtaagttgtatcttttagtgattttcaaagaaactcctatttgcttggtgctttttctgtaagcatatgttgattaaatctttgtgtattctttctgtacactaatttaacttatcattattctgtcatccagtatgttgtcttatttgaatggttcatttccttctttaggtgattgacaaggtttaggaggaaacttccaaaagccggtcaagtatggagtgcttaacatcactttggcaacttatatttttttacatgtttgctttgtttgttaacaacataatttatgggctgacaatgtgatcatgtattctttctggtagtcttcgtgtcactgcttgcagttgcaggggagggatcatggctttcttttattttccatgtgcaatgtttaatttaggtgatgaactccaaagcttatcccattgttttctagcaagagctaagcaatactggatggagaacatttatctttttaataacgagtaaaagcataatggcatgcttgtgtttagttctctgtttgttgaccaatcgctatatttaatcttgattttttttatctataacttgaatttcaaagattcaatattttttattcagacattttctcttctctagatattcttttatgcaaataacgcggttacactagatcagccaacattctgggaaataagctatatggtcagagtaagaggttcaagagttgatagttcaacaactttaactgagagcaaatctacaagaaaaaggaaacaagcaacctggaacctacaactgcaggagcttgcttgaaagtgaacaatcaaggttgtgtgtatatattatgcccgacatttttgaaggatattgcgagggccattgtatctgctggaaaaatcatttcaacttgtcgaacatggtattaggatacgaattggagtggtcaacagaaattctggacagatatgtcaaatttcagaatccacgatggtcctccaagaaataaagatgctcttgatcatctattgagaagtggaatactaattttttgctgcagcgtgatggataaaggtttttgcgtattcttgggtttttttcctttcctttttggctacacacaactctttttaaatatacattcagtaggtggcaatgcctcctatttccctaaaaatatagcgccaaagagttcaaaattgaattctcataatctgctattaggaaaagaggtcaacttctatattttttacatcaggtaatttggctataatacaacggcatgctgaggtcaacttctgtatttttttctgcaagtaacttggctataatacagcggcatgctccattctgaagctggtcaagaaataaatatagcacttgcaatattttccagtagtcaaacctctccattacttcaattctcgttctcatttttgactatgttcttcatgtcagttcaacataataattaagaggtcgcttgcccctgagacggcttcatgatccatcgaagatggcgcttaatctcgagagctagggagatgaaatgccttttgtacatgatggaaggaaacaaattacgtacatgtatatgtggatcgaattgactgttgcattctgcctgtatttaagcaacggtttccacccaaaacgtctataatttggtccttcctagatgtgtcaaatgtgtttactgcactgcgtttgcttttgtggcagcgccctaatagttgtttataaagtctgatgttaacaaactattgtcatgctatgtaatatatagtcttaacatgttggtttgttgagtgttcgaatatcagttttatattattatgtcaggtgttattagtgttcaattttttaagttcttgttgtacatcctatcattacatgagacaatgttgtgatgtttacaatattgtgttatgtatgttatatcattttggtattatagtataatttaatttgtatcagtttagttctgtattggttgttgccaaaaaaaattatgagatattaaggtcgataataatgttcgtttttatataatcgttttgcactaatattttgttaatttttttgtataccgttgcaacgcacgggcacctaactagtatgagactatgagtacatcaagtgcattcccttagaactcttgttgtgtaaaaaaatgtgtaacatgtcttggtacagagattaatttggtttgtgttttttagactgcaattatatctgggttctcagccttgccatggttagtcaagcccctctatgattttatcagttgattcaggtggttgattatatggtggttcagagagctcgaggtgaatcacagagtacatatagatctctccactccagtcactatgttgggaatcctcagcctttggaggaatcatgagtgcatacttcagtggttctccagtcacttatggcgtaagatttgtctttggtgttacagcacttttgccactgttccgagtagcagagaaggacaactctggcaaactgtgaagaaaataaaagattttcacaagcggaatcttcagaatctgaataaaggagttcgtgggaatcagttgtaccaaaaactggttcagttttcgtattccaagcatactactggaagttcacactgatcggcgacaaactctcgcccaaggagaagttgaaggaggatcagcgtgaacacccactgaaagagagatggagttgaatgagaaatctgaaaagaatacgcaagaggtagatgagaagttccaaaacacaaacttgtatctcaagaacttagagatggagcttcgggagttacaagtgcttcataagcaatcagatagatctgaaagttttactgtgccaacacatgcacacactggtggtgcctgcatctagctattcagatcaaagcctgacaggtaccatagggcaaagtgaagaagaaacagaagagttgagcaagatcacgctagagaataaggatattcagcttgatatcaatataagagaagaatcttggagctcttcacaacaagtgaacttttacacagaaagtaccagctccagtgaggcttgtttgatggagccgaccctatggagctgcatgtttatgattttaaaggacctggtgtaaccttatcaatgtacaatagcgatgagtttattaggccttttgctaagtcctccatggatatggctctttcaaaaaagtcgtctcttcatctcagcaccaagaatacaatcatcaagaagtatgacgacaggcatggatcatctatgtttctacaagctcgcggtcacatttattaggccttttgctaagttcatggatatggctctttcaaaaaagtcgtctcttcatctcagcaccaagaatacaatcatcaagaagtatgacgacatgcatggatcatctatgtttctacaagctcgcgttacaatggaatgctaagagacaaatagttaaagaactgctttaacctaccttgatggagaggggagaatgcatcgtgttagcaagggagcaccagagcaggtgatcaacttgctattgggaaagaaactgcacgtcgtttgggaatgggtactaatatgtacccttcctctgctttactcagacagaataaggatgagtcaattgcttccttgccaattgatgaattgatcgagaaggctgatggctttgctggtgtctttccagaacacaagtatgagatcgtgaaaggcttgcaagcaagaaaacatatatgtggcatgactggggatggtgtaaatgatgccccagctttgaagaaggctgatattggtattgcagtagcagactctactgatgcaactcgtagtgcttctgacattgtcctaactgaacctggccttagtgtgattattagtgctgtgctgacgagtcgggcaattttccaaaggatgaagaattacacgatctatgctgtatcgattaccatccgtattgtgcttggttttatgcttcttgcgctgatatggaagtttgacttcccaccatttatggtcctgatcattgccatcctcaatgacggtaccattatgactatctcgaaggacagagtaaaaccatctccacaaccagacagttggaagttagctgagatttttgcaactggagtagttcttggtggttatttggccatgatgactgtcattttcttctgggctgcatacaagactgactttttcccgcggctgttccacgtcgaaagcctcgagaagaccgcccaggatgactttcagaagttcgcctctgccgtgtaccttcaagtcagcacggtcagtcaggcccttatcttcgtgacacggtcgcgcagctggtcgtttgtggagcgtcctgggttcttgctggtcttcgctttcttggtggctaagctgattgccactctgatcgctgtatatgccaactgggcgttcactgcgatcaagggcattggatggggctgggccggtgtcatctggctctataacatcgtcttctacttcccgctggacatcatcaagttcctcatccgctatgcgctgagtgggagggcatggaacctcgtccttgagcagaggattgcgttcacgagcaagaagaatttcggcacggaagaaagggagcgcaagtgggcgcatgcgcagaggactctccatgggctccagccgccagaagcatccatcttcgagaacaagacgacattcaatgagctgaaccagctcgcggaagaggcccgcaggagagccgagatggcgaggttgcgagaagtgagcaccctgaaggggaggatggagtcagtggtgaagcagaagggtctggacatctagaccatccagcagtcctacactgtgtgactgactgactgacgacgacggggtttatagaggaaatgaatgatggtaatatttatgatgtcggtgtggtgcttctgtcgccaactctcgaccatactaccctcaactcacccccggcaccaccggcaggcattgatattcagagatgaggtttgttttttatttttgccgagtctt

SEQ ID NO: 198569 - DNA, 6569 bp, Zea Mays
atggcctcacccacggtcgcctccccgatccgggcgagccccgtcgacaaccccaccgtcgcgccctcactggcctcctgccgctgcgccttatcgctagatgctcgacatccccatccgcgcgctcgaggcagaggccagggacaccaagatgagcccgaccgcgaccgcctagccatcagctccaaagaagaagccaggggaccgatggacgtcagtgttccgtcgtggtggcccgctagatccatattcagcaagaaagatatctcgccatgccggcccagggccgcagcccgtcaccttcctccccccgcacccgccgtgacagccgcctccccacgcccgcttacccgactggccgcacaagatgcccacagtggcccccatcgcgcccacccgctccccccatccaccgcgacctcagccgccacgccgacgccatccccgtcctctagcgcgttgtcgccgtcgtcacaccgccaaaggtgcctgccccctgctaccgaggtcgacgaccagcagcggcaagctgccgagctcgacgacacgcacgccatgcttggccatatggacgagtccatcgcctgctacgagaaggggctccagatccagatgtccgcgctcgatgagcgcaatccctgcctccctgagacctgcaggtaggtgacaatgtcatcaagggcccctccccctttgtcgcttctcgatctagatctcgcctctccctaaagcacgggttgcacctccccccgtcacccactccttccttggcttctcccgggaaacgaccttcagtctttacaggtatgaggtcttattgtgtgccatcattttcttttgctattcattcccgaatccccactgtgccctccagtgatgatggggtatgagctctgaataacaaacaaggtaaatgtttactcttttgagtagctgaattttgctatgatgtagtaaattatactagtaaattatacttgtactgaatatgaatataagaaaaaaatactgcactaattatttttctacgctctatattgtaaaataataggaatataataaaaagctgacataaaagctaatttacaacatccctttattttactatgttttatgataaataccttgattttccttgtaagttgtatcttttagtgattttcaaagaaactcctatttgcttggtgctttttctgtaagcatatgttgattaaatctttgtgtattctttctgtacactaatttaacttatcattattctgtcatccagtatgttgtcttatttgaatggttcatttccttctttaggtgattgacaaggtttaggaggaaacttccaaaagccggtcaagtatggagtgcttaacatcactttggcaacttatatttttttacatgtttgctttgtttgttaacaacataatttatgggctgacaatgtgatcatgtattctttctggtagtcttcgtgtcactgcttgcagttgcaggggagggatcatggctttcttttattttccatgtgcaatgtttaatttaggtgatgaactccaaagcttatcccattgttttctagcaagagctaagcaatactggatggagaacatttatctttttaataacgagtaaaagcataatggcatgcttgtgtttagttctctgtttgttgaccaatcgctatatttaatcttgattttttttatctataacttgaatttcaaagattcaatattttttattcagacattttctcttctctagatattcttttatgcaaataacgcggttacactagatcagccaacattctgggaaataagctatatggtcagagtaagaggttcaagagttgatagttcaacaactttaactgagagcaaatctacaagaaaaaggaaacaagcaacctggaacctacaactgcaggagcttgcttgaaagtgaacaatcaaggttgtgtgtatatattatgcccgacatttttgaaggatattgcgagggccattgtatctgctggaaaaatcatttcaacttgtcgaacatggtattaggatacgaattggagtggtcaacagaaattctggacagatatgtcaaatttcagaatccacgatggtcctccaagaaataaagatgctcttgatcatctattgagaagtggaatactaattttttgctgcagcgtgatggataaaggtttttgcgtattcttgggtttttttcctttcctttttggctacacacaactctttttaaatatacattcagtaggtggcaatgcctcctatttccctaaaaatatagcgccaaagagttcaaaattgaattctcataatctgctattaggaaaagaggtcaacttctatattttttacatcaggtaatttggctataatacaacggcatgctgaggtcaacttctgtatttttttctgcaagtaacttggctataatacagcggcatgctccattctgaagctggtcaagaaataaatatagcacttgcaatattttccagtagtcaaacctctccattacttcaattctcgttctcatttttgactatgttcttcatgtcagttcaacataataattaagaggtcgcttgcccctgagacggcttcatggtattttatttgttttttacaaagtattttttaagcgctaaacttacagtgcactttctctattcgttttggtgctgcttataagtcttttgtgttttagatccatcgaagatggcgcttaatctcgagagctagggagatgaaatgccttttgtacatgatggaaggaaacaaattacgtacatgtatatgtggatcgaattgactgttgcattctgcctgtatttaagcaacggtttccacccaaaacgtctataatttggtccttcctagatgtgtcaaatgtgtttactgcactgcgtttgcttttgtggcagcgccctaatagttgtttataaagtctgatgttaacaaactattgtcatgctatgtaatatatagtcttaacatgttggtttgttgagtgttcgaatatcagttttatattattatgtcaggtgttattagtgttcaattttttaagttcttgttgtacatcctatcattacatgagacaatgttgtgatgtttacaatattgtgttatgtatgttatatcattttggtattatagtataatttaatttgtatcagtttagttctgtattggttgttgccaaaaaaaattatgagatattaaggtcgataataatgttcgtttttatataatcgttttgcactaatattttgttaatttttttgtataccgttgcaacgcacgggcacctaactagtatgagactatgagtacatcaagtgcattcccttagaactcttgttgtgtaaaaaaatgtgtaacatgtcttggtacagagattaatttggtttgtgttttttagactgcaattatatctgggttctcagccttgccatggttagtcaagcccctctatgattttatcagttgattcaggtggttgattatatggtggttcagagagctcgaggtgaatcacagagtacatatagatctctccactccagtcactatgttgggaatcctcagcctttggaggaatcatgagtgcatacttcagtggttctccagtcacttatggcgtaagatttgtctttggtgttacagcacttttgccactgttccgagtagcagagaaggacaactctggcaaactgtgaagaaaataaaagattttcacaagcggaatcttcagaatctgaataaaggagttcgtgggaatcagttgtaccaaaaactggttcagttttcgtattccaagcatactactggaagttcacactgatcggcgacaaactctcgcccaaggagaagttgaaggaggatcagcgtgaacacccactgaaagagagatggagttgaatgagaaatctgaaaagaatacgcaagaggtagatgagaagttccaaaacacaaacttgtatctcaagaacttagagatggagcttcgggagttacaagtgcttcataagcaatcagatagatctgaaagttttactgtgccaacacatgcacacactggtggtgcctgcatctagctattcagatcaaagcctgacaggtaccatagggcaaagtgaagaagaaacagaagagttgagcaagatcacgctagagaataaggatattcagcttgatatcaatataagagtgtttgatggagccgaccctatggagctgcatgtttatgattttaaaggacctggtgtaaccttatcaatgtacaatagcgatgaggccttttgctaagtcctccatggatatggctctttcaaaaaagtcgtctcttcatctcagcaccaagaatacaatcatcaagaagtatgacgacaggcatggatcatctatgtttctacaagctcgcggtcacatttattaggccttttgctaagttcatggatatggctctttcaaaaaagtcgtctcttcatctcagcaccaagaatacaatcatcaagaagtatgacgacatgcatggatcatctatgtttctacaagctcgcgttacaatggaatgctaagagacaaatagttaaagaactgctttaacctaccttgatggagaggggagaatgcatcgtgttagcaagggagcaccagagcagatccttcatcttgcccacaacaagtcagatattgaaagaagggtcagagctgtgattgacaaatttgctgagcgtggtctgtgagcacttggtgtggcttaccaggtgatcaacttgctattgggaaagaaactgcacgtcgtttgggaatgggtactaatatgtacccttcctctgctttactcagacagaataaggatgagtcaattgcttccttgccaattgatgaattgatcgagaaggctgatggctttgctggtgtctttccagaacacaagtatgagatcgtgaaaggcttgcaagcaagaaaacatatatgtggcatgactggggatggtgtaaatgatgccccagctttgaagaaggctgatattggtattgcagtagcagactctactgatgcaactcgtagtgcttctgacattgtcctaactgaacctggccttagtgtgattattagtgctgtgctgacgagtcgggcaattttccaaaggatgaagaattacacgatctatgctgtatcgattaccatccgtattgtgcttggttttatgcttcttgcgctgatatggaagtttgacttcccaccatttatggtcctgatcattgccatcctcaatgacggtaccattatgactatctcgaaggacagagtaaaaccatctccacaaccagacagttggaagttagctgagatttttgcaactggagtagttcttggtggttatttggccatgatgactgtcattttcttctgggctgcatacaagactgactttttcccgcggctgttccacgtcgaaagcctcgagaagaccgcccaggatgactttcagaagttcgcctctgccgtgtaccttcaagtcagcacggtcagtcaggcccttatcttcgtgacacggtcgcgcagctggtcgtttgtggagcgtcctgggttcttgctggtcttcgctttcttggtggctaagctgattgccactctgatcgctgtatatgccaactgggcgttcactgcgatcaagggcattggatggggctgggccggtgtcatctggctctataacatcgtcttctacttcccgctggacatcatcaagttcctcatccgctatgcgctgagtgggagggcatggaacctcgtccttgagcagaggattgcgttcacgagcaagaagaatttcggcacggaagaaagggagcgcaagtgggcgcatgcgcagaggactctccatgggctccagccgccagaagcatccatcttcgagaacaagacgacattcaatgagctgaaccagctcgcggaagaggcccgcaggagagccgagatggcgaggttgcgagaagtgagcaccctgaaggggaggatggagtcagtggtgaagcagaagggtctggacatctagaccatccagcagtcctacactgtgtgactgactgactgacgacgacggggtttatagaggtttcttcttatactatacaatctgtactaggtagcaataaggatcaaggaaggaacccctatatattggctgcggttcgcaggaaatgaatgatggtaatatttatgatgtcggtgtggtgcttctgtcgccaactctcgaccatactaccctcaactcacccccggcaccaccggcaggcattgatattcagagatgagatcacaatgagtcgacgaagtctgccaatgcaattggtgctggattcatcttcagatgatgacgacgacgaattctttctctctagtactcatatgaccatgaatgcggatgagtcagataacgaaacaaaacaacgtggttctataaaggggcaccgagtacttcaatgagataggcaagcgggatatcagaggttgtatcaagattatttttcagac

SEQ ID NO: 198570 - DNA, 6303 bp, Zea Mays
atggcctcacccacggtcgcctccccgatccgggcgagccccgtcgacaaccccaccgtcgcgccctcactggcctcctgccgctgcgccttatcgctagatgctcgacatccccatccgcgcgctcgaggcagaggccagggacaccaagatgagcccgaccgcgaccgcctagccatcagctccaaagaagaagccaggggaccgatggacgtcagtgttccgtcgtggtggcccgctagatccatattcagcaagaaagatatctcgccatgccggcccagggccgcagcccgtcaccttcctccccccgcacccgccgtgacagccgcctccccacgcccgcttacccgactggccgcacaagatgcccacagtggcccccatcgcgcccacccgctccccccatccaccgcgacctcagccgccacgccgacgccatccccgtcctctagcgcgttgtcgccgtcgtcacaccgccaaaggtgcctgccccctgctaccgaggtcgacgaccagcagcggcaagctgccgagctcgacgacacgcacgccatgcttggccatatggacgagtccatcgcctgctacgagaaggggctccagatccagatgtccgcgctcgatgagcgcaatccctgcctccctgagacctgcaggtaggtgacaatgtcatcaagggcccctccccctttgtcgcttctcgatctagatctcgcctctccctaaagcacgggttgcacctccccccgtcacccactccttccttggcttctcccgggaaacgaccttcagtctttacaggtatgaggtcttattgtgtgccatcattttcttttgctattcattcccgaatccccactgtgccctccagtgatgatggggtatgagctctgaataacaaacaaggtgattgacaaggtttaggaggaaacttccaaaagccggtcaagtatggagtgcttaacatcactttggcaacttatatttttttacatgtttgctttgtttgttaacaacataatttatgggctgacaatgtgatcatgtattctttctggtagtcttcgtgtcactgcttgcagttgcaggggagggatcatggctttcttttattttccatgtgcaatgtttaatttaggtgatgaactccaaagcttatcccattgttttctagcaagagctaagcaatactggatggagaacatttatctttttaataacgagtaaaagcataatggcatgcttgtgtttagttctctgtttgttgaccaatcgctatatttaatcttgattttttttatctataacttgaatttcaaagattcaatattttttattcagacattttctcttctctagatattcttttatgcaaataacgcggttacactagatcagccaacattctgggaaataagctatatggtcagagtaagaggttcaagagttgatagttcaacaactttaactgagagcaaatctacaagaaaaaggaaacaagcaacctggaacctacaactgcaggagcttgcttgaaagtgaacaatcaaggttgtgtgtatatattatgcccgacatttttgaaggatattgcgagggccattgtatctgctggaaaaatcatttcaacttgtcgaacatggtattaggatacgaattggagtggtcaacagaaattctggacagatatgtcaaatttcagaatccacgatggtcctccaagaaataaagatgctcttgatcatctattgagaagtggaatactaattttttgctgcagcgtgatggataaaggtttttgcgtattcttgggtttttttcctttcctttttggctacacacaactctttttaaatatacattcagtaggtggcaatgcctcctatttccctaaaaatatagcgccaaagagttcaaaattgaattctcataatctgctattaggaaaagaggtcaacttctatattttttacatcaggtaatttggctataatacaacggcatgctgaggtcaacttctgtatttttttctgcaagtaacttggctataatacagcggcatgctccattctgaagctggtcaagaaataaatatagcacttgcaatattttccagtagtcaaacctctccattacttcaattctcgttctcatttttgactatgttcttcatgtcagttcaacataataattaagaggtcgcttgcccctgagacggcttcatggtattttatttgttttttacaaagtattttttaagcgctaaacttacagtgcactttctctattcgttttggtgctgcttataagtcttttgtgttttagatccatcgaagatggcgcttaatctcgagagctagggagatgaaatgccttttgtacatgatggaaggaaacaaattacgtacatgtatatgtggatcgaattgactgttgcattctgcctgtatttaagcaacggtttccacccaaaacgtctataatttggtccttcctagatgtgtcaaatgtgtttactgcactgcgtttgcttttgtggcagcgccctaatagttgtttataaagtctgatgttaacaaactattgtcatgctatgtaatatatagtcttaacatgttggtttgttgagtgttcgaatatcagttttatattattatgtcaggtgttattagtgttcaattttttaagttcttgttgtacatcctatcattacatgagacaatgttgtgatgtttacaatattgtgttatgtatgttatatcattttggtattatagtataatttaatttgtatcagtttagttctgtattggttgttgccaaaaaaaattatgagatattaaggtcgataataatgttcgtttttatataatcgttttgcactaatattttgttaatttttttgtataccgttgcaacgcacgggcacctaactagtatgagactatgagtacatcaagtgcattcccttagaactcttgttgtgtaaaaaaatgtgtaacatgtcttggtacagagattaatttggtttgtgttttttagactgcaattatatctgggttctcagccttgccatggttagtcaagcccctctatgattttatcaggtttcaccaaaatactgaatagccttcctatcatccctttctttctgtatatgatatatgcatttaattgcaatgatgtactgttgctatttccgtacacagttgattcaggtggttgattatatggtggttcagagagctcgaggtgaatcacagagtacatatagatctctccactccagtcactatgttgggaatcctcagcctttggaggaatcatgagtgcatacttcagtggttctccagtcacttatggcgtaagatttgtctttggtgttacagcacttttgccactgttccgagtagcagagaaggacaactctggcaaactgtgaagaaaataaaagattttcacaagcggaatcttcagaatctgaataaaggagttcgtgggaatcagttgtaccaaaaactggttcagttttcgtattccaagcatactactggaagttcacactgatcggcgacaaactctcgcccaaggagaagttgaaggaggatcagcgtgaacacccactgaaagagagatggagttgaatgagaaatctgaaaagaatacgcaagaggtagatgagaagttccaaaacacaaacttgtatctcaagaacttagagatggagcttcgggagttacaagtgcttcataagcaatcagatagatctgaaagttttactgtgccaacacatgcacacactggtggtgcctgcatctagctattcagatcaaagcctgacaggtaccatagggcaaagtgaagaagaaacagaagagttgagcaagatcacgctagagaataaggatattcagcttgatatcaatataagagaagaatcttggagctcttcacaacaagtgaacttttacacagaaagtaccagctccagtgaggcttgtttgatggagccgaccctatggagctgcatgtttatgattttaaaggacctggtgtaaccttatcaatgtacaatagcgatgagtttattaggccttttgctaagtcctccatggatatggctctttcaaaaaagtcgtctcttcatctcagcaccaagaatacaatcatcaagaagtatgacgacaggcatggatcatctatgtttctacaagctcgcggtcacatttattaggccttttgctaagttcatggatatggctctttcaaaaaagtcgtctcttcatctcagcaccaagaatacaatcatcaagaagtatgacgacatgcatggatcatctatgtttctacaagctcgcgttacaatggaatgctaagagacaaatagttaaagaactgctttaacctaccttgatggagaggggagaatgcatcgtgttagcaagggagcaccagagcaggtgatcaacttgctattgggaaagaaactgcacgtcgtttgggaatgggtactaatatgtacccttcctctgctttactcagacagaataaggatgagtcaattgcttccttgccaattgatgaattgatcgagaaggctgatggctttgctggtgtctttccagaacacaagtatgagatcgtgaaaggcttgcaagcaagaaaacatatatgtggcatgactggggatggtgtaaatgatgccccagctttgaagaaggctgatattggtattgcagtagcagactctactgatgcaactcgtagtgcttctgacattgtcctaactgaacctggccttagtgtgattattagtgctgtgctgacgagtcgggcaattttccaaaggatgaagaattacacgatctatgctgtatcgattaccatccgtattgtgcttggttttatgcttcttgcgctgatatggaagtttgacttcccaccatttatggtcctgatcattgccatcctcaatgacggtaccattatgactatctcgaaggacagagtaaaaccatctccacaaccagacagttggaagttagctgagatttttgcaactggagtagttcttggtggttatttggccatgatgactgtcattttcttctgggctgcatacaagactgactttttcccgcggctgttccacgtcgaaagcctcgagaagaccgcccaggatgactttcagaagttcgcctctgccgtgtaccttcaagtcagcacggtcagtcaggcccttatcttcgtgacacggtcgcgcagctggtcgtttgtggagcgtcctgggttcttgctggtcttcgctttcttggtggctaagctgattgccactctgatcgctgtatatgccaactgggcgttcactgcgatcaagggcattggatggggctgggccggtgtcatctggctctataacatcgtcttctacttcccgctggacatcatcaagttcctcatccgctatgcgctgagtgggagggcatggaacctcgtccttgagcagaggattgcgttcacgagcaagaagaatttcggcacggaagaaagggagcgcaagtgggcgcatgcgcagaggactctccatgggctccagccgccagaagcatccatcttcgagaacaagacgacattcaatgagctgaaccagctcgcggaagaggcccgcaggagagccgagatggcgaggttgcgagaagtgagcaccctgaaggggaggatggagtcagtggtgaagcagaagggtctggacatctagaccatccagcagtcctacactgtgtgactgactgactgacgacgacggggtttatagaggaaatgaatgatggtaatatttatgatgtcggtgtggtgcttctgtcgccaactctcgaccatactaccctcaactcacccccggcaccaccggcaggcattgatattcagagatgaggttttgaatgagacgttcattatttgtacgtatttggaaagtcgtagaacaacatgatcaatactttgttcagaaaaggaacgcagctggcactctagccctttctagtctgcaaaaaattactgcagcatttcgaatgttatcttatggggtagttgctgatgctactattgattcacccctagaagtattcacaaacatgaaatgcagttctcttcttcaagtttgatgatgaagatgtttagtactacatcctgatgaagatgttctgcatgcacatgtactatattggtcccctttcagatagcatcataaaccaggaaacaaaataaagtagtacatatgtagtgaaaggaatcaataac

SEQ ID NO: 198571 - DNA, 5988 bp, Zea Mays
atggcctcacccacggtcgcctccccgatccgggcgagccccgtcgacaaccccaccgtcgcgccctcactggcctcctgccgctgcgccttatcgctagatgctcgacatccccatccgcgcgctcgaggcagaggccagggacaccaagatgagcccgaccgcgaccgcctagccatcagctccaaagaagaagccaggggaccgatggacgtcagtgttccgtcgtggtggcccgctagatccatattcagcaagaaagatatctcgccatgccggcccagggccgcagcccgtcaccttcctccccccgcacccgccgtgacagccgcctccccacgcccgcttacccgactggccgcacaagatgcccacagtggcccccatcgcgcccacccgctccccccatccaccgcgacctcagccgccacgccgacgccatccccgtcctctagcgcgttgtcgccgtcgtcacaccgccaaaggtgcctgccccctgctaccgaggtcgacgaccagcagcggcaagctgccgagctcgacgacacgcacgccatgcttggccatatggacgagtccatcgcctgctacgagaaggggctccagatccagatgtccgcgctcgatgagcgcaatccctgcctccctgagacctgcaggtaggtgacaatgtcatcaagggcccctccccctttgtcgcttctcgatctagatctcgcctctccctaaagcacgggttgcacctccccccgtcacccactccttccttggcttctcccgggaaacgaccttcagtctttacaggtatgaggtcttattgtgtgccatcattttcttttgctattcattcccgaatccccactgtgccctccagtgatgatggggtatgagctctgaataacaaacaaggtaaatgtttactcttttgagtagctgaattttgctatgatgtagtaaattatactagtaaattatacttgtactgaatatgaatataagaaaaaaatactgcactaattatttttctacgctctatattgtaaaataataggaatataataaaaagctgacataaaagctaatttacaacatccctttattttactatgttttatgataaataccttgattttccttgtaagttgtatcttttagtgattttcaaagaaactcctatttgcttggtgctttttctgtaagcatatgttgattaaatctttgtgtattctttctgtacactaatttaacttatcattattctgtcatccagtatgttgtcttatttgaatggttcatttccttctttaggtgattgacaaggtttaggaggaaacttccaaaagccggtcaagtatggagtgcttaacatcactttggcaacttatatttttttacatgtttgctttgtttgttaacaacataatttatgggctgacaatgtgatcatgtattctttctggtagtcttcgtgtcactgcttgcagttgcaggggagggatcatggctttcttttattttccatgtgcaatgtttaatttaggtgatgaactccaaagcttatcccattgttttctagcaagagctaagcaatactggatggagaacatttatctttttaataacgagtaaaagcataatggcatgcttgtgtttagttctctgtttgttgaccaatcgctatatttaatcttgattttttttatctataacttgaatttcaaagattcaatattttttattcagacattttctcttctctagatattcttttatgcaaataacgcggttacactagatcagccaacattctgggaaataagctatatggtcagagtaagaggttcaagagttgatagttcaacaactttaactgagagcaaatctacaagaaaaaggaaacaagcaacctggaacctacaactgcaggagcttgcttgaaagtgaacaatcaaggttgtgtgtatatattatgcccgacatttttgaaggatattgcgagggccattgtatctgctggaaaaatcatttcaacttgtcgaacatggtattaggatacgaattggagtggtcaacagaaattctggacagatatgtcaaatttcagaatccacgatggtcctccaagaaataaagatgctcttgatcatctattgagaagtggaatactaattttttgctgcagcgtgatggataaaggtttttgcgtattcttgggtttttttcctttcctttttggctacacacaactctttttaaatatacattcagtaggtggcaatgcctcctatttccctaaaaatatagcgccaaagagttcaaaattgaattctcataatctgctattaggaaaagaggtcaacttctatattttttacatcaggtaatttggctataatacaacggcatgctgaggtcaacttctgtatttttttctgcaagtaacttggctataatacagcggcatgctccattctgaagctggtcaagaaataaatatagcacttgcaatattttccagtagtcaaacctctccattacttcaattctcgttctcatttttgactatgttcttcatgtcagttcaacataataattaagaggtcgcttgcccctgagacggcttcatgatccatcgaagatggcgcttaatctcgagagctagggagatgaaatgccttttgtacatgatggaaggaaacaaattacgtacatactgcaattatatctgggttctcagccttgccatggttagtcaagcccctctatgattttatcaggtttcaccaaaatactgaatagccttcctatcatccctttctttctgtatatgatatatgcatttaattgcaatgatgtactgttgctatttccgtacacagttgattcaggtggttgattatatggtggttcagagagctcgaggtgaatcacagagtacatatagatctctccactccagtcactatgttgggaatcctcagcctttggaggaatcatgagtgcatacttcagtggttctccagtcacttatggcgtaagatttgtctttggtgttacagcacttttgccactgttccgagtagcagagaaggacaactctggcaaactgtgaagaaaataaaagattttcacaagcggaatcttcagaatctgaataaaggagttcgtgggaatcagttgtaccaaaaactggttcagttttcgtattccaagcatactactggaagttcacactgatcggcgacaaactctcgcccaaggagaagttgaaggaggatcagcgtgaacacccactgaaagagagatggagttgaatgagaaatctgaaaagaatacgcaagaggtagatgagaagttccaaaacacaaacttgtatctcaagaacttagagatggagcttcgggagttacaagtgcttcataagcaatcagatagatctgaaagttttactgtgccaacacatgcacacactggtggtgcctgcatctagctattcagatcaaagcctgacaggtaccatagggcaaagtgaagaagaaacagaagagttgagcaagatcacgctagagaataaggatattcagcttgatatcaatataagagtgtttgatggagccgaccctatggagctgcatgtttatgattttaaaggacctggtgtaaccttatcaatgtacaatagcgatgagtttattaggccttttgctaagtcctccatggatatggctctttcaaaaaagtcgtctcttcatctcagcaccaagaatacaatcatcaagaagtatgacgacaggcatggatcatctatgtttctacaagctcgcggtcacatttattaggccttttgctaagttcatggatatggctctttcaaaaaagtcgtctcttcatctcagcaccaagaatacaatcatcaagaagtatgacgacatgcatggatcatctatgtttctacaagctcgcgttacaatggaatgctaagagacaaatagttaaagaactgctttaacctaccttgatggagaggggagaatgcatcgtgttagcaagggagcaccagagcaggtgatcaacttgctattgggaaagaaactgcacgtcgtttgggaatgggtactaatatgtacccttcctctgctttactcagacagaataaggatgagtcaattgcttccttgccaattgatgaattgatcgagaaggctgatggctttgctggtgtctttccagaacacaagtatgagatcgtgaaaggcttgcaagcaagaaaacatatatgtggcatgactggggatggtgtaaatgatgccccagctttgaagaaggctgatattggtattgcagtagcagactctactgatgcaactcgtagtgcttctgacattgtcctaactgaacctggccttagtgtgattattagtgctgtgctgacgagtcgggcaattttccaaaggatgaagaattacacgatctatgctgtatcgattaccatccgtattgtgcttggttttatgcttcttgcgctgatatggaagtttgacttcccaccatttatggtcctgatcattgccatcctcaatgacggtaccattatgactatctcgaaggacagagtaaaaccatctccacaaccagacagttggaagttagctgagatttttgcaactggagtagttcttggtggttatttggccatgatgactgtcattttcttctgggctgcatacaagactgactttttcccgcggctgttccacgtcgaaagcctcgagaagaccgcccaggatgactttcagaagttcgcctctgccgtgtaccttcaagtcagcacggtcagtcaggcccttatcttcgtgacacggtcgcgcagctggtcgtttgtggagcgtcctgggttcttgctggtcttcgctttcttggtggctaagctgattgccactctgatcgctgtatatgccaactgggcgttcactgcgatcaagggcattggatggggctgggccggtgtcatctggctctataacatcgtcttctacttcccgctggacatcatcaagttcctcatccgctatgcgctgagtgggagggcatggaacctcgtccttgagcagaggattgcgttcacgagcaagaagaatttcggcacggaagaaagggagcgcaagtgggcgcatgcgcagaggactctccatgggctccagccgccagaagcatccatcttcgagaacaagacgacattcaatgagctgaaccagctcgcggaagaggcccgcaggagagccgagatggcgaggttgcgagaagtgagcaccctgaaggggaggatggagtcagtggtgaagcagaagggtctggacatctagaccatccagcagtcctacactgtgtgactgactgactgacgacgacggggtttatagaggtttcttcttatactatacaatctgtactaggtagcaataaggatcaaggaaggaacccctatatattggctgcggttcgcaggaaatgaatgatggtaatatttatgatgtcggtgtggtgcttctgtcgccaactctcgaccatactaccctcaactcacccccggcaccaccggcaggcattgatattcagagatgaggttttgaatgagacgttcattatttgtacgtatttggaaagtcgtagaacaacatgatcaatactttgttcagaaaaggaacgcagctggcactctagccctttctagtctgcaaaaaattactgcagcatttcgaatgttatcttatggggtagttgctgatgctactattgattcacccctagaagtattcacaaacatgaaatgcagttctcttcttcaagtttgatgatgaagatgtttagtactacatcctgatgaagatgttctgcatgcacatgtactatattggtcccctttcagatagcatcataaaccaggaaacaaaataaagtagtacatatgtagtgaaaggaatcaataac

SEQ ID NO: 198572 - DNA, 6602 bp, Zea Mays
atggcctcacccacggtcgcctccccgatccgggcgagccccgtcgacaaccccaccgtcgcgccctcactggcctcctgccgctgcgccttatcgctagatgctcgacatccccatccgcgcgctcgaggcagaggccagggacaccaagatgagcccgaccgcgaccgcctagccatcagctccaaagaagaagccaggggaccgatggacgtcagtgttccgtcgtggtggcccgctagatccatattcagcaagaaagatatctcgccatgccggcccagggccgcagcccgtcaccttcctccccccgcacccgccgtgacagccgcctccccacgcccgcttacccgactggccgcacaagatgcccacagtggcccccatcgcgcccacccgctccccccatccaccgcgacctcagccgccacgccgacgccatccccgtcctctagcgcgttgtcgccgtcgtcacaccgccaaaggtgcctgccccctgctaccgaggtcgacgaccagcagcggcaagctgccgagctcgacgacacgcacgccatgcttggccatatggacgagtccatcgcctgctacgagaaggggctccagatccagatgtccgcgctcgatgagcgcaatccctgcctccctgagacctgcaggtaggtgacaatgtcatcaagggcccctccccctttgtcgcttctcgatctagatctcgcctctccctaaagcacgggttgcacctccccccgtcacccactccttccttggcttctcccgggaaacgaccttcagtctttacaggtatgaggtcttattgtgtgccatcattttcttttgctattcattcccgaatccccactgtgccctccagtgatgatggggtatgagctctgaataacaaacaaggtaaatgtttactcttttgagtagctgaattttgctatgatgtagtaaattatactagtaaattatacttgtactgaatatgaatataagaaaaaaatactgcactaattatttttctacgctctatattgtaaaataataggaatataataaaaagctgacataaaagctaatttacaacatccctttattttactatgttttatgataaataccttgattttccttgtaagttgtatcttttagtgattttcaaagaaactcctatttgcttggtgctttttctgtaagcatatgttgattaaatctttgtgtattctttctgtacactaatttaacttatcattattctgtcatccagtatgttgtcttatttgaatggttcatttccttctttaggtgattgacaaggtttaggaggaaacttccaaaagccggtcaagtatggagtgcttaacatcactttggcaacttatatttttttacatgtttgctttgtttgttaacaacataatttatgggctgacaatgtgatcatgtattctttctggtagtcttcgtgtcactgcttgcagttgcaggggagggatcatggctttcttttattttccatgtgcaatgtttaatttaggtgatgaactccaaagcttatcccattgttttctagcaagagctaagcaatactggatggagaacatttatctttttaataacgagtaaaagcataatggcatgcttgtgtttagttctctgtttgttgaccaatcgctatatttaatcttgattttttttatctataacttgaatttcaaagattcaatattttttattcagacattttctcttctctagatattcttttatgcaaataacgcggttacactagatcagccaacattctgggaaataagctatatggtcagagtaagaggttcaagagttgatagttcaacaactttaactgagagcaaatctacaagaaaaaggaaacaagcaacctggaacctacaactgcaggagcttgcttgaaagtgaacaatcaaggttgtgtgtatatattatgcccgacatttttgaaggatattgcgagggccattgtatctgctggaaaaatcatttcaacttgtcgaacatggtattaggatacgaattggagtggtcaacagaaattctggacagatatgtcaaatttcagaatccacgatggtcctccaagaaataaagatgctcttgatcatctattgagaagtggaatactaattttttgctgcagcgtgatggataaaggtttttgcgtattcttgggtttttttcctttcctttttggctacacacaactctttttaaatatacattcagtaggtggcaatgcctcctatttccctaaaaatatagcgccaaagagttcaaaattgaattctcataatctgctattaggaaaagaggtcaacttctatattttttacatcaggtaatttggctataatacaacggcatgctgaggtcaacttctgtatttttttctgcaagtaacttggctataatacagcggcatgctccattctgaagctggtcaagaaataaatatagcacttgcaatattttccagtagtcaaacctctccattacttcaattctcgttctcatttttgactatgttcttcatgtcagttcaacataataattaagaggtcgcttgcccctgagacggcttcatgatccatcgaagatggcgcttaatctcgagagctagggagatgaaatgccttttgtacatgatggaaggaaacaaattacgtacatgtatatgtggatcgaattgactgttgcattctgcctgtatttaagcaacggtttccacccaaaacgtctataatttggtccttcctagatgtgtcaaatgtgtttactgcactgcgtttgcttttgtggcagcgccctaatagttgtttataaagtctgatgttaacaaactattgtcatgctatgtaatatatagtcttaacatgttggtttgttgagtgttcgaatatcagttttatattattatgtcaggtgttattagtgttcaattttttaagttcttgttgtacatcctatcattacatgagacaatgttgtgatgtttacaatattgtgttatgtatgttatatcattttggtattatagtataatttaatttgtatcagtttagttctgtattggttgttgccaaaaaaaattatgagatattaaggtcgataataatgttcgtttttatataatcgttttgcactaatattttgttaatttttttgtataccgttgcaacgcacgggcacctaactagtatgagactatgagtacatcaagtgcattcccttagaactcttgttgtgtaaaaaaatgtgtaacatgtcttggtacagagattaatttggtttgtgttttttagactgcaattatatctgggttctcagccttgccatggttagtcaagcccctctatgattttatcaggtttcaccaaaatactgaatagccttcctatcatccctttctttctgtatatgatatatgcatttaattgcaatgatgtactgttgctatttccgtacacagttgattcaggtggttgattatatggtggttcagagagctcgaggtgaatcacagagtacatatagatctctccactccagtcactatgttgggaatcctcagcctttggaggaatcatgagtgcatacttcagtggttctccagtcacttatggcgtaagatttgtctttggtgttacagcacttttgccactgttccgagtagcagagaaggacaactctggcaaactgtgaagaaaataaaagattttcacaagcggaatcttcagaatctgaataaaggagttcgtgggaatcagttgtaccaaaaactggttcagttttcgtattccaagcatactactggaagttcacactgatcggcgacaaactctcgcccaaggagaagttgaaggaggatcagcgtgaacacccactgaaagagagatggagttgaatgagaaatctgaaaagaatacgcaagaggtagatgagaagttccaaaacacaaacttgtatctcaagaacttagagatggagcttcgggagttacaagtgcttcataagcaatcagatagatctgaaagttttactgtgccaacacatgcacacactggtggtgcctgcatctagctattcagatcaaagcctgacaggtaccatagggcaaagtgaagaagaaacagaagagttgagcaagatcacgctagagaataaggatattcagcttgatatcaatataagagaagaatcttggagctcttcacaacaagtgaacttttacacagaaagtaccagctccagtgaggcttgtttgatggagccgaccctatggagctgcatgtttatgattttaaaggacctggtgtaaccttatcaatgtacaatagcgatgagtttattaggccttttgctaagtcctccatggatatggctctttcaaaaaagtcgtctcttcatctcagcaccaagaatacaatcatcaagaagtatgacgacaggcatggatcatctatgtttctacaagctcgcggtcacatttattaggccttttgctaagttcatggatatggctctttcaaaaaagtcgtctcttcatctcagcaccaagaatacaatcatcaagaagtatgacgacatgcatggatcatctatgtttctacaagctcgcgttacaatggaatgctaagagacaaatagttaaagaactgctttaacctaccttgatggagaggggagaatgcatcgtgttagcaagggagcaccagagcaggtgatcaacttgctattgggaaagaaactgcacgtcgtttgggaatgggtactaatatgtacccttcctctgctttactcagacagaataaggatgagtcaattgcttccttgccaattgatgaattgatcgagaaggctgatggctttgctggtgtctttccagaacacaagtatgagatcgtgaaaggcttgcaagcaagaaaacatatatgtggcatgactggggatggtgtaaatgatgccccagctttgaagaaggctgatattggtattgcagtagcagactctactgatgcaactcgtagtgcttctgacattgtcctaactgaacctggccttagtgtgattattagtgctgtgctgacgagtcgggcaattttccaaaggatgaagaattacacgatctatgctgtatcgattaccatccgtattgtgcttggttttatgcttcttgcgctgatatggaagtttgacttcccaccatttatggtcctgatcattgccatcctcaatgacggtaccattatgactatctcgaaggacagagtaaaaccatctccacaaccagacagttggaagttagctgagatttttgcaactggagtagttcttggtggttatttggccatgatgactgtcattttcttctgggctgcatacaagactgactttttcccgcggctgttccacgtcgaaagcctcgagaagaccgcccaggatgactttcagaagttcgcctctgccgtgtaccttcaagtcagcacggtcagtcaggcccttatcttcgtgacacggtcgcgcagctggtcgtttgtggagcgtcctgggttcttgctggtcttcgctttcttggtggctaagctgattgccactctgatcgctgtatatgccaactgggcgttcactgcgatcaagggcattggatggggctgggccggtgtcatctggctctataacatcgtcttctacttcccgctggacatcatcaagttcctcatccgctatgcgctgagtgggagggcatggaacctcgtccttgagcagaggattgcgttcacgagcaagaagaatttcggcacggaagaaagggagcgcaagtgggcgcatgcgcagaggactctccatgggctccagccgccagaagcatccatcttcgagaacaagacgacattcaatgagctgaaccagctcgcggaagaggcccgcaggagagccgagatggcgaggttgcgagaagtgagcaccctgaaggggaggatggagtcagtggtgaagcagaagggtctggacatctagaccatccagcagtcctacactgtgtgactgactgactgacgacgacggggtttatagaggaaatgaatgatggtaatatttatgatgtcggtgtggtgcttctgtcgccaactctcgaccatactaccctcaactcacccccggcaccaccggcaggcattgatattcagagatgaggttttgaatgagacgttcattatttgtacgtatttggaaagtcgtagaacaacatgatcaatactttgttcagaaaaggaacgcagctggcactctagccctttctagtctgcaaaaaattactgcagcatttcgaatgttatcttatggggtagttgctgatgctactattgattcacccctagaagtattcacaaacatgaaatgcagttctcttcttcaagtttgatgatgaagatgtttagtactacatcctgatgaagatgttctgcatgcacatgtactatattggtcccctttcagatagcatcataaaccaggaaacaaaataaagtagtacatatgtagtgaaaggaatcaataac

SEQ ID NO: 198573 - DNA, 6111 bp, Zea Mays
atggcctcacccacggtcgcctccccgatccgggcgagccccgtcgacaaccccaccgtcgcgccctcactggcctcctgccgctgcgccttatcgctagatgctcgacatccccatccgcgcgctcgaggcagaggccagggacaccaagatgagcccgaccgcgaccgcctagccatcagctccaaagaagaagccaggggaccgatggacgtcagtgttccgtcgtggtggcccgctagatccatattcagcaagaaagatatctcgccatgccggcccagggccgcagcccgtcaccttcctccccccgcacccgccgtgacagccgcctccccacgcccgcttacccgactggccgcacaagatgcccacagtggcccccatcgcgcccacccgctccccccatccaccgcgacctcagccgccacgccgacgccatccccgtcctctagcgcgttgtcgccgtcgtcacaccgccaaaggtgcctgccccctgctaccgaggtcgacgaccagcagcggcaagctgccgagctcgacgacacgcacgccatgcttggccatatggacgagtccatcgcctgctacgagaaggggctccagatccagatgtccgcgctcgatgagcgcaatccctgcctccctgagacctgcaggtgattgacaaggtttaggaggaaacttccaaaagccggtcaagtatggagtgcttaacatcactttggcaacttatatttttttacatgtttgctttgtttgttaacaacataatttatgggctgacaatgtgatcatgtattctttctggtagtcttcgtgtcactgcttgcagttgcaggggagggatcatggctttcttttattttccatgtgcaatgtttaatttaggtgatgaactccaaagcttatcccattgttttctagcaagagctaagcaatactggatggagaacatttatctttttaataacgagtaaaagcataatggcatgcttgtgtttagttctctgtttgttgaccaatcgctatatttaatcttgattttttttatctataacttgaatttcaaagattcaatattttttattcagacattttctcttctctagatattcttttatgcaaataacgcggttacactagatcagccaacattctgggaaataagctatatggtcagagtaagaggttcaagagttgatagttcaacaactttaactgagagcaaatctacaagaaaaaggaaacaagcaacctggaacctacaactgcaggagcttgcttgaaagtgaacaatcaaggttgtgtgtatatattatgcccgacatttttgaaggatattgcgagggccattgtatctgctggaaaaatcatttcaacttgtcgaacatggtattaggatacgaattggagtggtcaacagaaattctggacagatatgtcaaatttcagaatccacgatggtcctccaagaaataaagatgctcttgatcatctattgagaagtggaatactaattttttgctgcagcgtgatggataaaggtttttgcgtattcttgggtttttttcctttcctttttggctacacacaactctttttaaatatacattcagtaggtggcaatgcctcctatttccctaaaaatatagcgccaaagagttcaaaattgaattctcataatctgctattaggaaaagaggtcaacttctatattttttacatcaggtaatttggctataatacaacggcatgctgaggtcaacttctgtatttttttctgcaagtaacttggctataatacagcggcatgctccattctgaagctggtcaagaaataaatatagcacttgcaatattttccagtagtcaaacctctccattacttcaattctcgttctcatttttgactatgttcttcatgtcagttcaacataataattaagaggtcgcttgcccctgagacggcttcatggtattttatttgttttttacaaagtattttttaagcgctaaacttacagtgcactttctctattcgttttggtgctgcttataagtcttttgtgttttagatccatcgaagatggcgcttaatctcgagagctagggagatgaaatgccttttgtacatgatggaaggaaacaaattacgtacatgtatatgtggatcgaattgactgttgcattctgcctgtatttaagcaacggtttccacccaaaacgtctataatttggtccttcctagatgtgtcaaatgtgtttactgcactgcgtttgcttttgtggcagcgccctaatagttgtttataaagtctgatgttaacaaactattgtcatgctatgtaatatatagtcttaacatgttggtttgttgagtgttcgaatatcagttttatattattatgtcaggtgttattagtgttcaattttttaagttcttgttgtacatcctatcattacatgagacaatgttgtgatgtttacaatattgtgttatgtatgttatatcattttggtattatagtataatttaatttgtatcagtttagttctgtattggttgttgccaaaaaaaattatgagatattaaggtcgataataatgttcgtttttatataatcgttttgcactaatattttgttaatttttttgtataccgttgcaacgcacgggcacctaactagtatgagactatgagtacatcaagtgcattcccttagaactcttgttgtgtaaaaaaatgtgtaacatgtcttggtacagagattaatttggtttgtgttttttagactgcaattatatctgggttctcagccttgccatggttagtcaagcccctctatgattttatcagttgattcaggtggttgattatatggtggttcagagagctcgaggtgaatcacagagtacatatagatctctccactccagtcactatgttgggaatcctcagcctttggaggaatcatgagtgcatacttcagtggttctccagtcacttatggcgtaagatttgtctttggtgttacagcacttttgccactgttccgagtagcagagaaggacaactctggcaaactgtgaagaaaataaaagattttcacaagcggaatcttcagaatctgaataaaggagttcgtgggaatcagttgtaccaaaaactggttcagttttcgtattccaagcatactactggaagttcacactgatcggcgacaaactctcgcccaaggagaagttgaaggaggatcagcgtgaacacccactgaaagagagatggagttgaatgagaaatctgaaaagaatacgcaagaggtagatgagaagttccaaaacacaaacttgtatctcaagaacttagagatggagcttcgggagttacaagtgcttcataagcaatcagatagatctgaaagttttactgtgccaacacatgcacacactggtggtgcctgcatctagctattcagatcaaagcctgacaggtaccatagggcaaagtgaagaagaaacagaagagttgagcaagatcacgctagagaataaggatattcagcttgatatcaatataagagaagaatcttggagctcttcacaacaagtgaacttttacacagaaagtaccagctccagtgaggctgtatgtttatgagattgagatcctttttttgctctgtcgatccataagattgagattttttttgcttgtatacgaggtgtttgatggagccgaccctatggagctgcatgtttatgattttaaaggacctggtgtaaccttatcaatgtacaatagcgatgagtttattaggccttttgctaagtcctccatggatatggctctttcaaaaaagtcgtctcttcatctcagcaccaagaatacaatcatcaagaagtatgacgacaggcatggatcatctatgtttctacaagctcgcggtcacatttattaggccttttgctaagttcatggatatggctctttcaaaaaagtcgtctcttcatctcagcaccaagaatacaatcatcaagaagtatgacgacatgcatggatcatctatgtttctacaagctcgcgttacaatggaatgctaagagacaaatagttaaagaactgctttaacctaccttgatggagaggggagaatgcatcgtgttagcaagggagcaccagagcaggtgatcaacttgctattgggaaagaaactgcacgtcgtttgggaatgggtactaatatgtacccttcctctgctttactcagacagaataaggatgagtcaattgcttccttgccaattgatgaattgatcgagaaggctgatggctttgctggtgtctttccagaacacaagtatgagatcgtgaaaggcttgcaagcaagaaaacatatatgtggcatgactggggatggtgtaaatgatgccccagctttgaagaaggctgatattggtattgcagtagcagactctactgatgcaactcgtagtgcttctgacattgtcctaactgaacctggccttagtgtgattattagtgctgtgctgacgagtcgggcaattttccaaaggatgaagaattacacgatctatgctgtatcgattaccatccgtattgtgcttggttttatgcttcttgcgctgatatggaagtttgacttcccaccatttatggtcctgatcattgccatcctcaatgacggtaccattatgactatctcgaaggacagagtaaaaccatctccacaaccagacagttggaagttagctgagatttttgcaactggagtagttcttggtggttatttggccatgatgactgtcattttcttctgggctgcatacaagactgactttttcccgcggctgttccacgtcgaaagcctcgagaagaccgcccaggatgactttcagaagttcgcctctgccgtgtaccttcaagtcagcacggtcagtcaggcccttatcttcgtgacacggtcgcgcagctggtcgtttgtggagcgtcctgggttcttgctggtcttcgctttcttggtggctaagctgattgccactctgatcgctgtatatgccaactgggcgttcactgcgatcaagggcattggatggggctgggccggtgtcatctggctctataacatcgtcttctacttcccgctggacatcatcaagttcctcatccgctatgcgctgagtgggagggcatggaacctcgtccttgagcagaggattgcgttcacgagcaagaagaatttcggcacggaagaaagggagcgcaagtgggcgcatgcgcagaggactctccatgggctccagccgccagaagcatccatcttcgagaacaagacgacattcaatgagctgaaccagctcgcggaagaggcccgcaggagagccgagatggcgaggttgcgagaagtgagcaccctgaaggggaggatggagtcagtggtgaagcagaagggtctggacatctagaccatccagcagtcctacactgtgtgactgactgactgacgacgacggggtttatagaggtttcttcttatactatacaatctgtactaggtagcaataaggatcaaggaaggaacccctatatattggctgcggttcgcaggaaatgaatgatggtaatatttatgatgtcggtgtggtgcttctgtcgccaactctcgaccatactaccctcaactcacccccggcaccaccggcaggcattgatattcagagatgaggttttgaatgagacgttcattatttgtacgtatttggaaagtcgtagaacaacatgatcaatactttgttcagaaaaggaacgcagctggcactctagccctttctagtctgcaaaaaattactgcagcatttcgaatgttatcttatggggtagttgctgatgctactattgattcacccctagaagtattcacaaacatgaaatgcagttctcttcttcaagtttgatgatgaagatgtttagtactacatcctgatgaagatgttctgcatgcacatgtactatattggtcccctttcagatagcatcataaaccaggaaacaaaataaagtagtacatatgtagtgaaaggaatcaataac

SEQ ID NO: 198574 - DNA, 2024 bp, Zea Mays
taagattgagattttttttgcttgtatacgaggtgtttgatggagccgaccctatggagctgcatgtttatgattttaaaggacctggtgtaaccttatcaatgtacaatagcgatgagtttattaggccttttgctaagtcctccatggatatggctctttcaaaaaagtcgtctcttcatctcagcaccaagaatacaatcatcaagaagtatgacgacaggcatggatcatctatgtttctacaagctcgcggtcacatttattaggccttttgctaagttcatggatatggctctttcaaaaaagtcgtctcttcatctcagcaccaagaatacaatcatcaagaagtatgacgacatgcatggatcatctatgtttctacaagctcgcggtgatcaacttgctattgggaaagaaactgcacgtcgtttgggaatgggtactaatatgtacccttcctctgctttactcagacagaataaggatgagtcaattgcttccttgccaattgatgaattgatcgagaaggctgatggctttgctggtgtctttccagaacacaagtatgagatcgtgaaaggcttgcaagcaagaaaacatatatgtggcatgactggggatggtgtaaatgatgccccagctttgaagaaggctgatattggtattgcagtagcagactctactgatgcaactcgtagtgcttctgacattgtcctaactgaacctggccttagtgtgattattagtgctgtgctgacgagtcgggcaattttccaaaggatgaagaattacacgatctatgctgtatcgattaccatccgtattgtgcttggttttatgcttcttgcgctgatatggaagtttgacttcccaccatttatggtcctgatcattgccatcctcaatgacggtaccattatgactatctcgaaggacagagtaaaaccatctccacaaccagacagttggaagttagctgagatttttgcaactggagtagttcttggtggttatttggccatgatgactgtcattttcttctgggctgcatacaagactgactttttcccgcggctgttccacgtcgaaagcctcgagaagaccgcccaggatgactttcagaagttcgcctctgccgtgtaccttcaagtcagcacggtcagtcaggcccttatcttcgtgacacggtcgcgcagctggtcgtttgtggagcgtcctgggttcttgctggtcttcgctttcttggtggctaagctgattgccactctgatcgctgtatatgccaactgggcgttcactgcgatcaagggcattggatggggctgggccggtgtcatctggctctataacatcgtcttctacttcccgctggacatcatcaagttcctcatccgctatgcgctgagtgggagggcatggaacctcgtccttgagcagaggattgcgttcacgagcaagaagaatttcggcacggaagaaagggagcgcaagtgggcgcatgcgcagaggactctccatgggctccagccgccagaagcatccatcttcgagaacaagacgacattcaatgagctgaaccagctcgcggaagaggcccgcaggagagccgagatggcgaggttgcgagaagtgagcaccctgaaggggaggatggagtcagtggtgaagcagaagggtctggacatctagaccatccagcagtcctacactgtgtgactgactgactgacgacgacggggtttatagaggtttcttcttatactatacaatctgtactaggtagcaataaggatcaaggaaggaacccctatatattggctgcggttcgcaggaaatgaatgatggtaatatttatgatgtcggtgtggtgcttctgtcgccaactctcgaccatactaccctcaactcacccccggcaccaccggcaggcattgatattcagagatgagcgatggcataatagctgcacaggcatgtatatgccatgagcatgtgcagtgtttaccgttgcggcatgggca

SEQ ID NO: 198575 - DNA, 1675 bp, Zea Mays
gttagcaagggagcaccagagcaggtgatcaacttgctattgggaaagaaactgcacgtcgtttgggaatgggtactaatatgtacccttcctctgctttactcagacagaataaggatgagtcaattgcttccttgccaattgatgaattgatcgagaaggctgatggctttgctggtgtctttccagcttggttttatgcttcttgcgctgatatggaagtttgacttcccaccatttatggtcctgatcattgccatcctcaatgacggtaccattatgactatctcgaaggacagagtaaaaccatctccacaaccagacagttggaagttagctgagatttttgcaactggagtagttcttggtggttatttggccatgatgactgtcattttcttctgggctgcatacaagactgactttttcccgcggctgttccacgtcgaaagcctcgagaagaccgcccaggatgactttcagaagttcgcctctgccgtgtaccttcaagtcagcacggtcagtcaggcccttatcttcgtgacacggtcgcgcagctggtcgtttgtggagcgtcctgggttcttgctggtcttcgctttcttggtggctaagctgattgccactctgatcgctgtatatgccaactgggcgttcactgcgatcaagggcattggatggggctgggccggtgtcatctggctctataacatcgtcttctacttcccgctggacatcatcaagttcctcatccgctatgcgctgagtgggagggcatggaacctcgtccttgagcagaggattgcgttcacgagcaagaagaatttcggcacggaagaaagggagcgcaagtgggcgcatgcgcagaggactctccatgggctccagccgccagaagcatccatcttcgagaacaagacgacattcaatgagctgaaccagctcgcggaagaggcccgcaggagagccgagatggcgaggttgcgagaagtgagcaccctgaaggggaggatggagtcagtggtgaagcagaagggtctggacatctagaccatccagcagtcctacactgtgtgactgactgactgacgacgacggggtttatagaggtttcttcttatactatacaatctgtactaggtagcaataaggatcaaggaaggaacccctatatattggctgcggttcgcaggaaatgaatgatggtaatatttatgatgtcggtgtggtgcttctgtcgccaactctcgaccatactaccctcaactcacccccggcaccaccggcaggcattgatattcagagatgaggttttgaatgagacgttcattatttgtacgtatttggaaagtcgtagaacaacatgatcaatactttgttcagaaaaggaacgcagctggcactctagccctttctagtctgcaaaaaattactgcagcatttcgaatgttatcttatggggtagttgctgatgctactattgattcacccctagaagtattcacaaacatgaaatgcagttctcttcttcaagtttgatgatgaagatgtttagtactacatcctgatgaagatgttctgcatgcacatgtactatattggtcccctttcagatagcatcataaaccaggaaacaaaataaagtagtacatatgtagtgaaaggaatcaataac

SEQ ID NO: 198576 - DNA, 1665 bp, Zea Mays
tttttcaggtcatagttttgtgctgctgatgatggtgttaagtgccggtgggctcggccttcttataagtctaaagcatgggtgagcagtgagctgctgccgtaactccaaagctgacaagttttctgtgctgtccaccaagattgtagcatgtagatgagatgtagaggagctagtagcggctaccattacggcaataaagagcccgtaggaaaagcggagggggcagcgagcgggtgctgcataacctgcattcagtctcagggtaccattgcatcccactcggctccacctcgcggcccatatttgatatttcggctatggcaggtcattgcgccgtcgtcgtcgtcgttcgcaagcagcaaccaggcagctccgggctccggccatggcatcaccaccaaggaatgtcggtaccaggactaccagcaacccggagatcccagagttcctggtgggcccggctggccggccggtgccggccgtggggctcggcacggcatcgttcccgttcgtggaggaaaacgtcaggaccgccgtcctcgcggcactggagctcggataccgccacctcgataccgcttcgctctaccgctccgaacgtgccgtcggcgacgccgtggccgaggcagcgcggcgcgggatcgtggcgtccagggaggaggtgttcgtgacgaccaagatgtggtgctcgcagtgccacccggatctcgtgctaccttccctcaaggagagcttgcagaaccttcaaatggattatgttgatttgtacctggttcattggccgatagctgcaaagcccggcaagccacagttcccgtttaaaagggaggacatcatgcccatggacctaataggtgtatggcgggcaatggaggaatgccaccggcttggccttgctaggatgattggtgtcagcaatttcacaacaaagaagctccaagagctactggccattgctaaaatccccccgtcagtaaatcaggttgaaatgaatccaatttggcagcagaaaaggttagctgagttctgcaaagacaaaggtattcatttgactgcctattctccgctagcaggccaaagcacgtctaaggtcaatccagtaatgcagtctgaggttctgcaagaggttgcaaaggctagaggaaagtcagtggctcagatttcgctgaggtggatctacgagcaaggcgctagcgtggttgtcaagagtttcggaagggataggctcaaggagaacgtggaaatcttcgattgggaactgaccaatgaagacaggcgtaagattagtcagatacctcagcacaagagggtcacagtgttggggatcctcagcccagacggcgtctccagcgtggatcttgctgagcttgatattgttgaaatgtagcagaaatctccatctatcaggttgcaaggacaaaaaatggtgattggagtagctttcatacggctacgttgaatcagttgcttagatacggccatattgaatcaagaattagaagtagaggacgatctctctacttgtcgtccggacctcattttcttaaaatgtattttcaggtgtctgaccttgtcctgaaatgccatccaggccattactttttagaatgccatttttagatctgtttgatctagcttaaataagttactaggcaaacaaac

SEQ ID NO: 198577 - DNA, 2113 bp, Zea Mays
tgagcagtgagctgctgccgtaactccaaagctgacaagttttctgtgctgtccaccaagattgtagcatgtagatgagatgtagaggagctagtagcggctaccattacggcaataaagagcccgtaggaaaagcggagggggcagcgagcgggtgctgcataacctgcattcagtctcagggtaccattgcatcccactcggctccacctcgcggcccatatttgatatttcggctatggcaggtcattgcgccgtcgtcgtcgtcgttcgcaagcagcaaccaggcagctccgggctccggccatggcatcaccaccaaggaatgtcggtaccaggactaccagcaacccggagatcccagagttcctggtgggcccggctggccggccggtgccggccgtggggctcggcacggcatcgttcccgttcgtggaggaaaacgtcaggaccgccgtcctcgcggcactggagctcggataccgccacctcgataccgcttcgctctaccgctccgaacgtgccgtcggcgacgccgtggccgaggcagcgcggcgcgggatcgtggcgtccagggaggaggtgttcgtgacgaccaagatgtggtgctcgcagtgccacccggatctcgtgctaccttccctcaaggagagcttgcagaaccttcaaatggattatgttgatttgtacctggttcattggccgatagctgcaaagcccggcaagccacagttcccgtttaaaagggaggacatcatgcccatggacctaataggtgtatggcgggcaatggaggaatgccaccggcttggccttgctaggatgattggtgtcagcaatttcacaacaaagaagctccaagagctactggccattgctaaaatccccccgtcagtaaatcaggtctgtgcagatcatatgagttaggtggtggcaatggcagtaagccagtaacctcagttagttgtgggtctttcaggttcttgtagtccttttcttaatgattgataagcatgatatactctatataaggccccctttggacattttcacgtttcatgcgtttttgttgtaaaaaacaaactgattcgtataaaatttctatacaaattaccgtgaaatttctactgcgcaaaagaccacaaaaggaagaacaggatgttttactgtatttatttttatcgaacatgcagaatagctgtgtgcctttcttttcatcaaagaagaaagagtgtcacatggatattaatattccatatgaatatagaacattagaacttgaaggttttttaatatgtaaatagtcatcattgaacgaaaagtgggtgttttaggggataattgtttcaaattaaaaataactttgtatattgtatatcctcaagtatacctacaccatacactgacatgtgagataaccttggcttgagcaggttgaaatgaatccaatttggcagcagaaaaggttagctgagttctgcaaagacaaaggtattcatttgactgcctattctccgctagcaggccaaagcacgtctaaggtcaatccagtaatgcagtctgaggttctgcaagaggttgcaaaggctagaggaaagtcagtggctcagatttcgctgaggtggatctacgagcaaggcgctagcgtggttgtcaagagtttcggaagggataggctcaaggagaacgtggaaatcttcgattgggaactgaccaatgaagacaggcgtaagattagtcagatacctcagcacaagagggtcacagtgttggggatcctcagcccagacggcgtctccagcgtggatcttgctgagcttgatattgttgaaatgtagcagaaatctccatctatcaggttgcaaggacaaaaaatggtgattggagtagctttcatacggctacgttgaatcagttgcttagatacggccatattgaatcaagaattagaagtagaggacgatctctctacttgtcgtccggacctcattttcttaaaatgtattttcaggtgtctgaccttgtcctgaaatgccatccaggccattactttttagaatgccatttttagatctgtttgatctagcttaaataagttactaggcaaacaaac

SEQ ID NO: 198578 - DNA, 1554 bp, Zea Mays
cgctgcttcaccaccggcctcggcctcggtgccggcgccgatcgcccaggccgcgcaccccgcccgtcgtagtactgtcagtcatatcatagcaccccgctcagatttccacaacccaaatctacccacctcctcagacctcactccactcaccgttgccaaaagctcccacccacctctcatgggcagggttcatgtcacggcagccggccgcccgcccgcccgcgttcggcggcgcgcatgcagcatacaccgccccaggcccgatcgatggaggggaggggagcgcccgcgagaaccctaaaaagcctccgctcaacctctatgctggatgggatcagctggacggaggcctggagcgtccagcactccagcctgccacacgcctgggctggggcccacctccccgctataaagcggagccgccgggttaccgttgaagtctgaggagacctgatccacaagcaccgccgccgtgtgccagagatgagatgccatggaagagcaagaagacgcatggaattgtgacgccaaggagagcgaggcacaggagcacggtgacacggtcggccggcagatctgcagtggctgccgccgtctccgcacgatatctcgatcgggcctaacttgtttgtcacgtgataaaggatgcaaactgaaccagagcctacaggtatgttcctcctacactaatgtggcatatgaatgcgcccttagccagtactcctccgttccaaattaaaatttgttttattaattaatgggtttatacaatacttgatgtatttgttttatatatgtctaagttcatgttcatctatttgaatatagacataaaactaagagctaaaataactactattttagaacgaatgaagtatataattaccatgtaagaaattaaaacttgtgtgatcaagaaattaaaacaagagacggttttatttcaagttttgagtaatagtgcttgcttgattaaacttatctcttttactggtaatggttcattgatgatttgttcaattgtatatacattattttaggattcttgcaatcaagtcttttgaactttgatgatcaatagacaattgttgacgtaaggctgatgttagtgaatttatcctggcaaatacttgcatatttgttcgtttggattttatgctttcacataaattacctgaacttgttgatgtagtaaactacttgtagctgtgatcagaccatagacttagtacattacaacaatttaaaaattatttgaatgtaacaacctatgcatggcagaacgactgagcatgcatatagtgttagttcagcgtatggccttctatctgtttacttccttggagcagcttacacacataaagtcatttaaagtggagatgtatgatatatatgaacatatattttatttatttcggtcttcattttgtgacccgcatgaattttactgccttggtcccgaaaaatgcaactgtagctatttttggatcatatgttaaagtttgaccaagtttgtagaagatagtatcaataataggtatagctataaac

SEQ ID NO: 198579 - DNA, 1714 bp, Zea Mays
agcaccccgctcagatttccacaacccaaatctacccacctcctcagacctcactccactcaccgttgccaaaagctcccacccacctctcatgggcagggttcatgtcacggcagccggccgcccgcccgcccgcgttcggcggcgcgcatgcagcatacaccgccccaggcccgatcgatggaggggaggggagcgcccgcgagaaccctaaaaagcctccgctcaacctctatgctggatgggatcagctggacggaggcctggagcgtccagcactccagcctgccacacgcctgggctggggcccacctccccgctataaagcggagccgccgggttaccgttgaagtctgaggagacctgatccacaagcaccgccgccgtgtgccagagatgagatgccatggaagagcaagaagacgcatggaattgtgacgccaaggagagcgaggcacaggagcacggtgacacggtcggccggcagatctgcagtggctgccgccgtctccgcacgatatctcgatcggatactgttgagatagctagccggccgccgttccattcatggtgcttgtactcgtccgatcgaattcctggccgcacacgccatttctttgacttttgtgctgccgctcgatcggtctaataaattaaggggctcgggcgatatgcattcctgaatttattttttttccttgcgcaaattaagtttatatatcggcgtttgatgttcataaagacggcataatttcactgaatagtgtgaaacaaattatagttccggaggttttgttgaattattgggctttgcaggatttatattgttttatacttcgattacctgggacaatgtaagctttattttttttctgtctttattatatgggcaagtaaaaagtcaagtcggctgtaaataatagcattgaaggtttcaaggtacgcgcaagcatggtccctggtgaaagttgtaggttggttaagaaataaatattttctggtatatgtagccaaagtttgcgttgggggtttctaaatttgaattcaacctacgaacttttcaccagcaggagtgttgatttttcacacacaagtattctataaaaaagaaaggccaagctagttgctgccagttcttttttactggacaaacgttgaactttcaactttttcctatgttgcaatattgcatgctttctttacaattagtaaagtctgatgttgcttttaaactgctcacttacaggcaaaagaatttttgttagttttccagttccaacatggcgctacaatggttaatggcagtgcatataaattttcaagtatataaagtcttaatccagcataggaataatcagggtaatacatatactctctttccattagcatgtaaaccacacttgcacatcaaagcttcctttttattttaaaaatatatgtaatgaagctagcgcaacatctgtttcatcatatatactcagggtgatacatatactctcttaatccattcccacttctgtttcatcatgtatgttagctcaatctgatcttatatctaataatatatctatgtagctatgcacctgcacatcaaagcgtccttttatttttaaaatatatgtaatgaagctagcgcaaggtggttatgtagaggtgtaaaaactccagccaaggcattattgcactaataagggggtgtttgggaacaaagttt

SEQ ID NO: 198580 - DNA, 1192 bp, Zea Mays
ctatttcaaaccaagtcataggtgtattgaaagggaattggagtcttcggcaaagacaaaggcttccactacgtaactcatccttcgccgtcgctccaagcaactctccgttctaagggggagaaaacatgagcaccaaggacttcttctttgggggcagatgggtttatctgaggagcagcagaagcaagctctcgagcttcggagcatgacaaatggtggcaaagaatcccttgaagaaaccgaaacagacggtgcttcttgtaaccctgcagcaactggtggatgctgccaaggcaatggtggcttcactcgagctttggagcagcagaagcaagctctcgagcttcggagcatgacaaatggtggcaaagaatcccttgaagaaaccgaaacagacggtgcttcttgtaaccctgcagcaactggtggatgctgccaaggcaatggtagcttcacttgctgccatcctgacctgccaaaggaaaaacgggacaagagcatcgcaattgagcagaaccctaagagctgtgaggagaatggcaaggaggggggtggtgctggcagcaagaaggggaattcaaagacttgcccgatgcccacctggtttgagacctgggagagagctgacacctatgctgctcttgctgttgtcgcagctgccgcagctgtgtttatctctttcagaatctacaagaacctcaactgaagagcttgagagatctttgaagaggtgcccgaaacaagtctaggtgaatcagcgtactggtggtaaaacaatccgggacgagaataatctttacctgtgtatagtaatgtgaggtttagaacctcaaagtagcttatctggagatggtgataaaaaggtgttgtggctacggtgttttcgcgtgtgaacgtccactgctatcgaagtttggatgccttagctgctggtaatcgtaaggcatcaagtaagcaacattcactgtgatgatgttgtcttttgtttgggttttggatgttctggagattctaggttttgaaacaatatcaggttgattgaaaaacataaacatctggaaaaggttaacgcctttcttgtgacatttgaaaatttgaacttcctcgtttatctgcaacctgcgcgcgcatgtttctatggtgaacccggcgagacgccaatggacttcgcgtgaagccatagagacag

SEQ ID NO: 198581 - DNA, 1056 bp, Zea Mays
acttcacgagaaatgagggggcagatgggtttatctgaggagcagcagaagcaagctctcgagcttcggagcatgacaaatggtggcaaagaatcccttgaagaaaccgaaacagacggtgcttcttgtaaccctgcagcaactggtggatgctgccaaggcaatggtggcttcactcgagctttggagcagcagaagcaagctctcgagcttcggagcatgacaaatggtggcaaagaatcccttgaagaaaccgaaacagacggtgcttcttgtaaccctgcagcaactggtggatgctgccaaggcaatggtagcttcacttgctgccatcctgacctgccaaaggaaaaacgggacaagagcatcgcaattgagcagaaccctaagagctgtgaggagaatggcaaggaggggggtggtgctggcagcaagaaggggaattcaaagacttgcccgatgcccacctggtttgagacctgggagagagctgacacctatgctgctcttgctgttgtcgcagctgccgcagctgtgtttatctctttcagaatctacaagaacctcaactgaagagcttgagagatctttgaagaggtgcccgaaacaagtctaggtgaatcagcgtactggtggtaaaacaatccgggacgagaataatctttacctgtgtatagtaatgtgaggtttagaacctcaaagtagcttatctggagatggtgataaaaaggtgttgtggctacggtgttttcgcgtgtgaacgtccactgctatcgaagtttggatgccttagctgctggtaatcgtaaggcatcaagtaagcaacattcactgtgatgatgttgtcttttgtttgggttttggatgttctggagattctaggttttgaaacaatatcaggttgattgaaaaacataaacatctggaaaaggttaacgcctttcttgtgacatttgaaaatttgaacttcctcgtttatctgcaacctgcgcgcgcatgtttctatggtgaacccggcgagacgccaatggacttcgcgtgaagccatagagacag

SEQ ID NO: 198582 - DNA, 1057 bp, Zea Mays
catatgaactcctaaccgggggcagatgggtttatctgaggagcagcagaagcaagctctcgagcttcggagcatgacaaatggtggcaaagaatcccttgaagaaaccgaaacagacggtgcttcttgtaaccctgcagcaactggtggatgctgccaaggcaatggtggcttcactcgagctttggagcagcagaagcaagctctcgagcttcggagcatgacaaatggtggcaaagaatcccttgaagaaaccgaaacagacggtgcttcttgtaaccctgcagcaactggtggatgctgccaaggcaatggtagcttcacttgctgccatcctgacctgccaaaggaaaaacgggacaagagcatcgcaattgagcagaaccctaagagctgtgaggagaatggcaaggaggggggtggtgctggcagcaagaaggggaattcaaagacttgcccgatgcccacctggtttgagacctgggagagagctgacacctatgctgctcttgctgttgtcgcagctgccgcagctgtgtttatctctttcagaatctacaagaacctcaactgaagagcttgagagatctttgaagaggtgcccgaaacaagtctaggtgaatcagcgtactggtggtaaaacaatccgggacgagaataatctttacctgtgtatagtaatgtgaggtttagaacctcaaagtagcttatctggagatggtgataaaaaggtgttgtggctacggtgttttcgcgtgtgaacgtccactgctatcgaagtttggatgccttagctgctggtaatcgtaaggcatcaagtaagcaacattcactgtgatgatgttgtcttttgtttgggttttggatgttctggagattctaggttttgaaacaatatcaggttgattgaaaaacataaacatctggaaaaggttaacgcctttcttgtgacatttgaaaatttgaacttcctcgtttatctgcaacctgcgcgcgcatgtttctatggtgaacccggcgagacgccaatggacttcgcgtgaagccatagagacag

SEQ ID NO: 198583 - DNA, 1482 bp, Zea Mays
ataggaaacacttcgtactattggactctgcgactctagcatcaaattcaccatctgtgaaggagaagatggcactgaatcatcaaatggagatgtgttgatctttccagatatgatcagatacaaagggctgacccattttgacgtcgacaactttgttgaagaagtgtttgtgaaggatattgactggcttcctggatctcctgagcctataagtggttcctatgttttcgtttgctcccatcaaagaagggatataaggtggctgtcagtgcatgctcacacgtgggaggtcataagtatgcaggaaatgtcatcattttcagttctgatgccaagggagaagtggttggtcattggtatggttatgttgtccccgacgatgtgcctgttttgctgcataaacatattggacaaggagaagttgtggaccgtctatggagggggcagatgggtttatctgaggagcagcagaagcaagctctcgagcttcggagcatgacaaatggtggcaaagaatcccttgaagaaaccgaaacagacggtgcttcttgtaaccctgcagcaactggtggatgctgccaaggcaatggtggcttcactcgagctttggagcagcagaagcaagctctcgagcttcggagcatgacaaatggtggcaaagaatcccttgaagaaaccgaaacagacggtgcttcttgtaaccctgcagcaactggtggatgctgccaaggcaatggtagcttcacttgctgccatcctgacctgccaaaggaaaaacgggacaagagcatcgcaattgagcagaaccctaagagctgtgaggagaatggcaaggaggggggtggtgctggcagcaagaaggggaattcaaagacttgcccgatgcccacctggtttgagacctgggagagagctgacacctatgctgctcttgctgttgtcgcagctgccgcagctgtgtttatctctttcagaatctacaagaacctcaactgaagagcttgagagatctttgaagaggtgcccgaaacaagtctaggtgaatcagcgtactggtggtaaaacaatccgggacgagaataatctttacctgtgtatagtaatgtgaggtttagaacctcaaagtagcttatctggagatggtgataaaaaggtgttgtggctacggtgttttcgcgtgtgaacgtccactgctatcgaagtttggatgccttagctgctggtaatcgtaaggcatcaagtaagcaacattcactgtgatgatgttgtcttttgtttgggttttggatgttctggagattctaggttttgaaacaatatcaggttgattgaaaaacataaacatctggaaaaggttaacgcctttcttgtgacatttgaaaatttgaacttcctcgtttatctgcaacctgcgcgcgcatgtttctatggtgaacccggcgagacgccaatggacttcgcgtgaagccatagagacag

SEQ ID NO: 198584 - DNA, 636 bp, Zea Mays
ctgctgtgtttacctgaaatgaagatcttcatggatacaattagacttcttgctgaaaaaacaaataatctacttgaagagctctggaactacattgagaatgtaaaacttatccagtctgcggttttactactggctgcttaggggaagatctgtgggggttgttcctcgaagataaatggcagtaataagaaagatgagtttgacattatcaatgagcgtatactgaggttttcatttgtcttgagatgggagaaaggttcaaatggaatgaccagaagcttctaaaggaaaggattgttcttgttgattgcactgggttgcttgttaatataatttctcgtactggcgaacctctttctgcatatattcagtcactttcagaggtacggatttttcattatgttgtagcttcagtgcctcatacgcctgttgcttaatattttaaaaatatgttctctactattgttagttgtgttattttaaaaaaatacgtgcacaaactttagcaagaagaatgttaatagttctcatgccaactgaaaaataatagtatatgttgtataattgtatttgacaactttgtaatcagactatcagagtttattcttttaaacaaactctacagaaatgaac

SEQ ID NO: 198585 - DNA, 1767 bp, Zea Mays
gttccggtgattccacaaaatttcaactgactgttttctgaagcattgcaaaattatgttattactatgaagtccagtgaagaaactacttttgtgatgactactcatgtcacttttgaattgttacacgtggttaggggaggaaacctcttggaggttgtagttctgatgggtggtatggtagggtgatgggctttgttgctggcaactcgtgatggtttttccagccttggtgaacattggcagtggctacagcttgggcaggggctggtggcagcgcaaaggagagtgagagggaactttaaggtgagtcattagaagatgctttgaggcaattatacctcattgatgcaattgatgaaaacggacaaataacggatgttggacgagttatggcagagcttcctcttgagccgtctctttcaaggactttgattgaagcaaatgaattgggatgcctatctcaggcgttaactgttgcatcgattttgtcagcagaaataacattgcgatcagttagcaaggacgtggtggatggaaagaggaaaaggcaggagctccctgatgggtctggctggggtgaccatatacaattgcttcagatatttgaaagctgggaccaaactggctatgacacaaaatggtgctctcatcatgatttgcaggtgcggggtatgaaattgagcaaagatgtgaggaaccaactatgtcagattattcaaaaaattgcaaaaggttcaactgatgtggatgcaaggaaaagccggaagaatgaccctgattatagaaagctgaggagagctctctgcgtaggatatggtaaccagctagctgagaggatgctgcatcacaatggctaccatactgttggctataggacccaacttgtacaggtgcatccatcttctgtactggaaggcgatgagtatggaaagtttccaatgtacgttatttatcatgagctgataagtacaactcgtccatacatgagaaatgtctgcgccgtcgagcaagcctgggttcagcctatattaaagaagctcgacaaattagacataaacagattaagtggtggttcgagtgcaccgggagattctgaacttctgggagacaataagcaagtgaactcgtcaaagaatgacgtgggtgtaaaacaatcagaggtggacagtaaaatccaggcagctcgagagcggtaccttgcacgaaaaggcaagaaatgacaatcgacacgtttaactgatcgctcagcatccttctggtcagcctgaagcttctctgaagatcataccgaggaaccattcgtgttattgtgggtggtgtatgcttcaacgtgcacaaacaagagaatttcttatgtaatcttttgtttgaggactctaaccttttcttttatttggcattactgtgatgtgaccttttccttgggccgaaatattttacaggcttttctgcatgggctagattcttttcccccatattcctatatggtgttgtctgttgaggtcttgtccctcctgcctagcatatgttgagtcccaagcaaggcaacaccgcaatatgatgcgatcttggaagtgatactgatatgcgctctgcttgggtttctctaacaaattttagagtcccgctctccctccctccgttccaaaatataatttgttttagattaattacacattcattaagtaacatatgaatataatttgtatgtatattcattatcatttgaatgaatgtggacaaaaaaaagtgggctagaaggaa

SEQ ID NO: 198586 - DNA, 2841 bp, Zea Mays
atgtctattgtgccttgtgatgtgtgtgtctgtgaattctcaatggatcgtgacccatgggcaaaattccgacgcccaaacagtgagcacccagcccaatcagaggagacacgcacgcaccagcaccctggtgtggccggtgcccggcggccaaacgcgatgccatctccgtctccagccccgccgccagtgctgccgatctcggagcacgaggacgagatagtcgccgcggtggacgcgaacccagtggtggtggtcatcggcgagactggctccggcaagagcactcagctctcccagatcctccaccgccgcggatacacccgtcggggtgccatcgctgtcacccagccccgccgcgttgctgcggtttccgtttccagaagagtagctcaagagcttggtgttccacttggggatgaagttggttatgcaattcgatttgaggacagaacttcagaaagaacatgcataaaatacctcacagacggcattcttctccgtgaaagcctttcaaatcctgagttgaagcagtactcagtaatcatactggatgaagctcacgagcgtagcttaaacactgatatccttttaggtttgatgaaaagattgatcaaggaccgagcttcagatttaaaagttttaatcacctctgcgactcttgacggtttaaaagtttcaaagttcttctcaggatgccctgtgttaaacattcctggaactttattccctgtggagaaattttacagcactgatcgcccaacaaattatatagaatcttcactcagaacagctatagaaaatgattgttgtcagatatccatgccaaggaacctcctggagatgtcttaatatttatgacaggaaaggatgatattgacaagatggtatcaaaattggaggaaagaattcgaaatcttgaggagggctcctgcatcgatgctcttgtccttcctcttcatggttctttgccacctgagctgcaggttagagtatttgctccagcacctccaaactgccgacgcttcattgttgcaacaaatgttgctgaaacttcgctgactgtagatggtgtcgtgttcgtgattgattgtggttatgtaaagcagcgccaatacaatccatcaagtggaatgtattcacttgatgttgtccaaatcagcagagtgcaggctgatcagcgagcagggcgagctggtagaactcggcccggcaagtgctataggctatacccaatttccatatatcagaatgagtttcttgaggcaacagtccctgaaattcaacgctcttctcttgctggaagtgttctgtatctgaaatcgttaaatcttccagacatcaacatactgaagtttgattttctagatccaccatcacgtgagtcattagaagatgctttgaggcaattatacctcattgatgcaattgatgaaaacggacaaataacggatgttggacgagttatggcagagcttcctcttgagccgtctctttcaaggactttgattgaagcaaatgaattgggatgcctatctcaggcgttaactgttgcatcgattttgtcagcagaaataacattgcgatcagttagcaaggacgtggtggatggaaagaggaaaaggcaggagctccctgatgggtctggctggggtgaccatatacaattgcttcagatatttgaaagctgggaccaaactggctatgacacaaaatggtgctctcatcatgatttgcaggtgcggggtatgaaattgagcaaagatgtgaggaaccaactatgtcagattattcaaaaaattgcaaaaggttcaactgatgtggatgcaaggaaaagccggaagaatgaccctgattatagaaagctgaggagagctctctgcgtaggatatggtaaccagctagctgagaggatgctgcatcacaatggctaccatactgttggctataggacccaacttgtacaggtgcatccatcttctgtactggaaggcgatgagtatggaaagtttccaatgtacgttatttatcatgagctgataagtacaactcgtccatacatgagaaatgtctgcgccgtcgagcaagcctgggttcagcctatattaaagaagctcgacaaattagacataaacagattaagtggtggttcgagtgcaccgggagattctgaacttctgggagacaataagcaagtgaactcgtcaaagaatgacgtgggtgtaaaacaatcagaggtggacagtaaaatccaggcagctcgagagcggtaccttgcacgaaaaggcaagaaatgacaatcgacacgtttaactgatcgctcagcatccttctggtcagcctgaagcttctctgaagatcataccgaggaaccattcgtgttattgtgggtggtgtatgcttcaacgtgcacaaacaagagaatttcttatgtaatcttttgtttgaggactctaaccttttcttttatttggcattactgtgatgtgaccttttccttgggccgaaatattttacaggcttttctgcatgggctagattcttttcccccatattcctatatggtgttgtctgttgaggtcttgtccctcctgcctagcatatgttgagtcccaagcaaggcaacaccgcaatatgatgcgatcttggaagtgatactgatatgcgctctgcttgggtttctctaacaaattttagagtcccgctctccctccctccgttccaaaatataatttgttttagattaattacacattcattaagtaacatatgaatataatttgtatgtatattcattatcatttgaatgaatgtggacaaaaaaaagtgggctagaaggaa

SEQ ID NO: 198587 - DNA, 3945 bp, Zea Mays
atgtctattgtgccttgtgatgtgtgtgtctgtgaattctcaatggatcgtgacccatgggcaaaattccgacgcccaaacagtgagcacccagcccaatcagaggagacacgcacgcaccagcaccctggtgtggccggtgcccggcggccaaacgcgatgccatctccgtctccagccccgccgccagtgctgccgatctcggagcacgaggacgagatagtcgccgcggtggacgcgaacccagtggtggtggtcatcggcgagactggctccggcaagagcactcagctctcccagatcctccaccgccgcggatacacccgtcggggtgccatcgctgtcacccagccccgccgcgttgctgcggtttccgtttccagaagagtagctcaagagcttggtgttccacttggggatgaagttggttatgcaattcgatttgaggacagaacttcagaaagaacatgcataaaatacctcacagacggcattcttctccgtgaaagcctttcaaatcctgagttgaagcagtactcagtaatcatactggatgaagctcacgagcgtagcttaaacactgatatccttttaggtttgatgaaaagattgatcaaggaccgagcttcagatttaaaagttttaatcacctctgcgactcttgacggtttaaaagtttcaaagttcttctcaggatgccctgtgttaaacattcctggaactttattccctgtggagaaattttacagcactgatcgcccaacaaattatatagaatcttcactcagaacagctatagatatccatgccaaggaacctcctggagatgtcttaatatttatgacaggaaaggatgatattgacaagatggtatcaaaattggaggaaagaattcgaaatcttgaggagggctcctgcatcgatgctcttgtccttcctcttcatggttctttgccacctgagctgcaggttagagtatttgctccagcacctccaaactgccgacgcttcattgttgcaacaaatgttgctgaaacttcgctgactgtagatggtgtcgtgtaagaagcaaacacaatcagttcgtgattgattgtggttatgtaaagcagcgccaatacaatccatcaagtggaatgtattcacttgatgttgtccaaatcagcagagtgcaggctgatcagcgagcagggcgagctggtagaactcggcccggcaagtgctataggctatacccaatttccatatatcagaatgagtttcttgaggcaacagtccctgaaattcaacgctcttctcttgctggaagtgttctgtatctgaaatcgttaaatcttccagacatcaacatactgaagtttgattttctagatccaccatcacgtaagataaaacttcagattctttattcttatagtttcaatcattcttgtggacctgtctgtatgcacctatttgttgcctagttacttattttgtttggagttcgatggctaatttctttttttctcgaacacgcaggagagctacgtatcattatattaaaagaagaaataaacaaggtctaaaatagaccggggtacaattgacgccttacggcagcctgaacgacactaacatagactgacttatctatataactctaggctacatgagagagggaagcaacaagggaggtcaaccccttggccccggcagtctcccacagacggcgctcatccccaacatggattaggaaattagcaatattaggggaaaggccatcaaagatgcatctgttccggtgattccacaaaatttcaactgactgttttctgaagcattgcaaaattatgttattactatgaagtccagtgaagaaactacttttgtgatgactactcatgtcacttttgaattgttacacgtggttaggggaggaaacctcttggaggttgtagttctgatgggtggtatggtagggtgatgggctttgttgctggcaactcgtgatggtttttccagccttggtgaacattggcagtggctacagcttgggcaggggctggtggcagcgcaaaggagagtgagagggaactttaaggcaaaaacacttttctggttaatccatatggatacatccaaaagatgttatatatatgatccacccttcttaattcaattcaagctttcgccacaaagctctcttattctctaatactgataactttttggcggccccgaattggaggggtatggaggttgcagcatgctagccgtaccctctggttgctgcaacatgtagatgtaggtggtggctactgcctcttgggttcagctgggctgcttggcccatgggcattatgccaaaaacataaatgtgtaaaagtgtacttacagaagacataaatggccaaaagggggagctatttggtgccttgaaataaataaaataaaaaatatgttctttggcttctgcctactatttaaaatttacaaatgatttgcaggtgagtcattagaagatgctttgaggcaattatacctcattgatgcaattgatgaaaacggacaaataacggatgttggacgagttatggcagagcttcctcttgagccgtctctttcaaggactttgattgaagcaaatgaattgggatgcctatctcaggcgttaactgttgcatcgattttgtcagcagaaataacattgcgatcacaaggacgtggtggatggaaagaggaaaaggcaggagctccctgatgggtctggctggggtgaccatatacaattgcttcagatatttgaaagctgggaccaaactggctatgacacaaaatggtgctctcatcatgatttgcaggtgcggggtatgaaattgagcaaagatgtgaggaaccaactatgtcagattattcaaaaaattgcaaaaggttcaactgatgtggatgcaaggaaaagccggaagaatgaccctgattatagaaagctgaggagagctctctgcgtaggatatggtaaccagctagctgagaggatgctgcatcacaatggctaccatactgttggctataggacccaacttgtacaggtgcatccatcttctgtactggaaggcgatgagtatggaaagtttccaatgtacgttatttatcatgagctgataagtacaactcgtccatacatgagaaatgtctgcgccgtcgagcaagcctgggttcagcctatattaaagaagctcgacaaattagacataaacagattaagtggtggttcgagtgcaccgggagattctgaacttctgggagacaataagcaagtgaactcgtcaaagaatgacgtgggtgtaaaacaatcagaggtggacagtaaaatccaggcagctcgagagcggtaccttgcacgaaaaggcaagaaatgacaatcgacacgtttaactgatcgctcagcatccttctggtcagcctgaagcttctctgaagatcataccgaggaaccattcgtgttattgtgggtggtgtatgcttcaacgtgcacaaacaagagaatttcttatgtaatcttttgtttgaggactctaaccttttcttttatttggcattactgtgatgtgaccttttccttgggccgaaatattttacaggcttttctgcatgggctagattcttttcccccatattcctatatggtgttgtctgttgaggtcttgtccctcctgcctagcatatgttgagtcccaagcaaggcaacaccgcaatatgatgcgatcttggaagtgatactgatatgcgctctgcttgggtttctctaacaaattttagagtcccgctctccctccctccgttccaaaatataatttgttttagattaattacacattcattaagtaacatatgaatataatttgtatgtatattcattatcatttgaatgaatgtggacaaaaaaaagtgggctagaaggaa

SEQ ID NO: 198588 - DNA, 1502 bp, Zea Mays
atgtctattgtgccttgtgatgtgtgtgtctgtgaattctcaatggatcgtgacccatgggcaaaattccgacgcccaaacagtgagcacccagcccaatcagaggagacacgcacgcaccagcaccctggtgtggccggtgcccggcggccaaacgcgatgccatctccgtctccagccccgccgccagtgctgccgatctcggagcacgaggacgagatagtcgccgcggtggacgcgaacccagtggtggtggtcatcggcgagactggctccggcaagagcactcagctctcccagatcctccaccgccgcggatacacccgtcggggtgccatcgctgtcacccagccccgccgcgttgctgcggtttccgtttccagaagagtagctcaagagcttggtgttccacttggggatgaagttggttatgcaattcgatttgaggacagaacttcagaaagaacatgcataaaatacctcacagacggcattcttctccgtgaaagcctttcaaatcctgagttgaagcagtactcagtaatcatactggatgaagctcacgagcgtagcttaaacactgatatccttttaggtttgatgaaaagattgatcaaggaccgagcttcagatttaaaagttttaatcacctctgcgactcttgacggtttaaaagtttcaaagttcttctcaggatgccctgtgttaaacattcctggaactttattccctgtggagaaattttacagcactgatcgcccaacaaattatatagaatcttcactcagaacagctatagatatccatgccaaggaacctcctggagatgtcttaatatttatgacaggaaaggatgatattgacaagatggtatcaaaattggaggaaagaattcgaaatcttgaggagggctcctgcatcgatgctcttgtccttcctcttcatggttctttgccacctgagctgcaggttagagtatttgctccagcacctccaaactgccgacgcttcattgttgcaacaaatgttgctgaaacttcgctgactgtagatggtgtcgtgttcgtgattgattgtggttatgtaaagcagcgccaatacaatccatcaagtggaatgtattcacttgatgttgtccaaatcagcagagtgcaggctgatcagcgagcagggcgagctggtagaactcggcccggcaagtgctataggctatacccaatttccatatatcagaatgagtttcttgaggcaacagtccctgaaattcaacgctcttctcttgctggaagtgttctgtatctgaaatcgttaaatcttccagacatcaacatactgaagtttgattttctagatccaccatcacgtgagtcattagaagatgctttgaggcaattatacctcattgatgcaattgatgaaaacggacaaataacggatgttggacgagttatggcaggaatatgctacaagttcttatagcacaatggaatcgtgaatcgtag

SEQ ID NO: 198589 - DNA, 2009 bp, Zea Mays
ccggagtttgcgcgcggcctctccttggaaaatggaaatggacacggccggacatgggcatggacatggagatggaaatggatggtaatcaggtccgtgtaggtcgcatgcaagctgggcgacactgcgtgccgggcgtcctccttcctctgctccttccgatccccctcccggcgtggaggtatagcgtccgccatctcccccggccgaccggatccctcacccctctaggtacgtagctagctaggccaggttatcgtcgattcgatagattcaataagcaaaggcgatcaacaacacaattaatggggggcggcggcggcggcaactcgcgggagctggaccagacgccgacatgggcggtggcgtcggtgtgcggcgtgatcgtgctcatctccatcctgctggagaaagggctccaccacgtgggcgagttcttctcccaccgcaagaagaaggccatggtggaggccctggagaaggtgaaggcggagctcatggtgctgggcttcatctccctcctcctcgtgttcggccagaactacatcgtcaaggtgtgcatcagcaaccacgccgccaacactatgctcccctgcaagctcaaggaggccgccgtccctggcaagaagaaggccgccgcagcagcagagcatctcgggggcgtgctggactggccgccgccctactacgcgcacaacggcaggatgctggcggaggcgagcatggcgaccaagtgccccgaggggaaggtgtcgctcatctccatcaacgccttgcaccagctgcacatcttcatcttcttcctcgccgtcttccacgtctcctacagcgccatcaccatggcgctcggcagggccaaggagtgggagaaggaagcagcagggcaggactacgagttctctaacgaccctacgcggttcaggttcacccacgagacttcgtttgtgaggcagcatatgaatgtgctcaacaagttcccagcatccttctacatcagcaacttcttccggcagttcttcaggtccgtcaggcgggcagactactgcgcgctgcgccacagctttgtcaacgtccatctggcccctggcaccaagtttgatttccaaaagtacatcaagcggtctctggaggacgacttcaaggtgatcgtggggatcagccctcctttgtgggcttctgctctcatcttcctattcctcaatgtcaatggatggcacaccatgctctggatctccatcatgccggtggtgatcatcctgtccgtggggacgaagctgcagggcatcatctgccgcatggcgatcgacatcacggagcggcacgccgtgatccagggcatcccgctggtgcaggtcagcgactcctacttctggttcgcacgcccaaccttcgtgctcttcctcatccacttcaccctcttccagaatggcttccagatcatctacttcctctggattctgtatgagtacgggatggactcgtgcttcaacgactccgaagaattcgtctttgcacgtctctgccttggggtggttgttcaggtgctgtgcagctacgtgacgctccctctgtacgcgctcgtctcccagatgggctccaccatgaagcagtccatcttcgacgagcagacctccaaggcgctcaagaactggcgcgccggcgccaagaagaaggcccccaccggctccaagcacggcggcggctccccaaccgccgccggcagccccaccaaggccgacggcgacgcgtaggcgtagctagcagagggtcatcgatcgattgatcgatcgatccagctgttcgttctacatataacctgttacttatttgtatgtaattgtaccaatagcaatcgacacgcgtgcgccgcatgcaatgtaccatgaaactgctgatagctagagagcgacatttttcttgtttggttcgtttctgcaatgctcctactatgtaattgtcagttatcttaaatctctatccttagttctctagtggagcggttgttggag

SEQ ID NO: 198590 - DNA, 2399 bp, Zea Mays
ggattgagagaaaaattagtttatttccttcgtaatccctgtaatgctcttgtgaccaaatcaaaagatagaaataagaaaaaacaacagtccgacggtgggcggtgggcctgcgatcactcgcaagtactagtacgtaggcaacgcgaagggtggaggtagaagcctgcgtctctttctcaacctcacctgctcccaaacccccgagctgcacagctcaattctgtttatgtaatctcaactcactctcatgccactgtcagttgccatccctataaaatgaacggctccgttttattgcgctttccggcacgggcagctccgcagcggggcagggcagggcaggctgtggacgccgccgcacttgctctgcgaactgcgacggaccagccgatgcagccgtcttcctgaattgttgacgacttctcagatccaggtcctgggggtccgggccgtggaccactactccgcctctgtctcccaggcagatgaagcctcggcacgagcgcagcaggtccaccacgtccacgttcgtctcccagggtcaggacggtggcgacgccaacggcagcgcgacggaccaggaggtgatggcgcagccggaaaatggcgtccggccgccgctgctgcggacggacatggaggagccgccgcgggtgagcgacggaagcgccaccaaggagcgtgtgcggctcctggagcgggaggtggcgtcggcgaagcagagggagatgaagatgctggagtcgctggtccagcagaccaaggagctggagcaggccaagatcgcgctcgaggaggcctcgctcgaggtcgccacgctgcgtcagcagcagcagcagcagggcgagggcggcgccgctgctgagccggccgtgcaggcgcagcagtggagcgtcatggacctcatgttcggcggcgtcgacgaggagatcaacgggctgagggccaagctccgcgcggcgcagcaggccgaggagcggagccggaaggcggccgacgagctcgccgcggcgctgtccgcggtcaccgtggaggcgaagcaggtcaaggcgtggctctccggcgcgcaggccgaggtggaggccagcaacgccgaggccgacaggctccggggcctgctccagggcgccgaggcggagctgtggtctgccaccgagcaggtcggcgcgctcacgtccaactggaaggacgccgcggccgggtggcgcgccagggagaaggcacttgtggcgcgcgcgcgcgccgccgaggaggacgccgccgccgcgcggagggacaacgccggcctgcgccgcgcgctggagcaggcggtcgaggaggccaacgcggccgccgaggcgctcgaggccgccggcgccgacaacgccggcctgcaggaggccgtcgcggagaaagagcgcgccctggaggccctgcgacgggacaacgagggcctcagggccagcgaggccgcggccagggcgcgcgccgaggagctccagggccagctcgcggcgaaagagcgggagattccgcttgtggagaagtggagacgcgaagacgcgcagggcaagctggtgagctccggaatgttcctgggatccgggcggctggtcccgggacggaaggaccggatgttcgcgtcgctgagcaacatcgcggagctcaagtcggcggcggcggccgcggcggccatggacgactacggctacgagttcgaccacctggacgtggggcagccctgcgacgacgccacggagcacaagatcaagaggcggtcgatcctgcgcaaggtcggagatctcttcaggaggaggaggagcccgaacctcgcgccggtgctgcatgaccactactagatgcctgcctatgcacgtagaaccctgacagggcctgacagtagatgttcgatcgcgaggtcgacgatggtttcttgcagttgcaggacaagggaaaagtaggcagtacagcagtgcagattgatgtagcagggagttggaaggatcagtgtgttgtggtgacggttttagttacgcgtgtcgattactcgaacttttcccttctttttggtttaggtgtcatcagtgcacttgagtagtgccacgcactggaacagcgttgatcagcagttacagatacgcgcggtttgagcggccataattactgtacggatcactaccccacaatgatcagcagttagaggtcgggtaagctgtcagatctgctgttgtttctagctgtaagcaataaatccgggtgtcgctatcatgatttcagctgccgccgggtgctgcctgctgtgccagcagttgggcttgtgtagactgtagaaaagcagttggacttgtgcacgttgtattgctccgagagaaggccatacatccgtggtctggtttgattccatttgtgctgatggg

SEQ ID NO: 198591 - DNA, 1505 bp, Zea Mays
ctaggtagccgggtgctttccttcgtcagttccgggcttccggccttctatggagaagcttccttcagtgagtcctccctttccgtttaaggcagcaagcaggagcagacaggaggcgccgagagcccagcgtcggagatctccgccgccatggagacgctggccagcgccatgcggcgcgagaaccgccggtccaaggccccgccctcctcctctgcttcctccgccctcgcctcgggcagggtccctctcgtcatggccttcctctcctgcctcgcctggctctacgtcgccggccgtttgtggcaggacgcgcagacccgggcgatcctgtccggcctcctcgagaagagctctaccagcgtcccgaaggtgctctcggtggaggacaagcttaggaaccttgggtgcaaggcgattggaaggaaaattgttgaggcggagatggacctgaccaaggccaagagcgaggggtacctgtgggggaacaggactgcagctgtggactccgacaagaagcagcagcttcttgccgtcattggagtttacactgggtttggctcccgtctcaagaggaacgtcttccgtggctcctggatgccaagaggtgatgctctgaagaagcttgaggaaaagggtgtagctattcgttttgttattgtgcaaatcgaggtgatagcttggaccgtaatattgatgatgaaaatcggcagacaaaggacttcttgattcttgaaagtcatgaagaggctgcagaagaattaccgagcaaagcaaaaattttcttcagtgctgcagttgaagcctgggatgcagaattttatgtcaaagttgaagataacattaatcttgacttagctgggttaattgagatgctcgaaggccgtcgaggtagccaaggattgtacatgggttgtatgaaatcagggatggtcataagtgaagagggccaacaatggtatgaacctgagtggtggaaatttggagattcaaaaacgtattttcgacacgcttctggttctttgtttatcctctcaaaaaatttggctcgctacatcaacataaatagtgcgtcactgcagagttatgcacacgatgatatatcagtaggttcatggatgatgggactgaatgcaacttacgtggatgatgaccggttgtgctgcagcagttccagacaagagaaaatctgttccaatgcttgagcggaaggcgtggctgctggcctgttgctgtacatcctgatgaagattttgcacacctgtcattttgtatacactgctttcgtgaaccggaaaaggctactatccagatagaaacggcttgcaccaaaatttaggaacttccatcaaaaagaaaaaaaaagaacaattttttccatccatgagtattgttggaactaatattgggtctgtttgtttcggcttctggcagcttctggccaccaaaagctgctacagactgtcaaccgctcagcttttcagccagcttctataaaattcgtt

SEQ ID NO: 198592 - DNA, 1217 bp, Zea Mays
tatgcaattgataatatgcaatctgctagcatggaggaagccaagaaaaatggtatccagcagctagctgaagaaacaactctggtgcagtttatatttgggggttatctgcgatctaagatgtaattcgtacgagcgtgcccaaaagaagttgactatattagaggccccaaatatattgacaattgcactgaaaagatatcagtctggtgttcttggcaagatcagcaaggctgtcaagttcccagagcacttaaatttgtcccagtatatgtgtagaacagatgattctagtcctgtgtacagcttatatgctgtggttgtccaccgcaatgttaggaatgcaactgtgtctggtcattatgtatgttatgtcaaggattcccaagggaagtggcacgagatggacgataacaaggtgaaacctgtgtctgtccaaaaagtcctgtcaagatgtgcatacatgctgctctatgcaagatgttcaccgcgtgccccaacctctgcacgcgctaagaaacccaagcagatggcacgttcaggatcattcccttcgggaggaggcaggtaccggagcaggcaccaaggtgggcaactgtctaaggacgatgcggtccacaaccttacatacacattgggtacatctgacacgtcatcgtacccggtagcaccctgctttagcggaagcaacagctcctcgctgttcagcagctctgatgcagggtcaagctgcactttcagcagcgacagcactgacagtgccgggaaatccagcatggagtatgaccgcatttttggaacctcgggctatatgtgcccggtggtaagctcagcggttgtgcccgagggagacaatcagagttacttgcggcaagggtctagctggaaccctagctcttcgggtcatgacatggatgaggcaggtaagtttgcgcggcagtaccagggagggtatcaggctggcggaggggctcccgtaggcggttgggagaccccatccttctcttacgccgatcaaggtaaatatcagggcagtagtagtcgtcgtaaccgtagtttcggtagtagctgtaaattaacacagcagcggaggagtacagggcgggcgtttttttatataaggtcgattagggagaggatacaagggggcttgggctcgggcttgggttcgtagagagattaattattcatcatgtatgattacgccattgcaattg

SEQ ID NO: 198593 - DNA, 1315 bp, Zea Mays
ctaggagtagacggatcggagacgagcactctatataccgtactagccagagcgccactcattgtgctatcgtcggttcgtcgggcgtagcggcagcgatgatattttagtcgtactcgtacagaagccacagccctctgctagctagctagctcctgctagaatggaaagtgcaggaggggaagctcggccggtgctgccgccgccgccgccgccggtgcaagagctcgccggcgcagcgaacgacgtgccagctcggtacgtcgcgcgcgcaggcaacgagcccaaggtcacggtaaccgcgccggtcccggtcatcgacctcgcccggctgtgccagccgggcggcggcgccgacgaggcctcgaagctccggctggcgctcgagtcctggggtctcttcctggtgaccaaccacggcatcgaggccactctcatggacgccatgatggacgcgtcgagggagttcttcaggcagccgctccaggagaagcagaagcacagcaacatgatcgacggcaagcacttccagctccaagggtacgggaacgaccgggtggcgtcggaggaccaggtcctggactggtgcgaccgcctttacctcttggtggagcctcaggaggacaggagccttgacctatggcccgcatgtctaagggacgttctgcacgatttcaccacagagtgcacgagagtgaaggactgcctgcttcgagaaatggcgaaggcgctagatgagctcggcgacgacgacgactacttcatcgaccagttcggcgacagggccgacacccatgccaggttttccgggacggagcctggtacgacgtgcgcaccagacctcacaccctgctcgtcaatctaggagaccaaatagagataataagcaatgggatcttcaagagcccagtgcaccgggttgtaacaaacgcggagaaagagaggctatcagtggttctgttctattctatagatcctgagagagaaatccggcccgctgacaaactgatagacgagaaccatccagcactatacaagaaggtgaaagtcaaagaatatactgctggactctacgaacatttctctcgagggaaattggttaaagagactgcaaagatatagcttgttcgctttggattaaatccatggactaatccttagagacaaaaacactgtataagtagtaaaagtcggtacgaattaaagctcaagctagtcgtatctatgtaatgaataagggtgaaacctttgcgatcctagataataaatgaaattaatttttaataaaataaagtgtatatagttcgttgcagct

SEQ ID NO: 198594 - DNA, 1331 bp, Zea Mays
ctaggagtagacggatcggagacgagcactctatataccgtactagccagagcgccactcattgtgctatcgtcggttcgtcgggcgtagcggcagcgatgatattttagtcgtactcgtacagaagccacagccctctgctagctagctagctcctgctagaatggaaagtgcaggaggggaagctcggccggtgctgccgccgccgccgccgccggtgcaagagctcgccggcgcagcgaacgacgtgccagctcggtacgtcgcgcgcgcaggcaacgagcccaaggtcacggtaaccgcgccggtcccggtcatcgacctcgcccggctgtgccagccgggcggcggcgccgacgaggcctcgaagctccggctggcgctcgagtcctggggtctcttcctggtgaccaaccacggcatcgaggccactctcatggacgccatgatggacgcgtcgagggagttcttcaggcagccgctccaggagaagcagaagcacagcaacatgatcgacggcaagcacttccagctccaagggtacgggaacgaccgggtggcgtcggaggaccaggtcctggactggtgcgaccgcctttacctcttggtggagcctcaggaggacaggagccttgacctatggcccgcatgtctaagggacgttctgcacgatttcaccacagagtgcacgagagtgaaggactgcctgcttcgagaaatggcgaaggcgctagatgagctcggcgacgacgacgactacttcatcgaccagttcggcgacagggccgacacccatgccagcgtcggcgggcttcaggttttccgggacggagcctggtacgacgtgcgcaccagacctcacaccctgctcgtcaatctaggagaccaaatagagataataagcaatgggatcttcaagagcccagtgcaccgggttgtaacaaacgcggagaaagagaggctatcagtggttctgttctattctatagatcctgagagagaaatccggcccgctgacaaactgatagacgagaaccatccagcactatacaagaaggtgaaagtcaaagaatatactgctggactctacgaacatttctctcgagggaaattggttaaagagactgcaaagatatagcttgttcgctttggattaaatccatggactaatccttagagacaaaaacactgtataagtagtaaaagtcggtacgaattaaagctcaagctagtcgtatctatgtaatgaataagggtgaaacctttgcgatcctagataataaatgaaattaatttttaataaaataaagtgtatatagttcgttgcagct

SEQ ID NO: 198595 - DNA, 824 bp, Zea Mays
tgacgtgacgcgatccatccttgctgaacgtgctgcgcgtgacgatcgaggtgccggacgccggcgaggtgaacttccactgcacgcacctggaccacctggacgaggggtggaggatgaagcaggtggacgccatcatgcgctccggcggcgacggcccgcacatcctcgccggcggcctcaacgcgctcgacggcaccgactactccgccgaccgatgggccgacatcgtcaagtactacgaggagatcggcaagccgacgcccaaggtggaggtgatgcagtacctcaaggcgaagcagtacgtcgacgccaaggacttcgcgggagaatgcgaggcggtggtggtcgtggccaaagggcaagacgtgcaggggacgtgcaagtacggcacgagggtggactacatcatggcgtcgcccaactgcccctacaagttcgtgcccggatcctacacggtcgtctcctccaaagggacgtcggaccatcacgtcgtccgggtcgacgtcgccgtacctcacgccagagagcccgatgacgccgaggccaccgcgaacgggcagcgcagcagagtggtcaagatgaccaagaagagctcgagaaaggggatatggggagctaaatgaatgaacagggtagttttgtgtgtgtgtgtgtttttttctctcaaagtttcttttggccgcgttctttctttttttatctgggggtgatgtggagggtgggttgcttggaattgtgtatatgcctgtggtggttgctttgaggccgaaggtgcctggtttgcagtggctgctgcgatagatgtggccaacgagtggaaa

SEQ ID NO: 198596 - DNA, 1185 bp, Zea Mays
gttccaagctcctagtgcctataaacaaagaatgaagagcaacacctctgcttaccaaaacagatgtgtcttgcgcctcattctctaccatgtatgtgtgaacctgcctgtcatgattttctcgtatcctgccttcaaattcatgggtctcaggagctctcttcctttgccacattggtcggttgttgtatctcaagttcttttctactttgtccttgaggattttatattctattgggggcacagggcattgcatacgaaatggctatacaaacacgttcacagcgtccaccatgagtacgccacaccctttggtttaacatcggaatatgcccacccagctgaaattttgttcctgggattcgccacagttgttggtcctgctcttactggccctcatctcttcaccctgtggctgtggatggtgttgagggttttggagacagttgaagctcacagcggctatcacttcccatggagcccatcaaatttcctgccgctgtatggcgggtaagtaagctagatcattgttttccttccccccccttaaaagagattgtgcttgtttatttgaagctgaacgtctggccatttgctgagcttttgtcatggtgaatagctcggacttccatgactaccatcaccgtgtgctgtacacaaagtcagggaactatgcctcaacatttgtttacatggactggttgttcggcacggacaaggattatcgcaaggcaaagaccattgaggagaaagaagggaaaaatctgtagattgtggaagctgctcagcaagactggcgatagagtttcactcatggaaggagatatggatgcaccctagaaacagtcagtttatctcctgaccatcgatactataggttgagatattgatttcctgtgtttgctatgatcaagaatgaggccctggtggccctggtctgtcatgaactgaatttgatgatttgtcatctcctcctggtggtttgctttgcgtttctttcgtgactcgacgggatgtatacatatggaatggcctggcagcagtaataaccatctgaattgagtcgtcagcgatggtgggggtagctttgcaccctagaaactttcctctgcacgcttgtgtattttgttggtaatcgattccggaattgcattgttcctcgtacacgcgcacacaattgatctg

SEQ ID NO: 198597 - DNA, 2323 bp, Zea Mays
ggccgcgcgacaaggcgtacggggagagggaagaggggtggccggtctcgccggcgtcgattcgccgccgtgtggcgatccctgcacggacgtcggtcggtcgccatggagacggcgcatgagatggtaccgcgtgaagattagtgccctgtgggaggatgacgagaatcgagcacccatctcgccggccagggtcacgcaatacgaaggactgacgttcaagattcaagtgatgatacagatttgatccctgtccatgaatttaggatcccacatagagcactcctaggcttacactcgtattgccctgtccattttgacgcattacactcggcgctagtggatctgacaatacacattgtctacctgaaagctgctgtgactaaatcatcactgaaggtacacagccgctggaacaaagttttggctcaaagtcatatggtattgtgaaagcatcactaatatctagggaaatacttcttgaagaagtgaagaagatcagtaatgctgttggtagcactcttgaggatttggatcgcactgacttaacccttggtaaatatgagacagttcaaccatcaaagtcagcttcgcccagttacagttatgggcagggtacgcccacaaagtgtagtccccagatgactggcatcttacgtgattttcttgagagttctggggttgtggttggaagcactgatgatatcttgctgtatactctatctgaggaagaattgtttgaactatttcaaattgtcagcagccaactctcatttatatggaatgagttcttgaaattccataggacacataaagacaaggtaatgggttatttgcatgatatgtgggatattaatcggaaagcagaatggtcaatatggattattcattcaaagattgagattccacatcgctatttgagaagcatgaatgacgactctcctcgccatttgattcggatttccagttcaagaaagcctatacaaaattcgatgtcacaggctgaactgcacaggaaaagtatagcacaaatgaagcatgtcatggttattccgcaacattgttctagcaaggattttctaacagatgcttcagaaccagctcgtactattgtgccaccacctctactacaaggacaatcattgggggaagaaacttgtggtttcaagagtggacgcattttacgagctgtcatttttgtgcatggatttcaggggcatcatctggatttacgtcttgttaagaaccaatggcttttgcttgatcctggggctgagtgcctattgtctcagataaatgaggatagaacgtctggggattttaaagaaatgggtagaaggctcgctaatgaagtagtggcattcctcaaaaggaaggtggacaagtactccagaaatggaggttgcaaagagattaagctcagttttgtcggtcattctattgggaacattatcctcagaagtgccctcacagaacccaaattgcagccatttttgaagaacctgtatacatacatgtccatatcgggacctcacttgggttactggtacagcccaaattctctgttcaactctggcctctggctcatgaaacggctcaagggcatgcagtgcatgcatcagctcactttcagtgatgaccacgacccacagaacacgttcttttacaagctctgcaagctgaagacactggagaacttcaagaacatcatcctggtatcgtcaccgcaggatggttacgtcccataccattcagcaagaatcgacctctgccacgcctcgtcgtcagataactcgaaacgcgggcaggtgttcactgagatgctgaacaattgcttggaccagatccgggcaccaacgtcggaaactcgggtattcatgcgttgtgacgtgatattcgaccagtccgcccaaggacggaacctgaacaccatgatcggcagagctgcgcacatagagttcctggagaacgacatctatgcaaggttcatcatgtggtccttcccagagttgtttcggtgatgatggtgatgatgtgctcctggacctggagatgatctgaatacgtatcacacaagtcattatccattacagtatataaccgcagcattcgtgttgtttttaatgaattttagatgcgagacacaattttttgctctgttgccccgtcacctagcaatcgcagagcataaaattcatctggacagacaaattatggtttggtatcaacaactagtccgattgggatatgtacaaatacgagtgatgtttgtgaaacaaatggtggcgtgtcatgtgttgtgagaataatggggtgtttgaat

SEQ ID NO: 198598 - DNA, 2636 bp, Zea Mays
ggccggtctcgccggcgtcgattcgccgccgtgtggcgatccctgcacggacgtcggtcggtcgccatggagacggcgcatgaggtggccatttacatcgaccgcttccacaacctggacctgttccagcaaggatggtaccgcgtgaagattagtgccctgtgggaggatgacgagaatcgagcacccatctcgccggccagggtcacgcaatacgaagctattgatattggtgtgaagagctcatttggcttttggaaaatagacgatgttgacaatagcttctacacacagccgtttcttgttaaatattctaggcaagatatttatctatcagttatggtgtccttctacatacccaacagcgaagacgagggtccagcaacttcttctgttatattgaagttcgagctcatatatatcccaacactggggaatgcatggactgacgttcaagattcaagtgatgatacagatttgatccctgtccatgaatttaggatcccacatagagcactcctaggcttacactcgtattgccctgtccattttgacgcattacactcggcgctagtggatctgacaatacacattgtctacctgaaagctgctgtgactaaatcatcactgaagccgctggaacaaagttttggctcaaagtcatatggtattgtgaaagcatcactaatatctagggaaatacttcttgaagaagtgaagaagatcagtaatgctgttggtagcactcttgaggatttggatcgcactgacttaacccttggtaaatatgagacagttcaaccatcaaagtcagcttcgcccagttacagttatgggcagggtacgcccacaaagtgtagtccccagatgactggcatcttacgtgattttcttgagagttctggggttgtggttggaagcactgatgatatcttgctgtatactctatctgaggaagaattgtttgaactatttcaaattgtcagcagccaactctcatttatatggaatgagttcttgaaattccataggacacataaagacaaggtaatgggttatttgcatgatatgtgggatattaatcggaaagcagaatggtcaatatggattattcattcaaagattgagattccacatcgctatttgagaagcatgaatgacgactctcctcgccatttgattcggatttccagttcaagaaaggtccatcatgatcctatacaaaattcgatgtcacaggctgaactgcacaggaaaagtatagcacaaatgaagattaacacgccgtctgttcaagatatgcatatttatgctgatccttcatgtatacctgttgtccgcatagagcagcatgtcatggttattccgcaacattgttctagcaaggattttctaacagatgcttcagaaccagctcgtactattgtgccaccacctctactacaaggacaatcattgggggaagaaacttgtggtttcaagagtggacgcattttacgagctgtcatttttgtgcatggatttcaggggcatcatctggatttacgtcttgttaagaaccaatggcttttgcttgatcctggggctgagtgcctattgtctcagataaatgaggatagaacgtctggggattttaaagaaatgggtagaaggctcgctaatgaagtagtggcattcctcaaaaggaaggtggacaagtactccagaaatggaggttgcaaagagattaagctcagttttgtcggtcattctattgggaacattatcctcagaagtgccctcacagaacccaaattgcagccatttttgaagaacctgtatacatacatgtccatatcgggacctcacttgggttactggtacagcccaaattctctgttcaactctggcctctggctcatgaaacggctcaagggcatgcagtgcatgcatcagctcactttcagtgatgaccacgacccacagaacacgttcttttacaagctctgcaagctgaagacactggagaacttcaagaacatcatcctggtatcgtcaccgcaggatggttacgtcccataccattcagcaagaatcgacctctgccacgcctcgtcgtcagataactcgaaacgcgggcaggtgttcactgagatgctgaacaattgcttggaccagatccgggcaccaacgtcggaaactcgggtattcatgcgttgtgacgtgatattcgaccagtccgcccaaggacggaacctgaacaccatgatcggcagagctgcgcacatagagttcctggagaacgacatctatgcaaggttcatcatgtggtccttcccagagttgtttcggtgatgatggtgatgatgtgctcctggacctggagatgatctgaatacgtatcacacaagtcattatccattacagtatataaccgcagcattcgtgttgtttttaatgaattttagatgcgagacacaattttttgctctgttgccccgtcacctagcaatcgcagagcataaaattcatctggacagacaaattatggtttggtatcaacaactagtccgattgggatatgtacaaatacgagtgatgtttgtgaaacaaatggtggcgtgtcatgtgttgtgagaataatggggtgtttgaat

SEQ ID NO: 198599 - DNA, 2633 bp, Zea Mays
ccggcgtcgattcgccgccgtgtggcgatccctgcacggacgtcggtcggtcgccatggagacggcgcatgaggtggccatttacatcgaccgcttccacaacctggacctgttccagcaaggatggtaccgcgtgaagattagtgccctgtgggaggatgacgagaatcgagcacccatctcgccggccagggtcacgcaatacgaagctattgatattggtgtgaagagctcatttggcttttggaaaatagacgatgttgacaatagcttctacacacagccgtttcttgttaaatattctaggcaagatatttatctatcagttatggtgtccttctacatacccaacagcgaagacgagggtccagcaacttcttctgttatattgaagttcgagctcatatatatcccaacactggggaatgcatggactgacgttcaagattcaagtgatgatacagatttgatccctgtccatgaatttaggatcccacatagagcactcctaggcttacactcgtattgccctgtccattttgacgcattacactcggcgctagtggatctgacaatacacattgtctacctgaaagctgctgtgactaaatcatcactgaaggtacacagccgctggaacaaagttttggctcaaagtcatatggtattgtgaaagcatcactaatatctagggaaatacttcttgaagaagtgaagaagatcagtaatgctgttggtagcactcttgaggatttggatcgcactgacttaacccttggtaaatatgagacagttcaaccatcaaagtcagcttcgcccagttacagttatgggcagggtacgcccacaaagtgtagtccccagatgactggcatcttacgtgattttcttgagagttctggggttgtggttggaagcactgatgatatcttgctgtatactctatctgaggaagaattgtttgaactatttcaaattgtcagcagccaactctcatttatatggaatgagttcttgaaattccataggacacataaagacaaggtaatgggttatttgcatgatatgtgggatattaatcggaaagcagaatggtcaatatggattattcattcaaagattgagattccacatcgctatttgagaagcatgaatgacgactctcctcgccatttgattcggatttccagttcaagaaaggtccatcatgatcctatacaaaattcgatgtcacaggctgaactgcacaggaaaagtatagcacaaatgaagattaacacgccgtctgttcaagatatgcatatttatgctgatccttcatgtatacctgttgtccgcatagagcagcatgtcatggttattccgcaacattgttctagcaaggattttctaacagatgcttcagaaccagctcgtactattgtgccaccacctctactacaaggacaatcattgggggaagaaacttgtggtttcaagagtggacgcattttacgagctgtcatttttgtgcatggatttcaggggcatcatctggatttacgtcttgttaagaaccaatggcttttgcttgatcctggggctgagtgcctattgtctcagataaatgaggatagaacgtctggggattttaaagaaatgggtagaaggctcgctaatgaagtagtggcattcctcaaaaggaaggtggacaagtactccagaaatggaggttgcaaagagattaagctcagttttgtcggtcattctattgggaacattatcctcagaagtgccctcacagaacccaaattgcagccatttttgaagaacctgtatacatacatgtccatatcgggacctcacttgggttactggtacagcccaaattctctgttcaactctggcctctggctcatgaaacggctcaagggcatgcagtgcatgcatcagctcactttcagtgatgaccacgacccacagaacacgttcttttacaagctctgcaagctgaagacactggagaacttcaagaacatcatcctggtatcgtcaccgcaggatggttacgtcccataccattcagcaagaatcgacctctgccacgcctcgtcgtcagataactcgaaacgcgggcaggtgttcactgagatgctgaacaattgcttggaccagatccgggcaccaacgtcggaaactcgggtattcatgcgttgtgacgtgatattcgaccagtccgcccaaggacggaacctgaacaccatgatcggcagagctgcgcacatagagttcctggagaacgacatctatgcaaggttcatcatgtggtccttcccagagttgtttcggtgatgatggtgatgatgtgctcctggacctggagatgatctgaatacgtatcacacaagtcattatccattacagtatataaccgcagcattcgtgttgtttttaatgaattttagatgcgagacacaattttttgctctgttgccccgtcacctagcaatcgcagagcataaaattcatctggacagacaaattatggtttggtatcaacaactagtccgattgggatatgtacaaatacgagtgatgtttgtgaaacaaatggtggcgtgtcatgtgttgtgagaataatggggtgtttgaat

SEQ ID NO: 198600 - DNA, 3130 bp, Zea Mays
ctattttatactgttcgtagagtgaaatttggtaaaattagtacaggagaggagtgagggagaaaaagaaaagaaacctaacatctgatgtggagacaaacccctcgccaaacctccattcacggaccacattaacgttagttattattagcctattatagaggaggattacagctcatcattggtgagtggaaaaacgattaggaaagcaggagaaggggagtggcggagtgcatagcaattagcaacatcatccagcggacagcattcctaaccctcctttctatctcacccgtttcttctctgcaagtagtactatttctccgtcatactgaagctctgctgtgtgtgcgcgcgcgcgttggaggaaggaggaagtaagcctaggaaagccatcgcccaccttctcgctacccaccaaacgccgcttggtaggagaagaattgcccgaaaagcttcccgttggccgggatctcttcttctttaattacccctggggattgcctggctcattagaccagacagggggagagagggagcgagctggccggctaggccaggagaggagaggggagacacagacaacgagcgctcgctgggaagaggaagaggttcgtggggacgcagggatccagaggaagatgaggcggtgggtcttagccatcgccattcccattctcgccgctgcttcggcggcggcgctgttccttggggctgaggcccaggcggtccagcagggccaccagacagagaggatctcaggtgagaccgtgagagagagagagagagagagagagagagagaaagagatgatgggcctcttttccttgcgtttgttcccgtcttgtttctcatcttgataggcacatccttgtcagtttgtagaactcaagctgcttggtctgtctagttgggtgtcatttgctttttgctagtagtattaattgtgtaaagctagagttttggcatcggttaatgtggcagtgcacctgtcgggacctctgaatcctaaattcatagaactttaatcctgatttcgtatgctaataagttacagagaaactggatgcaggtttatcctgtggtgttctgttcgtagcagtttgatccggttctcgtgaaatttagcagaaaccacttttttacatgctgctccatgaatctgttgtgaaaaatgtagaatgcaatatggtacttgttccctatgttctatcaccaacgcctacaatttatgtacctctttcacggtgtgttttgttgctagttcttcaagcttggacaagtagaatcctatgtgccgtttggttcacgaaagtaatgattcacactctgattgccagtgataacaagtttgaataagacaatgtcagtttctagtgtactatctgactacggttagacttaaccaaacatggtttaacgttatcggttatcattcacgttacaaacatgtgaactaaaaagtaccctactgtcagttcaacataggtgcaaaaatcactttacacctataaggcttctacctggcacactttcattctatcattgtacttttatgatcttgtgatccctagcatggttctaaggcccaagtatattcttttccctacctttgtgcaaagcctgtaatgatgtggccgataaaattcaggaagtgctggtgacgtgttggaagataaccctgttgggaggctcaaggtttacgtgtatgatctccccagtaaatacaacaagaagctggtgaagaaggatcctaggtgcctgaaccacatgtttgctgctgagatcttcatgcaccggttcctgttgtcaagtgctgtccgaacatttaatcctgaagaagcagattggttctacactcccgtatacgccacatgtgatctgactccttcgggtcttccccttcccttcaaatctccacgcatgatgcgcagcgcaattgagctgattgccacgaactggccttactggaacagatcagagggtgcagatcatttctttgtcacgccacatgactttggtgcttgcttccattatcaggaagagaaagcaatcgggcggggaatccttcccttgcttcagcgtgctacactggttcagacctttggacagaagaaccatgtctgcctgaagggcgggtccatcacaatcccaccatttgcacctccccagaaaatgcaggctcaccttatccccttggacacccctcggtctatcttcgtgtacttccgtggtctgttctacgacaccagcaacgatcctgagggtggttactatgcgagaggtgctcgtgcatcagtctgggagaacttcaagaacaacccgctcttcgacatctcgactgatcacccaccgacttactacgaagacatgcagcgttcagtgttctgcctgtgccccttgggctgggctccatggagccccaggctggtggaagctgtggttttcggctgcatcccggtgatcatcgccgacgacattgtcctgccctttgcggacgccatcccgtgggaggagattggtgtgtttgtcgccgaggaggatgtcccgaagctggacagcatcctgacgtccatcccaacagatgttatactgaggaagcagcgtctcctcgcgaacccggccatgaagcaggccatgctgttcccccagcctgctcaggcgggagatgcattccaccagatcctaaacgggctcgcgcgcaagctcccacatggtgacaacgtcttcttgaagcccggggagagggtcctgaactggaccgccggaccgccaggcgacctgaagccttggtagcatctgcctgcctagaacctttttgtgaaaaaaagcaagaacgagaacatggtgatatacatacatgcgcctttaagttaccatggttgtgtacttgtatagtgctgcattttgccctcctgatcgagctgacaattgccatatatacagcacatggaccgccatctttcatcatctaatgcaaagggtagcatgtcgctgcagtctttgtctgaatgttgctgagttctcaaggaactgacgcgagcacataatcaacatcagcacgttcctttttttattttgtggcccaggaggtgtacgagctaacaatttgaaatggccaggttgtagg

SEQ ID NO: 198601 - DNA, 1738 bp, Zea Mays
gtttgatccggttctcgtgaaatttagcagaaaccacttttttacatgctgctccatgaatctgttgtgaaaaatgtagaatgcaatatggaagtgctggtgacgtgttggaagataaccctgttgggaggctcaaggtttacgtgtatgatctccccagtaaatacaacaagaagctggtgaagaaggatcctaggtgcctgaaccacatgtttgctgctgagatcttcatgcaccggttcctgttgtcaagtgctgtccgaacatttaatcctgaagaagcagattggttctacactcccgtatacgccacatgtgatctgactccttcgggtcttccccttcccttcaaatctccacgcatgatgcgcagcgcaattgagctgattgccacgaactggccttactggaacagatcagagggtgcagatcatttctttgtcacgccacatgactttggtgcttgcttccattatcaggaagagaaagcaatcgggcggggaatccttcccttgcttcagcgtgctacactggttcagacctttggacagaagaaccatgtctgcctgaagggcgggtccatcacaatcccaccatttgcacctccccagaaaatgcaggctcaccttatccccttggacacccctcggtctatcttcgtgtacttccgtggtctgttctacgacaccagcaacgatcctgagggtggttactatgcgagaggtgctcgtgcatcagtctgggagaacttcaagaacaacccgctcttcgacatctcgactgatcacccaccgacttactacgaagacatgcagcgttcagtgttctgcctgtgccccttgggctgggctccatggagccccaggctggtggaagctgtggttttcggctgcatcccggtgatcatcgccgacgacattgtcctgccctttgcggacgccatcccgtgggaggagattggtgtgtttgtcgccgaggaggatgtcccgaagctggacagcatcctgacgtccatcccaacagatgttatactgaggaagcagcgtctcctcgcgaacccggccatgaagcaggccatgctgttcccccagcctgctcaggcgggagatgcattccaccagatcctaaacgggctcgcgcgcaagctcccacatggtgacaacgtcttcttgaagcccggggagagggtcctgaactggaccgccggaccgccaggcgacctgaagccttggtagcatctgcctgcctagaacctttttgtgaaaaaaagcaagaacgagaacatggtgatatacatacatgcgcctttaagttaccatggttgtgtacttgtatagtgctgcattttggtatgttcttctttccctgtagttgttataccatatatcttcatttatccctctcttcttttctgccctttctcactagggtatgagaatgtcagccttgtcaatcatgcggataccatagtcgaaatctacaccattttactcactctgaatgttcactgccggacagccctcctgatcgagctgacaattgccatatatacagcacatggaccgccatctttcatcatctaatgcaaagggtagcatgtcgctgcagtctttgtctgaatgttgctgagttctcaaggaactgacgcgagcacataatcaacatcagcacgttcctttttttattttgtggcccaggaggtgtacgagctaacaatttgaaatggccaggttgtagg

SEQ ID NO: 198602 - DNA, 2060 bp, Zea Mays
cgcgcgccacttcgtcacggcccaaagaccagccgccgccggcagaaccccacgccgctcaatccagcctccgcctcgccgccgccgccgcctgtgctgctccgggcgcgccgcgtccatcagccatgctcgccctcgcccgcgcgctccggagccttggccaggcgggggccaggcgggagggccccctcctcgcctggctctcttccttgaggtcggccgccttctcctcctcatccgcgccgccggagtacgacatgccgtcggtgacatggggcgtaatacaggggcgcaaggagcgtctcgtctcgcgcgtgttggcgctcgacttcctccgctccgcgggcgtctccgaccccgccggggagctcgaggcggtcgagctcccctcgtccctcgaggtgctccaggagcgcctcgacttcctcctccgcctcggcctctccaccgacgacctctccaactacccgctattactggcctgctccctcaggaagaacgtcatccccgtcctctcctacctcgagaagctcggcgtcacgcgcgcccgcctggccgcctttgtccgcgcctacccggcctgcctccacgcctctgtcgccgtcgacctcgctcccatggtcaaggcgctccgtggcctggacgtcgaccgccaggacctcccccgcgtcctcgagcggtaccccgacgtcctgggactcaagcccgacggcacaatcagcacctccgtcgcctaccttgtcggcatcgtcggcgtggcgccacgagacatcggtcccatggtaacgcacttccctttcttccttggcatgagggttggcactaccatcaagccgttctgcgactacatcacctccctcgggctgcccatgcggatcctggcgaggatcctagagaagcgaccttacattctcggctatgatcttgaggaaacggtcaaaccaaacgtggaggcattgctcagctttggcattcagaaggaggccctgccgttggtgattgcacagtacccatctatactcgggctgccactgaaagcgaagctagcggcacaacagtacttcttcaccttgaagctccagatcgacccagatgggttcgcacgtgtgattgagaagttgccacagcttgtaagcttaaatcagaatgtgatcttgaagcctgtggagttcctccgtggacgagggatctccaatgaggatgttgctcggatggtggtccgctgtcctcagattctactgctgcggatcgagctcatgaagaacagtttgtacttcttcaagagtgagatgaagagaccaatgagtgaattgttagaatacccagaatattttacttacagcttggagtcaagaatcaagcctaggtatatgagagttacaagtcgggggattaagtgtagcttggattggttcttgaactgcagtgatatgaggtttgaggacaggatgcaaggggattttatagaaggggatgcaccaggtccttcgtttacgatgggtgggaagcttcagatgccaggcagccagctagtgtcagatgatgacgaggatactgatgatgaggtgctatataggaggacggtcatgatctaatttggtggaagataatcccaatggtctttcatgacatgtttccctgcagtatcatataaacaatagtttgagtgctgccctagcaaaaactcggaggcattgataacgactctgatggtactcgggcacgacctttgatcatgtgccccaaagatggaagtgggaggtccattgacaacctaagcagggaagagtttgtagtaaaacggatatgacgtgctgccaaaaatctccttccagctaaacagtcgattctttcattgattaattaatgctactctaaggcaggtcagggggtgatcatacaataggatcagatatttgtagcatgtgactatctactatttgtaactgaaatgtcccacctactttttccctattgaaatagaacctcatgtacagctcgagtgtgttccatgaaaccatcttgacgtagccaattaattaatatgatcatgattttct

SEQ ID NO: 198603 - DNA, 4493 bp, Zea Mays
attcccttttctctcgcgctcgcaacggcggcgggcggcggctgcttctccgtctcctacttccccgcaaacttgtctcgtattcctagcgcagccggggaacactcccggcctccgcccgagcggagcggagcgtttcgtccgcgccgctgactccgaggagttcgtttcgccgcgctgtctccctgaatcctaatcgtccttttcgcgtttggctcgactgacgcgttgattcctgcttctttcgttggtctcccattctttttttacaagaactaaaaaaataaaaattctttgggttgggatggcatcacctggccaaatgacagcaagcaatctgttacggactgaaggctttcctggaaatatggtaaaaatatgtggtttaaatcctgcgagaagtcttggatcaagaagattgcggatgactcaacactccttccatcaacagcatctttgttgcccacgtctgcaaagagtaatgactcataatatccgattgttgtcatctcctggggccgtggcatccaaggggtttgacagcccattagttgagaaacctgatactgcatcggatgttaaaattattcacttgtaccgtataccatttcttcaagaaagtgaaaccatggagctgctcaggaaagtgaaggcgaaggtttctgctaatattgttgatatactgacagagcagtgcttcaacattcaattggacaattcactcactcctgagaaacttacaatgcttcattggctcttagcagaaacttatgaacctgagaagttgcagactaggagctttctggaggatgaagtatctagaaattcttgtactgtcattgttgaggttggtccccggatgacattttcaacggcgttctcgaccaatgctgtctcaatctgtaaatctctctcattagtagaagtgacacgattggagagatcaagaagataccttttgtgcctagagcctggtagtgacccacttgatgaaggtcagctcaaagaattcactgcattggttcatgatagaatgacagagtgcatttatcgcaataagctcacatcatttcaatcagatgtagttcctgaacctgtctgcattgttccagtcattgaaaggggagaagaagcattgaaagaaataaatgtgaagatgggacttgcttttgataaacaagatattgactattatacacacctttttagagatgatatcaaacgcaatccaactactgtggaactttttgatattgcacaatccaacagcgaacatagcagacattggttttttaatggaaagcttgtaatagacggagagaccatgccaaccactttgttccagttagtgaagagtcccctaaaagccaacctcaataactctgtcattggttttaaggataactcgagtgcaataaaaggattcccagtaaatcagctacgcccaacaattccggggttcacttcaccattatccattatcatgcgtgagctagatattttattcacagcagaaacccataatttcccatgtgctgttgcaccataccctggagccgagacaggtgcaggtggccgtataagggacacacatgccactggaaagggttcttttgtcgttgcttccactgctgtacagcgtggagatgctgagatggcacagaaattgtatcgcgtagtcagggcatgtgcagaaatgggagagagcaatcctatcatcagcattcatgatcagggcgcaggaggaaattgtaatgttgtgaaggaaataatatatcccaagggagctgaaattgatatccgttcaattgttgttggtgatcatacattgtcggtcttagagatatggggtgctgagtaccaggaacaggatgcactacttgtaaaacttgagagcagaagcctcttagaatcgctttgtgagagggaaagagtttcgatggctgtcattgggaaaattgatggcagtggaaaaattgtgttgattgatagcgctgctgtggagtattccaagctgaatgacctccctcctccaacccctgttgaagaacttgagcttgaaaaggttttaggagatatgcctcagaagaccttcgagtttaggcgtgtttctcaagtcacagagcccttggacattgcacctggggtaacactattagatgctctgaagcgagtattaaggctcccatctgtgtgttcaaaacgtttcttgaccactaaggttgataggtgtgtgacaggtcttgttgcacaacagcagacagttggtcctctccaactcccgcttgctgatgtggctgtgattgcacagacgtacacagacctaacaggtggtgcttgcagcattggagaacaaccaataaaggggttgcttaatcctaaggccatggccagacttgctgttggggaggccttgactaatcttgtttgggctaaggttacatcacttgctgatgtgaaagcaagcgggaactggatgtatgctgcaaagcttgatggtgaaggtgcagatatgtatgatgcagctgttgcattggctgactgtatgattgaacttggtattgcaatagatgggggaaaggacagtctttccatggcagctcaatgtgatggtgaagtcatcaaggctcctggaaatctggttatcagtacatacgtgacatgtcctgatataacattgacagtaacccctgatttgaagcttggtgaggatgggattcttctacatattgatctcgctaaaggaaatcgccgtcttggtggttctgctcttgcacaagcatttgatcaaattggaaatgactgcccggacattgatgatgttctgtacttgaagaaggtatttgaggccattcaagaattgctcagtcaacgtcttatttcagcaggccatgacataagtgatggtggccttattgtttgtgttcttgagatggcatttgctggtaactgtggttttaagcttgacatagacttagaagataggagccttattgaaggactttttgcagaggagcttggcctcattattgaagtacactcgaaatatctcaacattgtgaagcaaaagcttgaaatagcaggcatttctgctaatgttattggagaagttactaactcaccagaaatagaagtttttattgatggcaatctgcatctcaaggaaaaaacttcagatctcagggatctgtgggaggaaacaagcttccagcttgaggagttacaacgtctgaaatcttgtgtaaaacttgagaaagaaggattaaaatgcaggacatcaccatcatggtctctgtcttttaccccaaaattcacagatgggaaactgttgactgcttccttgaaaccaaaggttgccatcattcgtgaggaagggagcaatggggacagggaaatggctgctgcattccacgctgctggatttgaaccatgggatattacaatgtcagacctcttggctgggaagtcttctctcaaggagttccgtgggattgcatttgttggtggtttcagctatgcagatgtgctggattcagcgaaaggctgggctgcatcaatcaggtttaaccaacccctcattcagcaattccaggacttctaccataggccagacacgtttagccttggagtgtgcaatggttgtcagcttatggctcttcttggctgggtgccaggatcaggtgttggaggttctcttggtacaggtggagatatgtcccagccgaggtttattcacaatgaatctggtcgttttgagtgccggtttaccagtgtgtccattggcgattctcctgctattatgttcaaagggatggaaggttccaccttaggtgtttggagtgctcatggtgagggaagagcttttttcccagatgaaaatgttctagctactgttgtgaagtcaaatctggctcctgtgcggtattgtgatgattctaacaatattactgagacctatcccttcaaccctaatggttctccactgggtatagcagccctttgctcacctgacgggaggcacctggctatgatgccgcatccagagcgttgcttcatgatgtggcaatatccatggtatcccaaggaatggcaggttgagaagagtggccccagcccttggctgcgaatgttccagaatgctagagaatggtgttcatagtgcagggaagcttcctgctgcaaggatgtagtcatccaggcaccggctgctacgagtatatggatgattggtggttgtatggcccaattgatgacccctttttggcagaataaatgtgttttgaccatcaatacattatcttgtaataatgtatcgaatttggaattttgaaaatggagaaccgtctggtttccgaagtcggaaggcctcagatatgactccactagtttaaaacatttactagtggaaaagaaatgagtgggttaattaataatgcaaaaggtacattgggaagacactgtacctagggatgaaaacggacggaaacggacgg

SEQ ID NO: 198604 - DNA, 4640 bp, Zea Mays
ctttttctcattcccttttctctcgcgctcgcaacggcggcgggcggcggctgcttctccgtctcctacttccccgcaaacttgtctcgtattcctagcgcagccggggaacactcccggcctccgcccgagcggagcggagcgtttcgtccgcgccgctgactccgaggagttcgtttcgccgcgctgtctccctgaatcctaatcgtccttttcgcgtttggctcgactgacgcgttgattcctgcttctttcgttggtctcccattctttttttacaagaactaaaaaaataaaaattctttgggttgggatggcatcacctggccaaatgacagcaagcaatctgttacggactgaaggctttcctggaaatatggtaaaaatatgtggtttaaatcctgcgagaagtcttggatcaagaagattgcggatgactcaacactccttccatcaacagcatctttgttgcccacgtctgcaaagagtaatgactcataatatccgattgttgtcatctcctggggccgtggcatccaaggggtttgacagcccattagttgagaaacctgatactgcatcggatgttaaaattattcacttgtaccgtataccatttcttcaagaaagtgaaaccatggagctgctcaggaaagtgaaggcgaaggtttctgctaatattgttgatatactgacagagcagtgcttcaacattcaattggacaattcactcactcctgagaaacttacaatgcttcattggctcttagcagaaacttatgaacctgagaagttgcagactaggagctttctggaggatgaagtatctagaaattcttgtactgtcattgttgaggttggtccccggatgacattttcaacggcgttctcgaccaatgctgtctcaatctgtaaatctctctcattagtagaagtgacacgattggagagatcaagaagataccttttgtgcctagagcctggtagtgacccacttgatgaagtcattgaaaggggagaagaagcattgaaagaaataaatgtgaagatgggacttgcttttgataaacaagatattgactattatacacacctttttagagatgatatcaaacgcaatccaactactgtggaactttttgatattgcacaatccaacagcgaacatagcagacattggttttttaatggaaagcttgtaatagacggagagaccatgccaaccactttgttccagttagtgaagagtcccctaaaagccaacctcaataactctgtcattggttttaaggataactcgagtgcaataaaaggattcccagtaaatcagctacgcccaacaattccggggttcacttcaccattatccattatcatgcgtgagctagatattttattcacagcagaaacccataatttcccatgtgctgttgcaccataccctggagccgagacaggtgcaggtggccgtataagggacacacatgccactggaaagggttcttttgtcgttgcttccactgctggttactgtgttggtaatctgcgaattgacaattcaaatgcaccctgggaagatccttcattttcttacccagtgaatctggcttctccattgcaaattcttgttgacgctagtgatggtgcatctgactatgggaacaagtttggtgagcctctaattcagggatataccagaacatttgggatgaggttgctaaatggggagcggcgtgaatggttgaagcctataatgttcagtggagctatagggcaaattgaccatgcacacatatcaaagggtgacccagaaattggcatgctagttgtgaagattggtggtccagcatacagaattggtatgggcggtggtgctgcctcgagtatggttagtggccagaatgatgcagaacttgatttcaacgcagtacagcgtggagatgctgagatggcacagaaattgtatcgcgtagtcagggcatgtgcagaaatgggagagagcaatcctatcatcagcattcatgatcagggcgcaggaggaaattgtaatgttgtgaaggaaataatatatcccaagggagctgaaattgatatccgttcaattgttgttggtgatcatacattgtcggtcttagagatatggggtgctgagtaccaggaacaggatgcactacttgtaaaacttgagagcagaagcctcttagaatcgctttgtgagagggaaagagtttcgatggctgtcattgggaaaattgatggcagtggaaaaattgtgttgattgatagcgctgctgtggagtattccaagctgaatgacctccctcctccaacccctgttgaagaacttgagcttgaaaaggttttaggagatatgcctcagaagaccttcgagtttaggcgtgtttctcaagtcacagagcccttggacattgcacctggggtaacactattagatgctctgaagcgagtattaaggctcccatctgtgtgttcaaaacgtttcttgaccactaaggttgataggtgtgtgacaggtcttgttgcacaacagcagacagttggtcctctccaactcccgcttgctgatgtggctgtgattgcacagacgtacacagacctaacaggtggtgcttgcagcattggagaacaaccaataaaggggttgcttaatcctaaggccatggccagacttgctgttggggaggccttgactaatcttgtttgggctaaggttacatcacttgctgatgtgaaagcaagcgggaactggatgtatgctgcaaagcttgatggtgaaggtgcagatatgtatgatgcagctgttgcattggctgactgtatgattgaacttggtattgcaatagatgggggaaaggacagtctttccatggcagctcaatgtgatggtgaagtcatcaaggctcctggaaatctggttatcagtacatacgtgacatgtcctgatataacattgacagtaacccctgatttgaagcttggtgaggatgggattcttctacatattgatctcgctaaaggaaatcgccgtcttggtggttctgctcttgcacaagcatttgatcaaattggaaatgactgcccggacattgatgatgttctgtacttgaagaaggtatttgaggccattcaagaattgctcagtcaacgtcttatttcagcaggccatgacataagtgatggtggccttattgtttgtgttcttgagatggcatttgctggtaactgtggttttaagcttgacatagacttagaagataggagccttattgaaggactttttgcagaggagcttggcctcattattgaagtacactcgaaatatctcaacattgtgaagcaaaagcttgaaatagcaggcatttctgctaatgttattggagaagttactaactcaccagaaatagaagtttttattgatggcaatctgcatctcaaggaaaaaacttcagatctcagggatctgtgggaggaaacaagcttccagcttgaggagttacaacgtctgaaatcttgtgtaaaacttgagaaagaaggattaaaatgcaggacatcaccatcatggtctctgtcttttaccccaaaattcacagatgggaaactgttgactgcttccttgaaaccaaaggttgccatcattcgtgaggaagggagcaatggggacagggaaatggctgctgcattccacgctgctggatttgaaccatgggatattacaatgtcagacctcttggctgggaagtcttctctcaaggagttccgtgggattgcatttgttggtggtttcagctatgcagatgtgctggattcagcgaaaggctgggctgcatcaatcaggtttaaccaacccctcattcagcaattccaggacttctaccataggccagacacgtttagccttggagtgtgcaatggttgtcagcttatggctcttcttggctgggtgccaggatcaggtgttggaggttctcttggtacaggtggagatatgtcccagccgaggtttattcacaatgaatctggtcgttttgagtgccggtttaccagtgtgtccattggcgattctcctgctattatgttcaaagggatggaaggttccaccttaggtgtttggagtgctcatgccctttgctcacctgacgggaggcacctggctatgatgccgcatccagagcgttgcttcatgatgtggcaatatccatggtatcccaaggaatggcaggttgagaagagtggccccagcccttggctgcgaatgttccagaatgctagagaatggtgttcatagtgcagggaagcttcctgctgcaaggatgtagtcatccaggcaccggctgctacgagtatatggatgattggtggttgtatggcccaattgatgacccctttttggcagaataaatgtgttttgaccatcaatacattatcttgtaataatgtatcgaatttggaattttgaaaatggagaaccgtctggtttccgaagtcggaaggcctcagatatgactccactagtttaaaacatttactagtggaaaagaaatgagtgggttaattaataatgcaaaaggtacattgggaagacactgtacctagggatgaaaacggacggaaacggacgg

SEQ ID NO: 198605 - DNA, 1591 bp, Zea Mays
gccactttgctaagatcacattccaaggcaatgccagagtatacttgtactgcatgttataagtaacagcaggattatttggggatggactactttgatgcaaggcggaagcctcataatgttggtaaaatcattgcagccctggtcctcacaacactctgtatatttgttctgaagcaatctcctggttttggtggcaatagtgtgttttctcgccatgaacatggggttacccacgtcttagtaacaggaggagctggttatattggttcacatgctgctttaaggctcttaaaggataactatcgagttactatcgtggataatctatctagaggaaacatgggagcagtaaaggttctgcagggcttatttccgcagcctgggagactacaattcatctttgctgatctggggaaccagaaatctgtcaacaagatatttgctgaaaatgcatttgatgctgtgatgcactttgcagctgttgcttatgtgggagagagcacattggaaccccttaggtactatcacaatattacatcgaacacactactgattttggaggctatggcatctcatggagtccaaacccttatttactccagtacatgtgctacctacggagaaccagataagatgcctattacagaagccacacctcagttccctatcaatccatatggaaaagctaagaaaatggcagaggatatcataatagatttctcaaactcaaagggagctgacatggctgtcatgattttaagatatttcaatgttattggatctgaccctgagggaagattaggtgaggctcctaggccagaacttcgagagcatggtcggatatctggggcttgctttgatgcagcattaggagtcattccaggattaaaggttaaaggaacagattatcccacagctgatggaacctgcataagagattatattgatgtcacagatttagttgatgctcatgtgaaagcactcaacaaggcagagcctagaaaagtcggcatttacaatgttggaacaggaagaggtcgctcagttaatgagtttgttgatgcctgcaagaaggcaactggggtcaacatcaaaattgagtacctcaacagaaggccaggagattatgcagaagtatacagcgacccaacaaagataaacaaggagctcaactggacagctcattataccgatctcaaagagagcctatcagtcgcatggaggtggcaaaagtcgcatccgcgtggctacgggccaaactaaatatagcctgctgatctataattcacttaatcgtcaatacatattagttctttagttagagatacaagatcttgctgcgatactcctcaaaatcagtccttcgtattcttctttctctcgtcctttttatttcaaaagtttgcatttttggctagcagaaacatgaatggtgatttggatgaaaaaaaggacctgtgatgacaatttcattgtttctgacacattgttggtaaaaaaaatgtaaattgcttcagccaatgagctgcaagattgattgaattgagttaagaaaaaaacttgtgttgcgatccttgatctccagcag

SEQ ID NO: 198606 - DNA, 1563 bp, Zea Mays
gttataagtaacagcaggattatttggggatggactactttgatgcaaggcggaagcctcataatgttggtaaaatcattgcagccctggtcctcacaacactctgtatatttgttctgaagcaatctcctggttttggtggcaatagtgtgttttctcgccatgaacatggggttacccacgtcttagtaacaggaggagctggttatattggttcacatgctgctttaaggctcttaaaggataactatcgagttactatcgtggataatctatctagaggaaacatgggagcagtaaaggttctgcagggcttatttccgcagcctgggagactacaattcatctttgctgatctggggaaccagaaatctgtcaacaagatatttgctgaaaatgcatttgatgctgtgatgcactttgcagctgttgcttatgtgggagagagcacattggaaccccttaggtactatcacaatattacatcgaacacactactgattttggaggctatggcatctcatggagtccaaacccttatttactccagtacatgtgctacctacggagaaccagataagatgcctattacagaagccacacctcagttccctatcaatccatatggaaaagctaagaaaatggcagaggatatcataatagatttctcaaactcaaagggagctgacatggctgtcatgattttaaggttagaaccttttcttcagttgcatagatatttcaatgttattggatctgaccctgagggaagattaggtgaggctcctaggccagaacttcgagagcatggtcggatatctggggcttgctttgatgcagcattaggagtcattccaggattaaaggttaaaggaacagattatcccacagctgatggaacctgcataagagattatattgatgtcacagatttagttgatgctcatgtgaaagcactcaacaaggcagagcctagaaaagtcggcatttacaatgttggaacaggaagaggtcgctcagttaatgagtttgttgatgcctgcaagaaggcaactggggtcaacatcaaaattgagtacctcaacagaaggccaggagattatgcagaagtatacagcgacccaacaaagataaacaaggagctcaactggacagctcattataccgatctcaaagagagcctatcagtcgcatggaggtggcaaaagtcgcatccgcgtggctacgggccaaactaaatatagcctgctgatctataattcacttaatcgtcaatacatattagttctttagttagagatacaagatcttgctgcgatactcctcaaaatcagtccttcgtattcttctttctctcgtcctttttatttcaaaagtttgcatttttggctagcagaaacatgaatggtgatttggatgaaaaaaaggacctgtgatgacaatttcattgtttctgacacattgttggtaaaaaaaatgtaaattgcttcagccaatgagctgcaagattgattgaattgagttaagaaaaaaacttgtgttgcgatccttgatctccagcag

SEQ ID NO: 198607 - DNA, 1330 bp, Zea Mays
gttggttctgggcctattcacggcattcagggggaaatgggtgagtcccaagctcttcctctcatcaacttcttcccgttccacgcagaccaaccagacattaagaattgagatcctgcaaccgcaacaatggcggccatggcgaacacctctcgtctccccaccccctgcagcctcccaaccatcagcatcggcgctaagagcaggaggctagctgtggcggccgtcagatgcggtcccggcggcagcaggagccaccggaggagccttggggtcttgctgtgtcgatcctcgtccacggccggagcccaagggagcacgaggatggaggactataacaccgccatgaagcggatgatgcgtaacccctacgagtaccatcacgatctcggcatgaactatgctgtcataagtgagagcttgattgttggctcacagcctcagaagcctgaagatatcgatcgcttgaaaaatgaagagcgagtagcatatattctttgcttacagcaggacaaggacattgaatattggggcattgacttccaatccattgtcaataggtgcaaagaacttggcattcagcacatcaggagaccggccgtggattttgatccagactcactgaggtcgcaactgccgaaagcagtttcggcgctagaatgggctacgtcgcagcgcaaagggcgggtttatgtccactgcaccgctgggcttgggagagcacctgcggttgcaatcgcttacatgttttggtttgagaacatggataagctaacctccataaggccctgtggacccagcaagagagccatccgcgccgcaacctatgatctagctaagaacgatccatccaaagagccttttgagaaccttccggagcacgcttttgagggcgttgcagactgggagaggaagttgattcatgaccgggtgcgtgctcttcacgaagcatgagcagaagaaactttctccacgcgtcaagaaggggggaactaagcttcctaatgaggcaatggctgtgcttcggcaccagatcattagatgtcgaaacgataaagtttgttctcaataaagcttatacgacgccatatttgttgctgggtagtttgtaatagtcactaataggaaggaaataaagagggccttgcatgagattccagctggtgtcttcacctttgtggtgactgcaaatgagatgcccatccattaatggcatggcgcattgtaggtatattgtgtaaataaacctgtggatcttcatttgaggaacatcacttctgtaaaagtttatttgaagatacggccagctttgcaaatctaccataccttt

SEQ ID NO: 198608 - DNA, 1347 bp, Zea Mays
agcaacgtctcgccctcccagctcctcccaccaaacaaactgaaccactgtccgctgcgtgctttccttcctctcaacgccagccttgccgagagcccgagaccaatcgccgccatctcccggaatgacggggtgacgaaaccgcgccgcaccagacaagacagaggagccgccgccgcgacccacaggccaccgggtcgccgaggaggggatccagcgagccatgtcgaccgacgtgcccatgagccccgagctcgagcaggtggacggcgagatccaggacatcttccgcgcgctccagaatgggttccagaagatggacaagatcaaggactccagcaggcagtccaagcagctggaggatctcacggccaagatgagagagtgcaagcgcttgatcaaagagtttgaccgtatactcaaggatgaggagaaaaagaacacccctgatgtcaacaagcagctcaatgacaagaagcagttcatgatcaaagaactcaactcctatgtgaccttaaggaaaacgtaccagagcagccttggtaataagaggatcgaactattcgatacgggtaatgaccaggtggctgagggaactccagttcaaatggcatcagaaatgtcaaatcaagaactcattagcaccggaaggaaacaaatggaccaaactgatcaagctattgagcgctcaaaaatggttgtagcacaaactgttgaagttggagctcagactgctgcaactctgacacagcaaacggaacaaatgaagaggataggcaatgagctagattctgtccacttttcactgaagaaggctagtcaaatggtgaaagagattggccgtcagattgtcaacccgcataacaagaacatcagagacattccgggcctagcacctcccgccatgaacaggaagctgctgtccatcgacgctgcaggactctgagcgttgtgaatggctgcctcccgcagcacagcgcaacgcagcgcgtcagagttctcttatgagccacgatacatggcttcgcgattcttttgtgcttgtagtttacgtccgcccattctttccctattgcattggtgagtagtagcctcaggtttgtagcgggactcttgttgtttattgcttgcgagcccatagctttctggttgtttgtgtatatgcggtagtgatgtgaatgtgagagtcgagtggagattcttcatggttcgttcttatgagttgtgactggtttgtgagcttgtggtgaaaggttcgcagcttgcttggcatgcgtctcctctgttcctgccgtgctgctctgcagtcgatacaagaaaagataaaactggtaggttgcatcgggg

SEQ ID NO: 198609 - DNA, 1174 bp, Zea Mays
ctgagatgcttctccacagcattcggcggcggccagcgcccggacttcggcagaatgggttccagaagatggacaagatcaaggactccagcaggcagtccaagcagctggaggatctcacggccaagatgagagagtgcaagcgcttgatcaaagagtttgaccgtatactcaaggatgaggagaaaaagaacacccctgatgtcaacaagcagctcaatgacaagaagcagttcatgatcaaagaactcaactcctatgtgaccttaaggaaaacgtaccagagcagccttggtaataagaggatcgaactattcgatacgggtaatgaccaggtggctgagggaactccagttcaaatggcatcagaaatgtcaaatcaagaactcattagcaccggaaggaaacaaatggaccaaactgatcaagctattgagcgctcaaaaatggttgtagcacaaactgttgaagttggagctcagactgctgcaactctgacacagcaaacggaacaaatgaagaggataggcaatgagctagattctgtccacttttcactgaagaaggctagtcaaatggtgaaagagattggccgtcaggttgctactgacaaatgcattatggcgttcctgtttctgattgtctgtggtgtcattgcaataattgttgttaagattgtcaacccgcataacaagaacatcagagacattccgggcctagcacctcccgccatgaacaggaagctgctgtccatcgacgctgcaggactctgagcgttgtgaatggctgcctcccgcagcacagcgcaacgcagcgcgtcagagttctcttatgagccacgatacatggcttcgcgattcttttgtgcttgtagtttacgtccgcccattctttccctattgcattggtgagtagtagcctcaggtttgtagcgggactcttgttgtttattgcttgcgagcccatagctttctggttgtttgtgtatatgcggtagtgatgtgaatgtgagagtcgagtggagattcttcatggttcgttcttatgagttgtgactggtttgtgagcttgtggtgaaaggttcgcagcttgcttggcatgcgtctcctctgttcctgccgtgctgctctgcagtcgatacaagaaaagataaaactggtaggttgcatcgggg

SEQ ID NO: 198610 - DNA, 1734 bp, Zea Mays
aagccactgtaacgtacctatcatcatccactccaaagtccaaacccccaccgagccacgcgacgagccgcgccgccatgtggccactctcctacctgccgccggcaccggcgcagcagttgcgagcgcaccccggtcccggctccggccgcgggcccaggccgcagccgtgcgggctgccgttccccgacgccctccgcacggctgcggctgcggccgccgtctccctttctctcatctatggcaacggcgtgggcgcggccttcgcggcatcagcggcgcaacccacggaggtgtgccggaacgggggcgcggagatggtagaggaggtgagggccgaggcggtgactaacgagcagctcgtggaggaggcgtgggaggtggtcaacgagagcttcctccccgacgccgccagccgtccgtggtcgccagagatgtggatgcaaaggaagcaggatgttctccaaggcacaattaaatctcgtgctagagcccatgatatcattcgcaagatgctagcgagcctcggtgacccttacactcggtttctatctccctccgaattctcaaagatgtcaaaatatgacatgacgggaattggattaaatctgcgggagattcctgatgaaaatggttcttttaagttgatggtattagggctgttgttagatgggcctgcttactctgctggtgttagacagggtgatgagcttttatcagtcaacggcattgatgtaaagggtaaatctgcatttgatgcttcatccatgctgcaaggtccaaaggagacgttcgttacgattaaggttaagcatggcgactgtggtcctgttgagtcaatgaaggtgcagaggcaactggttactcgaactccagttttctatcgtttggagaaaagagaaaacaatgattcatctgttgggtatattcacattacagagttcaatgcagtggccaaaaaagatttgcgctaaaacgtctacagaaatcaggcgcctcctattttgttctggatttgagggacaatcttggtggactagtgcaagctggaatcgagacagcaaagctctttctgaataaaggagacacggtcatttatactgctggccgggatcgcctagtccaaaaggcaattgttgctgaaagtggacctatgattgctactcccctcatgttgctggtgaataataggacagcacgcgccagtgaaatagttgcttcagcacttcatgacaattgcaaagctgttcttgttggcgaaaggacttttggcaaggtttgaaccacccaaaagaggatactgtgacgtttttctttctctgtgatcaacaggattatattatgccctttttgtgtctggtaactcatgtctagggaaatgcaggagcttaatccaatctgtatttgaacttcatgatggttctggtattgtcgtcacagttggcaaatacgtgacaccaaaccacaaggatatcaatgggaatggaatagaaccggattacaatcgtcttcctgatttcaatgaagccaaagatttcctttcacgatgcggaattaaagaattaagctgacagacgtttgtggcagatttcaatgaagcattatattctgaaggttctctcacggtaagaagcttttatttactgttgcatagttggttgttactgctctgcatacattggattatccaagtaacaacaaagaaataaagaacaaggcagaaattttgtatgg

SEQ ID NO: 198611 - DNA, 515 bp, Zea Mays
tggactggccaataatgtagtagggtgatgagcttttatcagtcaacggcattgatgtaaagggtaaatctgcatttgatgcttcatccatgctgcaaggtccaaaggagacgttcgttacgattaaggttaagcatggcgactgtggtcctgttgagtcaatgaaggtgcagaggcaactggttactcgaactccagttttctatcgtttggagaaaagagaaaacaatgattcatctgttgggtatattcacattacagagttcaatgcagtggccaaaaaagatttggctaaaacgtctacagaaatcaggcgcctcctattttgttctggatttgagggacaatcttggtggactagtgcaagctggaatcgagacagcaaagctctttctgaataaaggagacacggtcatttatactgctggccgggatcgcctagtccaaaaggcaattgttgctgaaagtggacctatgattgctactcccctcatgttgctggtgaataataggac

SEQ ID NO: 198612 - DNA, 1990 bp, Zea Mays
tgccgccgacgcgtcgccacctgtgacctgtgtccgtagagcccgtgcggacagctgggaccggaggcagactcccactcgaacttgcccacctcgacggttgttctacggtttggttcattgaacctggcctggcccttcaacactccccaaggccagccaagccaaggccgccaaggggcgtccggactccggcgtctcctccttgcttctgcccagccacagcaagccctgcctcccgtcccgccctccgctctccgcctacaccttctcccgtccaagaccacacgcgcacagaaaaaagtacagctggtcagtggtcctggtcagctgctcccgtacaaaaagcgcaccacaagcggcggccaagccgtccgctgccccccgcatcgccatggctctcgccgtgcgcacgccccgcttccagcctcgaccggcctccatttctgcgcccgcaacacccgcctcgaattccctcgccgccgccgccgccgcgaacgcgaggccccgcacctgcgccggcgccgccgtccgcgcttcgcccttcaccgaggccacctcctcctcgcgctacctccgtgacgcctggtcctacgccaccgattgctcctccaactccgcatcccgttcctccgatgccgccgctgcggcggcggcgctgggccgccgggacgacgagatcgcactgcagctgccggagctgcagaggctcctggacgcgctgagggcgtccagaaggaggggcgcagagggcggcggcggcggcggccgcggacccgggagggtggcactggtgggtacagggcccggggaccccgagctgctcacgctcaaggcggtccgggctatcgaggcggcggacctggtgctctacgacaggctggtgtctaacgacgtgttggacttggtcggggagggctccaggcttctctatgtcggcaagaccgcgggataccacagccgcacccaggaggagattcacgagctgctgctgagctttgcggaggctggtgccaatgttgtgcgcttgaaaggtggcgatcctctggtttttggaaggggtggagaagagatggatttcttacagcaacagggaatcaaagttgaaattatcccaggaattacctctgcttcaggaattgcagcagaactaggcattccgctaacccatcgaggtgttgctaccagttaatgaagcacggcctgccaccagatacccctgctgttgcagtagagcgcgggactacacctcaacaacgaatggtgtttgcgttgttaaaggatcttgtggatgaagtcaagtcagctgatcttgtttctccaactctaataattatcgggaaagtggtatccttgtcaccattttgggttgagtcatctgaacatgatgccctgaaaattgagagctcgtatgcaagtgaagccagatgataatacgttttcatgattttagtgattggacaatacatacttgagtaacgcaatatcccagatatgagcagttccagttgggatccatttaggacatgcgagcacaggttcgacctggtgtacacaacatttcaggaagcatggattctgaatgacggatgatagcttaagcccataacagcctttggggtttgggcagaagcgcacttgggagttgatgagggcatgtctggaggcttcagcttcagtaaatttacggctttcaattcggtgtcttcttcgtcaaagaagactcggtagatgtatggttttcaattcaatagcacctgcaaactcctttctgactggaggtccattcggagtgcagggattttacagaaattagacaaaaaaagttctgttttttggggggaattagaaaaatctctgcttcccaagcgtagataactgtaagatttttgttgtcatctttaaaataattgtattgtttttatgtgttatattcatctttaaaaactcttggtaaaacagagcctgaagaatgaacctttaagctgaa

SEQ ID NO: 198613 - DNA, 2354 bp, Zea Mays
tgccgccgacgcgtcgccacctgtgacctgtgtccgtagagcccgtgcggacagctgggaccggaggcagactcccactcgaacttgcccacctcgacggttgttctacggtttggttcattgaacctggcctggcccttcaacactccccaaggccagccaagccaaggccgccaaggggcgtccggactccggcgtctcctccttgcttctgcccagccacagcaagccctgcctcccgtcccgccctccgctctccgcctacaccttctcccgtccaagaccacacgcgcacagaaaaaagtacagctggtcagtggtcctggtcagctgctcccgtacaaaaagcgcaccacaagcggcggccaagccgtccgctgccccccgcatcgccatggctctcgccgtgcgcacgccccgcttccagcctcgaccggcctccatttctgcgcccgcaacacccgcctcgaattccctcgccgccgccgccgccgcgaacgcgaggccccgcacctgcgccggcgccgccgtccgcgcttcgcccttcaccgaggccacctcctcctcgcgctacctccgtgacgcctggtcctacgccaccgattgctcctccaactccgcatcccgttcctccgatgccgccgctgcggcggcggcgctgggccgccgggacgacgagatcgcactgcagctgccggagctgcagaggctcctggacgcgctgagggcgtccagaaggaggggcgcagagggcggcggcggcggcggccgcggacccgggagggtggcactggtgggtacagggcccggggaccccgagctgctcacgctcaaggcggtccgggctatcgaggcggcggacctggtgctctacgacaggctggtgtctaacgacgtgttggacttggtcggggagggctccaggcttctctatgtcggcaagaccgcgggataccacagccgcacccaggtgtgggagcactgttccttcgtttcaatttggaagtttacacgcgattggaaatgctagttgggcgggcattctgcaataacgatttcaagtaggtactttttcttgagcacgtgtgagacaacatccatgaagaacagagaattgaggcgacctcagcttaggacgttgtacctttccttccgctttcttggtcatttgtatgtttgatgactggttgatgcaatgtaggaggagattcacgagctgctgctgagctttgcggaggctggtgccaatgttgtgcgcttgaaaggtggcgatcctctggtttttggaaggggtggagaagagatggatttcttacagcaacagggaatcaaagttgaaattatcccaggaattacctctgcttcaggaattgcagcagaactaggcattccgctaacccatcgaggtgttgctaccagtgtcagatttttaactggacactccagaaatggtgggacagacccactatatgtagctggaaatgcagccgatcctgacactactttggttgtgtacatgggtttgtcaacacttgcatcacttgcaccaaagttaatgaagcacggcctgccaccagatacccctgctgttgcagtagagcgcgggactacacctcaacaacgaatggtgtttgcgttgttaaaggatcttgtggatgaagtcaagtcagctgatcttgtttctccaactctaataattatcgggaaagtggtatccttgtcaccattttgggttgagtcatctgaacatgatgccctgaaaattgagagctcgtatgcaagtgaagccagatgataatacgttttcatgattttagtgattggacaatacatacttgagtaacgcaatatcccagatatgagcagttccagttgggatccatttaggacatgcgagcacaggttcgacctggtgtacacaacatttcaggaagcatggattctgaatgacggatgatagcttaagcccataacagcctttggggtttgggcagaagcgcacttgggagttgatgagggcatgtctggaggcttcagcttcagtaaatttacggctttcaattcggtgtcttcttcgtcaaagaagactcggtagatgtatggttttcaattcaatagcacctgcaaactcctttctgactggaggtccattcggagtgcagggattttacagaaattagacaaaaaaagttctgttttttggggggaattagaaaaatctctgcttcccaagcgtagataactgtaagatttttgttgtcatctttaaaataattgtattgtttttatgtgttatattcatctttaaaaactcttggtaaaacagagcctgaagaatgaacctttaagctgaa

SEQ ID NO: 198614 - DNA, 2605 bp, Zea Mays
tgccgccgacgcgtcgccacctgtgacctgtgtccgtagagcccgtgcggacagctgggaccggaggcagactcccactcgaacttgcccacctcgacggttgttctacggtttggttcattgaacctggcctggcccttcaacactccccaaggccagccaagccaaggccgccaaggggcgtccggactccggcgtctcctccttgcttctgcccagccacagcaagccctgcctcccgtcccgccctccgctctccgcctacaccttctcccgtccaagaccacacgcgcacagaaaaaagtacagctggtcagtggtcctggtcagctgctcccgtacaaaaagcgcaccacaagcggcggccaagccgtccgctgccccccgcatcgccatggctctcgccgtgcgcacgccccgcttccagcctcgaccggcctccatttctgcgcccgcaacacccgcctcgaattccctcgccgccgccgccgccgcgaacgcgaggccccgcacctgcgccggcgccgccgtccgcgcttcgcccttcaccgaggccacctcctcctcgcgctacctccgtgacgcctggtcctacgccaccgattgctcctccaactccgcatcccgttcctccgatgccgccgctgcggcggcggcgctgggccgccgggacgacgagatcgcactgcagctgccggagctgcagaggctcctggacgcgctgagggcgtccagaaggaggggcgcagagggcggcggcggcggcggccgcggacccgggagggtggcactggtgggtacagggcccggggaccccgagctgctcacgctcaaggcggtccgggctatcgaggcggcggacctggtgctctacgacaggctggtgtctaacgacgtgttggacttggtcggggagggctccaggcttctctatgtcggcaagaccgcgggataccacagccgcacccaggaggagattcacgagctgctgctgagctttgcggaggctggtgccaatgttgtgcgcttgaaaggtggcgatcctctggtttttggaaggggtggagaagagatggatttcttacagcaacagggaatcaaagttgaaattatcccaggaattacctctgcttcaggaattgcagcagaactaggcattccgctaacccatcgaggtgttgctaccaggtaagattagccttctgtaattttattctacctaactagtaactacgcaaaaaagatttcccctttaatatgcaatgcattttctaaatggattttccacaagattcaccatttcctatcaggtttttgtttaggatctgcaatactctctcgaatgcagcaattagcatgcctgcttgtggattttgtgagtatttgctgtagagttgaggctttaaatgtactagttacttgctgtaactcttaatggttcctgtttttgaccatacatgtctcattgcgtagtgaaagttcttggtattattttctgatgtcctgatgtgctatggctaatggagtagcaaatgtttttaataataaaacgctcttgcattgttaaatgagcagaaaggcgctagtttgtctctgataccttagtgtagagagataatcattcttgatgcttactagaataaatagttgagatataatcttctcttcagtgtcagatttttaactggacactccagaaatggtgggacagacccactatatgtagctggaaatgcagccgatcctgacactactttggttgtgtacatgggtttgtcaacacttgcatcacttgcaccaaagttaatgaagcacggcctgccaccagatacccctgctgttgcagtagagcgcgggactacacctcaacaacgaatggtgtttgcgttgttaaaggatcttgtggatgaagtcaagtcagctgatcttgtttctccaactctaataattatcgggaaagtggtatccttgtcaccattttgggttgagtcatctgaacatgatgccctgaaaattgagagctcgtatgcaagtgaagccagatgataatacgttttcatgattttagtgattggacaatacatacttgagtaacgcaatatcccagatatgagcagttccagttgggatccatttaggacatgcgagcacaggttcgacctggtgtacacaacatttcaggaagcatggattctgaatgacggatgatagcttaagcccataacagcctttggggtttgggcagaagcgcacttgggagttgatgagggcatgtctggaggcttcagcttcagtaaatttacggctttcaattcggtgtcttcttcgtcaaagaagactcggtagatgtatggttttcaattcaatagcacctgcaaactcctttctgactggaggtccattcggagtgcagggattttacagaaattagacaaaaaaagttctgttttttggggggaattagaaaaatctctgcttcccaagcgtagataactgtaagatttttgttgtcatctttaaaataattgtattgtttttatgtgttatattcatctttaaaaactcttggtaaaacagagcctgaagaatgaacctttaagctgaa

SEQ ID NO: 198615 - DNA, 187 bp, Zea Mays
ggagtaccgagtcctactgcgagctgcttgtgacgtggaaggaggagctgacccggccgctccgggaggcggaggagttcctgacgacagtggaggcgcagctcaactccattaccaacaccgggccaaccatgggagctttcatctcttcagctgcagctgcagtcagaatggtgccaatctgaag

SEQ ID NO: 198616 - DNA, 871 bp, Zea Mays
gctctatgcgatctcatctcatctctgtgccacagccagtcgaatctcacagccacggtgtggacctccttttcgtctccactcttcctgttcctctccttttatttatcccgaaattccactttactatactgtactgtagtactgcaaaaagatctcaaagccgaagcaaacaaatctctcgtgcttagccctagctagctactggtccttttcttctcctctcccgtcttcgttactcggatcacgaaatctatagctactaattactggcgatggaggatctctcggatcttggaggccacggccacccgggtgctgctgcctggcggcccgcggcgccatcattggcgtcctcttccaaggtctcggtgcaagtctacaccgtcccaagctcagctgctaccggccgtgaagcccgaggtcaaggtgttgcaccaatgatgcatgcgtctagcgtcgctggccatggcggccgcgctgctgatctagaccccgtcaaggccaagatcgtctcccaccctagctaccaccgcctgctcgccgccttcttggactgccacaaggtcggctgcccgccggaagcggccgaggagatcgcggcggtggcgcgggagcgcgaggcgtggcagcgtgcagccgcgggcgacgtcgcgcacacaaggccggacccggagctcgaccagttcatggagtcctactgcgagctgcttgtgacgtggaaggaggagctgacccggccgctccgggaggcggaggagttcctgacgacagtggaggcgcagctcaactccattaccaacaccgggccaaccatgggagctttcatctcttcagctgcagctgcagtcagaatggtgccaatctgaag

SEQ ID NO: 198617 - DNA, 2097 bp, Zea Mays
atggacccgggcaacaaactggcctttgcaaaagcgcccttcagctcccggaccgcttcccctgagctgctgcccaagaacttcgacaccacttgcccaccctccctggattcttgcggctcttcctcgagctcatcgaatccttcatggagagcgccgagggaccgtccccgtactccggtgatcgagcgactccggcggacatacgggatattgtcactccatttgttcataaagcttgatgaggcaccggttcaggatggcaatggccaaactacacctgggcataattcgcgaaggccaaacctttctttgcaaataccagctaggaccttggataccaatataccttcatcgacaagagttactatatcctgcagccccagttcaacgagagtgggtttgccaccgagacctaattcgacgagaacaaaatcatctatcaagaacatgaatcctcagcacagtttcagagcaaggagttcagcccaggaaggtgatcgagtggtccttctaaatcctgggacgtcatctgaagggcagcaggataatccaagcacagcaagatcattttcttttagaaaggtcattaactcattatcggcaaaaaggacccattctcttccagtaacgcctgtaggaactactgacaaggctgcatctcctccaaatcaattagataccctgccaactacaactaatgaaggagttgaagcaaaaattaggcgctcactttcagtacctggaaatcgcaaaaacagaagtttgaggagggcagattcattaggtgtcatccgtgtgattccaacaaccccaagacctgtcccagtcgaagcaaccacatcaagcgatataattgaagaaacaatcgatgtccctgaagatggaggcgaagatattcctgaagaagaggcagtctgcagaatttgttttgttgaactcaacgaaggaggtgaaacacttaaaatggagtgcagctgcaaaggagaacttgcacttgcacaccaagactgtgctgtcaaatggtttagcatcaagggaaacaagatatgtgatgtctgtaaacaagaagttcagaatctgccagtgatgttactgagaataccaactcaaactgcaaacaggcgggtagcaaatgctgctcagcagagagcagctcaacaatacagattttggcaggacattccaattctggtgatggttagcatgcttgcgtacttctgtttcttggaacaactcctggttactgatttgcagtcacgtgcactggcaatttcgttgcctttctcgtgtgtgttaggcctcctttcttcaatgatagcatcaactatggtgtcgaagagctatctatgggcgtatgcttcattccagtttgctatcgttatcctgtttgctcatatcttctacaatgtgtacgaactctctactagtagagtatttgaggtggagagctaggaggaatcagcgtttggctcagcaggctgccaatgctgcacagcaccaagaatctggaaatgatggtggaaatgacaacgatgacgctcagcaagggcacgatccaaattctgggaacaatgctgtgtgatgattcaggttcttggtgcaaaaatccagcaccaaaaaaaagattatgaaatggtatgggtgtgaacagctgttttttttatctgtacagcaagtatagctcattcaacgcggcaccagtcacaagctgaaacctggaaaaacatatcttcatatgccacgtggagggcgctcacggatatcattatacatcacgcagagatgaagcaaaacacgatatgtttgtgtattagtccggtagtttgacttcaaatgtatctgttattcattttaagcttaatagatctaatgcattatagaagtacttcggtaagtgtgtgcagcttatagttgtgagttgcgagtatagccccatatagatatacatcaatgaaatgtacctttccagtatattgaggtttgctagccggcacggaacggaagaaatcctcagattgaattgtgatacaattgtctcaactgagaactacagaattgtatgcaatgcgagcgattgaaatacccaagtgatgc

SEQ ID NO: 198618 - DNA, 2073 bp, Zea Mays
atggacccgggcaacaaactggcctttgcaaaagcgcccttcagctcccggaccgcttcccctgagctgctgcccaagaacttcgacaccacttgcccaccctccctggattcttgcggctcttcctcgagctcatcgaatccttcatggagagcgccgagggaccgtccccgtactccggtgatcgagcggcaccggttcaggatggcaatggccaaactacacctgggcataattcgcgaaggccaaacctttctttgcaaataccagctaggaccttggataccaatataccttcatcgacaagagttactatatcctgcagccccagttcaacgagagtgggtttgccaccgagacctaattcgacgagaacaaaatcatctatcaagaacatgaatcctcagcacagtttcagagcaaggagttcagcccaggaaggtgatcgagtggtccttctaaatcctgggacgtcatctgaagggcagcaggataatccaagcacagcaagatcattttcttttagaaaggtcattaactcattatcggcaaaaaggacccattctcttccagtaacgcctgtaggaactactgacaaggctgcatctcctccaaatcaattagataccctgccaactacaactaatgaaggagttgaagcaaaaattaggcgctcactttcagtacctggaaatcgcaaaaacagaagtttgaggagggcagattcattaggtgtcatccgtgtgattccaacaaccccaagacctgtcccagtcgaagcaaccacatcaagcgatataattgaagaaacaatcgatgtccctgaagatggaggcgaagatattcctgaagaagaggcagtctgcagaatttgttttgttgaactcaacgaaggaggtgaaacacttaaaatggagtgcagctgcaaaggagaacttgcacttgcacaccaagactgtgctgtcaaatggtttagcatcaagggaaacaagatatgtgatgtctgtaaacaagaagttcagaatctgccagtgatgttactgagaataccaactcaaactgcaaacaggcgggtagcaaatgctgctcagcagagagcagctcaacaatacagattttggcaggacattccaattctggtgatggttagcatgcttgcgtacttctgtttcttggaacaactcctggttactgatttgcagtcacgtgcactggcaatttcgttgcctttctcgtgtgtgttaggcctcctttcttcaatgatagcatcaactatggtgtcgaagagctatctatgggcgtatgcttcattccagtttgctatcgttatcctgtttgctcatatcttctacaatgtgttgaaagtgaatccagtccttgcagtcttactctcctcattcactgggtttggtattgctattagtacgaactctctactagtagagtatttgaggtggagagctaggaggaatcagcgtttggctcagcaggctgccaatgctgcacagcaccaagaatctggaaatgatggtggaaatgacaacgatgacgctcagcaagggcacgatccaaattctgggaacaatgctgtgtgatgattcagattatgaaatggtatgggtgtgaacagctgttttttttatctgtacagcaagtatagctcattcaacgcggcaccagtcacaagctgaaacctggaaaaacatatcttcatatgccacgtggagggcgctcacggatatcattatacatcacgcagagatgaagcaaaacacgatatgtttgtgtattagtccggtagtttgacttcaaatgtatctgttattcattttaagcttaatagatctaatgcattatagaagtacttcggtaagtgtgtgcagcttatagttgtgagttgcgagtatagccccatatagatatacatcaatgaaatgtacctttccagtatattgaggtttgctagccggcacggaacggaagaaatcctcagattgaattgtgatacaattgtctcaactgagaactacagaattgtatgcaatgcgagcgattgaaatacccaagtgatgc

SEQ ID NO: 198619 - DNA, 1871 bp, Zea Mays
ctgttcagtttattactacctgtcaggacagtccttgacatagaatgtggatttggtacctttggggcacatctttttgagagagatctcttgaccatgtgcattgctaactatgaagcatcaggcagccaagtgcaaattacactagagagaggcattcctgcaatgattggttcatttgcaacgaagcagcttccatatccctatctttcctttgatatggtgcattgtgcgaaatgcaatatcgaatggtacaaaaatgatggcattttcttagttgaagtgaacaggcttttgaggcctgatgggtattttgtatggacatcaaatttgaatacacatagagccttgcgtgacaaagaaaatcaaaagaaatggacagccattcgtgactttgctgagggtctttgttgggagatgctgtcacaacaagatgagacaattgtatggaaaaagacaaataaaagggactgttacaattcgagaaaatctgggcctgagctatgtggccatgatccagaatcaccatactaccaaccactaaacccctgcatatcaggcacaagaagtcagcgttggatccccattgaatatcgtaccacctggccatctcaggctagacaaaactcaacagaattggacatacatggtgtgcatcctgaagtctttgctgatgatacctcaagctgggactccatggtgcgaaactactggtctttgctatctccacttatattttcagaccatccaaagagacccggtgatgaggacccacagccaccatttaacatgctaaggaatgttttagatatgaatgctcactttggtggatttaatgctgctttactgaaggcaggaaagtctgtatgggtgatgaatgttgttcctacagatgccccaaactatctaccgctgatatttgaccggggttttatcggggttcaacatgactggtgtgatgcatttccaacttacccaagaacatatgatatggtgcacgctgatggttttctatcacttcagaagaaccacaagcatagatgttctactcttgacatattcttggaagttgaccgcatcctacgaccagagggctgggtcataatccgtgacgctgcccctcttattgaagcggcaagatctgttgttactcaactcagatgggacgcccgcgttttggatcttgacatagccagtgatgaaaaactactggtctgtcagaagccgtttctcagaaaataatgagcatagtagacactgacacaagatatgaacttattctttcaccctacacactgttacaattgctgtctgagcacaactgagtacaaagtttgggtaaaaaacacgggaagcatgattcagcaaacttgtcatgcatcaccatggaaccgcaaggtgccattaaattgatcggtcaagtgcatgctgcagaaacaggcttggtggctaagctttccaggccaaggttttattgccaggatatagagatgaagccataaaaattactttagtagtgaaaccatatccaataaagagatgctgctgcggtgtacataatcgccgccaatgtgccatataggtataattcattttttcccttgttacaatttctctccttttttctgtaactgtgccaatttgttttattttgtatcttgtatgtaaattggttggtctatatactgatcatcccagactacagcctagtgaaatcaatataattattatttggagatgaatgataagcaagagcaaattataatcattccactatatttatctatcatttctacaattcattatttttgtacattgtacggaacaagagtgataccttcattattcaagaagaataaaatacatttcca

SEQ ID NO: 198620 - DNA, 1906 bp, Zea Mays
aagaaatctgaaagtttcttgtgttgggagaggactaatgggttacattagggataaggttaatcaggggcaagttttacttgataatgtggacatcaagacgttgcaattaaagcgacttagagaccagatcggattggtgaatcaggaacctactctttttgcaactacaattcttgagaatattctttttggcaaacctgaggcgacaaaggcagaggttgggtctacgactacttccgcagtagattaaaggagccctagctttcggaggacaacccagatgccttcaaagttcaaaatgacggtgatgaaggcgctgaaccgcgctggtggcaaggctggaaacaagggtgctgaagctgctcttacttccattgagatggcctctctgttccggcatcacttaggctgacactttgcatattctggtttctatacacgaggcaagacatcatttcttcctatcaagagtttcggctaatagagcttttctgccgtggctagtataatttattttcaattctgttggttcggtgctgatttgttgctttctttctatgagatttgaaaagctcacaagacatgtttctaaacctggcacaatgaataattgtcaccatgaggtcatgaataaggttgcacatttcatgaattgtgatatcacccttgactccgtgataactgagaaattaacatactaacacagccgctgctccagcacaactgtcacggcgtgtgctagggcagtggggctgtcgccaaggacatgcagcttgtgaagcagtgctggagccgtccccatcgccgagcagctcgtgagggtaattcaagcacgctaatgcagtctggtcctacaatagcgatccttggtcttcacctacatcttcacctaccgaacatcaggtgttggtccagtgcaacctgctgtcttcgagctctagcagatcgccttgccttgcgtagccgcgaccacgccggcgctgcagcactacagctttacctcaccgggtttagggtcctccgaccaagccgcgccgacctccactccagcttagaccggcggcggatgcatgcctttctgtcctcgcgttcggatctcagtgtcccacgctgtcgtgccgtctcagtcatccctagctcttcctcgtccgtaccgtgtgtcacagcaaactcttcttcggtcctggcgctcgtctcctcgccatcgttttacggattcggcgtcgtcgagtttcacctcgctgttacaacgtcctggtcttttggagcttcggcaaattgttgtcctgctgcattgtcgtgtggtgctccctactccctagtccctacctagtggtgagttggcgttgatcctgatcttcattttgctgtttccaatcaatttagcacatttaccatagttgtgtatgtcgatatggtgctcgacgtgttgtgattgtcctgggattaagagggtttgttgttggccgtcgcaggcaagttttgcctggtgcagcctaccgtgtgggccgagccgggtccaaatcggattaagaagattttttttcatttatctaataaagatataccttgtgaatttttcctagagctacatgaagaagtaacagttgtgaggtaaattctgttaggctcacaaaaatgggttctctaggttaaaatagttttagggattctcaggcaagtccttaattttggataattaaaacttggtttttataggattatatgagttttagttataaaaatagagcactaaaaattgtgtaagcttatcttgagcatgtgaacccttgggtaaagtttggaactgtttggacaagatttgcttagcaaattaattattcctcagtaaaggaaaagagttttaccctagggtatttaggacacctagtgtcttagtaag

SEQ ID NO: 198621 - DNA, 1291 bp, Zea Mays
agcgacagggcaaggagccagggccgctccgctccgctccgctcgtgctctgctcctgctctctctctctctcggcgtcgattgggcgaccgccgccgcctcccccaggtcttcgctgggcccgtcgccggcgccgagcacccaccagggcaagttttacttgataatgtggacatcaagacgttgcaattaaagcgacttagagaccagatcggattggtgaatcaggaacctactctttttgcaactacaattcttgagaatattctttttggcaaacctgaggcgacaaaggcagaggttgggtctacgactacttccgcagttttctcctaaacacatttgctctgatgttgtttgtcaccataactggcgctgaaccgcgctggtggcaaggctggaaacaagggtgctgaagctgctcttacttcccacaactgtcacggcgtgtgctagggcagtggggctgtcgccaaggacatgcagcttgtgaagcagtgctggagccgtccccatcgccgagcagctcgtgagggtaattcaagcacgctaatgcagtctggtcctacaatagcgatccttggtcttcacctacatcttcacctaccgaacatcaggacattgcttctggctaggtgtataccatgtgacacaggtaagaaccctttcttggactattccatgttgaaccgtttcaacaccttgtcaatgtacgtatcttgacttaatcctataagcctctttgacctatctctatagattcttatgcccaaaatatatgctgcttcccctaagttcttcatagaaaactatttttcagtgaagccttaacgaactccaaaataggaatgtcattcccaaccaataatatgccatccacatacaagatcaaaaatacaacagcgctcccactttccttcttgtaaacacaagcttcttcttcattctgatgaaaaacaaaccctttgaccacttcatcaaaacaaatgttccaactcggagatgcttgcttcaacccataaatggatttctgaagtttgcatatctttccagcattgatcggatcgacaaaaccctcgggctgtatcatatatatgtcctcatcaagtttccattaaagaaagttgttttgacatccatctgccaaattgtaacaccccaggtgttacgataactaaaaatttggcatgtcatcatatacactcgcattaacttgtttgatacacttagaatgcattcactaggatccaaaataatctaagtatgatgttgtgattagtgaagagtgaag

SEQ ID NO: 198622 - DNA, 470 bp, Zea Mays
taatgggttacattagggataaggttaatcaggggcaagttttacttgataatgtggacatcaagacgttgcaattaaagcgacttagagaccagatcggattggtgaatcaggaacctactctttttgcaactacaattcttgagaatattctttttggcaaacctgaggcgacaaaggcagaggttgggtctacgactacttccgcaggcgctgaaccgcgctggtggcaaggctggaaacaagggtgctgaagctgctcttacttccccgctgctccagcacaactgtcacggcgtgtgctagggcagtggggctgtcgccaaggacatgcagcttgtgaagcagtgctggagccgtccccatcgccgagcagctcgtgagggtaattcaagcacgctaatgcagtctggtcctacaatagcgatccttggtcttcacctacatcttcacctaccgaacatcaggta

SEQ ID NO: 198623 - DNA, 1025 bp, Zea Mays
cttgaattctcttaaaacttcattaggatctttgaggtttgatgcaacagctgaagtttagttttctatttataccactggaacttcgtcccgttcagttcctgataagctaagtgcttgtccctgaaatagaatttgtaatcaacaaaccagtcacatgtttgttgcattcttcaggatgaaactgagcccgctatgtattctttttcactgtttataattgttgtttcctaatatactactgtgaatgcttgttctttgtttattttcgtatattgttaattcctaatatacataatttccccaaataacatgataataaatatcggaaaagtggagaactgaacgacaatgtttagcgcaatggtgaacagtgctttatagttggcattaatcttagttcctacatgttgttaatatgtagtctatatactttgattattttttattgattacaaaatattgggaggaccataataattttgaaaaaaatgcttggattgtttctgaggatttgggcttggaaaggcgtaagaaatctgaaagtttcttgtgttgggagaggactaatgggttacattagggataaggttaatcaggggcaagttttacttgataatgtggacatcaagacgttgcaattaaagcgacttagagaccagatcggattggtgaatcaggaacctactctttttgcaactacaattcttgagaatattctttttggcaaacctgaggcgacaaaggcagaggttgggtctacgactacttccgcaggcgctgaaccgcgctggtggcaaggctggaaacaagggtgctgaagctgctcttacttcccacaactgtcacggcgtgtgctagggcagtggggctgtcgccaaggacatgcagcttgtgaagcagtgctggagccgtccccatcgccgagcagctcgtgagggtaattcaagcacgctaatgcagtctggtcctacaatagcgatccttggtcttcacctacatcttcacctaccgaacatcaggta

SEQ ID NO: 198624 - DNA, 653 bp, Zea Mays
gagtgatatgcgtggcacatggctttatgtattgtttcttttcaatcaggcaagttttacttgataatgtggacatcaagacgttgcaattaaagcgacttagagaccagatcggattggtgaatcaggaacctactctttttgcaactacaattcttgagaatattctttttggcaaacctgaggcgacaaaggcagaggttgggtctacgactacttccgcagttttctcctaaacacatttgctctgatgttgtttgtcaccataactggcgctgaaccgcgctggtggcaaggctggaaacaagggtgctgaagctgctcttacttccattgagatggcctctctgttccggcatcacttaggctgacactttgcatattctggtttctatacacgagctcacaagacatgtttctaaacctggcacaatgaataattgtcaccatgaggtcatgaataagcacaactgtcacggcgtgtgctagggcagtggggctgtcgccaaggacatgcagcttgtgaagcagtgctggagccgtccccatcgccgagcagctcgtgagggtaattcaagcacgctaatgcagtctggtcctacaatagcgatccttggtcttcacctacatcttcacctaccgaacatcaggta

SEQ ID NO: 198625 - DNA, 536 bp, Zea Mays
gttgctttttgctgggtgagtgatatgcgtggcacatggctttatgtattgtttcttttcaatcaggcaagttttacttgataatgtggacatcaagacgttgcaattaaagcgacttagagaccagatcggattggtgaatcaggaacctactctttttgcaactacaattcttgagaatattctttttggcaaacctgaggcgacaaaggcagaggttgggtctacgactacttccgcaggcgctgaaccgcgctggtggcaaggctggaaacaagggtgctgaagctgctcttacttccattgagatggcctctctgttccggcatcacttaggctgacactttgcatattctggtttctatacacgagggcagtggggctgtcgccaaggacatgcagcttgtgaagcagtgctggagccgtccccatcgccgagcagctcgtgagggtaattcaagcacgctaatgcagtctggtcctacaatagcgatccttggtcttcacctacatcttcacctaccgaacatcaggta

SEQ ID NO: 198626 - DNA, 740 bp, Zea Mays
ttaatatgtttggttcgaatcttacactggtcttgcattgtcttatgcatggcacatggcagtatgatcagtgactcagttttactttgaaattaagctacttgcaggtacatggtagttgctttttgctgggtgagtgatatgcgtggcacatggctttatgtattgtttcttttcaatcaggcaagttttacttgataatgtggacatcaagacgttgcaattaaagcgacttagagaccagatcggattggtgaatcaggaacctactctttttgcaactacaattcttgagaatattctttttggcaaacctgaggcgacaaaggcagaggttgggtctacgactacttccgcaggcgctgaaccgcgctggtggcaaggctggaaacaagggtgctgaagctgctcttacttccattgagatggcctctctgttccggcatcacttaggctgacactttgcatattctggtttctatacacgagctcacaagacatgtttctaaacctggcacaatgaataattgtcaccatgaggtcatgaataagcacaactgtcacggcgtgtgctagggcagtggggctgtcgccaaggacatgcagcttgtgaagcagtgctggagccgtccccatcgccgagcagctcgtgagggtaattcaagcacgctaatgcagtctggtcctacaatagcgatccttggtcttcacctacatcttcacctaccgaacatcaggta

SEQ ID NO: 198627 - DNA, 1440 bp, Zea Mays
ctgcatctccatacaaagttagtaattagcagacccctatttaatatgtttggttcgaatcttacactggtcttgcattgtcttatgcatggcacatggcagtatgatcagtgactcagttttactttgaaattaagctacttgcaggtacatggtagttgctttttgctgggtgagtgatatgcgtggcacatggctttatgtattgtttcttttcaatcagtgagtgatatttcttgaattctcttaaaacttcattaggatctttgaggtttgatgcaacagctgaagtttagttttctatttataccactggaacttcgtcccgttcagttcctgataagctaagtgcttgtccctgaaatagaatttgtaatcaacaaaccagtcacatgtttgttgcattcttcaggatgaaactgagcccgctatgtattctttttcactgtttataattgttgtttcctaatatactactgtgaatgcttgttctttgtttattttcgtatattgttaattcctaatatacataatttccccaaataacatgataataaatatcggaaaagtggagaactgaacgacaatgtttagcgcaatggtgaacagtgctttatagttggcattaatcttagttcctacatgttgttaatatgtagtctatatactttgattattttttattgattacaaaatattgggaggaccataataattttgaaaaaaatgcttggattgtttctgaggatttgggcttggaaaggcgtaagaaatctgaaagtttcttgtgttgggagaggactaatgggttacattagggataaggttaatcaggggcaagttttacttgataatgtggacatcaagacgttgcaattaaagcgacttagagaccagatcggattggtgaatcaggaacctactctttttgcaactacaattcttgagaatattctttttggcaaacctgaggcgacaaaggcagaggttgggtctacgactacttccgcagttttctcctaaacacatttgctctgatgttgtttgtcaccataactggcgctgaaccgcgctggtggcaaggctggaaacaagggtgctgaagctgctcttacttccattgagatggcctctctgttccggcatcacttaggctgacactttgcatattctggtttctatacacgagctcacaagacatgtttctaaacctggcacaatgaataattgtcaccatgaggtcatgaataagcacaactgtcacggcgtgtgctagggcagtggggctgtcgccaaggacatgcagcttgtgaagcagtgctggagccgtccccatcgccgagcagctcgtgagggtaattcaagcacgctaatgcagtctggtcctacaatagcgatccttggtcttcacctacatcttcacctaccgaacatcaggta

SEQ ID NO: 198628 - DNA, 1394 bp, Zea Mays
agcgacagggcaaggagccagggccgctccgctccgctccgctcgtgctctgctcctgctctctctctctctcggcgtcgattgggcgaccgccgccgcctcccccaggtcttcgctgggcccgtcgccggcgccgagcacccaccaggtacatggtagttgctttttgctgggtgagtgatatgcgtggcacatggctttatgtattgtttcttttcaatcagtgagtgatatttcttgaattctcttaaaacttcattaggatctttgaggtttgatgcaacagctgaagtttagttttctatttataccactggaacttcgtcccgttcagttcctgataagctaagtgcttgtccctgaaatagaatttgtaatcaacaaaccagtcacatgtttgttgcattcttcaggatgaaactgagcccgctatgtattctttttcactgtttataattgttgtttcctaatatactactgtgaatgcttgttctttgtttattttcgtatattgttaattcctaatatacataatttccccaaataacatgataataaatatcggaaaagtggagaactgaacgacaatgtttagcgcaatggtgaacagtgctttatagttggcattaatcttagttcctacatgttgttaatatgtagtctatatactttgattattttttattgattacaaaatattgggaggaccataataattttgaaaaaaatgcttggattgtttctgaggatttgggcttggaaaggcgtaagaaatctgaaagtttcttgtgttgggagaggactaatgggttacattagggataaggttaatcaggggcaagttttacttgataatgtggacatcaagacgttgcaattaaagcgacttagagaccagatcggattggtgaatcaggaacctactctttttgcaactacaattcttgagaatattctttttggcaaacctgaggcgacaaaggcagaggttgggtctacgactacttccgcaggcgctgaaccgcgctggtggcaaggctggaaacaagggtgctgaagctgctcttacttccattgagatggcctctctgttccggcatcacttaggctgacactttgcatattctggtttctatacacgagctcacaagacatgtttctaaacctggcacaatgaataattgtcaccatgaggtcatgaataagcacaactgtcacggcgtgtgctagggcagtggggctgtcgccaaggacatgcagcttgtgaagcagtgctggagccgtccccatcgccgagcagctcgtgagggtaattcaagcacgctaatgcagtctggtcctacaatagcgatccttggtcttcacctacatcttcacctaccgaacatcaggta

SEQ ID NO: 198629 - DNA, 690 bp, Zea Mays
agcgacagggcaaggagccagggccgctccgctccgctccgctcgtgctctgctcctgctctctctctctctcggcgtcgattgggcgaccgccgccgcctcccccaggtcttcgctgggcccgtcgccggcgccgagcacccaccagggcaagttttacttgataatgtggacatcaagacgttgcaattaaagcgacttagagaccagatcggattggtgaatcaggaacctactctttttgcaactacaattcttgagaatattctttttggcaaacctgaggcgacaaaggcagaggttgggtctacgactacttccgcagttttctcctaaacacatttgctctgatgttgtttgtcaccataactggcgctgaaccgcgctggtggcaaggctggaaacaagggtgctgaagctgctcttacttccattgagatggcctctctgttccggcatcacttaggctgacactttgcatattctggtttctatacacgagcacaactgtcacggcgtgtgctagggcagtggggctgtcgccaaggacatgcagcttgtgaagcagtgctggagccgtccccatcgccgagcagctcgtgagggtaattcaagcacgctaatgcagtctggtcctacaatagcgatccttggtcttcacctacatcttcacctaccgaacatcaggta

SEQ ID NO: 198630 - DNA, 765 bp, Zea Mays
agcgacagggcaaggagccagggccgctccgctccgctccgctcgtgctctgctcctgctctctctctctctcggcgtcgattgggcgaccgccgccgcctcccccaggtcttcgctgggcccgtcgccggcgccgagcacccaccagggcaagttttacttgataatgtggacatcaagacgttgcaattaaagcgacttagagaccagatcggattggtgaatcaggaacctactctttttgcaactacaattcttgagaatattctttttggcaaacctgaggcgacaaaggcagaggttgggtctacgactacttccgcagttttctcctaaacacatttgctctgatgttgtttgtcaccataactggcgctgaaccgcgctggtggcaaggctggaaacaagggtgctgaagctgctcttacttccattgagatggcctctctgttccggcatcacttaggctgacactttgcatattctggtttctatacacgagctcacaagacatgtttctaaacctggcacaatgaataattgtcaccatgaggtcatgaataagccgctgctccagcacaactgtcacggcgtgtgctagggcagtggggctgtcgccaaggacatgcagcttgtgaagcagtgctggagccgtccccatcgccgagcagctcgtgagggtaattcaagcacgctaatgcagtctggtcctacaatagcgatccttggtcttcacctacatcttcacctaccgaacatcaggta

SEQ ID NO: 198631 - DNA, 651 bp, Zea Mays
aaaagagtaaaaaaccgacagcgacagggcaaggagccagggccgctccgctccgctccgctcgtgctctgctcctgctctctctctctctcggcgtcgattgggcgaccgccgccgcctcccccaggtcttcgctgggcccgtcgccggcgccgagcacccaccagggcaagttttacttgataatgtggacatcaagacgttgcaattaaagcgacttagagaccagatcggattggtgaatcaggaacctactctttttgcaactacaattcttgagaatattctttttggcaaacctgaggcgacaaaggcagaggttgggtctacgactacttccgcagttttctcctaaacacatttgctctgatgttgtttgtcaccataactggcgctgaaccgcgctggtggcaaggctggaaacaagggtgctgaagctgctcttacttccccgctgctccagcacaactgtcacggcgtgtgctagggcagtggggctgtcgccaaggacatgcagcttgtgaagcagtgctggagccgtccccatcgccgagcagctcgtgagggtaattcaagcacgctaatgcagtctggtcctacaatagcgatccttggtcttcacctacatcttcacctaccgaacatcaggta

SEQ ID NO: 198632 - DNA, 605 bp, Zea Mays
caaaagagtaaaaaaccgacagcgacagggcaaggagccagggccgctccgctccgctccgctcgtgctctgctcctgctctctctctctctcggcgtcgattgggcgaccgccgccgcctcccccaggtcttcgctgggcccgtcgccggcgccgagcacccaccagggcaagttttacttgataatgtggacatcaagacgttgcaattaaagcgacttagagaccagatcggattggtgaatcaggaacctactctttttgcaactacaattcttgagaatattctttttggcaaacctgaggcgacaaaggcagaggttgggtctacgactacttccgcaggcgctgaaccgcgctggtggcaaggctggaaacaagggtgctgaagctgctcttacttccccgctgctccagcacaactgtcacggcgtgtgctagggcagtggggctgtcgccaaggacatgcagcttgtgaagcagtgctggagccgtccccatcgccgagcagctcgtgagggtaattcaagcacgctaatgcagtctggtcctacaatagcgatccttggtcttcacctacatcttcacctaccgaacatcaggta

SEQ ID NO: 198633 - DNA, 589 bp, Zea Mays
ctttatgtattgtttcttttcaatcaggcaagttttacttgataatgtggacatcaagacgttgcaattaaagcgacttagagaccagatcggattggtgaatcaggaacctactctttttgcaactacaattcttgagaatattctttttggcaaacctgaggcgacaaaggcagaggttgggtctacgactacttccgcagttttctcctaaacacatttgctctgatgttgtttgtcaccataactgtagattaaaggagccctagctttcggaggacaacccagatgccttcaaagttcaaaatgacggtgatgaaggtggacaagaaacaaaattttggatggttcaaaattttgctataggtcctagcaacgcttatgtgttgctataggggggttattttgtagtgaactcccaggccatatgctagcttactttgaggagtgcccactatttgtgcatgctacaggcgctatcattacatttccatgacctgtaaagtggtgacatctttaaatacagaatggccacattagcgaaccagaggtttcacacgagtattcccttgtgatgagaaagtcccat

SEQ ID NO: 198634 - DNA, 1499 bp, Zea Mays
cttttgggcaggggataaaacaatttttgttatggctgatctgttagccctaaggaatttgttactgctttttaggaattatatatactagttatagatgagcaaatgaattagcacacctggataatgtatgcttctattgcctaagctgcatctccatacaaagttagtaattagcagacccctatttaatatgtttggttcgaatcttacactggtcttgcattgtcttatgcatggcacatggcagtatgatcagtgactcagttttactttgaaattaagctacttgcaggtacatggtagttgctttttgctgggtgagtgatatgcgtggcacatggctttatgtattgtttcttttcaatcagtgagtgatatttcttgaattctcttaaaacttcattaggatctttgaggtttgatgcaacagctgaagtttagttttctatttataccactggaacttcgtcccgttcagttcctgataagctaagtgcttgtccctgaaatagaatttgtaatcaacaaaccagtcacatgtttgttgcattcttcaggatgaaactgagcccgctatgtattctttttcactgtttataattgttgtttcctaatatactactgtgaatgcttgttctttgtttattttcgtatattgttaattcctaatatacataatttccccaaataacatgataataaatatcggaaaagtggagaactgaacgacaatgtttagcgcaatggtgaacagtgctttatagttggcattaatcttagttcctacatgttgttaatatgtagtctatatactttgattattttttattgattacaaaatattgggaggaccataataattttgaaaaaaatgcttggattgtttctgaggatttgggcttggaaaggcgtaagaaatctgaaagtttcttgtgttgggagaggactaatgggttacattagggataaggttaatcaggggcaagttttacttgataatgtggacatcaagacgttgcaattaaagcgacttagagaccagatcggattggtgaatcaggaacctactctttttgcaactacaattcttgagaatattctttttggcaaacctgaggcgacaaaggcagaggttgggtctacgactacttccgcagtagattaaaggagccctagctttcggaggacaacccagatgccttcaaagttcaaaatgacggtgatgaaggtggacaagaaacaaaattttggatggttcaaaattttgctataggtcctagcaacgcttatgtgttgctataggggggttattttgtagtgaactcccaggccatatgctagcttactttgaggagtgcccactatttgtgcatgctacaggcgctatcattacatttccatgacctgtaaagtggtgacatctttaaatacagaatggccacattagcgaaccagaggtttcacacgagtattcccttgtgatgagaaagtcccat

SEQ ID NO: 198635 - DNA, 735 bp, Zea Mays
agcgacagggcaaggagccagggccgctccgctccgctccgctcgtgctctgctcctgctctctctctctctcggcgtcgattgggcgaccgccgccgcctcccccaggtcttcgctgggcccgtcgccggcgccgagcacccaccagggcaagttttacttgataatgtggacatcaagacgttgcaattaaagcgacttagagaccagatcggattggtgaatcaggaacctactctttttgcaactacaattcttgagaatattctttttggcaaacctgaggcgacaaaggcagaggttgggtctacgactacttccgcagaatccttcatttcttgttttgtagttttctcctaaacacatttgctctgatgttgtttgtcaccataactgtagattaaaggagccctagctttcggaggacaacccagatgccttcaaagttcaaaatgacggtgatgaaggtggacaagaaacaaaattttggatggttcaaaattttgctataggtcctagcaacgcttatgtgttgctataggggggttattttgtagtgaactcccaggccatatgctagcttactttgaggagtgcccactatttgtgcatgctacaggcgctatcattacatttccatgacctgtaaagtggtgacatctttaaatacagaatggccacattagcgaaccagaggtttcacacgagtattcccttgtgatgagaaagtcccat

SEQ ID NO: 198636 - DNA, 730 bp, Zea Mays
aaaagagtaaaaaaccgacagcgacagggcaaggagccagggccgctccgctccgctccgctcgtgctctgctcctgctctctctctctctcggcgtcgattgggcgaccgccgccgcctcccccaggtcttcgctgggcccgtcgccggcgccgagcacccaccagggcaagttttacttgataatgtggacatcaagacgttgcaattaaagcgacttagagaccagatcggattggtgaatcaggaacctactctttttgcaactacaattcttgagaatattctttttggcaaacctgaggcgacaaaggcagaggttgggtctacgactacttccgcagttttctcctaaacacatttgctctgatgttgtttgtcaccataactgtagattaaaggagccctagctttcggaggacaacccagatgccttcaaagttcaaaatgacggtgatgaaggtggacaagaaacaaaattttggatggttcaaaattttgctataggtcctagcaacgcttatgtgttgctataggggggttattttgtagtgaactcccaggccatatgctagcttactttgaggagtgcccactatttgtgcatgctacaggcgctatcattacatttccatgacctgtaaagtggtgacatctttaaatacagaatggccacattagcgaaccagaggtttcacacgagtattcccttgtgatgagaaagtcccat

SEQ ID NO: 198637 - DNA, 982 bp, Zea Mays
atatcggaaaagtggagaactgaacgacaatgtttagcgcaatggtgaacagtgctttatagttggcattaatcttagttcctacatgttgttaatatgtagtctatatactttgattattttttattgattacaaaatattgggaggaccataataattttgaaaaaaatgcttggattgtttctgaggatttgggcttggaaaggcgtaagaaatctgaaagtttcttgtgttgggagaggactaatgggttacattagggataaggttaatcaggggcaagttttacttgataatgtggacatcaagacgttgcaattaaagcgacttagagaccagatcggattggtgaatcaggaacctactctttttgcaactacaattcttgagaatattctttttggcaaacctgaggcgacaaaggcagaggttgggtctacgactacttccgcaggttcattgctcttcttcctagtggccacaacactcatgcgggttctacttctctttatattctaatttctaatgccatttgcacttcatttctgttttgatttcagaatccttcatttcttgttttgtagttttctcctaaacacatttgctctgatgttgtttgtcaccataactggtatgctactcacatccatctcaatcaatccaaccatataaatctgcattatactccccataaacagacttgtggacgttttccattaggccttccaatgtcttcataatcccctaaatagacttgtgaacaatggacaagcatgtctaaattttcatgtctgaacctatgtgctgcttgttctgttcatactactaggcctatgagtattaatttttatttgattggattagatcaagactctcactcccctgttcagattaatactaaattttatttgatttgattagatcggattggttgggtgtgcatttgttgcagctcgagctgtgtgtgtaattgatgcagct

SEQ ID NO: 198638 - DNA, 1659 bp, Zea Mays
cgacggttagtttattgcacgccgtccaccagccggtcctgcgctctcgagtcgagactccaccttccattcatttcatctgctccatctccctctctgttcgccggcgtataataagcttcccctttctgcaactgatctgatccgggctgccgtgagctctgctcgtcctgatggagttcaagagggatgtatggagcctgctcctcgtgctgctcctcgggcagctcgtcgccttctccatggccgcctcaagcttcgcctcctccctcattgctaatcttggagtcgatgccccactgacacagtctttcttagcctacctgttgctgaccttagtctatgtaccaatcgtcctgcgtcgacggcagaagctgcaaatagcttggtactggtacctagctctggccttctttgatgtacaggggaactatcttgttgtgaaggcgtaccagtactcatacattaccagtgtgactttgttggattgctggactgttgtatgggtcgtcatgctcacctggtacgcactgggcacaagatactcactctggcagttcgtgggggcagggacctgtgtggcagggctcgcccttgtgctgctttcagatgcaaaatctcaagatgagcaagatccgaaaaaaataccacttctgggggatgcccttgttattgctgggacagttggttttgcatttagcaatgttggggaggaatactgtgtcaagaaaaaggatagagttgaagttgttgcaatgcttggtctctttgggttgctgatcagcacagcgcagatacttgtatttgaaaggaagggcctagaagcagttacatggtctccaacaatgataagtctgtttgcaggatttgcagtggcaattttcgtattctacacagttgctcctttcgttcttaagatgagtggagctacattgttcaacctttcactgctaacatctgacatgtgggcagtcgccattcgagttttattctatcagcaagagataaacaggttgtactacctagcattcgcagttgtggccattggattaatcatctattcgttgaatgatagatcttcagatgatgaaacagctggaagtacagaagcaccggcccaatatcagcaacttccaattgaagacaattcaacaagaattggttctagttcaggtagccaagaaaggacacataaggaagaagttcatatctgttagtgggataataatgtattaatgaaaacgtttaattggcccaagaagctaagcaagatgaggaagagaatcagaattaattttctttacaagtcagtccagcagattattcacaagagcagacccattgctgaaggctcccgcatcagtgagatctaaggaagggataatacatcgggtcaaaatgatctttgactagggattgtgaacaatcacagctggtctgcaaagcataatagcaacagtatgaacatgtaaagggagttactagtcactaaagctctttcaagaattgtctatgaaggaaaaaaaattctagatagtgtatggatagcttacatgctttactggaatgcagaattatgatttaatgatattttctatattactcattgttaaattctatgagaagtatcatgccccgtgaattggaagctaaaagggg

SEQ ID NO: 198639 - DNA, 2122 bp, Zea Mays
ccagccggtcctgcgctctcgagtcgagactccaccttccattcatttcatctgctccatctccctctctgttcgccggcgtataataagcttcccctttctgcaactgatctgatccgggctgccgtgagctctgctcgtcctgatggagttcaagagggatgtatggagcctgctcctcgtgctgctcctcgggcagctcgtcgccttctccatggccgcctcaagcttcgcctcctccctcattgctaatcttggtattcaatctttcacctctcattgagctgaccagaatacacagacttgttggtgtccatggtaatttacttgatgattcttatctggatagtggtaaattttgttacttaccatgaacatcgtgcaggagtcgatgccccactgacacagtctttcttagcctacctgttgctgaccttagtctatgtaccaatcgtcctgcgtcgacggcagaagctgcaaatagcttggtactggtacctagctctggccttctttgatgtacaggggaactatcttgttgtgaaggcgtaccagtactcatacattaccagtgtgactttgttggattgctggactgttgtatgggtcgtcatgctcacctggtacgcactgggcacaagatactcactctggcagttcgtgggggcagggacctgtgtggcagggctcgcccttgtgctgctttcagatgcaaaatctcaagatgagcaagatccgaaaaaaataccacttctgggggatgcccttgttattgctgggacagttggttttgcatttagcaatgttggggaggaatactgtgtcaagaaaaaggatagagttgaagttgttgcaatgcttggtctctttgggttgctgatcagcacagcgcagatgtatcctcaaaaattcattattagttatataacctgtatagcaaactggcatgatctattggtaatcacatacattgctctatttcgcaaggttaaactcttgccacagttttcctggaacaaaaaagtagtaactgtgtaacccatattaatcttaaaaattagttaaataaactggcatgatctgtcgaatgacatctatatattgtctcccttttgtcaagttaaactaacagcacaattctttggaacaaaagttgtaactataaatatgacccaggttcttgtaatcttttaacttgatgaaccttagacttgtatttgaaaggaagggcctagaagcagttacatggtctccaacaatgataagtctgtttgcaggatttgcagtggcaattttcgtattctacacagttgctcctttcgttcttaaggttaagatctccaacatgtcaggcatgacatgagcttcacaaggaggaggcaacactagaaacttaggccctgtcaaatggttatggtttattaaaaataaacacagaataatgatgagtggagctacattgttcaacctttcactgctaacatctgacatgtgggcagtcgccattcgagttttattctatcagcaagagataaacaggttgtactacctagcattcgcagttgtggccattggattaatcatctattcgttgaatgatagatcttcagatgatgaaacagctggaagtacagaagcaccggcccaatatcagcaacttccaattgaagacaattcaacaagaattggttctagttcaggaaaacgtttaattggcccaagaagctaagcaagatgaggaagagaatcagaattaattttctttacaagtcagtccagcagattattcacaagagcagacccattgctgaaggctcccgcatcagtgagatctaaggaagggataatacatcgggtcaaaatgatctttgactagggattgtgaacaatcacagctggtctgcaaagcataatagcaacagtatgaacatgtaaagggagttactagtcactaaagctctttcaagaattgtctatgaaggaaaaaaaattctagatagtgtatggatagcttacatgctttactggaatgcagaattatgatttaatgatattttctatattactcattgttaaattctatgagaagtatcatgccccgtgaattggaagctaaaagggg

SEQ ID NO: 198640 - DNA, 1482 bp, Zea Mays
ccccaaatcatcccaagcgctccaaccgctcgcagccctaaatctaatccgtcgtcttccgggtcgccatccgccctcatcccctcacgctcaaaccaaaccctagcaaaccctagcagatgtcagcccacgacgaggacggcggccgccgccgcaggacccttgccaaggtttcactctcgttggtctcgagcaccatggcggaggcctccacctactccttagacgcagttaagacgcgccacctctagctccaccacagccccggcggcgcgggcgtgcgcggcgtaatccgggtcgcggccgagctcgtccgagatagcggggtttaacggggcttaaccccctccgttctccgccacctgatgtacacccgctttgcatcgtggggttccagcatcttcggtccaccctcgctagcaactgggggaggatggcctttttgggaaggcgctcgccggtggactttcaggtgttgctgcacagtcactgatagggcagccgttctgggtttcctatgagaaactgcaccaaacatcagggccgacatgttgtgttgggcgcctttccatggttgcagggccggcacggatgtatggttgtcgtgctgagtgagcaggccggaagatgctcttttagtactttgtctgatcaagtccatttagattttccctatgtcaaactattttacctttgactatcaatttttaaacttgacaggctgatgacacaattcacattattactaggtttattatgaaaaagacagcatattcttgacgatattgctatatgaagtgtcatactaagagactactgatcggatggacgagtgtattattttagtagttagtggtgcttgtttagaactaagattgcaaatacactgagatgatttgggtattataatacaagccaagctgcaaatatggaaccatgcaacttccacaattagtcaagttatctttgggtcctgcttttaattcttgggattccaaactcatgtttggtcaagacaaggacattacgacattgtgcaatgggctggcttttgataaactcgaatgtggaggtggcttgctactgcaagccttgttactggcttataaatctggcttccaagtgtgggatgtggaacatgtttatgatgtaagatagctagatacagacatgatggctctatttcatttattcaagtgctaaaggatccaattttcacaaccgaatctcgagacagatttgtagatgtacggccatcgctagctcttgcatgtgatcgtgtatgattgcaacaatcctgacaaaatatggtggtactttatattttggcatattgtgcacaaaaacaagtgtcttctatgaccaccgtgatttatgtattttcaaacgaaattttatggcacttcttgttgtgttttacgcttctactaaaaaacagtcttactgcgttttacaccaaatttatgacacttttgatgtatt

SEQ ID NO: 198641 - DNA, 2555 bp, Zea Mays
cgcccccaaatcatcccaagcgctccaaccgctcgcagccctaaatctaatccgtcgtcttccgggtcgccatccgccctcatcccctcacgctcaaaccaaaccctagcaaaccctagcagatgtcagcccacgacgaggacggcggccgccgccgcaggacccttgccaaggtttcactctcgttggtctcgagcaccatggcggaggcctccacctactccttagacgcagttaagacgcgccacctctagctccaccacagccccggcggcgcgggcgtgcgcggcgtaatccgggtcgcggccgagctcgtccgagatagcggggtttaacggggcttaaccccctccgttctccgccacctgatgtacacccgctttgcatcgtggggttccagcatcttcggtccaccctcgctagcaactgggggaggatggcctttttgggaaggcgctcgccggtggactttcaggtgttgctgcacagtcactgatagggcagccgttctgggtttcctatgagaaactgcaccaaacatcaggtattttatcattttggcaatcgagtgtgtttcatggtagaaccatttttatgttcattactagagtgtgggcttttatcctttgctgtctccaaggaaacatggatgaaattgctacgcctcacattgtattttgacaatctacaagattcatgagctccacagaaaactgacaatctcatccattatcccttttctattaacaaagttgtttgctcaatctatatttgtgtgatttatagcctcacgtcggaagttatatatgtcattcaaaatttgacatctatagatatttattcataacttttaatcaaagtataaggatgaaagaagattttaaaatgtgatgtatatgaactaaataaccttagcttatgactgcaataattggacgcccggtgggaaatcctctcagtgccagatgtgatggaccatcctgccggtgtcacctctagccttcgcttggtaattgtaattcggcagcgactgaaaccatggctcaattgcagggccgacatgttgtgttgggcgcctttccatggttgcagggccggcacggatgtatggttgtcgtgctgagtgagcaggccggaagatgctcttttagtactttgtctgatcaagtccatttagattttccctatgtcaaactattttacctttgactatcaatttttaaacttgacaggctgatgacacaattcacattattactaggtttattatgaaaaagacagcatattcttgacgatattgctatatgaagtgtcatactaagagactactgatcggatggacgagtgtattattttagtagttagtggtgcttgtttagaactaagattgcaaatacactgagatgatttgggtattataatacaagccaagctgcaaatatggaaccatgcaacttccacaattagtcaagttatctttgggtcctgcttttaattcttgggattccaaactcatgtttggtcaagacaaggacattacgacattgtatattctacatacttttattctctctaataatatgttattatgtaaatgttataatttcaagctgaggactgattatgctctggtttactgagttatgaattcccactttgtcatgaaaattacttcggttttaccatggtcagaactgtatgtaaggttgactccaatgttgagcaaaaagttggttatatactctgacttcataattagagttccatattgaaaaatgcatatagtaaaataaaaatgttgtccacattttaattctccagtctctcaaccatgcaaaattgaatgtaatcttttacaactctttgtttgtacacatcattctttatgcatgttttgagttatgttgaaattgaccactatctttggctttttgcatagtgagaataaaacaaatagtagtgtctatatgtctgttctttactatcatgtaagctgtatatacaccaaaccaatgtatgatgcacctaaggcttgggtttttactttttgagtattaatccatgtaaacaatgaactaaaacccttcttacctgtcatgttttgcaggtgcaatgggctggcttttgataaactcgaatgtggaggtggcttgctactgcaagccttgttactggcttataaatctggcttccaagtgtgggatgtggaacatgtttatgatgtaagatagctagatacagacatgatggctctatttcatttattcaagtgctaaaggatccaattttcacaaccgaatctcgagacagatttgtagatgtacggccatcgctagctcttgcatgtgatcgtgtatgattgcaacaatcctgacaaaatatggtggtactttatattttggcatattgtgcacaaaaacaagtgtcttctatgaccaccgtgatttatgtattttcaaacgaaattttatggcacttcttgttgtgttttacgcttctactaaaaaacagtcttactgcgttttacaccaaatttatgacacttttgatgtatt

SEQ ID NO: 198642 - DNA, 950 bp, Zea Mays
atccgccccactacgcccccaaatcatcccaagcgctccaaccgctcgcagccctaaatctaatccgtcgtcttccgggtcgccatccgccctcatcccctcacgctcaaaccaaaccctagcaaaccctagcagatgtcagcccacgacgaggacggcggccgccgccgcaggacccttgccaaggtttcactctcgttggtctcgagcaccatggcggaggcctccacctactccttagacgcagttaagacgcgccacctctagctccaccacagccccggcggcgcgggcgtgcgcggcgtaatccgggtcgcggccgagctcgtccgagatagcggggtttaacggggcttaaccccctccgttctccgccacctgatgtacacccgctttgcatcgtggggttccagcatcttcggtccaccctcgctagcaactgggggaggatggcctttttgggaaggcgctcgccggtggactttcaggtgttgctgcacaggtgcaatgggctggcttttgataaactcgaatgtggaggtggcttgctactgcaagccttgttactggcttataaatctggcttccaagtgtgggatgtggaacatgtttatgatgtaagatagctagatacagacatgatggctctatttcatttattcaagtgctaaaggatccaattttcacaaccgaatctcgagacagatttgtagatgtacggccatcgctagctcttgcatgtgatcgtgtatgattgcaacaatcctgacaaaatatggtggtactttatattttggcatattgtgcacaaaaacaagtgtcttctatgaccaccgtgatttatgtattttcaaacgaaattttatggcacttcttgttgtgttttacgcttctactaaaaaacagtcttactgcgttttacaccaaatttatgacacttttgatgtatt

SEQ ID NO: 198643 - DNA, 1882 bp, Zea Mays
ggatccgccccactacgcccccaaatcatcccaagcgctccaaccgctcgcagccctaaatctaatccgtcgtcttccgggtcgccatccgccctcatcccctcacgctcaaaccaaaccctagcaaaccctagcagatgtcagcccacgacgaggacggcggccgccgccgcaggacccttgccaaggtttcactctcgttggtctcgagcaccatggcggaggcctccacctactccttagacgcagttaagacgcgccacctctagctccaccacagccccggcggcgcgggcgtgcgcggcgtaatccgggtcgcggccgagctcgtccgagatagcggggtttaacggggcttaaccccctccgttctccgccacctgatgtacacccgctttgcatcgtggggttccagcatcttcggtccaccctcgctagcaactgggggaggatggcctttttgggaaggcgctcgccggtggactttcaggtgttgctgcacagtcactgatagggcagccgttctgggtttcctatgagaaactgcaccaaacatcaggctgatgacacaattcacattattactaggtttattatgaaaaagacagcatattcttgacgatattgctatatgaagtgtcatactaagagactactgatcggatggacgagtgtattattttagtagttagtggtgcttgtttagaactaagattgcaaatacactgagatgatttgggtattataatacaagccaagctgcaaatatggaaccatgcaacttccacaattagtcaagttatctttgggtcctgcttttaattcttgggattccaaactcatgtttggtcaagacaaggacattacgacattgtatattctacatacttttattctctctaataatatgttattatgtaaatgttataatttcaagctgaggactgattatgctctggtttactgagttatgaattcccactttgtcatgaaaattacttcggttttaccatggtcagaactgtatgtaaggttgactccaatgttgagcaaaaagttggttatatactctgacttcataattagagttccatattgaaaaatgcatatagtaaaataaaaatgttgtccacattttaattctccagtctctcaaccatgcaaaattgaatgtaatcttttacaactctttgtttgtacacatcattctttatgcatgttttgagttatgttgaaattgaccactatctttggctttttgcatagtgagaataaaacaaatagtagtgtctatatgtctgttctttactatcatgtaagctgtatatacaccaaaccaatgtatgatgcacctaaggcttgggtttttactttttgagtattaatccatgtaaacaatgaactaaaacccttcttacctgtcatgttttgcaggtgcaatgggctggcttttgataaactcgaatgtggaggtggcttgctactgcaagccttgttactggcttataaatctggcttccaagtgtgggatgtggaacatgtttatgatgtaagatagctagatacagacatgatggctctatttcatttattcaagtgctaaaggatccaattttcacaaccgaatctcgagacagatttgtagatgtacggccatcgctagctcttgcatgtgatcgtgtatgattgcaacaatcctgacaaaatatggtggtactttatattttggcatattgtgcacaaaaacaagtgtcttctatgaccaccgtgatttatgtattttcaaacgaaattttatggcacttcttgttgtgttttacgcttctactaaaaaacagtcttactgcgttttacaccaaatttatgacacttttgatgtatt

SEQ ID NO: 198644 - DNA, 2329 bp, Zea Mays
cacacacaaaaaaaacctagcgctccacctcaccgatagaaatttgtgattttgtcattatcagttttggttgtctgttattatgtcatcccgtatctataactagttgaagcgcacatcgttccaatcgtcgccgccggctacctcctccagccgccgcgcctccctcctccacccgctgccgcctccctccaaaacttgtcgtcgtatccctccaacacccgcatctggcgcagacgaccatacacccgctctgatgctttaaatcaatgtgtatggggttccaagcgtctgacctgacaaagaccgccccaagcaacgatgattcttgaagcgattgcagagataaaattgaaagggctgatttccttgatgtgcgcttcaacgagttggagaggatacttcgccaaccgaacaagcctaagtgggggtgatgatgagccaccggaggcgttctcgcgctgccggctcgccgcctggcgacgccagtacgggtacgccccctactcctgagaagtcgggacgggtccggccgtgggcggcgacagcgtcgaaccggaaggtgctggtgttcgcgctggcgttccgcgcggccaacgcgctgctcgtgcgcacgtacttcaaccctgatgagcactggcagtgtctcgaggtcgcccaccgcgtcgccttcgggtatggtcatctcacgtgggagtggaagcggggcctgcgcagttatctccacccattgctctttgctgctttgtacaagaccctggcgctactccatatggacactccgtgggttatggtgatggctccacgtctcgtgcaatctttgtttgcagcttttggagatctatacctatataaactttccaaacttattttcaatggtcaagttgctaagtggacgttattttctcagttggttaactggttcatgtttttctgtatcacacggactctatcaaacagcttggagactgttttgaccgtggctggactctattattggtttgctgcaatagagtcttccaaggcaacctcaatcgtttcaaagcagcacgcggcctgtgaacaaagtatcccatcaagaaaagtggctcttctgatagcagccttgtcatgtgccattcggccaacaagtgctgtaacatggctatatgttggccttttggattttattcagatgaaatcaaaatgtcgctttatccttcttgatgtcattccagtgggggccattgtccttgcagtaacaacactccttgattggtggatgtatggttcctgggtcatagtgccgcttaattttttgaaattcaacttattgtcttccggaggagactactatggaacacatgtcttccattggtactttacacagggttttccatccatgatttggacattcttaccatttgcattgtgcggtattgtaaagtctcaggaatggaggctttcaggtctaattgcttgggtgttaggggtttacagcattcttggacataaagaattcaggtttgttcttccagtgctacctttagcattgatgttctcaggttactgcttagcttccatgtcacagtccaagggcaaaaatcagcataggaaaggaagtctttcaaggctgcagctttctgttattcttctcgtcataaccaatgttcccatggctttatatatgtccttattccatcaaaggggaacagaagacgttatgtattatttgtcaaaagaagcctatgatggaagagtgaggagtgttctctttctcatgccttgtcattcaacaccttactactcaaccttacattacaatctacctatgcgttttttggactgcactcctagtgatagcaaagggaccttggatgagtcagatcgtttccttacaagtccatctgagtttgtcggcgatgtttttggaaatttatctgcattcagtcacattgtattattcgagtcagaagaaagacatgttctccagttgcttctgcacaattcctttcttgagatgaggaggtttttccactcacatttcaagattgacagagaccttcagtcggctgttgtggtttattcatggagggatgtgctatgatttagtactgatgtggcagaaaatgcctgttagctcgtgtaacaatccccacatgtttaatgttgtttcagcttttcatttgagaaatgagttgtggcattgctggatacttctgatatcttaatcctcttggaatgagatgttatgttacttttacccaagtgctttacgacggcataacaattcacagttcgctttcttgcatcgagtctctatgtccatgatatctgcttctaagataaa

SEQ ID NO: 198645 - DNA, 2282 bp, Zea Mays
gtcatcccgtatctataactagttgaagcgcacatcgttccaatcgtcgccgccggctacctcctccagccgccgcgcctccctcctccacccgctgccgcctccctccaaaacttgtcgtcgtatccctccaacacccgcatctggcgcagacgaccatacacccgctctgatgctttaaatcaatgtgtatggggttccaagcgtctgacctgacaaagaccgccccaagcaacgatgattcttgaagcgattgcagagataaaattgaaagggctgatttccttgatgtgcgcttcaacgagttggagaggtgggaactgggaagacctgtttgataaattacagaggatacttcgccaaccgaacaagcctaagtgggggtgatgatgagccaccggaggcgttctcgcgctgccggctcgccgcctggcgacgccagtacgggtacgccccctactcctgagaagtcgggacgggtccggccgtgggcggcgacagcgtcgaaccggaaggtgctggtgttcgcgctggcgttccgcgcggccaacgcgctgctcgtgcgcacgtacttcaaccctgatgagcactggcagtgtctcgaggtcgcccaccgcgtcgccttcgggtatggtcatctcacgtgggagtggaagcggggcctgcgcagttatctccacccattgctctttgctgctttgtacaagaccctggcgctactccatatggacactccgtgggttatggtgatggctccacgtctcgtgcaatctttgtttgcagcttttggagatctatacctatataaactttccaaacttattttcaatggtcaagttgctaagtggacgttattttctcagttggttaactggttcatgtttttctgtatcacacggactctatcaaacagcttggagactgttttgaccgtggctggactctattattggtttgctgcaatagagtcttccaaggcaacctcaatcgtttcaaagcagcacgcggcctgtgaacaaagtatcccatcaagaaaagtggctcttctgatagcagccttgtcatgtgccattcggccaacaagtgctgtaacatggctatatgttggccttttggattttattcagatgaaatcaaaatgtcgctttatccttcttgatgtcattccagtgggggccattgtccttgcagtaacaacactccttgattggtggatgtatggttcctgggtcatagtgccgcttaattttttgaaattcaacttattgtcttccggaggagactactatggaacacatgtcttccattggtactttacacagggttttccatccatgatttggacattcttaccatttgcattgtgcggtattgtaaagtctcaggaatggaggctttcaggtctaattgcttgggtgttaggggtttacagcattcttggacataaagaattcaggtttgttcttccagtgctacctttagcattgatgttctcaggttactgcttagcttccatgtcacagtccaagggcaaaaatcagcataggaaaggaagtctttcaaggctgcagctttctgttattcttctcgtcataaccaatgttcccatggctttatatatgtccttattccatcaaaggggaacagaagacgttatgtattatttgtcaaaagaagcctatgatggaagagtgaggagtgttctctttctcatgccttgtcattcaacaccttactactcaaccttacattacaatctacctatgcgttttttggactgcactcctagtgatagcaaagggaccttggatgagtcagatcgtttccttacaagtccatctgagtttgtcggcgatgtttttggaaatttatctgcattcagtcacattgtattattcgagtcagaagaaagacatgttctccagttgcttctgcacaattcctttcttgagatgaggaggtttttccactcacatttcaagattgacagagaccttcagtcggctgttgtggtttattcatggagggatgtgctatgatttagtactgatgtggcagaaaatgcctgttagctcgtgtaacaatccccacatgtttaatgttgtttcagcttttcatttgagaaatgagttgtggcattgctggatacttctgatatcttaatcctcttggaatgagatgttatgttacttttacccaagtgctttacgacggcataacaattcacagttcgctttcttgcatcgagtctctatgtccatgatatctgcttctaagataaa

SEQ ID NO: 198646 - DNA, 2269 bp, Zea Mays
ttctccctcaccgacaggttgaagcgcacatcgttccaatcgtcgccgccggctacctcctccagccgccgcgcctccctcctccacccgctgccgcctccctccaaaacttgtcgtcgtatccctccaacacccgcatctggcgcagacgaccatacacccgctctgatgctttaaatcaatgtgtatggggttccaagcgtctgacctgacaaagaccgccccaagcaacgatgattcttgaagcgattgcagagataaaattgaaagggctgatttccttgatgtgcgcttcaacgagttggagaggtgggacgccagtttttttttttttttttttttgaaaaaaaacagggcaacgaaggggaggtgggaactgggaagacctgtttgataaattacagaggtgaggagatggtctgttgaatgagcaattgatggccaagattgtatatgtgcaccatgtgcatctctcctcaatgtgcacaggatacttcgccaaccgaacaagcctaagtgggggtgatgatgagccaccggaggcgttctcgcgctgccggctcgccgcctggcgacgccagtacgggtacgccccctactcctgagaagtcgggacgggtccggccgtgggcggcgacagcgtcgaaccggaaggtgctggtgttcgcgctggcgttccgcgcggccaacgcgctgctcgtgcgcacgtacttcaaccctgatgagcactggcagtgtctcgaggtcgcccaccgcgtcgccttcgggtatggtcatctcacgtgggagtggaagcggggcctgcgcagttatctccacccattgctctttgctgctttgtacaagaccctggcgctactccatatggacactccgtgggttatggtgatggctccacgtctcgtgcaatctttgtttgcagcttttggagatctatacctatataaactttccaaacttattttcaatggtcaagttgctaagtggacgttattttctcagttggttaactggttcatgtttttctgtatcacacggactctatcaaacagcttggagactgttttgaccgtggctggactctattattggtttgctgcaatagagtcttccaaggcaacctcaatcgtttcaaagcagcacgcggcctgtgaacaaagtatcccatcaagaaaagtggctcttctgatagcagccttgtcatgtgccattcggccaacaagtgctgtaacatggctatatgttggccttttggattttattcagatgaaatcaaaatgtcgctttatccttcttgatgtcattccagtgggggccattgtccttgcagtaacaacactccttgattggtggatgtatggttcctgggtcatagtgccgcttaattttttgaaattcaacttattgtcttccggaggagactactatggaacacatgtcttccattggtactttacacagggttttccatccatgatttggacattcttaccatttgcattgtgcggtattgtaaagtctcaggaatggaggctttcaggtctaattgcttgggtgttaggggtttacagcattcttggacataaagaattcaggtttgttcttccagtgctacctttagcattgatgttctcaggttactgcttagcttccatgtcacagtccaagggcaaaaatcagcataggaaaggaagtctttcaaggctgcagctttctgttattcttctcgtcataaccaatgttcccatggctttatatatgtccttattccatcaatgatagcaaagggaccttggatgagtcagatcgtttccttacaagtccatctgagtttgtcggcgatgtttttggaaatttatctgcattcagtcacattgtattattcgagtcagaagaaagacatgttctccagttgcttctgcacaattcctttcttgagatgaggaggtttttccactcacatttcaagattgacagagaccttcagtcggctgttgtggtttattcatggagggatgtgctatgatttagtactgatgtggcagaaaatgcctgttagctcgtgtaacaatccccacatgtttaatgttgtttcagcttttcatttgagaaatgagttgtggcattgctggatacttctgatatcttaatcctcttggaatgagatgttatgttacttttacccaagtgctttacgacggcataacaattcacagttcgctttcttgcatcgagtctctatgtccatgatatctgcttctaagataaa

SEQ ID NO: 198647 - DNA, 1404 bp, Zea Mays
cttaaactcatttatgtacctatacaattttcttccttggagactgttttgaccgtggctggactctattattggtttgctgcaatagagtcttccaaggcaacctcaatcgtttcaaagcagcacgcggcctgtgaacaaagtatcccatcaagaaaagtggctcttctgatagcagccttgtcatgtgccattcggccaacaagtgctgtaacatggctatatgttggccttttggattttattcagatgaaatcaaaatgtcgctttatccttcttgatgtcattccagtgggggccattgtccttgcagtaacaacactccttgattggtggatgtatggttcctgggtcatagtgccgcttaattttttgaaattcaacttattgtcttccggaggagactactatggaacacatgtcttccattggtactttacacagggttttccatccatgatttggacattcttaccatttgcattgtgcggtattgtaaagtctcaggaatggaggctttcaggtctaattgcttgggtgttaggggtttacagcattcttggacataaagaattcaggtttgttcttccagtgctacctttagcattgatgttctcaggttactgcttagcttccatgtcacagtccaagggcaaaaatcagcataggaaaggaagtctttcaaggctgcagctttctgttattcttctcgtcataaccaatgttcccatggctttatatatgtccttattccatcaaaggggaacagaagacgttatgtattatttgtcaaaagaagcctatgatggaagagtgaggagtgttctctttctcatgccttgtcattcaacaccttactactcaaccttacattacaatctacctatgcgttttttggactgcactcctagtgatagcaaagggaccttggatgagtcagatcgtttccttacaagtccatctgagtttgtcggcgatgtttttggaaatttatctgcattcagtcacattgtattattcgagtcagaagaaagacatgttctccagttgcttctgcacaattcctttcttgagatgaggaggtttttccactcacatttcaagattgacagagaccttcagtcggctgttgtggtttattcatggagggatgtgctatgatttagtactgatgtggcagaaaatgcctgttagctcgtgtaacaatccccacatgtttaatgttgtttcagcttttcatttgagaaatgagttgtggcattgctggatacttctgatatcttaatcctcttggaatgagatgttatgttacttttacccaagtgctttacgacggcataacaattcacagttcgctttcttgcatcgagtctctatgtccatgatatctgcttctaagataaa

SEQ ID NO: 198648 - DNA, 515 bp, Zea Mays
gctcggccaactcttcgattcgtaatttcgcgaaaattacagccagtgccaccaccttccttatcctgggcctcggacggacaggcccgaacgagccacttcgagcgtaccgccgccgccgccgcccgccatggtggcgctcgcctcactctcgtctctctgtccctgcggcatcgcccgccgccgcgctgctgccgcctcctcacccgccgccgtttccatctcgtgctgtgccgtcgcgaccccgtcctcctctgggaaagggccccaggaatctagaaccccccgaagaaggctgaggaaaactgagggtgcctccaagagcttggaagattcggtcaagcgaaagatggagcagttttatgaagggtccgatggtcctcctctgcgagtgctccccatcggcggtcttggcgaaataggcatgaattgcatgcttgtggggaattatgaccgatatatcttgattgatgctggagttatgttcccggagtagccgagcttgagggcacgat

SEQ ID NO: 198649 - DNA, 3391 bp, Zea Mays
aattctccattgatcttttcccttcagaaaacagagcgagtccaattcgagacggctctccccacatcaccacagcgcagccgcaaccatggcttccgccgaaaccctagcccgctccccctcacgcgagccctcttccgacctgacccgcgccgactcttccgagccccaccacaacatcgatggctccggcgcgggcgccggagactcatcccgccgccgccgccgctcccgctgggagcagtctaacgacgactccgccgccaacaactccggcggcgagggcgggaccgggggccggaagcgcaagacgcggtgggccgaggaggagccgcgcccggcgatcgcgctcccggacttcatgaaggacttcgccgccgagatggaccccgaggtgcacgccctaaacgcgcgcctcctcgagatctcgcgtctgctgcaatcgggcctcccgctcgacgatcgccccgagggggcgcgctcgccctcccctgagcctgtctacgacaacctcggcatccgcatcaacacccgcgaataccgcgctagggagcgcctcaaccgcgagaggcaggagatcatctcgcagcttatccgccgcaaccccgccttcaagcccccctccgactaccgcccacccaagctccagaagaagctctacatccccatgaaggagtacccaggctacaactttatcggcctcatcattggccctcgtggcaacacgcagaagcgcatggagaaggagactggtgccaagattgtcatcagggggaagggtagtgtcaaggaagggaagctgctccagaagagggacctcaagccagatcccagcgagaacgaagacctccacgtgcttgttgaggcagatacacaggaggcactggatgcagctgctggtatggtggagaagctgctcaccccggtggatgaggtgctcaatgagcacaagcggcagcagctccgggagcttgccgcgcttaatggaacaattagggacgatgaattttgtaggacatgtggtgaggctggtcacaggcagtatgcttgccccaacaagatgaacacatttaagagtgatgttcagtgcaagatctgcggggacggtgggcacccaactattgattgtccggtcaagggcacttctgggaagaagatggatgatgaataccagaacttcctggctgagcttggtggtgggagtgcacctgagtccatgaacaaatctggtggtccgatgttggctcttacaggaagtggtggtagcggtggtgcttctactggaactgggagtaacccgccttggtcggccggtggtggtgccgcttccactgggctcaatggtatcaagaaagattatgacgagacaaatctttatattggatacctgccacctacaatggacgatgcaggtttagtcagtctgttttcgcagtttggggagattgtcatggctaaggtgatcaaggatcgaaacactggacagagcaaaggatatggatttgtcaagtattcagatgtgtcacaggccaatgcagcgattgctgcaatgaatggtcaccatcttgaagggcgagttattgcggttagagttgcaggaaagccgccacagacagcaccagcagtgtcagcacccccatcatatcctcctccggatcctacttcaggtggctattcctcccagtcctacatgggggcaccaccacctcctcctccagggagttatgctccagttccttgggggcagccgccaccatatgcttcatatcctccgccaccaccaggctctggtgtctacagtcctgcaccccctgcaccaggtcaagctgccccacctccgtatgggatgcaatatccaccaccaccaccacccccagcagctccaatccctccaccaggcactgctccatcaagtgatggagctcagaactatccacctggtgtaacaccaccaagttctggctcatccactcaccctgttgcaacatcagtatatgcatcatctggtgcaccaaatgcaccatcgatataccctccaccaccttatagttattcctcatactaccctccaccatttcagccaccacctccaccaccaccaccaccggctagtgttgatccctctcagagtattgcaactgcaccttggctaacccacagtgtggtggtgccaccaccacccacgagtgttgatccttctcagagtatttcaactgcaccttggttaacccacagcgcagtgccgccaccaccaccacctttgtcctccacaaccgaccagtctactgcttcctatggtgccgatgcagagtatgacaagtttatgtcagagatgaagtgatacgagcgaagctggatgattcttccaatgaagggcaaaaggcttgatctttcttggagcttataccaacctgatttatttcttgttggaagtttcggactcacatcttaaccttgctgtgtgctgttgtgaccgttgcagaggttgcatgcttaagaaggcatcaagtattactggctcagctggcatcagaatatttgctcatcttcttggaactattttaaggaatcttttactaatgcttttgttgtgatgtctattcttgttattatttgagattactctgtgttttcactttaatgctctgttctttgtgacatgtgttaatctcactttattattcatatatattattcttcatcttgatttggtagtgctagcactcctctccatctggagcagaaaagcctgctgctccgtgctgttgtcgtgacagcttggcacaggcagccagagtttttagcacgtgatgaatgaatatcaggacatgctggcgtgcagatctagtctggagtcctatgctcaaggtgcatactgtcacaatgatatttgtgagatgaactgaaggtttggaggggtgtattgagaaagaagaaattggaatctgctgatgtttaggaggaagtggatgtctgaaatttgtgacctaaacaagcacaaagaagttacaaaatgagacatgaattttgtaccattgtcactgtgaattgctttgaagtcatcctttggaatcttattttacaaccaaaaaaaatcaaaccttgagcatgagaacaactctcatcctttgcctacatgaaaaacaccaagaatagtgtgaaaagtcatcaacaatcaccaaaacatgtcacttcccccaagtgagcgaacctgagctgaagcaactgtgttcatatgaatcaactcgtttggttgcttggacatcaccttagtgatcttgggtgagaagtggcaactattagggtgtttgatttaaagaatgagctagtccatcattttctcaatcatcactttttatttggtttgtggaataaaatgagttgatccatc

SEQ ID NO: 198650 - DNA, 1814 bp, Zea Mays
aaggataaaaatgacatgagttcccgttttgctcccgagttctctctcacgtccatccctctctctcgtctcgttctttagcagggccggctggagcgcccactcctccctccagcccggccccagccgcgccgccgcgccggtcgtagacccaacgcccgccgcccagcccagcgcgccctccggccgtgaggcggagaggatcgggcgggcctcggggcgagcgccacgcgtagacggcggttgaggagcctgagaaaacaacggtcctccttcaagatcctggcgtaggagattgtattccgtctgattaatcggcggagagcaagcgggtgttgcggctgcgcgagcatggcgggcgaggaggctgcggagggcagcggaaccaggaggcacatggatctaaacctgtatctcggcctccctccattgccgcggcctccagtctggctggacccgacgttgatgcccaacttgaccggtgctgcgccagaatcctcaataactggtgagcctgaggaatcgttggccctgggggcggcagcctattctccgtcgaatgcactttccaccccggaggagcacccaatgcttgatcccatagtttattcctggctcgacggcaacaggaccgatggtgaagaggacactgatgctcctgagccggggccagtggatggtgccaatgtctctaggtcgcagcttgtggtagctgccacaggattggaaggggatgatgatcttcctctagtaaggtttgtgcgccctagccagatggttgttgctggtggaatggagacggtgaacacaagtatacttcagcagtccattcaaagggctgctgcaattgaggccaggactcctgaactccgctttcagagggtgatacagattagccagcagcatagaattgtgaggccagcatcagtgaaccgcagtcaaggggcagctagtacagatgcggataggcttgtctgggcaatccagcgcactcataactctttagaagcaacaaggcggcaaaaactagatgacaacaacttgtgtggaaacggttctgctaagaaggatgagtcctgtgactgcaactccagctttgagtgcaatatctgtcttgacccagctaaacagcctgtggttacaccctgcggtcacctcttctgttggccatgcttgtaccagtggcttcatgcacattcaccccactctgagtgccctgtatgcaagggtgaggtgctagaactgaatgtcactccgatatatggaagaggcggtgaagaagggaattccaccaaccctgacttcccacctaggccacgagcaaacagaagggagagcctgaggcaacagctgcaaatgacagacacaagaggaattgcaacagtggtgaggcagttgatacaaaaccagggtataattagcgttctcccaagcccaacagggatcgagatgtcggtggttcctgcaggccggcaaagggctagggctcggagacagcaaaggcaggataataatgcatcatcttccatacacgttgtagcgcagaatatgggcaatgttgcccctgagagcagcaaccaaatccagttgtcacattctaacggtgacaatgctgcacagatggttcttgcagctcctcagcagtcatcatctgtcgaacagctgtcaacttctagcaccacagctgttatattgggcgagcctgggtcaagtaggcggtcaaggccttcggagtctccaaccataagaagaacgaggaggaggccacagtagtaagcgaggaggtgcgagcggaggaggatcgccgggatcgc

SEQ ID NO: 198651 - DNA, 1340 bp, Zea Mays
gggatccccttgtcaccaaatcaaccctcagtgatcattagtgctgtttctgctcagcatgccccagtctcaaaaaccactcttctttcttcttcttttttcccccgagaacgtaaatccgctcctctttcaagtttgctttgcttcaaagcctgccttttgttggtgcttagctatcatgcttcgcgattcattcaacaaatgtgcgtccagtctgtctatctctgatgccaaccaccgttttcatccgcatgatttaaccatttgttttaataagtgatgagtgggtttttttttgggtggcattaatgctcacagtgcgcgttcggcgcgtggccggtggcgacgatgcggcgcggcgagaggaaggtggtcgtccggggccccgcgtgcagctcggccgcggtcaccggctggttctcccaggacttgggcggcagcggcaccgcggccgcctccgcatccacggcgaggcctggtgagctggacgtccacggcttcgccttcaacagctccgtgctctgggaccccgagcgctggggccgctacccaacctccgagcccgacaagtcccaggactccatgaagttcgtccagcaagtggtcctggaagattttagcaaggtgaagggcatcccttccgactgctcagaggtcatggtatggcacgtcgatacggctgcgccgtctttgcagaacaagaagagaagatagagagctcaactctagaacagaacggggacgagctggatggaggacggctgagtgtgttcgttgtacatgcatgtctacgccgtcaagaatcaagatgctggttgccccctgctcggtacctgcaaagaaggaaaatttttgagtttctcaccggaggatggatcagcctctgaacaccacccccccccccccttctccatcatgatgtacaattttccactgttcttttctttttttttctaaaagaagttgtgatatatgtatatttttttcttttctagagggtttaggtgaatacatacataatacccccttgaagtgcctctcaacaaggatgtaatggaaagaaaggcaagctaaagaccagcttaacaatgatggtacacatgagaatgttctcttctgttcagaagttatttccaatacaagatatccagttcgtagcaaagatagacgcctgtactgttcagaagttattccaataccaaatagcatgcttcagaagcacacaaaaactatggcattgttcttggtggtccgtgtgcccgttcactaggagcgagattgggggaccttgagtaccattgcatggttgttgttaggctgttagcccatcgccatcgtgc

SEQ ID NO: 198652 - DNA, 806 bp, Zea Mays
ctcgtggcccatctgtccgtgtcaccggttcacagcttacaggactccatgaagttcgtccagcaagtggtcctggaagattttagcaaggtgaagggcatcccttccgactgctcagaggtcatggtatggcacgtcgatacggctgcgccgtctttgcagaacaagaagagaagatagagagctcaactctagaacagaacggggacgagctggatggaggacggctgagtgtgttcgttgtacatgcatgtctacgccgtcaagaatcaagatgctggttgccccctgctcggtacctgcaaagaaggaaaatttttgagtttctcaccggaggatggatcagcctctgaacaccacccccccccccccttctccatcatgatgtacaattttccactgttcttttctttttttttctaaaagaagttgtgatatatgtatatttttttcttttctagagggtttaggtgaatacatacataatacccccttgaagtgcctctcaacaaggatgtaatggaaagaaaggcaagctaaagaccagcttaacaatgatggtacacatgagaatgttctcttctgttcagaagttatttccaatacaagatatccagttcgtagcaaagatagacgcctgtactgttcagaagttattccaataccaaatagcatgcttcagaagcacacaaaaactatggcattgttcttggtggtccgtgtgcccgttcactaggagcgagattgggggaccttgagtaccattgcatggttgttgttaggctgttagcccatcgccatcgtgc

SEQ ID NO: 198653 - DNA, 3482 bp, Zea Mays
ccgccttcctcctctccttatcctcctgacctcctctgacctctgcccccccctccattcccatttcccacgcggcaggcagctagccctacctctggtctcctctgccacctcctcccctgccacctcctcccctgcctagggtgcgccttcctcgccggacgccggcgcagggtcgggacgcttccgctgccgcgcgttccacgacccctctctgggagacgaaactcggcgccggcttggtagatacagacctgggattgccttttcctagttcagcatggagggcactctagttcagtctgcggttgttccaaccgtttacagaagcagctcaggtcggttccgtgtgcgtgcaagggccagaaccaatgctacaatggtgcgaaatatgccaacaaggactcttactcttggtggtttccaaggattgcgtcagacaaactttttagacacgaggtccgtgatcaagcgtgactttggatcgatcgtggcaagtcagattgcaagaccgcgtggatcagcctcaagaggggtggttcgtgccatgtttgagcgcttcactgagaaagcaatcaaggtgattatgcttgcacaggaggaggcaaggcgcctgggacataactttgttgggacagagcagattttgctggggcttattggtgagggcacgggtattgcggcgaaggttctgaagtctatgggaatcaatcttaaggatgcccgagttgaagtcgagaagataattggacgtggcagtgggtttgtggctgttgaaatcccattcacacctcgtgcaaaacgtgtattggaattgtcccttgaagaagctcgtcaacttgggcataactatgtaggatctgaacacttgctccttgggctacttcgtgagggtgaaggaactgatgttcgatatgatgttcaggtcataagaatggttggggaaagcacagaagctgttggggctggagttggtggaggaagcagtggccagaagatgcccacacttgaagaatacggtactaatttgacaaaattagcagaagagggcaaattggacccagtcgtttggtagacaagatcagattgagcgtgttactcagattttgggcaggcggacaaagaaacaacccctgcctaattggagagcctggtgttggaaaagactgctattgctgaggggcttgctcagcgtattgccaatggggatgttcctgaaacaatttgaaggaaagaaggttattactcttgacatggggctccttgttgctggaactaaataccgaggagagtttgaagagagactaaagaaacttatggaggaaattaagcaaaatgaagacattattctctttattgatgaagtgcacacactgattggagcaggtgcagcagaaggtgcgattgatgctgctaatattttgaagccagctcttgctagaggtgaacttcagtgcattggtgccacaacactggatgagtataggaagcatatagagaaagatcctgccttggaaagaaggtttcaaccagttaaggttccagagcctactgtggatgaaacaatacagatcttaagaggacttcgtgagagatatgaacttcatcacaaactgagatacacagatgatgctttaattgctgctgcacagctgtcttatcagtatatcagcgatcgtttcctgcctgacaaagccattgacttgattgatgaagctggatctcgtgttaggctgaggcatgcgcagctccctgatgaagccaaagagctggacaaagagctgcggcagataaccaagcagaaaaatgaggctgtacgtggccaagatttcgagaaggctggcgaattaagggaccgagaaatggagcttaaggctcaaattacagccattattgacaagagcaaggaaatgattaaagcagagactgaatctggtgaagtcggtccgcttgttactgaggcagacattcaacatattgtctcctcttggactggaattcctgtggagaaagtgtcatcggatgagtctgaccgcctcctaaagatggaagagacgctgcatacacgtatcattggacaggatgaggctgtcaaagctattagccgtgctatccgccgtgctcgtgttggcctcaagaatccaaataggccaattgccagcttcatattctctggaccgactggagttggcaaatcagagcttgcaaaggccctggcggcctactactttggctcggaggaggctatgatcaggcttgacatgagtgagttcatggagcggcatactgtctccaaactcattggatcacctccaggttatgttgggtacactgagggaggccaactaactgaagcagtccgtcgccgcccgtacacagttgttctctttgatgagattgagaaggcacatccagatgttttcaacatgatgcttcagatcttagaagatgggcggttaactgatagcaaggggcgcactgttgatttcaagaacacactattgatcatgacatctaatgtcgggagcagtgtcattgagaagggaggtcgcaagattgggttcgaccttgattatgatgagaaagacacaagctataacaggatcaagagccttgtgactgaggagttgaagcagtacttccggccagagttcttgaacagattggatgagatgattgtattccggcagctgactaaattggaggtgaaagagattgcagacattatgctgaaagaagtgtttgacaggctgaaggccaaggacattaatctccaggtgacggagaagttccgagatagagttgttgacgaaggttataacccgagctatggtgccagacctttgcggcgtgctatcatgaggcttctggaggatagtctggcagagaagatgctggctggtgaggtgaaagaaggtgactctgccatcgttgatgtggattcagatggcaaggtaatagtcctgaatggtggtagcggtgttgctgagccactggaacctgctctcagtacctaaccgaggttaaaatctttgggccgaaatggccttctttacaagtcagctgggctcttcgtgatggtaaagtagactgttattacttggccgctccattagttgctttatctttcattgatttttttttgttggaagtgaggcagtagggtcactatggaaacgaatagacggagaggcattagccgaaatgaatgtttttcagtttgatgcacttgtattattaggccttgctagcaacaaggtgcagatgcctctccgtttgctgttgtactttagtgtaacttaccttccgaatgtattattaggcgttgctagcaacaagatacggaggttatacatttgattttcagtaaaaaggtagactctttgttgcgccgcagctgttttattgtctgcgcactgcagtgttcgttcatcttggctttaggtagacgtggaagtggatttggagaaactgaagttcaa

SEQ ID NO: 198654 - DNA, 1950 bp, Zea Mays
aacactgaacacagccagccgcgcacaccagtacaccacgcgacgcaaacaacagagctgccagcctgccactgaggagtgaggaaccctaagcggcgcactgtgcaggcgaaggcggcgcgctaccggcgacggccgacgggggatacggcgacatcgtccccctcgacccctcctccatccccgacgcggcggcgccagactgcaggtgttgaatgctgatttgttgtggcctgttgcgtcttcaccagttcatacattaaacttgaagaaccacgtggttgaagaaaagcccactgaaaatgagtaatacatcatcttcgtcaagtggtgagcgtgctatgcagtgacagaggggatgtgatatatgctgatattccaaagctcattccatttattgatctgccgtgccaatttgccagttgggctgttccctccctaaaccccagcgtcgcctccgacgagtcaccgctccgtcggctgcttgctgcagtccacgccacgcgctacgccgtcacggtcgctcctcccgtgacgcagccgtcgctaggcgccgcctatttctcggacaaagtcgctcgccaccatggcggcagcgtcggctgccgcagaagccagcggcgagagtaaaaacgaattcctcatacgcgacgacgcgccagggctactcgccgctctcaaggagatgaaggacggactggacctcgtcaggggcaaggtcgaggccatcacgcggaaggtcaaggcgaaccagttgccggcggccaacgggatcgggtacctagaagcgaagaaccacctgctccttggctattgccaggacatcgtctactacctgctccgcaaggccaaggggctctcggtggatggccaccccgtcgtacggagccttgtcgagattaggctgtttctggagaagattcgtccgattgacaagaaggcagagtaccaaatccagaagctcaccgatgccgctgacaatgccactgttcgagagaaaccaggaaatgcacaggcgaaggggaaggacgggcattcggatgaggaagacctcctgaagtataggccaaacccagatatgatggacacaaagcctggtcctgatgggcaggatactgatggtgtttaccgtcctccgaaatttatgcctactagcatggatgatgaagagaaacgtcgtaaaaatgattcaaggagagataaagcgatagcccgagtggcaatagaaaacccttatattaaagagataattgatgatgctgcagacagacctgaagagtggaaggaaacagtgggcgatgaaagcagagaatttgggaggtacatgcgacagagagaagagcaagagaagcaggaagaggagttgttcactcgggctcctgtaaccaaacgtgataagcagatcgagaagcgcataaggagacaacttcatgggctaggaggcttaactgacggtttcgaccttgggatgaacatgctgttgggaggagacaaggaagatgatggcggttcaagcaagtcgcatggcaagagcggaaaccgaaagaagcacctgaagagcagcaagaagaggaagaggcattagccttggacccacactgctgtagcacttcaacataccgatacagcctagagacggttcaagcaatccacacggaaagttgaagctggagaaaatacaagaaaccaagtagagaaaaaaagctttggttcctgtaggcgtattatttctgaaacagaaaacttgatctgagcgactgatcctgagccaatggaacagtatgaattatatggcttgaacatggtaggtgtaccaagttttgttctgatagtcgaatgattgttgtattattgattaacaagaccaacaatatatagactaggctccaaccggttcatagaaacagtgcccggtagagatggacggtgatcacctgattagtaccttct

SEQ ID NO: 198655 - DNA, 1803 bp, Zea Mays
caccacgcgacgcaaacaacagagctgccagcctgccactgaggagtgaggaaccctaagcggcgcactgtgcaggcgaaggcggcgcgctaccggcgacggccgacgggggatacggcgacatcgtccccctcgacccctcctccatccccgacgcggcggcgccagactgcaggtgttgaatgctgatttgttgtggcctgttgcgtcttcaccagttcatacattaaacttgaagaaccacgtggttgaagaaaagcccactgaaaatgagtaatacatcatcttcgtcaagtgggatgtgatatatgctgatattccaaagctcattccatttattgatctgtccacgccacgcgctacgccgtcacggtcgctcctcccgtgacgcagccgtcgctaggcgccgcctatttctcggacaaagtcgctcgccaccatggcggcagcgtcggctgccgcagaagccagcggcgagagtaaaaacgaattcctcatacgcgacgacgcgccagggctactcgccgctctcaaggagatgaaggacggactggacctcgtcaggggcaaggtcgaggccatcacgcggaaggtcaaggcgaaccagttgccggcggccaacgggatcgggtacctagaagcgaagaaccacctgctccttggctattgccaggacatcgtctactacctgctccgcaaggccaaggggctctcggtggatggccaccccgtcgtacggagccttgtcgagattaggctgtttctggagaagattcgtccgattgacaagaaggcagagtaccaaatccagaagctcaccgatgccgctgacaatgccactgttcgagagaaaccaggaaatgcacaggcgaaggggaaggacgggcattcggatgaggaagacctcctgaagtataggccaaacccagatatgatggacacaaagcctggtcctgatgggcaggatactgatggtgtttaccgtcctccgaaatttatgcctactagcatggatgatgaagagaaacgtcgtaaaaatgattcaaggagagataaagcgatagcccgagtggcaatagaaaacccttatattaaagagataattgatgatgctgcagacagacctgaagagtggaaggaaacagtgggcgatgaaagcagagaatttgggaggtacatgcgacagagagaagagcaagagaagcaggaagaggagttgttcactcgggctcctgtaaccaaacgtgataagcagatcgagaagcgcataaggagacaacttcatgggctaggaggcttaactgacggtttcgaccttgggatgaacatgctgttgggaggagacaaggaagatgatggcggttcaagcaagtcgcatggcaagagcggaaaccgaaagaagcacctgaagagcagcaagaagaggaagaggcattagccttggacccacactgctgtagcacttcaacataccgatacagcctagagacggttcaagcaatccacacggaaagttgaagctggagaaaatacaagaaaccaagtagagaaaaaaagctttggttcctgtaggcgtattatttctgaaacagaaaacttgatctgagcgactgatcctgagccaatggaacagtatgaattatatggcttgaacatggtaggtgtaccaagttttgttctgatagtcgaatgattgttgtattattgattaacaagaccaacaatatatagactaggctccaaccggttcatagaaacagtgcccggtagagatggacggtgatcacctgattagtaccttct

SEQ ID NO: 198656 - DNA, 1484 bp, Zea Mays
accacgcgacgcaaacaacagagctgccagcctgccactgaggagtgaggaaccctaagcggcgcactgtgcaggcgaaggcggcgcgctaccggcgacggccgacgggggatacggcgacatcgtccccctcgacccctcctccatccccgacgcggcggcgccagactgcaggtgttgaatgctgatttgttgtggcctgttgcgtcttcaccagttcatacattaaacttgaagaaccacgtggttgaagaaaagcccactgaaaatgagtaatacatcatcttcgtcaagtggtgagcgtgctatgcagtgacagagggctgtggagatcataagttcataacatcctatgttagcctttcacttgatcataagttcataacatccttatattcatgcagggatgtgatatatgctgatattccaaagctcattccatttattgatctgattcgtccgattgacaagaaggcagagtaccaaatccagaagctcaccgatgccgctgacaatgccactgttcgagagaaaccaggaaatgcacaggcgaaggggaaggacgggcattcggatgaggaagacctcctgaagtataggccaaacccagatatgatggacacaaagcctggtcctgatgggcaggatactgatggtgtttaccgtcctccgaaatttatgcctactagcatggatgatgaagagaaacgtcgtaaaaatgattcaaggagagataaagcgatagcccgagtggcaatagaaaacccttatattaaagagataattgatgatgctgcagacagacctgaagagtggaaggaaacagtgggcgatgaaagcagagaatttgggaggtacatgcgacagagagaagagcaagagaagcaggaagaggagttgttcactcgggctcctgtaaccaaacgtgataagcagatcgagaagcgcataaggagacaacttcatgggctaggaggcttaactgacggtttcgaccttgggatgaacatgctgttgggaggagacaaggaagatgatggcggttcaagcaagtcgcatggcaagagcggaaaccgaaagaagcacctgaagagcagcaagaagaggaagaggcattagccttggacccacactgctgtagcacttcaacataccgatacagcctagagacggttcaagcaatccacacggaaagttgaagctggagaaaatacaagaaaccaagtagagaaaaaaagctttggttcctgtaggcgtattatttctgaaacagaaaacttgatctgagcgactgatcctgagccaatggaacagtatgaattatatggcttgaacatggtaggtgtaccaagttttgttctgatagtcgaatgattgttgtattattgattaacaagaccaacaatatatagactaggctccaaccggttcatagaaacagtgcccggtagagatggacggtgatcacctgattagtaccttct

SEQ ID NO: 198657 - DNA, 1556 bp, Zea Mays
accacgcgacgcaaacaacagagctgccagcctgccactgaggagtgaggaaccctaagcggcgcactgtgcaggcgaaggcggcgcgctaccggcgacggccgacgggggatacggcgacatcgtccccctcgacccctcctccatccccgacgcggcggcgccagactgcaggtgttgaatgctgatttgttgtggcctgttgcgtcttcaccagttcatacattaaacttgaagaaccacgtggttgaagaaaagcccactgaaaatgagtaatacatcatcttcgtcaagtgggatgtgatatatgctgatattccaaagctcattccatttattgatctggtcaaggcgaaccagttgccggcggccaacgggatcgggtacctagaagcgaagaaccacctgctccttggctattgccaggacatcgtctactacctgctccgcaaggccaaggggctctcggtggatggccaccccgtcgtacggagccttgtcgagattaggctgtttctggagaagattcgtccgattgacaagaaggcagagtaccaaatccagaagctcaccgatgccgctgacaatgccactgttcgagagaaaccaggaaatgcacaggcgaaggggaaggacgggcattcggatgaggaagacctcctgaagtataggccaaacccagatatgatggacacaaagcctggtcctgatgggcaggatactgatggtgtttaccgtcctccgaaatttatgcctactagcatggatgatgaagagaaacgtcgtaaaaatgattcaaggagagataaagcgatagcccgagtggcaatagaaaacccttatattaaagagataattgatgatgctgcagacagacctgaagagtggaaggaaacagtgggcgatgaaagcagagaatttgggaggtacatgcgacagagagaagagcaagagaagcaggaagaggagttgttcactcgggctcctgtaaccaaacgtgataagcagatcgagaagcgcataaggagacaacttcatgggctaggaggcttaactgacggtttcgaccttgggatgaacatgctgttgggaggagacaaggaagatgatggcggttcaagcaagtcgcatggcaagagcggaaaccgaaagaagcacctgaagagcagcaagaagaggaagaggcattagccttggacccacactgctgtagcacttcaacataccgatacagcctagagacggttcaagcaatccacacggaaagttgaagctggagaaaatacaagaaaccaagtagagaaaaaaagctttggttcctgtaggcgtattatttctgaaacagaaaacttgatctgagcgactgatcctgagccaatggaacagtatgaattatatggcttgaacatggtaggtgtaccaagttttgttctgatagtcgaatgattgttgtattattgattaacaagaccaacaatatatagactaggctccaaccggttcatagaaacagtgcccggtagagatggacggtgatcacctgattagtaccttct

SEQ ID NO: 198658 - DNA, 1376 bp, Zea Mays
accacgcgacgcaaacaacagagctgccagcctgccactgaggagtgaggaaccctaagcggcgcactgtgcaggcgaaggcggcgcgctaccggcgacggccgacgggggatacggcgacatcgtccccctcgacccctcctccatccccgacgcggcggcgccagactgcaggtgttgaatgctgatttgttgtggcctgttgcgtcttcaccagttcatacattaaacttgaagaaccacgtggttgaagaaaagcccactgaaaatgagtaatacatcatcttcgtcaagtgggatgtgatatatgctgatattccaaagctcattccatttattgatctgattcgtccgattgacaagaaggcagagtaccaaatccagaagctcaccgatgccgctgacaatgccactgttcgagagaaaccaggaaatgcacaggcgaaggggaaggacgggcattcggatgaggaagacctcctgaagtataggccaaacccagatatgatggacacaaagcctggtcctgatgggcaggatactgatggtgtttaccgtcctccgaaatttatgcctactagcatggatgatgaagagaaacgtcgtaaaaatgattcaaggagagataaagcgatagcccgagtggcaatagaaaacccttatattaaagagataattgatgatgctgcagacagacctgaagagtggaaggaaacagtgggcgatgaaagcagagaatttgggaggtacatgcgacagagagaagagcaagagaagcaggaagaggagttgttcactcgggctcctgtaaccaaacgtgataagcagatcgagaagcgcataaggagacaacttcatgggctaggaggcttaactgacggtttcgaccttgggatgaacatgctgttgggaggagacaaggaagatgatggcggttcaagcaagtcgcatggcaagagcggaaaccgaaagaagcacctgaagagcagcaagaagaggaagaggcattagccttggacccacactgctgtagcacttcaacataccgatacagcctagagacggttcaagcaatccacacggaaagttgaagctggagaaaatacaagaaaccaagtagagaaaaaaagctttggttcctgtaggcgtattatttctgaaacagaaaacttgatctgagcgactgatcctgagccaatggaacagtatgaattatatggcttgaacatggtaggtgtaccaagttttgttctgatagtcgaatgattgttgtattattgattaacaagaccaacaatatatagactaggctccaaccggttcatagaaacagtgcccggtagagatggacggtgatcacctgattagtaccttct

SEQ ID NO: 198659 - DNA, 1855 bp, Zea Mays
accacgcgacgcaaacaacagagctgccagcctgccactgaggagtgaggaaccctaagcggcgcactgtgcaggcgaaggcggcgcgctaccggcgacggccgacgggggatacggcgacatcgtccccctcgacccctcctccatccccgacgcggcggcgccagactgcaggtgttgaatgctgatttgttgtggcctgttgcgtcttcaccagttcatacattaaacttgaagaaccacgtggttgaagaaaagcccactgaaaatgagtaatacatcatcttcgtcaagtggtgagcgtgctatgcagtgacagagggctgtggagatcataagttcataacatcctatcgtcgcctccgacgagtcaccgctccgtcggctgcttgctgcagtccacgccacgcgctacgccgtcacggtcgctcctcccgtgacgcagccgtcgctaggcgccgcctatttctcggacaaagtcgctcgccaccatggcggcagcgtcggctgccgcagaagccagcggcgagagtaaaaacgaattcctcatacgcgacgacgcgccagggctactcgccgctctcaaggagatgaaggacggactggacctcgtcaggggcaaggtcgaggccatcacgcggaaggtcaaggcgaaccagttgccggcggccaacgggatcgggtacctagaagcgaagaaccacctgctccttggctattgccaggacatcgtctactacctgctccgcaaggccaaggggctctcggtggatggccaccccgtcgtacggagccttgtcgagattaggctgtttctggagaagattcgtccgattgacaagaaggcagagtaccaaatccagaagctcaccgatgccgctgacaatgccactgttcgagagaaaccaggaaatgcacaggcgaaggggaaggacgggcattcggatgaggaagacctcctgaagtataggccaaacccagatatgatggacacaaagcctggtcctgatgggcaggatactgatggtgtttaccgtcctccgaaatttatgcctactagcatggatgatgaagagaaacgtcgtaaaaatgattcaaggagagataaagcgatagcccgagtggcaatagaaaacccttatattaaagagataattgatgatgctgcagacagacctgaagagtggaaggaaacagtgggcgatgaaagcagagaatttgggaggtacatgcgacagagagaagagcaagagaagcaggaagaggagttgttcactcgggctcctgtaaccaaacgtgataagcagatcgagaagcgcataaggagacaacttcatgggctaggaggcttaactgacggtttcgaccttgggatgaacatgctgttgggaggagacaaggaagatgatggcggttcaagcaagtcgcatggcaagagcggaaaccgaaagaagcacctgaagagcagcaagaagaggaagaggcattagccttggacccacactgctgtagcacttcaacataccgatacagcctagagacggttcaagcaatccacacggaaagttgaagctggagaaaatacaagaaaccaagtagagaaaaaaagctttggttcctgtaggcgtattatttctgaaacagaaaacttgatctgagcgactgatcctgagccaatggaacagtatgaattatatggcttgaacatggtaggtgtaccaagttttgttctgatagtcgaatgattgttgtattattgattaacaagaccaacaatatatagactaggctccaaccggttcatagaaacagtgcccggtagagatggacggtgatcacctgattagtaccttct

SEQ ID NO: 198660 - DNA, 1831 bp, Zea Mays
tgctaggcggctgctagctgctaggtgttgaatgctgatttgttgtggcctgttgcgtcttcaccagttcatacattaaacttgaagaaccacgtggttgaagaaaagcccactgaaaatgagtaatacatcatcttcgtcaagtggtgagcgtgctatgcagtgacagagggctgtggagatcataagttcataacatcctatgttagcctttcacttgatcataagttcataacatccttatattcatgcagggatgtgatatatgctgatattccaaagctcattccatttattgatctgttgggctgttccctccctaaaccccagcgtcgcctccgacgagtcaccgctccgtcggctgcttgctgcagtccacgccacgcgctacgccgtcacggtcgctcctcccgtgacgcagccgtcgctaggcgccgcctatttctcggacaaagtcgctcgccaccatggcggcagcgtcggctgccgcagaagccagcggcgagagtaaaaacgaattcctcatacgcgacgacgcgccagggctactcgccgctctcaaggagatgaaggacggactggacctcgtcaggggcaaggtcgaggccatcacgcggaaggtcaaggcgaaccagttgccggcggccaacgggatcgggtacctagaagcgaagaaccacctgctccttggctattgccaggacatcgtctactacctgctccgcaaggccaaggggctctcggtggatggccaccccgtcgtacggagccttgtcgagattaggctgtttctggagaagattcgtccgattgacaagaaggcagagtaccaaatccagaagctcaccgatgccgctgacaatgccactgttcgagagaaaccaggaaatgcacaggcgaaggggaaggacgggcattcggatgaggaagacctcctgaagtataggccaaacccagatatgatggacacaaagcctggtcctgatgggcaggatactgatggtgtttaccgtcctccgaaatttatgcctactagcatggatgatgaagagaaacgtcgtaaaaatgattcaaggagagataaagcgatagcccgagtggcaatagaaaacccttatattaaagagataattgatgatgctgcagacagacctgaagagtggaaggaaacagtgggcgatgaaagcagagaatttgggaggtacatgcgacagagagaagagcaagagaagcaggaagaggagttgttcactcgggctcctgtaaccaaacgtgataagcagatcgagaagcgcataaggagacaacttcatgggctaggaggcttaactgacggtttcgaccttgggatgaacatgctgttgggaggagacaaggaagatgatggcggttcaagcaagtcgcatggcaagagcggaaaccgaaagaagcacctgaagagcagcaagaagaggaagaggcattagccttggacccacactgctgtagcacttcaacataccgatacagcctagagacggttcaagcaatccacacggaaagttgaagctggagaaaatacaagaaaccaagtagagaaaaaaagctttggttcctgtaggcgtattatttctgaaacagaaaacttgatctgagcgactgatcctgagccaatggaacagtatgaattatatggcttgaacatggtaggtgtaccaagttttgttctgatagtcgaatgattgttgtattattgattaacaagaccaacaatatatagactaggctccaaccggttcatagaaacagtgcccggtagagatggacggtgatcacctgattagtaccttct

SEQ ID NO: 198661 - DNA, 1302 bp, Zea Mays
cttcgcttcccctcactcccgtcgtcgtcgcagtcgcagctgcaggccagcagccacaggccacggccagcagttcctgtcgctgccgacgccgccgaggcccgaggggaatcgaccaccatcaccatggggaggactccgtgctgcgacagcaagggcatcaagaaggggccatgggcgccggaggaggacaagctgctcgtcgactacgtccaggccaacggacccggcaactggcgcattctccccaagctcgcggggctgaaccggtgcggcaagagctgccggctgcggtggaccaactacctgcgcccggacatcaagcgcgggcccttcacccccgaggagcacaattccatccttcagctccacgccgtagtcggcaacaagtggtccatgatcgcggcacagatgccgggccggacggacaacgagatcaagaactactggaacacgcacatgaagaagcctcctgccccgccgcccgccacacggcccagtgggagaccgccaggctcgaggccgaggcgcgcctctccctgctctcgtcctcggccgccacgacggtcacctccgccaccgcctcctcctcgtcgtccaccgtcgccgccgagcatgcggcgccacccgacatcttcctgcgcctctggaactccgaggtcggggattctttccgcggcgcagccgcgcagcaggggcacggtccggaggcgagcgcggcgggcgctggcgtgccggcgctgctgcctgagctcggcggtggcggtgacgattcctcggccgcgtcgacctacgaggctgaggccgcggcggacgacggctaccaggcgttcctggacctggcgatggaggagttcgcgctgctgcacggccggctcggcgcgttctcggcgttcccgcaggccgacgtgttcgctgaggcgcactgctgccttttcgctccgtttgaggagtagctttgctcgatctcattgccagtcatcagacatcagagtagtagactagacgtacgtacgtgaccacgtgcatgtaccctgcatgcgtccgtctgcgtacgcgtacgtacatacatacgtacacatgccgcttgtcttggggacgatggcgtatgtacgtgcctgtacgcaacgagcggatgggtggcgcgtgtgacagttcgttattagtctgtgccctagagcaagaggtttttgcgactgctccaaactagccttggcattgctctggtgaacgatgtcaactttcaagtattctgcctctgcgtgtttgtgtacaagctctgacttactgcgtggatgcaga

SEQ ID NO: 198662 - DNA, 1560 bp, Zea Mays
taggaactcccgcccaggtagggttggcgctctcaccaggccgccgctccaggccgcactccagggctccaggccaccgctgccgctgcttcaggccgccgcctcctcccccgtgcagcctcatccctcccccgtgctcagccgctcagcgtcgtcccccgtgctcagccgctcagcgtcgtcctccctcctgcaccgcccgtccggcgccgccagccccgcctctgcggctgctgcctgtgccgctgtccgcccgccgccagccccgcctctgcggctgcgcttgtcccgcactcctgctgtccgctcgccggcctgtcccgcattcccgctgctgaaggaagaaggattgaggtgaggtgctgtcctctgttttgcgtctgttcccgttgctacagactacatactacagagactacagagtacagaaactgtcccactgttctactgtccgctggcgtatgctccactgccattaactcgagcaagggtcccaatagtgaagcttatggatccaaaaacagggctttcctgtgatatatgcgtcaataatcttttagcagttgttaacacaaaacttttgcgagattatggacaaatagataaaaggttacagcagttggcattcattgtgaagcattgggctaaaactcgacgtgtaaatgaaacttatcaaggaacactttctagttatgcctatgtgattatgtgcattcacctcctacagctgcgaagaatactcccatgtctacaggaaatggaggccacttattatgtcaaggtggaagaaatcaactgtgcatactttgaccaagtggacaagctaaataattatggtgctcacaacagagatacagtatcaaggctgctctggtcctttttccattactgggcatatgagcacgattacacaagagatgtcatatcaattcgtactggaaggattatcagtaaggaacggaaggactggactagacgagttggaaatgacaggcatctcatatgcatcgaagatccgtttgagatctcccatgatctcggtcgcgtagttgacaagttcaccatcaaaatactcagggaggaattcgagcgagcagctaatatattacagttcgatccaaaccccagcgtaacactctttgagccctacgtgccccctccatcgccgagcctgttgcaagaagaaactgcgaatgctgcagaaattgaactatgatagcgtttggttcgtccccaggtattgtaataggaaatagaatcaactcaaggattttgatccttgcatcactggttgcagcctttggttggatgtgtaaatggtattgtttaccgttacagctgtttggtttctatctcagggatcacaagtcagttcccgaacttaaaaatcattcgtggtatgttctatttcaactcaagggatcacaagtcagctaccatatcacatgtcctattttatttctatttcaaacttcattcggcaaatagtggtgcgaattctctatttggacagccaaaagtcagcaccatacgtataattttggttcacatatgaaagag

SEQ ID NO: 198663 - DNA, 1510 bp, Zea Mays
aaaaaagccaagttgcattatcaaggactcttgccagcaaccagttgccagatttcagatcagatttttctagagggcatcatgtatcaagtcagagaataagattccagaggagaaacaggccatgtcgatatgacatagatcgatttacacctaacttcttgtcaatttttgaatctttggtgccctctgaagaggaaattgcaaatcagaaacagttgttaacatctctaagcagactgataaacacagaatggcctaattcaaaactatacctctatggatcatgtgccaattcttttggtttctcaaatagtgatattgatctttgtctctcgattgataacaaggaaatgagcaaggttgatattatattgaaattggcagatattttccaagctggaaatctccagaatattcagccattaactcgagcaagggtcccaatagtgaagcttatggatccaaaaacagggctttcctgtgatatatgcgtcaataatcttttagcagttgttaacacaaaacttttgcgagattatggacaaatagataaaaggttacagcagttggcattcattgtgaagcattgggctaaaactcgacgtgtaaatgaaacttatcaaggaacactttctagttatgcctatgtgattatgtgcattcacctcctacagctgcgaagaatactcccatgtctacaggaaatggaggccacttattatgtcaaggtggaagaaatcaactgtgcatactttgaccaagtggacaagctaaataattatggtgctcacaacagagatacagtatcaaggctgctctggtcctttttccattactgggcatatgagcacgattacacaagagatgtcatatcaattcgtactggaaggattatcagtaaggaacggaaggactggactagacgagttggaaatgacaggcatctcatatgcatcgaagatccgtttgagatctcccatgatctcggtcgcgtagttgacaagttcaccatcaaaatactcagggaggaattcgagcgagcagctaatatattacagttcgatccaaaccccagcgtaacactctttgagccctacgtgccccctccatcgccgagcctgttgcaagaagaaactgcgaatgctgcagaaattgaactatgatagcgtttggttcgtccccaggtattgtaataggaaatagaatcaactcaaggattttgatccttgcatcactggttgcagcctttggttggatgtgtaaatggtattgtttaccgttacagctgtttggtttctatctcagggatcacaagtcagttcccgaacttaaaaatcattcgtggtatgttctatttcaactcaagggatcacaagtcagctaccatatcacatgtcctattttatttctatttcaaacttcattcggcaaatagtggtgcgaattctctatttggacagccaaaagtcagcaccatacgtataattttggttcacatatgaaagag

SEQ ID NO: 198664 - DNA, 3870 bp, Zea Mays
ggaaaatatcgtcacagaggcccaggtcctcgccgcccccgatggccgactcctccggtcgcagtggcggccgccccacgtcagcctcgccatccactgccacacacacctcaccggcgtctttcgacggcggtctcctactccgcctcctccaaaaccctccttctgcgcacccgcgagaggaaatcctcgccccgtcccccgttgccccgggggcgcaccacttctttagtgaccctgccgtcgccgccgtggggcctctcttcgccgcatcggcgcagacgcaaggaggggacttcgggtggtcctccacctcgaccacgcacgtacagcagcaaccccgattctcggatccccgattcgctccaggggaccccttcgctgctcttggcggtagagggttcggatctggggatgcggttagggcggagaggcctcggtcgggggcgccgcctccagggtttggcaagccgtcgcatccacttcctgctgcccgtgatgcgcggagtgcatctggtgtggtattgcgtaaggagcagtacaatcctcgtcccgtggatttcgttccggctcttgcagatgttcgtgatccggttggcagaatgcctcatggacacggagagcagttttacagggaacagcagcaagatcgttttttgtcacggaccccgcctgagatcaatgccaatggacagtttggcaggatgccaattggagagcagcatacacttcctatcttaggtggcaggaggctccatgtagatcagtacatgcctcccgtccaggaaggcagggcaccacatggtggtcatggcaagcatgaatcccgcttaaccaatccgctacaaagggagcagaggtggcagggtcttagggaggacaagggctatgcttcgcggaagctgccaaatgtgaatgcccattacacatctggtaaggcactggtgaaggaggtgcaccatttgacaatacctgctggcagttcagttccagtggaaattacggagaatcaagcgagtggtttggaaggaggcagaatagggaaagtagttttggaggatggaattgatgaagaaggggtagtggaggcaagtaagtttgaagtgtcatatgaaaagagtaagattagatttgctggacatgatgaacaagatgatggtggtgacagggaagatgctataattgagcagatggcacaaaatctgctgattgatggcaatggtgatgccaagggagtagtgttggaaaaacctatcctgaggagtaaggatttcagatcagatttttctagagggcatcatgtatcaagtcagagaataagattccagaggagaaacaggccatgtcgatatgacatagatcgatttacacctaacttcttgtcaatttttgaatctttggtgccctctgaagaggaaattgcaaatcagaaacagttgttaacatctctaagcagactgataaacacagaatggcctaattcaaaactatacctctatggatcatgtgccaattcttttggtttctcaaatagtgatattgatctttgtctctcgattgataacaaggaaatgagcaaggttgatattatattgaaattggcagatattttccaagctggaaatctccagaatattcaggtgagctcaggtatcattccctgtgttgtgacatgctaactgatgttttgtgttgaatgatatcatcaacattttgctaaaccatgtgctgatgttgcatgtaatacttttgcaatacttctgatttgtttctacaagacctttatgatttttttgcttacaacgatgaacaatatcacaagaattctctgttactatataaattttatattgtagtactactgtgtacaggaaaacagctatccatgtgcctaaaccttgatcattttggtcgcctgggagatttggaagcaccgtaatgcttgggggttgtgctctgcacccagcgagttcagagtgctgtgattgaggagggcagcgcttggtgcttggctggtgcatcagctctgcaggacctcctcctgcgccaactccctaggggaccctagcagtttgcctgctggtggcatgcttattaaaacgatgttaaaacgacatttaaacgtcgtttaaactataaaacactgacagaaagtgaaacgataaaacgttttacgattcatcgtaaaacgtcgtttaacgttgtttaaacgtcgcgttttgacgtttaaacgcggtatagagtgaaacgccgcgtttcgggcgtttaatgtgtctgctgctagaaattggcccagcccaattaggaactcccgcccaggtagggttggcgctctcaccaggccgccgctccaggccgcactccagggctccaggccaccgctgccgctgcttcaggccgccgcctcctcccccgtgcagcctcatccctcccccgtgctcagccgctcagcgtcgtcccccgtgctcagccgctcagcgtcgtcctccctcctgcaccgcccgtccggcgccgccagccccgcctctgcggctgctgcctgtgccgctgtccgcccgccgccagccccgcctctgcggctgcgcttgtcccgcactcctgctgtccgctcgccggcctgtcccgcattcccgctgctgaaggaagaaggattgaggtgaggtgctgtcctctgttttgcgtctgttcccgttgctacagactacatactacagagactacagagtacagaaactgtcccactgttctactgtccgctggcgtatgctccactgccattaactcgagcaagggtcccaatagtgaagcttatggatccaaaaacagggctttcctgtgatatatgcgtcaataatcttttagcagttgttaacacaaaacttttgcgagattatggacaaatagataaaaggttacagcagttggcattcattgtgaagcattgggctaaaactcgacgtgtaaatgaaacttatcaaggaacactttctagttatgcctatgtgattatgtgcattcacctcctacagctgcgaagaatactcccatgtctacaggtttctgggaaatggaggccacttattatgtcaaggtggaagaaatcaactgtgcatactttgaccaagtggacaagctaaataattatggtgctcacaacagagatacagtatcaaggctgctctggtcctttttccattactgggcatatgagcacgattacacaagagatgtcatatcaattcgtactggaaggattatcagtaaggaacggaaggactggactagacgagttggaaatgacaggcatctcatatgcatcgaagatccgtttgagatctcccatgatctcggtcgcgtagttgacaagttcaccatcaaaatactcagggaggaattcgagcgagcagctaatatattacagttcgatccaaaccccagcgtaacactctttgagccctacgtgccccctccatcgccgagcctgttgcaagaagaaactgcgaatgctgcagaaattgaactatgatagcgtttggttcgtccccaggtattgtaataggaaatagaatcaactcaaggattttgatccttgcatcactggttgcagcctttggttggatgtgtaaatggtattgtttaccgttacagctgtttggtttctatctcagggatcacaagtcagttcccgaacttaaaaatcattcgtggtatgttctatttcaactcaagggatcacaagtcagctaccatatcacatgtcctattttatttctatttcaaacttcattcggcaaatagtggtgcgaattctctatttggacagccaaaagtcagcaccatacgtataattttggttcacatatgaaagag

SEQ ID NO: 198665 - DNA, 2476 bp, Zea Mays
gaaaaatagaacgagaaggtaccaaagctgggaaaatatcgtcacagaggcccaggtcctcgccgcccccgatggccgactcctccggtcgcagtggcggccgccccacgtcagcctcgccatccactgccacacacacctcaccggcgtctttcgacggcggtctcctactccgcctcctccaaaaccctccttctgcgcacccgcgagaggaaatcctcgccccgtcccccgttgccccgggggcgcaccacttctttagtgaccctgccgtcgccgccgtggggcctctcttcgccgcatcggcgcagacgcaaggaggggacttcgggtggtcctccacctcgaccacgcacgtacagcagcaaccccgattctcggatccccgattcgctccaggggaccccttcgctgctcttggcggtagagggttcggatctggggatgcggttagggcggagaggcctcggtcgggggcgccgcctccagggtttggcaagccgtcgcatccacttcctgctgcccgtgatgcgcggagtgcatctggtgtggtattgcgtaaggagcagtacaatcctcgtcccgtggatttcgttccggctcttgcagatgttcgtgatccggttggcagaatgcctcatggacacggagagcagttttacagggaacagcagcaagatcgttttttgtcacggaccccgcctgagatcaatgccaatggacagtttggcaggatgccaattggagagcagcatacacttcctatcttaggtggcaggaggctccatgtagatcagtacatgcctcccgtccaggaaggcagggcaccacatggtggtcatggcaagcatgaatcccgcttaaccaatccgctacaaagggagcagaggtggcagggtcttagggaggacaagggctatgcttcgcggaagctgccaaatgtgaatgcccattacacatctggtaaggcactggtgaaggaggtgcaccatttgacaatacctgctggcagttcagttccagtggaaattacggagaatcaagcgagtggtttggaaggaggcagaatagggaaagtagttttggaggatggaattgatgaagaaggggtagtggaggcaagtaagtttgaagtgtcatatgaaaagagtaagattagatttgctggacatgatgaacaagatgatggtggtgacagggaagatgctataattgagcagatggcacaaaatctgctgattgatggcaatggtgatgccaagggagtagtgttggaaaaacctatcctgaggagtaaggatttcagatcagatttttctagagggcatcatgtatcaagtcagagaataagattccagaggagaaacaggccatgtcgatatgacatagatcgatttacacctaacttcttgtcaatttttgaatctttggtgccctctgaagaggaaattgcaaatcagaaacagttgttaacatctctaagcagactgataaacacagaatggcctaattcaaaactatacctctatggatcatgtgccaattcttttggtttctcaaatagtgatattgatctttgtctctcgattgataacaaggaaatgagcaaggttgatattatattgaaattggcagatattttccaagctggaaatctccagaatattcaggaaatggaggccacttattatgtcaaggtggaagaaatcaactgtgcatactttgaccaagtggacaagctaaataattatggtgctcacaacagagatacagtatcaaggctgctctggtcctttttccattactgggcatatgagcacgattacacaagagatgtcatatcaattcgtactggaaggattatcagtaaggaacggaaggactggactagacgagttggaaatgacaggcatctcatatgcatcgaagatccgtttgagatctcccatgatctcggtcgcgtagttgacaagttcaccatcaaaatactcagggaggaattcgagcgagcagctaatatattacagttcgatccaaaccccagcgtaacactctttgagccctacgtgccccctccatcgccgagcctgttgcaagaagaaactgcgaatgctgcagaaattgaactatgatagcgtttggttcgtccccaggtattgtaataggaaatagaatcaactcaaggattttgatccttgcatcactggttgcagcctttggttggatgtgtaaatggtattgtttaccgttacagctgtttggtttctatctcagggatcacaagtcagttcccgaacttaaaaatcattcgtggtatgttctatttcaactcaagggatcacaagtcagctaccatatcacatgtcctattttatttctatttcaaacttcattcggcaaatagtggtgcgaattctctatttggacagccaaaagtcagcaccatacgtataattttggttcacatatgaaagag

SEQ ID NO: 198666 - DNA, 1743 bp, Zea Mays
ggaaaatatcgtcacagaggcccaggtcctcgccgcccccgatggccgactcctccggtcgcagtggcggccgccccacgtcagcctcgccatccactgccacacacacctcaccggcgtctttcgacggcggtctcctactccgcctcctccaaaaccctccttctgcgcacccgcgagaggaaatcctcgccccgtcccccgttgccccgggggcgcaccacttctttagtgaccctgccgtcgccgccgtggggcctctcttcgccgcatcggcgcagacgcaaggaggggacttcgggtggtcctccacctcgaccacgcacgtacagcagcaaccccgattctcggatccccgattcgctccaggggaccccttcgctgctcttggcggtagagggttcggatctggggatgcggttagggcggagaggcctcggtcgggggcgccgcctccagggtttggcaagccgtcgcatccacttcctgctgcccgtgatgcgcggagtgcatctggtgtggtattgcgtaaggagcagtacaatcctcgtcccgtggatttcgttccggctcttgcagatgttcgtgatccggttggcagaatgcctcatggacacggagagcagttttacagggaacagcagcaagatcgttttttgtcacggaccccgcctgagatcaatgccaatggacagtttggcaggatgccaattggagagcagcatacacttcctatcttaggtggcaggaggctccatgtagatcagtacatgcctcccgtccaggaaggcagggcaccacatggtggtcatggcaagcatgaatcccgcttaaccaatccgctacaaagggagcagaggtggcagggtcttagggaggacaagggctatgcttcgcggaagctgccaaatgtgaatgcccattacacatctggtaaggcactggtgaaggaggtgcaccatttgacaatacctgctggcagttcagttccagtggaaattacggagaatcaagcgagtggtttggaaggaggcagaatagggaaagtagttttggaggatggaattgatgaagaaggggtagtggaggcaagtaagtttgaagtgtcatatgaaaagagtaagattagatttgctggacatgatgaacaagatgatggtggtgacagggaagatgctataattgagcagatggcacaaaatctgctgattgatggcaatggtgatgccaagggagtagtgttggaaaaacctatcctgaggagtaaggatttcagatcagatttttctagagggcatcatgtatcaagtcagagaataagattccagaggagaaacaggccatgtcgatatgacatagatcgatttacacctaacttcttgtcaatttttgaatctttggtgccctctgaagaggaaattgcaaatcagaaacagttgttaacatctctaagcagactgataaacacagaatggcctaattcaaaactatacctctatggatcatgtgccaattcttttggtttctcaaatagtgatattgatctttgtctctcgattgataacaaggaaatgagcaaggttgatattatattgaaattggcagatattttccaagctggaaatctccagaatattcaggaaaacagctatccatgtgcctaaaccttgatcattttggtcgcctgggagatttggaagcaccgtaatgcttgggggttgtgctctgcacccagcgagttca

SEQ ID NO: 198667 - DNA, 2144 bp, Zea Mays
gggagcgccgggagtcgcctcgctacaaaagatcgcggacacgcgactctggccagggagacggacaaaaggagaggcgtggacacgggacgcgaggtagacagcgcccggcgtgacgtggcgcgagagggagagcggagaggggggctcaccaaactgcaaagtctgtctcctgactcctcgccggcgtgccggatctcctgtctctctcgcggtcggcggccgcatagcctcgttcactcgcacgacacagggcaggggggcgatgggctgcgcgacgtccaagcagttcagcaggagcgcgccggcgcacgcggatccggccgtgctggcgacccagacctcattcacggtgaacgaggtggaggcgctgtacgagctgtacaagaagctgagctgctccatcgtcaaagacgggctcatccacaaggaggagttccagctcgccttgttcaggaacagcaggagagcgaacctctttgcagacagggtcttcgatctgttcgatctcaagcggaacggagtcatcgatttcgaggagttcgtgcggtcgctcagtgtgttccaccctaaagcagatacgtcggagaagacggctcgctttcaagctgtatgatctgaggggaacaggctacatcgagaaagaagaggtgatcattcatgcgttctcctgtatattttccaaagaaaaaaaaaagaacaaccagagcgcatgccatttaatgactgcaaaccatagtgactgtgtgtttttttagataatggatcaaaattcggctttcgcctctttcgagggtaaggtcaaatttacacaacttaaaacaaatccaacaactcacaaaaacatgataaaactgtaagcttaaaagaggtaatagcttccctacttctcaccgactcaaactcacttaaacattattttattacaactcaatcatgtttgaaaacctccaaccctgataatcaaaaaactgcatgaccaccgactccagatgacgataagcttttcttaaaaaatctgctctttttcacttttatgtagctgtgcccgtagtcttagctaatgagtacctctaactagaacctgcaaataagtcaacatacgtaatttattaaatactaagtcatttatacttttccaaaaagctcagcacagtgttaagacacatgtaataatcagattcttagtatttagatccatcacgtcaaccaactcccaaccataatgcctgtgtacactgcacttgttcgattctaatataaaacagtaactttgttcttgagaagcagctcagagagatggtcttggcgctgcttgatgagtccgacctctgcctttcagacagcaccgtcgagacgatcgtcgataacacgttcagccaagcggactcgaacggagatggcaggatagatcctgaagaatgggaggagttcgtgaagaagaacccggcaacgttaaggaacatgactctcccctatctgcaggacatcaccatgtcatttccgagcttcataatgcgttcagaagccagtgactgaaatgtttgcgtacatctgcgtgtaaggaagcaccgttccatcagctctgctgtttgttggagcctacagcttagtccatggcacgaggcaccggagaaagttcagaatgtagcagcaacggccagcagagtgcatgagggttgctgccatagctgcaggctgcagccaaacaaaatgatgaccaaagattcatctagtgtcagcttcagggttcagatggtataccagccaacaattttctttctcggtatctaaacaccgtggatgttgcgtttaaaaaaattgttgcagaggatcaacaagtctgttcatcgaagcagtgcctgagtttagaatcagaagctaactgtctattgctgagatgctttcgtctaaatcttgcgtgtagttgtaactgcaaggaaagaataacttgtggagagttggatttgttgatgaaccttagtagttcttgacttggttagttgtttccacatttcttcgcagtgccagtgcgtgcacttgtaacttgcaaattcttctcaatccacccctaatcgaagggtggatccagttccgcatgtaatgaggcaatatcatcaatagtttatgcttcgtttatcgca

SEQ ID NO: 198668 - DNA, 1504 bp, Zea Mays
gggagcgccgggagtcgcctcgctacaaaagatcgcggacacgcgactctggccagggagacggacaaaaggagaggcgtggacacgggacgcgaggtagacagcgcccggcgtgacgtggcgcgagagggagagcggagaggggggctcaccaaactgcaaagtctgtctcctgactcctcgccggcgtgccggatctcctgtctctctcgcggtcggcggccgcatagcctcgttcactcgcacgacacagggcaggggggcgatgggctgcgcgacgtccaagcagttcagcaggagcgcgccggcgcacgcggatccggccgtgctggcgacccagacctcattcacggtgaacgaggtggaggcgctgtacgagctgtacaagaagctgagctgctccatcgtcaaagacgggctcatccacaaggaggagttccagctcgccttgttcaggaacagcaggagagcgaacctctttgcagacagggtcttcgatctgttcgatctcaagcggaacggagtcatcgatttcgaggagttcgtgcggtcgctcagtgtgttccaccctaaagcagatacgtcggagaagacggctcgctttcaagctgtatgatctgaggggaacaggctacatcgagaaagaagagctcagagagatggtcttggcgctgcttgatgagtccgacctctgcctttcagacagcaccgtcgagacgatcgtcgataacacgttcagccaagcggactcgaacggagatggcaggatagatcctgaagaatgggaggagttcgtgaagaagaacccggcaacgttaaggaacatgactctcccctatctgcaggacatcaccatgtcatttccgagcttcataatgcgttcagaagccagtgactgaaatgtttgcgtacatctgcgtgtaaggaagcaccgttccatcagctctgctgtttgttggagcctacagcttagtccatggcacgaggcaccggagaaagttcagaatgtagcagcaacggccagcagagtgcatgagggttgctgccatagctgcaggctgcagccaaacaaaatgatgaccaaagattcatctagtgtcagcttcagggttcagatggtataccagccaacaattttctttctcggtatctaaacaccgtggatgttgcgtttaaaaaaattgttgcagaggatcaacaagtctgttcatcgaagcagtgcctgagtttagaatcagaagctaactgtctattgctgagatgctttcgtctaaatcttgcgtgtagttgtaactgcaaggaaagaataacttgtggagagttggatttgttgatgaaccttagtagttcttgacttggttagttgtttccacatttcttcgcagtgccagtgcgtgcacttgtaacttgcaaattcttctcaatccacccctaatcgaagggtggatccagttccgcatgtaatgaggcaatatcatcaatagtttatgcttcgtttatcgca

SEQ ID NO: 198669 - DNA, 2112 bp, Zea Mays
gccatcgccgccaactgtgcgtgagcggccgccgcaagaaaatactttgttttttgcgcgcccgatctctgaccgggagcgccgggagtcgcctcgctacaaaagatcgcggacacgcgactctggccagggagacggacaaaaggagaggcgtggacacgggacgcgaggtagacagcgcccggcgtgacgtggcgcgagagggagagcggagaggggggctcaccaaactgcaaagtctgtctcctgactcctcgccggcgtgccggatctcctgtctctctcgcggtcggcggccgcatagcctcgttcactcgcacgacacagggcaggggggcgatgggctgcgcgacgtccaagcagttcagcaggagcgcgccggcgcacgcggatccggccgtgctggcgacccagacctcattcacggtgaacgaggtggaggcgctgtacgagctgtacaagaagctgagctgctccatcgtcaaagacgggctcatccacaaggaggagttccagctcgccttgttcaggaacagcaggagagcgaacctctttgcagacagggtcttcgatctgttcgatctcaagcggaacggagtcatcgatttcgaggagttcgtgcggtcgctcagtgtgttccaccctaaagcagatacgtcggagaagacggcgttcgctttcaagctgtatgatctgaggggaacaggctacatcgagaaagaagagataatggatcaaaattcggctttcgcctctttcgagggtaaggtcaaatttacacaacttaaaacaaatccaacaactcacaaaaacatgataaaactgtaagcttaaaagaggtaatagcttccctacttctcaccgactcaaactcacttaaacattattttattacaactcaatcatgtttgaaaacctccaaccctgataatcaaaaaactgcatgaccaccgactccagatgacgataagcttttcttaaaaaatctgctctttttcacttttatgtagctgtgcccgtagtcttagctaatgagtacctctaactagaacctgcaaataagtcaacatacgtaatttattaaatactaagtcatttatacttttccaaaaagctcagcacagtgttaagacacatgtaataatcagattcttagtatttagatccatcacgtcaaccaactcccaaccataatgcctgtgtacactgcacttgttcgattctaatataaaacagtaactttgttcttgagaagcagctcagagagatggtcttggcgctgcttgatgagtccgacctctgcctttcagacagcaccgtcgagacgatcgtcgataacacgttcagccaagcggactcgaacggagatggcaggatagatcctgaagaatgggaggagttcgtgaagaagaacccggcaacgttaaggaacatgactctcccctatctgcaggacatcaccatgtcatttccgagcttcataatgcgttcagaagccagtgactgaaatgtttgcgtacatctgcgtgtaaggaagcaccgttccatcagctctgctgtttgttggagcctacagcttagtccatggcacgaggcaccggagaaagttcagaatgtagcagcaacggccagcagagtgcatgagggttgctgccatagctgcaggctgcagccaaacaaaatgatgaccaaagattcatctagtgtcagcttcagggttcagatggtataccagccaacaattttctttctcggtatctaaacaccgtggatgttgcgtttaaaaaaattgttgcagaggatcaacaagtctgttcatcgaagcagtgcctgagtttagaatcagaagctaactgtctattgctgagatgctttcgtctaaatcttgcgtgtagttgtaactgcaaggaaagaataacttgtggagagttggatttgttgatgaaccttagtagttcttgacttggttagttgtttccacatttcttcgcagtgccagtgcgtgcacttgtaacttgcaaattcttctcaatccacccctaatcgaagggtggatccagttccgcatgtaatgaggcaatatcatcaatagtttatgcttcgtttatcgca

SEQ ID NO: 198670 - DNA, 1648 bp, Zea Mays
cctgcccgctacggcgcgccccccgggccaatcgcctcctcgcacctcgctcgcttcttccccttctccctcctctgtcctttcacacgtactccagcttgctcttttcctcctcccttcggccctcgcccatccgcctctctccccacgcgcgcgcgcatcgccctcccacagtcccccccccccccccccccccctcctcatcacccacccctagcaataccacactcctactgcaagacccgcccgcccaccgcttcctcgcatctcgggcgcgtgcctgcctgctctcgcggacgtggtggtggttctccggcgccgtggtgggcgggggacgagcgggtgggggaccggcgggtatttttggttgctgtggtttcgtgatggcggcggcggcgatctgcgtggaggacgaggcggcgtgcgccgccgcggaatgcgcggggatcgggaatctggatctcgctgccgccggcgccggggctggcggcaagaggagcgtctatctcatggactgcgcgccggtctggggctgcgcgtccacgcgcggccgcagcaccgagatggaggacgcctgcgccgcggccccgcgcttcgcggacgtgccggtgcgcctgctcgccagccgccgggacctcgaccgtctgggcctcgacgctgacacgctccgcctgccggcgcacctgttcggcgtcttcgacggccacggcggcgccgaggtggccagctactgccgggagaggctccaggtgctcctgaggcaggaactgaggctgctcagcaaggatttgggggagacaagcgaggccgacatgaaggagcactgggacgagctgttcaccaggtgtttccagaggctggatgacgaagtgtcggggcaggcgagcaggctcgtcggtggcgtccaggagacacggccggtggccgccgagaacgtcggctccactgcggttgtcgccgtcgtgtgctcctcccatgtggtggtcgccaactgcggggattcgcgtgttgttctctgccgtggaaaggagcccttagagctgtcgattgatcataagcctgacaggaaggatgaacgagcgaggattgaggccctggggggaaaggtcatccaatggaatggctaccgggtctccggtatacttgctatgtcaagatcgattggggaccggtatctgaagccgttcgtgattccaaaaccagaggtcacggtcgttcccagggcgaaagatgacgactgtctcatcctcgcaagcgatgggctgtgggatgtggtgacgaacgaagaggcatgcaaagctgcgcgccggcaaatccaagtgtggcacaagaacaacggtgccgctggcgcatcgtggtcgttgtgcgacgagggtgatggatccaccaccgaccccgctgcccaagccgcagcggattatctcgtgagggtcgcgctgaagaagggtaccgaggacaacgtcaccgtcatcgtggttgacctgaaacctcgaaagaaaagctcaggagcaactcgtagcatcgggcgttctgggtccatcacagtagagctgagctgaccatggcatggccaaagaactgctgctaggtgctagctggtcgtccgcacgagacttgaccggcccacagttttttttttgggtccgtt

SEQ ID NO: 198671 - DNA, 2011 bp, Zea Mays
cctaatcctgaataaaaggcaggctcatctttgcacagagtcattggaggaagtttgatgtttcagcagtactgtgacctttattagatgtctttccgcagcattgtgcgtgatgtaagagatggctttgggagcttgtctcgaagagggtttgaggtgaagtttctgggccaccgccgaggcagatctcacggtgctgtccatgagctgcgtgatccagccccagtgatccagagcagttgctgggctaatttgccccctgaattgcttcgagatgtgattgagaggttggaggccagtgaagccacatggcctaacaggaagagtgtagtctcttgtgcagctgtttgtcggacctggagagaaatctgcaaagagatcgttaagaatccagagttctctggaaaaatcacttttcctgtgtccttaaagcagcctgggcctcgagatgtaaccatccaatgcttcatcaaaagggataaatctactcaaacctactacttgtatctgtgccttagcacagctgtgcttgttgaaagtggcaagttcctcctatgtgcgaaacggacctcccgcccaacctgtacagaatatacaatatttatgaattctgaaaatttatctaggtcaagcaaaatgtacattggaaagctgaggtcgaatctcctcggcacaaagtttgcaatatatgatacccagcccccatgcaatgcagcagaacccgggaaaacaagccgtcggttctactcccggaaggtgtcgccaaaggtctcctccagcacctacaacatagcgcaggtttcatatgagctgaatgtcttgggtactcggggccctaggcggatgaactgtgttatgcactccatccctacctcgtgccttgaggctggtggcactgttcccagccagctggacagcatccttgctcgctctactgatgagtcatttggcagcatttccttctccaagtcatctgttgtggaccggtctatgcgtttcagcagctcaagattctccgacatctcaatgagcagcagccgcaggattggagacacggcatcgggagacaatgatgagtgcaaggagaggccattgattctccggaacaaggccccaaggtggcacgagcagctgcagtgctggtgcctcaatttcaggggcagggtgacagtcgcatctgtgaagaacttccagctcgttgctgccacgcagcccgctgctggagcaccaaccccatcacaggctaccccagtgccgcccgagcacgagaaggtgatcctgcaatttgggaaggtggctaaggacatgttcaccatggactaccgttacccactgtcagccttccaggccttcgcgatctgcctgagcagcttcgacaccaagctggcctgcgaatgaagccaccagtcatggctcaaagtcaaggacgatctgtctgtttcacgaagacggtggccccaaattttgctgggccaccattctgttgtatgttgttgatgccttcttaacttacctaggaagctgcgtttagacattttgcacctgatctacagctgctgctgtgtttctgtcctgatcgcattgttttccatagctttgctctgtggagcggcaacttgatctgccctgcccttaactagccggcaggtttattaatttggttttccatactatggttgtattaactgagaagagactccgacactttcgttgtgcctacctaagttctgtctgcctttgccctctgggatatgcaaatgtgcatcttgtaaaatttctgaattgcttttgtggcaagtcatagtaataaaagaactagcttccattcgattgcctgtttgggtacgtgttcctccaagtgaccactggccactgcaagcggcaacgccggcgaggtttttttcttgtttaaagtgcatgttttttttttgaattattatgtgcatgcttgtgctcgtaaaggcaagtgcttgcgaccttgcgtgtttgtgttctacaaaagaaaaaaaaa

SEQ ID NO: 198672 - DNA, 2146 bp, Zea Mays
tgttcagctgggtagacgcgtttcagctcgtatcgtggcgggattcggtgggggaggacgcggttctaagctgtgatttggcctcgaaattatttgggatttcggtgtcgactgtcgagaggtgcctccttccgagcatcctaatcctgaataaaaggctcatctttgcacagagtcattggaggaagtttgatgtttcagcagtactgtgacctttattagatgtctttccgcagcattgtgcgtgatgtaagagatggctttgggagcttgtctcgaagagggtttgaggtgaagtttctgggccaccgccgaggcagatctcacggtgctgtccatgagctgcgtgatccagccccagtgatccagagcagttgctgggctaatttgccccctgaattgcttcgagatgtgattgagaggttggaggccagtgaagccacatggcctaacaggaagagtgtagtctcttgtgcagctgtttgtcggacctggagagaaatctgcaaagagatcgttaagaatccagagttctctggaaaaatcacttttcctgtgtccttaaagcagcctgggcctcgagatgtaaccatccaatgcttcatcaaaagggataaatctactcaaacctactacttgtatctgtgccttagcacagctgtgcttgttgaaagtggcaagttcctcctatgtgcgaaacggacctcccgcccaacctgtacagaatatacaatatttatgaattctgaaaatttatctaggtcaagcaaaatgtacattggaaagctgaggtcgaatctcctcggcacaaagtttgcaatatatgatacccagcccccatgcaatgcagcagaacccgggaaaacaagccgtcggttctactcccggaaggtgtcgccaaaggtctcctccagcacctacaacatagcgcaggtttcatatgagctgaatgtcttgggtactcggggccctaggcggatgaactgtgttatgcactccatccctacctcgtgccttgaggctggtggcactgttcccagccagctggacagcatccttgctcgctctactgatgagtcatttggcagcatttccttctccaagtcatctgttgtggaccggtctatgcgtttcagcagctcaagattctccgacatctcaatgagcagcagccgcaggattggagacacggcatcgggagacaatgatgagtgcaaggagaggccattgattctccggaacaaggccccaaggtggcacgagcagctgcagtgctggtgcctcaatttcaggggcagggtgacagtcgcatctgtgaagaacttccagctcgttgctgccacgcagcccgctgctggagcaccaaccccatcacaggctaccccagtgccgcccgagcacgagaaggtgatcctgcaatttgggaaggtggctaaggacatgttcaccatggactaccgttacccactgtcagccttccaggccttcgcgatctgcctgagcagcttcgacaccaagctggcctgcgaatgaagccaccagtcatggctcaaagtcaaggacgatctgtctgtttcacgaagacggtggccccaaattttgctgggccaccattctgttgtatgttgttgatgccttcttaacttacctaggaagctgcgtttagacattttgcacctgatctacagctgctgctgtgtttctgtcctgatcgcattgttttccatagctttgctctgtggagcggcaacttgatctgccctgcccttaactagccggcaggtttattaatttggttttccatactatggttgtattaactgagaagagactccgacactttcgttgtgcctacctaagttctgtctgcctttgccctctgggatatgcaaatgtgcatcttgtaaaatttctgaattgcttttgtggcaagtcatagtaataaaagaactagcttccattcgattgcctgtttgggtacgtgttcctccaagtgaccactggccactgcaagcggcaacgccggcgaggtttttttcttgtttaaagtgcatgttttttttttgaattattatgtgcatgcttgtgctcgtaaaggcaagtgcttgcgaccttgcgtgtttgtgttctacaaaagaaaaaaaaa

SEQ ID NO: 198673 - DNA, 2880 bp, Zea Mays
gagagagagagagcacacgcaagacgagcgtcgccttctccgaatcccctccttgccaaacacgagctgcctaaccaaatccgtccacgctgtctcgtcccctcggcatcgcagtctcctacccaaatcgtcctcgtttcctcctccccgaactgacccgctgttgccgacggctagtaggatgacgaagctgacctcggagctactgcggccggtggttccggcggcggcgctggacgaggcggcgctgctgcgctacctggtggccaacgtcccgggcttcccgggccccgcgcccgcgctatcgctgacccagttcgggcacggccagtccaaccccacctactgcatccacgcctccgcgcccggcggggggcagcccaggcgctacgtgctcaggaagaagccgcccggggccatcctccagtccgcgcacgccgtcgagcgcgagtaccaggttctcaaagctctgggggatcacacagatgttcctgtcccgaaggtttattgtctctgcacagatgcaagtgtaattggaactcctttctatataatggagtatctggaaggaataatatatcctgatagcgcgttgccgggggtaactccatctaaaaggcgggctatatatttgtctactgccaaaactttggctgctatacacaaagttgatattaatgccattggattacaaaagtatgggagaagagacaattattgcaaaagacaggtagaaagatgggagaggcaatatcttgcatccactggcgaagggaagcctgcacgttaccagaggatgcttgatctagctcgttggttgaaagaacatgtaccagaagaagattcctcaccaggaccaggaacaggccttgtgcatggtgattaccgccctgataatctagtttttcatccaacagaggaccgagtaattggcgttattgattgggaactatctactttggggaatcagatgtgtgatgttgcttatagctgcttgccatatattatcgatgcagcacccagtgcaaggacttcttatggagggtttcaagatactggcattccagatggaattcctcaactggaagagtacctttctatatactgctcttttgctgcaagaccctggcctgctgcaaattggaagttctacattgctttttctttgtttcgtggggcatctatctatgcaggagtatatcacagatggactatgggtaatgcatcaggtggtgagcgcgctaaatttgctggcagggttgctaacgctatgattgactgtgcctgggacttcataaatagagtaaatgtcctgcaagaactgccttctaagggttctcaagtcttaggagcatcgtggcaagaatttcacagagaggaagaaagttcaacttctgaaaagaatcaaggaaaatttgttcctagtgaaaaggttatgcagcttcgaaagaaactaataaagtttatcgaagatcacatatacccaatggaggctgagttctacaaacatgcacaatcaacctcaagatggacaattcatccagaagaagaaaatcttaaagcattggcaaagaaggagggcctatggaacttgtttattccgctagacagtgcagcgagagctagaaagctattgtttgaagaccattctcaaatttcccttggaagttcgaataatcttttgctgggcgcgggtcttacaaatcttgaatatggatatctgtgtgagattatgggacgttcagtttgggctccacaaatatttaactgtggtgcacctgatacaggtaacatggaggtcctgttgaggtatggcactaaggagcaacagaagcaatggttagttcctttattggaagggacaattcgttctggatttgcaatgacagaaccacaagttgcatcttcagacgcgacaaatatagaatgctcaatatccaggcaaggagatttttatgtgataaatggaaggaagtggtggaccagtggagctatggatcctaggtgcaaaatcctgatattaatgggaaagacagatttttctgcacctaagcataagcagcagtccatgattttagtggacatcaacactcctggggtgcagataaagagaccattgttagtctttggttttgatgatgcacctcatggacacgcagagattacatttgaaaacgtgcgtgttccagtaacaaatatcctgcttggagaagggcgtggttttgagattgctcaaggaagacttggtcctggaaggttacatcattgcatgaggctagtaggagcagcagaacgtggcatgaatctgatggtagagagggccttaaacaggaccgcatttggaaagaggattgcacagcatggttcctttttatcagatcttgcaaagtgtcggattgaactggagcaggcaaggcttttagtccttgaagctgccgatcaactcgatcgacatgggaacaagaaagcacgtggtatcctcgcgatggccaaggttgcagctccaaatatggccctgaaggtgcttgacatggcgatgcaagttcacggcgcagctggtgtctcgtctgacacggtcttgtcgcacctatgggcaacggctaggacactgcggattgcagacggccccgacgaggtccatctcgggacaatcgccaagctggaactgcggagggctaggttgtaactcgagggcgatgtacagctcgcccgtcttgcgaatgaataaagaaggaacatcacccgtcgtcatttaacgtccatgtgaatacttagatgaataaataaatcctactttcagtagcagttactcttattttcaataaaccatatataatatcaatctttaataaatcatatcatttactcatcttcattaaa

SEQ ID NO: 198674 - DNA, 2808 bp, Zea Mays
cgccttctccgaatcccctccttgccaaacacgagctgcctaaccaaatccgtccacgctgtctcgtcccctcggcatcgcagtctcctacccaaatcgtcctcgtttcctcctccccgaactgacccgctgttgccgacggctagtaggatgacgaagctgacctcggagctactgcggccggtggttccggcggcggcgctggacgaggcggcgctgctgcgctacctggtggccaacgtcccgggcttcccgggccccgcgcccgcgctatcgctgacccagttcgggcacggccagtccaaccccacctactgcatccacgcctccgcgcccggcggggggcagcccaggcgctacgtgctcaggaagaagccgcccggggccatcctccagtccgcgcacgccgtcgagcgcgagtaccaggttctcaaagctctgggggatcacacagatgttcctgtcccgaaggtttattgtctctgcacagatgcaagtgtaattggaactcctttctatataatggagtatctggaaggaataatatatcctgatagcgcgttgccgggggtaactccatctaaaaggcgggctatatatttgtctactgccaaaactttggctgctatacacaaagttgatattaatgccattggattacaaaagtatgggagaagagacaattattgcaaaagacaggtagaaagatgggagaggcaatatcttgcatccactggcgaagggaagcctgcacgttaccagaggatgcttgatctagctcgttggttgaaagaacatgtaccagaagaagattcctcaccaggaccaggaacaggccttgtgcatggaccgagtaattggcgttattgattgggaactatctactttggggaatcagatgtgtgatgttgcttatagctgcttgccatatattatcgatgcagcacccagtgcaaggacttcttatggagggtttcaagatactggcattccagatggaattcctcaactggaagagtacctttctatatactgctcttttgctgcaagaccctggcctgctgcaaattggaagttctacattgctttttctttgtttcgtggggcatctatctatgcaggagtatatcacagatggactatgggtaatgcatcaggtggtgagcgcgctaaatttgctggcagggttgctaacgctatgattgactgtgcctgggacttcataaatagagtaaatgtcctgcaagaactgccttctaagggttctcaagtcttaggagcatcgtggcaagaatttcacagagaggaagaaagttcaacttctgaaaagaatcaaggaaaatttgttcctagtgaaaaggttatgcagcttcgaaagaaactaataaagtttatcgaagatcacatatacccaatggaggctgagttctacaaacatgcacaatcaacctcaagatggacaattcatccagaagaagaaaatcttaaagcattggcaaagaaggagggcctatggaacttgtttattccgctagacagtgcagcgagagctagaaagctattgtttgaagaccattctcaaatttcccttggaagttcgaataatcttttgctgggcgcgggtcttacaaatcttgaatatggatatctgtgtgagattatgggacgttcagtttgggctccacaaatatttaactgtggtgcacctgatacaggtaacatggaggtcctgttgaggtatggcactaaggagcaacagaagcaatggttagttcctttattggaagggacaattcgttctggatttgcaatgacagaaccacaagttgcatcttcagacgcgacaaatatagaatgctcaatatccaggcaaggagatttttatgtgataaatggaaggaagtggtggaccagtggagctatggatcctaggtgcaaaatcctgatattaatgggaaagacagatttttctgcacctaagcataagcagcagtccatgattttagtggacatcaacactcctggggtgcagataaagagaccattgttagtctttggttttgatgatgcacctcatggacacgcagagattacatttgaaaacgtgcgtgttccagtaacaaatatcctgcttggagaagggcgtggttttgagattgctcaaggaagacttggtcctggaaggttacatcattgcatgaggctagtaggagcagcagaacgtggcatgaatctgatggtagagagggccttaaacaggaccgcatttggaaagaggattgcacagcatggttcctttttatcagatcttgcaaagtgtcggattgaactggagcaggcaaggcttttagtccttgaagctgccgatcaactcgatcgacatgggaacaagaaagcacgtggtatcctcgcgatggccaaggttgcagctccaaatatggccctgaaggtgcttgacatggcgatgcaagttcacggcgcagctggtgtctcgtctgacacggtcttgtcgcacctatgggcaacggctaggacactgcggattgcagacggccccgacgaggtccatctcgggacaatcgccaagctggaactgcggagggctaggttgtaactcgagggcgatgtacagctcgcccgtcttgcgaatgaataaagaaggaacatcacccgtcgtcatttaacgtccatgtgaatacttagatgaataaataaatcctactttcagtagcagttactcttattttcaataaaccatatataatatcaatctttaataaatcatatcatttactcatcttcattaaa

SEQ ID NO: 198675 - DNA, 3600 bp, Zea Mays
gcagcctatagctgtaacgcaaaaaccttgcgagtccctccgataaaaagccccaatccctccatcccacctgcgtaccactcgtgtgctcgcaaacaagcgtccgagttcgaggcgtggcggcccgttttgcatgttgcgtttgcatgccgtagcagctctgctgccgatgttcctccccttccgaacccctcgccacctcctcgtctcgtgattcgaatcactgccccgctcccattgcgaacgagccagccgccacagctgttgccaggctcaagcggaagggctcgggttcccagacgtgccgggcgatcgatcggagagaggcggcgactcgggatcgggccgggggcgcggcggcaactgcacacacggggcgaagcggcggcgatgccaacctcatcgccctttgtcggcgacagcggcaccgcgggctccccgatccgcgccgagcgagcggtcggtgagcacggccgccgctacgacgtcttcgcgtcggacgcgatggataccgacgccgccgaggcggcctccgcttcggcgggggccttcgcgctcgatggtgtccactcgcctggacgtgcgtcaccggccaacatggaggacgccggcggcgcggccgcagggcacgccgcgcgaccgccgctcgccggctcccgcagcggtttccgccgcctcggtctccgcggcatgaagcagcgcctcctcgtcgtggccaaccgcctgcctgtgtccgccaaccgccgcggcgaggaccactggtcgcttgagatcagcgccggcggcctcgtgagcgccctacttggcgtgaaggacgtcgacgcgaaatggattggctgggcgggtgtcaacgtaccagatgagattggccagcgagccctcaccaaagctcttgcggagaagaggtgcataccggtgttcctggacgaggagattgtgcaccagtactacaatgggtactgcaacaacatcctgtggccgctgttccactatctaggactgccacaggaggacaggctggcaacaacgaggaactttgagtcgcagttcgacgcgtataagcgtgctaaccagatgttcgctgatgtcgtgtaccagcactaccaggagggggatgtaatctggtgtcatgactaccacctcatgttcctgcccaagtgcctcaaggaccatgacatcaatatgaaggtcgggtggttcctgcacacaccattcccgtcatcagagatttaccggacacttccgtcccgcttggagctgcttcggtcggtgctatgtgctgatttagttggattccatacttacgactatgcgaggcattttgtgagtgcttgcactagaatacttggacttgagggcacccctgagggcgtggaagatcaaggaagactaaccagggttgcagcgactctgatcgtttcaagcgagcattggagcttccggcagtaaaaaggcacatcaatgaactgacacaacgttttgccggtcgaaaggtaatgcttggtgttgatcgacttgacatgattaagggaattccacaaaagattctggcctttgaaaagtttcttgaggaaaatccagattggaacgacaaagttgttctactgcagattgctgtgccaacaagaactgacgtccctgagtatcaaaagctcacgagccaagtgcatgaaattgttgggcgcataaatggtcgattcggaacgctgactgctgtccctattcatcatttggaccggtctcttgatttccacgccttatgtgctctttatgcagtcactgatgttgctcttgtaacatcactgagagatgggatgaaccttgtgagctacgagtatgttgcatgccaagggtctaagaaaggagttctgatacttagtgagtttgctggggcagcacaatcccttggagctggcgccattctagtaaacccttggaatattacagaggttgcagactcaatacatcatgctttaacgatgccatccgacgagagagagaaacgacacagacacaactatgctcatgtcacaactcacacggctcaagattgggctgaaacttttgtatttgagctaaatgacacggttgctgaagctctactgaggacaagacaagttcctcctggtcttcctggtcaaacggcaatccagcaatatttgcgctctaaaaatcgtctgctcatattgggtttcaattcaacattgactgagccagtcgaatcctccgggagaaggggtggtgaccaaatcaaggaaatggaactcaagttgcatcctgacttaaagggtcctctgggagccctctgtgaggatgagcgcactacagttattgttcttagtggcagtgacaggagtgttcttgatgaaaattttggagaattcaaaatgtggttggcagcagagcatgggatgtttttacgcccgacttatggagaatggatgacaacaatgcctgagcatctgaacatggattgggtagacagcgtaaagcatgttttcgaatactttacagaaagaaccccaagatcccattttgaacatcgtgaaacatcatttgtgtggaactacaagtatgctgatgttgaatttggaaggctacaagcaagagatatgctgcagcacttgtggacaggcccgatctcaaatgcagctgttgatgttgttcaagggagtcggtcagttgaagtccggtctgttggagttacaaagggtgctgcaattgatcgtattttaggggagatagttcacagcgaaaacatgattactccaattgattatgtcctgtgtatagggcatttccttgggaaggatgaggacatctatgtcttttttgatcccgaatacccttctgaatccaaagtaaaaccagagggtgggtcagcatcacttgaccggaggccaaatggaaggccggcatcgaatggcagaagcaattcaaggaacccgcagtccaggccacagaaggcgcagcaggctgcatccgagaggtcgtcctcatcaagtcacagcagcactagcagcaaccacgactggcgcgaagggtcctcggtcctcgatctcaaggccgagaactacttctcctgcgccgtcggaaggaagcggtccaacgcccgttacctgctgagttcgtcagaggaggtcgtctccttcctcaaagagttggcaacggaaacagctggcttccagtccagctgtgctgattacatgttcttggataggcagtaaatagattggagcctccgtgctttgccagacaagcacactggagaggggaaaaacccattcattcctcaaatgcgcgacggagttacacccagcgtgttgtacaatcctgtacaaaatttatgctcgtgataaaactgcgagagggtggagcaaatggaaaaggataaaattagtttagatttagatagtttcgttgcttctggtacacaatcgacggctttttttatttctcattacaaattttttgagatgcgcttttgaactggttggtattgttcacatctgaaatacgcctgcgccatgagacatctcatattcttttttatctcagtaactaacagcacataacacgacaaaagaatttacctattta

SEQ ID NO: 198676 - DNA, 3806 bp, Zea Mays
ctccatcccacctgcgtaccactcgtgtgctcgcaaacaagcgtccgagttcgaggcgtggcggcccgttttgcatgttgcgtttgcatgccgtagcagctctgctgccgatgttcctccccttccgaacccctcgccacctcctcgtctcgtgattcgaatcactgccccgctcccattgcgaacgagccagccgccacagctgttgccaggctcaagcggaagggctcgggttcccagacgtgccgggcgatcgatcggagagaggcggcgactcgggatcgggccgggggcgcggcggcaactgcacacacggggcgaagcggcggcgatgccaacctcatcgccctttgtcggcgacagcggcaccgcgggctccccgatccgcgccgagcgagcggtcggtgagcacggccgccgctacgacgtcttcgcgtcggacgcgatggataccgacgccgccgaggcggcctccgcttcggcgggggccttcgcgctcgatggtgtccactcgcctggacgtgcgtcaccggccaacatggaggacgccggcggcgcggccgcagggcacgccgcgcgaccgccgctcgccggctcccgcagcggtttccgccgcctcggtctccgcggcatgaagcagcgcctcctcgtcgtggccaaccgcctgcctgtgtccgccaaccgccgcggcgaggaccactggtcgcttgagatcagcgccggcggcctcgtgagcgccctacttggcgtgaaggacgtcgacgcgaaatggattggctgggcgggtgtcaacgtaccagatgagattggccagcgagccctcaccaaagctcttgcggagaagaggtgcataccggtgttcctggacgaggagattgtgcaccagtactacaatgggtactgcaacaacatcctgtggccgctgttccactatctaggactgccacaggaggacaggctggcaacaacgaggaactttgagtcgcagttcgacgcgtataagcgtgctaaccagatgttcgctgatgtcgtgtaccagcactaccaggagggggatgtaatctggtgtcatgactaccacctcatgttcctgcccaagtgcctcaaggaccatgacatcaatatgaaggtcgggtggttcctgcacacaccattcccgtcatcagagatttaccggacacttccgtcccgcttggagctgcttcggtcggtgctatgtgctgatttagttggattccatacttacgactatgcgaggcattttgtgagtgcttgcactagaatacttggacttgagggcacccctgagggcgtggaagatcaaggaagactaaccagggttgcagcgtttcctattgggatagactctgatcgtttcaagcgagcattggagcttccggcagtaaaaaggcacatcaatgaactgacacaacgttttgccggtcgaaaggtaatgcttggtgttgatcgacttgacatgattaagggaattccacaaaagattctggcctttgaaaagtttcttgaggaaaatccagattggaacgacaaagttgttctactgcagattgctgtgccaacaagaactgacgtccctgagtatcaaaagctcacgagccaagtgcatgaaattgttgggcgcataaatggtcgattcggaacgctgactgctgtccctattcatcatttggtagctttcacacttcccatcgctgcctccatatctgtcttaggccctaatttttcttaagtgttatcctacatctgctgctgcgaaggcactacccgtttgtaaggttctattttgtagaactgatactatctgatttgcttttctaagtattacgaataagtataagtatcaatttttaacaccttgcataaaaagagctttgatgcattttctttacaataatttgaaacggtgtgttccttgcaggaccggtctcttgatttccacgccttatgtgctctttatgcagtcactgatgttgctcttgtaacatcactgagagatgggatgaaccttgtgagctacgagtatgttgcatgccaagggtctaagaaaggagttctgatacttagtgagtttgctggggcagcacaatcccttggagctggcgccattctagtaaacccttggaatattacagaggttgcagactcaatacatcatgctttaacgatgccatccgacgagagagagaaacgacacagacacaactatgctcatgtcacaactcacacggctcaagattgggctgaaacttttgtatttgagctaaatgacacggttgctgaagctctactgaggacaagacaagttcctcctggtcttcctggtcaaacggcaatccagcaatatttgcgctctaaaaatcgtctgctcatattgggtttcaattcaacattgactgagccagtcgaatcctccgggagaaggggtggtgaccaaatcaaggaaatggaactcaagttgcatcctgacttaaagggtcctctgggagccctctgtgaggatgagcgcactacagttattgttcttagtggcagtgacaggagtgttcttgatgaaaattttggagaattcaaaatgtggttggcagcagagcatgggatgtttttacgcccgacttatggagaatggatgacaacaatgcctgagcatctgaacatggattgggtagacagcgtaaagcatgttttcgaatactttacagaaagaaccccaagatcccattttgaacatcgtgaaacatcatttgtgtggaactacaagtatgctgatgttgaatttggaaggctacaagcaagagatatgctgcagcacttgtggacaggcccgatctcaaatgcagctgttgatgttgttcaagggagtcggtcagttgaagtccggtctgttggagttacaaagggtgctgcaattgatcgtattttaggggagatagttcacagcgaaaacatgattactccaattgattatgtcctgtgtatagggcatttccttgggaaggatgaggacatctatgtcttttttgatcccgaatacccttctgaatccaaagtaaaaccagagggtgggtcagcatcacttgaccggaggccaaatggaaggccggcatcgaatggcagaagcaattcaaggaacccgcagtccaggccacagaaggcgcagcaggctgcatccgagaggtcgtcctcatcaagtcacagcagcactagcagcaaccacgactggcgcgaagggtcctcggtcctcgatctcaaggccgagaactacttctcctgcgccgtcggaaggaagcggtccaacgcccgttacctgctgagttcgtcagaggaggtcgtctccttcctcaaagagttggcaacggaaacagctggcttccagtccagctgtgctgattacatgttcttggataggcagtaaatagattggagcctccgtgctttgccagacaagcacactggagaggggaaaaacccattcattcctcaaatgcgcgacggagttacacccagcgtgttgtacaatcctgtacaaaatttatgctcgtgataaaactgcgagagggtggagcaaatggaaaaggataaaattagtttagatttagatagtttcgttgcttctggtacacaatcgacggctttttttatttctcattacaaattttttgagatgcgcttttgaactggttggtattgttcacatctgaaatacgcctgcgccatgagacatctcatattcttttttatctcagtaactaacagcacataacacgacaaaagaatttacctattta

SEQ ID NO: 198677 - DNA, 2794 bp, Zea Mays
catgcgaatactgctggagttggcctaacccaacgaccagacgcaacacgacggcgacggccatggcttcgccggacctcgccgccggcgacggcagctacgactttcaccttcgctctctctccgcggcctcacgggactccgctgcggcctccgaccccgcctctgaccccaacctcctccaatctgttaggagggtgtgcgagatgtgccgaacggcgaaggaagcgaaggacgagatggtggcgcgggcgttccccgtgatgggcaagctatttcagcgatgcgccgccgctcccacgcaggccgttgcctccaccggcgtgctgctcctcaccattttgcaattcttcttggattttggggaggctgttttgcatgatgctgatggtagcttgaaaaccttcttccgctcttgcttaaggagtttgcagatcctattgttgcagagcgcacagttgaattccttgtaacaaacaagacaaagatccttagctcctttcccaatttgattccacaggtgccaacacttgaaatatttacttacttggaattgacaattcccacatgtagctcctattattcatgctgttgcagatcattgctttgaaaaactgaaagatataaatccagcttccttctttgttttatagcatatttgtcaattttttatgtgaatggtgggggaggcccctacatgtatttcttcactaacagaagcaaagaaatatttacaatacaggaggctgtaggccaaaaaggtagagaaaaaacagaaaaaaccatatttgtatgataagctactcaaccaatcttttgtaagattctttatagaatatctctcttctcttcctattttccatattcgacttaatcttgttaacacatgccaatgcttgtgtatccttgtttatacacagttctatccattgttgttaaagcttattgcatcaaacggtgagagactggagaataagttttcggaagtacttccattaatgatgtcagcaggatcttttcttcccctcttcctatcccttatggatttgccaatgttggtggtggcactggaaaaggtggaaagaagttctggaactcttattggtagtagtatagctacaatccagaagagcgctgctcctgagatgcttcttgcactgatggacgaggcatatactggttctgccgtagaagaacctagtggtaattcaggttctgatgatagtggtcccctagaccttactgacccaatgttcttagaccttctaaaagatgagaatgatggcattgccgcaaaacattggatatcccctacgatatcttcaacgttacaagcagcatttaacagcccacagtcggacagattgaaacagtcactggaaatggcacctcgctttcttactttatattttgcaacagcattgcgagacgttaatgactgtagcactgctgtgtgctcttattccagtagttatgtcaagatatgctgcaatgttcccagacaaagttttctctttcaaggtgagggaaaggctttcagacttcattttggctgcattccagcggtctcccaacatcattgcagtactgaagaaacctattactgacagacttggtgaggctcatgataatcttgccaagacagagttagcattgcacttgtgctgggccattggtgagcatggagctggaggggtgggtcacaaggatgtagctcgtgaactatttgaaaatttggagttattattgtatgaaaacctggcaactagccgtttgggattaagccaagagccaggatctgattccatgggtgcatcatctagaaagtcatcccaagccaggcttctctgctttgtggtgactgctattgcaaaattagcaacatgccacagtgagttgcttccgagggcacgcgtgtcattgggtaaggtcgctcgttcccgaacctcagacaggagggtctggcaacgggcctgtgactatttagggctcatgaatgaaccagccatctgtttatctgtactgggaccgtccaccgcccaaggaaatggtcctggtattgtgaattggagtgaaggaggaacaaagatggtagctcatgttcctttttaccttttagcccagcaaaaaggtccaccgtctcataatttttcatttgccgacctcctcccaacagaatgaagaaaatatctgcatgagtgcattggtgcaggcatgatttctctagcagaaggccatataacgattttgttttgaagatccaagttcctttttaaaaaaggggctggtctgaacattcaggcttatttctctagcataatactcataaagagtcctgtacttttaggtcttgttcggttattcctataatacatggattgatggaattaaaaaaaatttagaagaactttgacttgcttaggaattcaacacatctaatcccactcaatccatatggattgagagctaatcgaacaagtcttacatggttgactatgcactcgagttatggaatgtatggtattacatttctaagtggtggatcgtagtgtaaaaaatgtacacgtctgaatttgttcgaaatgacaagtatctgttttgtttgaaatgacacgtctgaacttggcatagaagtgcatgaaaaatagaaggtcgaaaggttacattctttcgaaaacagcaggaatattaggccatggctctataagtaaactaactgagaatttaaaagctgcaaaatagcagtgaagacactcagcaataacgcaagtatgcaagcacaaggcaataactg

SEQ ID NO: 198678 - DNA, 2493 bp, Zea Mays
catgcgaatactgctggagttggcctaacccaacgaccagacgcaacacgacggcgacggccatggcttcgccggacctcgccgccggcgacggcagctacgactttcaccttcgctctctctccgcggcctcacgggactccgctgcggcctccgaccccgcctctgaccccaacctcctccaatctgttaggagggtgtgcgagatgtgccgaacggcgaaggaagcgaaggacgagatggtggcgcgggcgttccccgtgatgggcaagctatttcagcgatgcgccgccgctcccacgcaggccgttgcctccaccggcgtgctgctcctcaccattttgcaattcttcttggattttggggaggctgttttgcatgatgctgatggtagcttgaaaaccttcttccgctcttgcttaagtagggagtttgcagatcctattgttgcagagcgcacagttgaattccttgtaacaaacaagacaaagatccttagctcctttcccaatttgattccacagttctatccattgttgttaaagcttattgcatcaaacggtgagagactggagaataagttttcggaagtacttccattaatgatgtcagcaggatcttttcttcccctcttcctatcccttatggatttgccaatgttggtggtggcactggaaaaggtggaaagaagttctggaactcttattggtagtagtatagctacaatccagaagagcgctgctcctgagatgcttcttgcactgatggacgaggcatatactggttctgccgtagaagaacctagtggtaattcaggttctgatgatagtggtcccctagaccttactgacccaatgttcttagaccttctaaaagatgagaatgatggcattgccgcaaaacattggatatcccctacgatatcttcaacgttacaagcagcatttaacagcccacagtcggacagattgaaacagtcactggaaatggcacctcgctttcttactttatattttgcaacagcattgcgagacgttaatgactgtaggttgcatacttttttttgcatgcttttttttgctacacatgttaagtgaccaacatattgttgatttgacaatctaagtttcttggttcagcactgctgtgtgctcttattccagtagttatgtcaagatatgctgcaatgttcccagacaaagttttctctttcaaggtgagggaaaggctttcagacttcattttggctgcattccagcggtctcccaacatcattgcagtactgaagattatctttctcactgtaactgaaatttactgatggactgtggccagtgcagacagagttagcattgcacttgtgctgggccattggtgagcatggagctggaggggtgggtcacaaggatgtagctcgtgaactatttgaaaatttggagttattattgtatgaaaacctggcaactagccgtttgggattaagccaagagccaggatctgattccatgggtgcatcatctagaaagtcatcccaagccaggcttctctgctttgtggtgactgctattgcaaaattagcaacatgccacagtgagttgcttccgagggcacgcgtgtcattgggtaaggtcgctcgttcccgaacctcagacaggagggtctggcaacgggcctgtgactatttagggctcatgaatgaaccagccatctgtttatctgtactgggaccgtccaccgcccaaggaaatggtcctggtattgtgaattggagtgaaggaggaacaaagatggtagctcatgttcctttttaccttttagcccagcaaaaaggtccaccgtctcataatttttcatttgccgacctcctcccaacagaatgaagaaaatatctgcatgagtgcattggtgcaggcatgatttctctagcagaaggccatataacgattttgttttgaagatccaagttcctttttaaaaaaggggctggtctgaacattcaggcttatttctctagcataatactcataaagagtcctgtacttttaggtcttgttcggttattcctataatacatggattgatggaattaaaaaaaatttagaagaactttgacttgcttaggaattcaacacatctaatcccactcaatccatatggattgagagctaatcgaacaagtcttacatggttgactatgcactcgagttatggaatgtatggtattacatttctaagtggtggatcgtagtgtaaaaaatgtacacgtctgaatttgttcgaaatgacaagtatctgttttgtttgaaatgacacgtctgaacttggcatagaagtgcatgaaaaatagaaggtcgaaaggttacattctttcgaaaacagcaggaatattaggccatggctctataagtaaactaactgagaatttaaaagctgcaaaatagcagtgaagacactcagcaataacgcaagtatgcaagcacaaggcaataactg

SEQ ID NO: 198679 - DNA, 3866 bp, Zea Mays
agcatgaagcagcagcaataactgtggtttatttcggtgccctagagcagagaatacagggtattactagaaaggaagaaacgggccccactgatgatcccgatggagatattatataactgcttctctcggtcttgagctaagcagcgcgcacgtcgtggtcattggcctccaccagatccgatgccttctttttcgctcttgctctgctctcatgggcagggcagggcatgcccatctacttgaattgcgatgcgtacatacatcgctgtctccatctagctgcacacatatatacatacatgcatacagagtgagagagaaacagatcgatctcacttagctgctgctgctgctgctgcttgctggtggcctgggcctggctgctgtgtctgtatcgatgtgtccgtattttctccatctcgtctgcatacgctgcaattggtaaggagctagctggcctttcatgtcttccatgctgccatagccatacggccggccggcaggcaggaggataccccatcgctcgctgcacatgcatgtatgcatggggatacatgttcatcatcagcagcacagtggctctgtatcccccatcccaatctgatcctatataggaggagaaggaggagcagcagcagcagccaggcgcggccggcggccggagtagtatccgaatccgctcaacacccaccggctggtctctagctttcctatcgatcaatggctttcaaaggactcccgcgtgattcccgagggtccctcgaagtcttcaatccagacgcccctgtttcagatcgagcaaccacctccccgtttctcctccctcctgcggccgcgtcccatcccagcctcctcgccgccggagatggcggcgatgctgacgtgggtcgggcgacacagagggccgccgagtggggcctcgtcctccagaccgacgagcacaccggccgcccccagggtgtcgtcgcccgtccctccggttccaaccgcaccagcgagagtggcaactccatcgacgagagggccgccgccgccggtgctggtagagctctcccccgggtgtcggaggagcttcgcgccgcgctctcagcgttccagcagaccttcgtcgtgtccgatgccacccgccctgaccaccccatcctctacgccagcgctggattcttcaacatgacgggctactcctccaatgaggtcgtcggaaggaactgccgcttccttcaaggttctgggaccgaccccgtagagatttccaagatcagacaggctctcgcagctgggtcaaattactgtggccgtatcctcaactacaagaaggatggtacaccattctggaacctcctaaccgttgcccccataaaggatgaggatggcagggtcctcaagttcattgggatgcaagtggaagtaagtaagtacacggaaggtaacaaagatactgctcttcgtccaaatggattgccagagtcactcatcaaatatgatgcaaggcagaaggatcatgctcgtagctcagtctcggagctcctacttgccctgaaggatccacggtcattgtcagaatcaagaaacaataccttaaaaaggaaatcacaggaatcagcaggttcagctctagttcccggcaagagaagctccgaaactggatcccgtcgtaactcacatagtggaatgagaaactctctacaaaaaatcagtgaggtgcctgaaggagggaataagaccaggaaatctggtttgcgttcttttatgggccttattggtatgggacatgggaatgtagagaagaacattctaaaaccaagggaagatcccctacttgatagcgatgatgagagaccagatagcttcgatgacgatttcaggaagaaagaaatgagaaagggcatagatttggctaccacacttgaacgtattgaaaagaattttgtcatcaccgacccgaggttaccagataatccaattatatttgcatcggatagctttttgcgtttgacagagtattgccgcgaagaaatattgggaagaaactgcaggtttcttcaaggacctgaaactgaccgtgggacagtaaagaagataagagatgccatagataaccaaacagaagttactgttcagctgataaattatacaaagagcggtaagaaattctggaacctctttcacttgcagcctatgcgtgatcagaagggtgatgttcaatacttcattggggttcaattggatggaactgagcgtgttcgagaggctgctgcaaaagatggtgccatactggttaagaaaactgcagacaatattgatgaggctgcaaaggagcttccggatgctaatttgagacctgaggatctatgggctaatcactcaaaaccagtcttgccaaagccacatatgaaggatactgcatcgtggagagccatccaaaaggttcttgagaacggtgaaagcattgatttgaaacatttcagaccagtaaggcctttaggatctggtgatactggcagtgtccacttggtggagttgcttggcacaggtgaatactttgccatgaaagctatggataaaagtgtcatgcttaaccgaaacaaggtccatagagctaccgctgaacgacaaatccttgatatgttggaccacccattccttccgacattgtatgcatcatttcagacaaagacacatatatgtcttattgttgactattgtgctggtggggaactctttatgctccttgataggcaacctatgaaggttctgaaggaggatgcggtcaggttctatgctgcagaagtggtcacagcacttgaatacctacattgccaaggtataatctacagagacttaaagccagagaacattttacttcatagagatgggcacatttcattgacagactttgatttgtcttgcttgacatcctgccgaccacaagtgtttcttccacacgatattgataagaagaaaaagaggaggaagagcaggagtaatcccatattttttgctgaaccaatgcgagcatcaaattcttttgttggtacagaggagtacattgcaccggagattattaccggagctggccatacgagtgctgtagattggtgggcgctaggaattcttctatatgagatgttatatggttatacaccgttcagagggaaaacaagacaaaggacatttgctaatattctgcacaaggatatcagatttcctgcgagcatacaggtgagcctggcggcaaggcagctgatataccggttgttacaccgagaccctgcaaataggctaggttcctatgagggcgctatggagatcaaacaacaccccttctttcgtggcataaactgggctctagttcgtgccgccacgcccccagagctggaggctcccctccaggatacattggaggccacactgcctcctcctgcagctgatggggctcacaccgatatgttctgatcatacattggtccatgatgctacatgttaatttgcttaaaggaagaaaaaatattagatgatgaagatgcatgactttggcatagatgagaacaataatgtatgttaaggactaattatcttgatccatctatgcatgctcacaattagaataagattggatgtgtatattgtttctgtggttgcaatatacgcacgagtctatgaaaggacctatggatagcttgaggggatgacagacactaggcatgttgattagtactccctccgtttcgttttacaagtcgtttccaacagcttcgtgctgattaaggaatctatgaatcaatgattctgccctcccacaagcctcggcttaggccttggcatttcgtccaaccttatccggtaaacacctgctgtaaggg

SEQ ID NO: 198680 - DNA, 3713 bp, Zea Mays
gcgcacgtcgtggtcattggcctccaccagatccgatgccttctttttcgctcttgctctgctctcatgggcagggcagggcatgcccatctacttgaattgcgatgcgtacatacatcgctgtctccatctagctgcacacatatatacatacatgcatacagagtgagagagaaacagatcgatctcacttagctgctgctgctgctgctgcttgctggtggcctgggcctggctgctgtgtctgtatcgatgtgtccgtattttctccatctcgtctgcatacgctgcaattggtaaggagctagctggcctttcatgtcttccatgctgccatagccatacggccggccggcaggcaggaggataccccatcgctcgctgcacatgcatgtatgcatggggatacatgttcatcatcagcagcacagtggctctgtatcccccatcccaatctgatcctatataggaggagaaggaggagcagcagcagcagccaggcgcggccggcggccggagtagtatccgaatccgctcaacacccaccggctggtctctagctttcctatcgatcaatggctttcaaaggactcccgcgtgattcccgagggtccctcgaagtcttcaatccagacgcccctgtttcagatcgagcaaccacctccccgtttctcctccctcctgcggccgcgtcccatcccagcctcctcgccgccggagatggcggcgatgctgacgtgggtcgggcgacacagagggccgccgagtggggcctcgtcctccagaccgacgagcacaccggccgcccccagggtgtcgtcgcccgtccctccggttccaaccgcaccagcgagagtggcaactccatcgacgagagggccgccgccgccggtgctggtagagctctcccccgggtgtcggaggagcttcgcgccgcgctctcagcgttccagcagaccttcgtcgtgtccgatgccacccgccctgaccaccccatcctctacgccagcgctggattcttcaacatgacgggctactcctccaatgaggtcgtcggaaggaactgccgcttccttcaaggttctgggaccgaccccgtagagatttccaagatcagacaggctctcgcagctgggtcaaattactgtggccgtatcctcaactacaagaaggatggtacaccattctggaacctcctaaccgttgcccccataaaggatgaggatggcagggtcctcaagttcattgggatgcaagtggaagtaagtaagtacacggaaggtaacaaagatactgctcttcgtccaaatggattgccagagtcactcatcaaatatgatgcaaggcagaaggatcatgctcgtagctcagtctcggagctcctacttgccctgaaggatccacggtcattgtcagaatcaagaaacaataccttaaaaaggaaatcacaggaatcagcaggttcagctctagttcccggcaagagaagctccgaaactggatcccgtcgtaactcacatagtggaatgagaaactctctacaaaaaatcagtgaggtgcctgaaggagggaataagaccaggaaatctggtttgcgttcttttatgggccttattggtatgggacatgggaatgtagagaagaacattctaaaaccaagggaagatcccctacttgatagcgatgatgagagaccagatagcttcgatgacgatttcaggaagaaagaaatgagaaagggcatagatttggctaccacacttgaacgtattgaaaagaattttgtcatcaccgacccgaggttaccagataatccaattatatttgcatcggatagctttttgcgtttgacagagtattgccgcgaagaaatattgggaagaaactgcaggtttcttcaaggacctgaaactgaccgtgggacagtaaagaagataagagatgccatagataaccaaacagaagttactgttcagctgataaattatacaaagagcgaaattctggaacctctttcacttgcagcctatgcgtgatcagaagggtgatgttcaatacttcattggggttcaattggatggaactgagcgtgttcgagaggctgctgcaaaagatggtgccatactggttaagaaaactgcagacaatattgatgaggctgcaaaggagcttccggatgctaatttgagacctgaggatctatgggctaatcactcaaaaccagtcttgccaaagccacatatgaaggatactgcatcgtggagagccatccaaaaggttcttgagaacggtgaaagcattgatttgaaacatttcagaccagtaaggcctttaggatctggtgatactggcagtgtccacttggtggagttgcttggcacaggtgaatactttgccatgaaagctatggataaaagtgtcatgcttaaccgaaacaaggtccatagagctaccgctgaacgacaaatccttgatatgttggaccacccattccttccgacattgtatgcatcatttcagacaaagacacatatatgtcttattgttgactattgtgctggtggggaactctttatgctccttgataggcaacctatgaaggttctgaaggaggatgcggtcaggttctatgctgcagaagtggtcacagcacttgaatacctacattgccaaggtataatctacagagacttaaagccagagaacattttacttcatagagatgggcacatttcattgacagactttgatttgtcttgcttgacatcctgccgaccacaagtgtttcttccacacgatattgataagaagaaaaagaggaggaagagcaggagtaatcccatattttttgctgaaccaatgcgagcatcaaattcttttgttggtacagaggagtacattgcaccggagattattaccggagctggccatacgagtgctgtagattggtgggcgctaggaattcttctatatgagatgttatatggttatacaccgttcagagggaaaacaagacaaaggacatttgctaatattctgcacaaggatatcagatttcctgcgagcatacaggtgagcctggcggcaaggcagctgatataccggttgttacaccgagaccctgcaaataggctaggttcctatgagggcgctatggagatcaaacaacaccccttctttcgtggcataaactgggctctagttcgtgccgccacgcccccagagctggaggctcccctccaggatacattggaggccacactgcctcctcctgcagctgatggggctcacaccgatatgttctgatcatacattggtccatgatgctacatgttaatttgcttaaaggaagaaaaaatattagatgatgaagatgcatgactttggcatagatgagaacaataatgtatgttaaggactaattatcttgatccatctatgcatgctcacaattagaataagattggatgtgtatattgtttctgtggttgcaatatacgcacgagtctatgaaaggacctatggatagcttgaggggatgacagacactaggcatgttgattagtactccctccgtttcgttttacaagtcgtttccaacagcttcgtgctgattaaggaatctatgaatcaatgattctgccctcccacaagcctcggcttaggccttggcatttcgtccaaccttatccggtaaacacctgctgtaaggg

SEQ ID NO: 198681 - DNA, 1742 bp, Zea Mays
cttcacatgctcccatgttcttgtaagaaattctggaacctctttcacttgcagcctatgcgtgatcagaagggtgatgttcaatacttcattggggttcaattggatggaactgagcgtgttcgagaggctgctgcaaaagatggtgccatactggttaagaaaactgcagacaatattgatgaggctgcaaaggagcttccggatgctaatttgagacctgaggatctatgggctaatcactcaaaaccagtcttgccaaagccacatatgaaggatactgcatcgtggagagccatccaaaaggttcttgagaacggtgaaagcattgatttgaaacatttcagaccagtaaggcctttaggatctggtgatactggcagtgtccacttggtggagttgcttggcacaggtgaatactttgccatgaaagctatggataaaagtgtcatgcttaaccgaaacaaggtccatagagctaccgctgaacgacaaatccttgatatgttggaccacccattccttccgacattgtatgcatcatttcagacaaagacacatatatgtcttattgttgactattgtgctggtggggaactctttatgctccttgataggcaacctatgaaggttctgaaggaggatgcggtcaggttctatgctgcagaagtggtcacagcacttgaatacctacattgccaaggtataatctacagagacttaaagccagagaacattttacttcatagagatgggcacatttcattgacagactttgatttgtcttgcttgacatcctgccgaccacaagtgtttcttccacacgatattgataagaagaaaaagaggaggaagagcaggagtaatcccatattttttgctgaaccaatgcgagcatcaaattcttttgttggtacagaggagtacattgcaccggagattattaccggagctggccatacgagtgctgtagattggtgggcgctaggaattcttctatatgagatgttatatggttatacaccgttcagagggaaaacaagacaaaggacatttgctaatattctgcacaaggatatcagatttcctgcgagcatacaggtgagcctggcggcaaggcagctgatataccggttgttacaccgagaccctgcaaataggctaggttcctatgagggcgctatggagatcaaacaacaccccttctttcgtggcataaactgggctctagttcgtgccgccacgcccccagagctggaggctcccctccaggatacattggaggccacactgcctcctcctgcagctgatggggctcacaccgatatgttctgatcatacattggtccatgatgctacatgttaatttgcttaaaggaagaaaaaatattagatgatgaagatgcatgactttggcatagatgagaacaataatgtatgttaaggactaattatcttgatccatctatgcatgctcacaattagaataagattggatgtgtatattgtttctgtggttgcaatatacgcacgagtctatgaaaggacctatggatagcttgaggggatgacagacactaggcatgttgattagtactccctccgtttcgttttacaagtcgtttccaacagcttcgtgctgattaaggaatctatgaatcaatgattctgccctcccacaagcctcggcttaggccttggcatttcgtccaaccttatccggtaaacacctgctgtaaggg

SEQ ID NO: 198682 - DNA, 1759 bp, Zea Mays
tatacaatgtgctttgctactttatgattgaacctataaattatagatacagacaatctcacaaatcaaagaatcatagacacatgtgacataataataaaccgacaacatttgccgattgcaaaaatgcaagggaggaccattaaccactgaccctgtatttcgtgtcacctagcgactccgacgagccccaatcccgcgcgccggtgaccatggagttcatcgacccctgggactcccagtcccgcgctcgcgtcgtccattccggcgccaactccacttcgttctcctcctccaccgccaaagcacccctctccctccgccacgccgcatcttgcgccgccgcggccgtcgcacttctcgccgccgcgttctacctcctcccgacctaccagatcctctcctccctcctcatatggatcgcttcgtccctgctcctcgcccccttcgcgcccttgtcggccactggcggcgacatctccgtcggccgaggccgcgtcgttccggctccagaaccggccccagaacccacaccggaacccacgcccgccccccgccgcggccgtcgccagaacccagtcccgacgcccacaaaaccctcagatccgggcactccccccgtccaatcggccgcatcactgcatccgttgcagaaggcgacaactgcggatggagccgtggtggacggcggcgagagggaggaggacgccggcgagtggactgaccaagagctggagctgctccggcggcagatggtgaagcacccggcgggtgagccccagcgctgggagaagatcgccgcggtgtttggcggccgccgcacgccggagaatgtcatccgggcggcaaagtcgggcgctcccgcggcgggaggaagctcgttcgagcagttcctacgcaagcggaagccgctcgatccgagggccgaggctgctgtcactgcggacgatgcgggaggcgccgagagtgcggacgccgcttggagcgccggggatgaccgggccttgctgaacgctcttaaggagttcccgaaggacactgcaatgaggtgggagaaggtggcggcctctgtacccgggaagacaaaggccgtgtgcatgaagaggatcaccgagctcaagcgagacttcaggagcaccaagacggcatcggaagcagcatcataggcgaaacctgataattttggtgccggactgaatgacatgcgctgcactggtttggctagcgaggaagaactttacatggctagctccagtgaaccatggaaacggcagaggattaactacactacggagagggccggagctatagaacagatcatgtaattttcctattgaactagagacagggtatcccttgatataggagaaactttgacttactactggacacatggcatgagacaggaagaacctgttcttgtttcaaactaaagcatgttttcattgcaatcttttgtaggggtcctattgctagtcggttaaatgtttttgtgtactgcttcgaattcctcgtttgagagtgggaaaccaagcagcgtttttttttatggtctgcgcgcttaggccatctcagaggaatcatatttgacttctacaggaatcagttcaatagcggtcggtactgcctgttaacatggtggcgtaggtggttggtatcgactggcttggttaattcggccaatcgatcggtgagtccgtcgatcgatcaatttggtcagtactccgatcacgggtcggtactgactagttcgttagag

SEQ ID NO: 198683 - DNA, 1541 bp, Zea Mays
cctagagcaagaatgcaaaggtttcttatcaactctagaaccgaggatttcaggagtctctttgtgtcggcgtgctcatgcaacatgtagctattctttggatgacaagttacagggagagctagatgatacacagggagaacagagaaagctagaaacagttggtgcgtttcagaaaataccaatggtgatgcctgcaactgatatactaatgtcagcacaaaggaaatctagaaacgtgccaccaacaaagggtatagcaaatattgctaagcgtgaaaggaacaaaggtgcgaaacagcttgatgccttaatgaaagaactttctgtaccgctgagaacatacacagaaaacttcccaaagaggagagatttgcatccttatgagaggtctctcattgagttgacttttggcgagggttattatgagcaggttctaggacgtgtagatactctcaggaaaaggattacttctgttggaaagcaacatgcttcagtctgtgctaagtcaacaacaaaacgtgaagcagaggagcgcctcactgagggcagaaagaaactcgaagaggctttccagcatgggaagcacgccattgatgatttagtaaatgtagcaaaggctttgcgttctatgcctgttgttgatctacatattccaacactatgtctagttggatcacccaatgtagggaagtcatctttagtccggatattatcatctggaaaacctgaggtctgcagctacccattcacaacaagagggattctaatgggtcacattgtatctaatcaggaacgttttcaggttacggacactccaggactcctgacaaggcatgatgatgacagaaataacatagagcgattgacactagctgtcctttcttatctacctatcgctgtcctgtatgtgcatgatctatccgaagactgtgggacctcagtggccgatcagtacatcacgtacaagcatattaaggacagattcggtgaccgcctatggcttgatgttatttccaaatgcgatcttttgggaaagaaagagcccataagttttcacgatgctgatgaagatgtagcacggtacagaagattggggccagaaggcgccctccaagtatctgtgcagaccgaaatcggcgtcaaacagcttaaggaaagagtgcatgagctgctgacctctcagatggctcggatcaaatctagcaaggcggagcatgaaacacatgaagtagggactagtgttgtttactgaagtttgacaataataaggattcgaatatcatgctgggtgtccgcgtaaacattcaatgtcgatgatggtaacacattccatcagttgtccttttgtccatttggaaagggtggtcaaaattgcccattatgcgttctttagtagggtaccaccacctgtccgaaaaaaaaaagattatcgttcgtcttctccatggtagaaagattgtcgatagagctcgggaaaagattattgaaacaaaaaatcatttaaatgatcaagatgtctaataggagattgaaatgag

SEQ ID NO: 198684 - DNA, 1855 bp, Zea Mays
caacatcatgtctgtaatggtgggcgtgagaaactgactgatgcgggtcttggcctcttggcctcttggtccaagcgattattttccgtgggccgttgggtccgtggaacatatccgttgcagaagactacagattacagaagcgctcgctcgctgttgttgctgctgccaactgaagggatgcgagccacggccaccgcaggaggccgtgcggtgttccacctccaacacctccgcccgcgcccgccatggcgagctcttcctcctgctgccaccacgcacctctcccgctccgcgccagcgaggcgagccgaccaccgttgcctccccaaaggtttcttatcaactctagaaccgaggatttcaggagtctctttgtgtcggcgtgctcatgcaacatgtagctattctttggatgacaagttacagggagagctagatgatacacagggagaacagagaaagctagaaacagttggtgcgtttcagaaaataccaatggtgatgcctgcaactgatatactaatgtcagcacaaaggaaatctagaaacgtgccaccaacaaagggtatagcaaatattgctaagcgtgaaaggaacaaaggtgcgaaacagcttgatgccttaatgaaagaactttctgtaccgctgagaacatacacagaaaacttcccaaagaggagagatttgcatccttatgagaggtctctcattgagttgacttttggcgagggttattatgagcaggttctaggacgtgtagatactctcaggaaaaggattacttctgttggaaagcaacatgcttcagtctgtgctaagtcaacaacaaaacgtgaagcagaggagcgcctcactgagggcagaaagaaactcgaagaggctttccagcatgggaagcacgccattgatgatttagtaaatgtagcaaaggctttgcgttctatgcctgttgttgatctacatattccaacactatgtctagttggatcacccaatgtagggaagtcatctttagtccggatattatcatctggaaaacctgaggtctgcagctacccattcacaacaagagggattctaatgggtcacattgtatctaatcaggaacgttttcaggttacggacactccaggactcctgacaaggcatgatgatgacagaaataacatagagcgattgacactagctgtcctttcttatctacctatcgctgtcctgtatgtgcatgatctatccgaagactgtgggacctcagtggccgatcagtacatcacgtacaagcatattaaggacagattcggtgaccgcctatggcttgatgttatttccaaatgcgatcttttgggaaagaaagagcccataagttttcacgatgctgatgaagatgtagcacggtacagaagattggggccagaaggcgccctccaagtatctgtgcagaccgaaatcggcgtcaaacagcttaaggaaagagtgcatgagctgctgacctctcagatggctcggatcaaatctagcaaggcggagcatgaaacacatgaagtagggactagtgttgtttactgaagtttgacaataataaggattcgaatatcatgctgggtgtccgcgtaaacattcaatgtcgatgatggtaacacattccatcagttgtccttttgtccatttggaaagggtggtcaaaattgcccattatgcgttctttagtagggtaccaccacctgtccgaaaaaaaaaagattatcgttcgtcttctccatggtagaaagattgtcgatagagctcgggaaaagattattgaaacaaaaaatcatttaaatgatcaagatgtctaataggagattgaaatgag

SEQ ID NO: 198685 - DNA, 1854 bp, Zea Mays
caacatcatgtctgtaatggtgggcgtgagaaactgactgatgcggtcttggcctcttggcctcttggtccaagcgattattttccgtgggccgttgggtccgtggaacatatccgttgcagaagactacagattacagaagcgctcgctcgctgttgttgctgctgccaactgaagggatgcgagccacggccaccgcaggaggccgtgcggtgttccacctccaacacctccgcccgcgcccgccatggcgagctcttcctcctgctgccaccacgcacctctcccgctccgcgccagcgaggcgagccgaccaccgttgcctccccaaaggtttcttatcaactctagaaccgaggatttcaggagtctctttgtgtcggcgtgctcatgcaacatgtagctattctttggatgacaagttacagggagagctagatgatacacagggagaacagagaaagctagaaacagttggtgcgtttcagaaaataccaatggtgatgcctgcaactgatatactaatgtcagcacaaaggaaatctagaaacgtgccaccaacaaagggtatagcaaatattgctaagcgtgaaaggaacaaaggtgcgaaacagcttgatgccttaatgaaagaactttctgtaccgctgagaacatacacagaaaacttcccaaagaggagagatttgcatccttatgagaggtctctcattgagttgacttttggcgagggttattatgagcaggttctaggacgtgtagatactctcaggaaaaggattacttctgttggaaagcaacatgcttcagtctgtgctaagtcaacaacaaaacgtgaagcagaggagcgcctcactgagggcagaaagaaactcgaagaggctttccagcatgggaagcacgccattgatgatttagtaaatgtagcaaaggctttgcgttctatgcctgttgttgatctacatattccaacactatgtctagttggatcacccaatgtagggaagtcatctttagtccggatattatcatctggaaaacctgaggtctgcagctacccattcacaacaagagggattctaatgggtcacattgtatctaatcaggaacgttttcaggttacggacactccaggactcctgacaaggcatgatgatgacagaaataacatagagcgattgacactagctgtcctttcttatctacctatcgctgtcctgtatgtgcatgatctatccgaagactgtgggacctcagtggccgatcagtacatcacgtacaagcatattaaggacagattcggtgaccgcctatggcttgatgttatttccaaatgcgatcttttgggaaagaaagagcccataagttttcacgatgctgatgaagatgtagcacggtacagaagattggggccagaaggcgccctccaagtatctgtgcagaccgaaatcggcgtcaaacagcttaaggaaagagtgcatgagctgctgacctctcagatggctcggatcaaatctagcaaggcggagcatgaaacacatgaagtagggactagtgttgtttactgaagtttgacaataataaggattcgaatatcatgctgggtgtccgcgtaaacattcaatgtcgatgatggtaacacattccatcagttgtccttttgtccatttggaaagggtggtcaaaattgcccattatgcgttctttagtagggtaccaccacctgtccgaaaaaaaaaagattatcgttcgtcttctccatggtagaaagattgtcgatagagctcgggaaaagattattgaaacaaaaaatcatttaaatgatcaagatgtctaataggagattgaaatgag

SEQ ID NO: 198686 - DNA, 1426 bp, Zea Mays
cactgaccttatgatgcacttggagaacagagaaagctagaaacagttggtgcgtttcagaaaataccaatggtgatgcctgcaactgatatactaatgtcagcacaaaggaaatctagaaacgtgccaccaacaaagggtatagcaaatattgctaagcgtgaaaggaacaaaggtgcgaaacagcttgatgccttaatgaaagaactttctgtaccgctgagaacatacacagaaaacttcccaaagaggagagatttgcatccttatgagaggtctctcattgagttgacttttggcgagggttattatgagcaggttctaggacgtgtagatactctcaggaaaaggattacttctgttggaaagcaacatgcttcagtctgtgctaagtcaacaacaaaacgtgaagcagaggagcgcctcactgagggcagaaagaaactcgaagaggctttccagcatgggaagcacgccattgatgatttagtaaatgtagcaaaggctttgcgttctatgcctgttgttgatctacatattccaacactatgtctagttggatcacccaatgtagggaagtcatctttagtccggatattatcatctggaaaacctgaggtctgcagctacccattcacaacaagagggattctaatgggtcacattgtatctaatcaggaacgttttcaggttacggacactccaggactcctgacaaggcatgatgatgacagaaataacatagagcgattgacactagctgtcctttcttatctacctatcgctgtcctgtatgtgcatgatctatccgaagactgtgggacctcagtggccgatcagtacatcacgtacaagcatattaaggacagattcggtgaccgcctatggcttgatgttatttccaaatgcgatcttttgggaaagaaagagcccataagttttcacgatgctgatgaagatgtagcacggtacagaagattggggccagaaggcgccctccaagtatctgtgcagaccgaaatcggcgtcaaacagcttaaggaaagagtgcatgagctgctgacctctcagatggctcggatcaaatctagcaaggcggagcatgaaacacatgaagtagggactagtgttgtttactgaagtttgacaataataaggattcgaatatcatgctgggtgtccgcgtaaacattcaatgtcgatgatggtaacacattccatcagttgtccttttgtccatttggaaagggtggtcaaaattgcccattatgcgttctttagtagggtaccaccacctgtccgaaaaaaaaaagattatcgttcgtcttctccatggtagaaagattgtcgatagagctcgggaaaagattattgaaacaaaaaatcatttaaatgatcaagatgtctaataggagattgaaatgag

SEQ ID NO: 198687 - DNA, 2108 bp, Zea Mays
ccgcccttccccaccgcacctccgttgtctccatcgcaatcaccgcggcggcttcaccatgtcccccaatcaccgcagacctcggctactcgtcagcacaatcagaggatagcaatgttgttgagaggtgcctggcagcagtaaatgctcttgcttcataccatttcagagaaagattaggagggagaggaggacagaactcgtagctcatggaatctgcaggaccaaatggcaaactgcaggaaagcataccaactcaattcttcatacttctattgtaaatacttctttttgaagatctcgggtgagctgtgtactgataatttgttttttattttgattgttttcaatattaagcgaagtacttatcaatttgttattatcttgtttaatcacaccgcaaattgtgtctgaagggaaccagaccatcaaagcatccattggtatttggacttgttcacatttaacttcagtctgctagattttttatataccgtgtgttctctgcaacaattactctatacatatgtaccataacgtgaggttgaaaagatttatgttcacaactctatagatttgtaaagagtttcatgagaaatgtggttacctttctgcccagctcctcttagtggccttctttctatttcccacatctttgcactgctgctgactgaatttcatccacagatatttcaccaattcactgcttcctcactatgaatcacctgctgctgctgctgcaatcaacattcagtcgacacaaaccagacaattcacctggacacaaaactgcagcagcagctgtgaaccattcatttaaatttagacaaagcagcaacaatttcagtcaatcattctaactcaaaccaagcagcggcagtgtcgaccattcttacaaattcagagcaagcagcctcactgccgaccattgtttccactttagaccaagaagcagcagtgtcaaccattctttcaaattcagagcaatcaacctcagtgtcgaccattatttccaatttagactaacatgcaacagtgtcaaccatttagtcaaccattctttccccaagctgaatgactagaggggcaattagcaggagcagaaggagcatgtgtcgctaatcatgttgttagccttttttattctttgctccagaaatttgttatcacatttcttttgccttgaaacttgaataaactttcttgtagcaattgctaatactagaggctaagcctatatttgggtgctttttcctcctatgattggcatacagacatgcagatggatattgataatatgtattatgaggtactatcttttatcatgtcttatcctgcctggatgttagaggggttttgttataggattattttctttgtggaggattctgctaggcgtgtgaacctctgtctccgcgctctcgcttgactgttgatttgactaatttggttgcttagatgtggctcttattaaaaaccatatgtagataggcttgcactacgtacacggtggcatggtaaacgttgtgaccacgctgtgataatgcatggattccatcagtttattttattcgtcaattgatcatggttgtgatctattttgtttagatactctatgatttgaatttcccctcttttttcgttatatttctcccttaactatatgattgtgatgaaactttattgttgtggaatttctcatatatgttataagatagctatttaccactttgaggtctgaaataaaacataatgacactcttaggctcactttgaggtctgaaataaaacataatagcactcttacatgattaccacatagctattcaccactttgaggtctgcaggtctcaggctcactttgagaggctagcagatttgcttacttcagatattttgaagccttataccaagccaccaaggagcagggttgcatcggtattactgccaatgatgatccatataattctaatgaaatgagcccaagtgaccaaagacaaaaccatgtttcaacatcgagaaaaaagcctatttccctcccaaaaagtgaagaagcaaaaactggtaaacctacataaaatctttgtagaaataaatttgatactgga

SEQ ID NO: 198688 - DNA, 1770 bp, Zea Mays
cgcccttccccaccgcacctccgttgtctccatcgcaatcaccgcggcggcttcaccatgtcccccaatcaccgcagacctcggctactcgtcagcacaatcagaggatagcaatgttgttgagaggtgcctggcagcagtaaatgctcttgcttcataccatttcagagaaagattaggagggagaggaggacagaactcgtagctcatggaatctgcaggaccaaatggcaaactgcaggaaagcataccaactcaattcttcatacttctattgtaaatacttctttttgaagatctcgggtgagctgtgtactgataatttgttttttattttgattgttttcaatattaagcgaagtacttatcaatttgttattatcttgtttaatcacaccgcaaattgtgtctgaagggaaccagaccatcaaagcatccattggtatttggacttgttcacatttaacttcagtctgctagattttttatataccgtgtgttctctgcaacaattactctatacatatgtaccataacgtgaggttgaaaagatttatgttcacaactctatagatttgtaaagagtttcatgagaaatgtggttacctttctgcccagctcctcttagtggccttctttctatttcccacatctttgcactgctgctgactgaatttcatccacagatatttcaccaattcactgcttcctcactatgaatcacctgctgctgctgctgcaatcaacattcagtcgacacaaaccagacaattcacctggacacaaaactgcagcagcagctgtgaaccattcatttaaatttagacaaagcagcaacaatttcagtcaatcattctaactcaaaccaagcagcggcagtgtcgaccattcttacaaattcagagcaagcagcctcactgccgaccattgtttccactttagaccaagaagcagcagtgtcaaccattctttcaaattcagagcaatcaacctcagtgtcgaccattatttccaatttagactaacatgcaacagtgtcaaccatttagtcaaccattctttccccaaggttctcttcttttcttttattaatcgtttgattactttttgtttcagctatttatgtggcaacaaactcactagacatatacccccaagactagggaacatgagtaattttagctacttgtaaattattgttaactaaataattgtgtgctgctgttgtccgtaattttaatgaaggttaatatttgttccatccatgcagctgaatgactagaggggcaattagcaggagcagaaggagcatgtgtcgctaatcatgttgttagccttttttattctttgctccagaaatttgttatcacatttcttttgccttgaaacttgaataaactttcttgtagcaattgctaatactagaggctaagcctatatttgggtgctttttcctcctatgattggcatacagacatgcagatggatattgataatatgtattatgaggtctcaggctcactttgagaggctagcagatttgcttacttcagatattttgaagccttataccaagccaccaaggagcagggttgcatcggtattactgccaatgatgatccatataattctaatgaaatgagcccaagtgaccaaagacaaaaccatgtttcaacatcgagaaaaaagcctatttccctcccaaaaagtgaagaagcaaaaactggtaaacctacataaaatctttgtagaaataaatttgatactgga

SEQ ID NO: 198689 - DNA, 2227 bp, Zea Mays
cggctactcgtcagcacaatcagaggatagcaatgttgttgagaggtgcctggcagcagtaaatgctcttgcttcataccatttcagagaaagattaggagggagaggaggacagaactcgtagctcatggaatctgcaggaccaaatggcaaactgcaggaaagcataccaactcaattcttcatacttctattgtaaatacttctttttgaagatctcgggtgagctgtgtactgataatttgttttttattttgattgttttcaatattaagcgaagtacttatcaatttgttattatcttgtttaatcacaccgcaaattgtgtctgaagggaaccagaccatcaaagcatccattggtatttggacttgttcacatttaacttcagtctgctagattttttatataccgtgtgttctctgcaacaattactctatacatatgtaccataacgtgaggttgaaaagatttatgttcacaactctatagatttgtaaagagtttcatgagaaatgtggttacctttctgcccagctcctcttagtggccttctttctatttcccacatctttgcactgctgctgactgaatttcatccacagatatttcaccaattcactgcttcctcactatgaatcacctgctgctgctgctgcaatcaacattcagtcgacacaaaccagacaattcacctggacacaaaactgcagcagcagctgtgaaccattcatttaaatttagacaaagcagcaacaatttcagtcaatcattctaactcaaaccaagcagcggcagtgtcgaccattcttacaaattcagagcaagcagcctcactgccgaccattgtttccactttagaccaagaagcagcagtgtcaaccattctttcaaattcagagcaatcaacctcagtgtcgaccattatttccaatttagactaacatgcaacagtgtcaaccatttagtcaaccattctttccccaaggttctcttcttttcttttattaatcgtttgattactttttgtttcagctatttatgtggcaacaaactcactagacatatacccccaagactagggaacatgagtaattttagctacttgtaaattattgttaactaaataattgtgtgctgctgttgtccgtaattttaatgaaggttaatatttgttccatccatgcagctgaatgactagaggggcaattagcaggagcagaaggagcatgtgtcgctaatcatgttgttagccttttttattctttgctccagaaatttgttatcacatttcttttgccttgaaacttgaataaactttcttgtagcaattgctaatactagaggctaagcctatatttgggtgctttttcctcctatgattggcatacagacatgcagatggatattgataatatgtattatgaggtactatcttttatcatgtcttatcctgcctggatgttagaggggttttgttataggattattttctttgtggaggattctgctaggcgtgtgaacctctgtctccgcgctctcgcttgactgttgatttgactaatttggttgcttagatgtggctcttattaaaaaccatatgtagataggcttgcactacgtacacggtggcatggtaaacgttgtgaccacgctgtgataatgcatggattccatcagtttattttattcgtcaattgatcatggttgtgatctattttgtttagatactctatgatttgaatttcccctcttttttcgttatatttctcccttaactatatgattgtgatgaaactttattgttgtggaatttctcatatatgttataagatagctatttaccactttgaggtctgaaataaaacataatgacactcttaggctcactttgaggtctgaaataaaacataatagcactcttacatgattaccacatagctattcaccactttgaggtctgcaggtctcaggctcactttgagaggctagcagatttgcttacttcagatattttgaagccttataccaagccaccaaggagcagggttgcatcggtattactgccaatgatgatccatataattctaatgaaatgagcccaagtgaccaaagacaaaaccatgtttcaacatcgagaaaaaagcctatttccctcccaaaaagtgaagaagcaaaaactggtaaacctacataaaatctttgtagaaataaatttgatactgga

SEQ ID NO: 198690 - DNA, 1502 bp, Zea Mays
cccacgtcccccaataccagcccggctcctcgctgtaatcactgcagcggccagatctgacctcgcccgcgacccatggcatgcgcccgagctacccgcgtcccccaaaatccaccccggatcctctcccttccccggtatgccaaaacccgtcccggctgctccccgccacatcgcggtgcctcaatactcaagacgcagcaaccccaatctagcgcaacttcttcaccgccgactgcgttgtgtcgccgtggtgggaccgggtccagcttgcccgacactggatagcaatgttgttgagaggtgcctggcagcagtaaatgctcttgcttcataccatttcagagaaagattaggagggagaggaggacagaactcgtagctcatggaatctgcaggaccaaatggcaaactgcagatatttcaccaattcactgcttcctcactatgaatcacctgctgctgctgctgcaatcaacattcagtcgacacaaaccagacaattcacctggacacaaaactgcagcagcagctgtgaaccattcatttaaatttagacaaagcagcaacaatttcagtcaatcattctaactcaaaccaagcagcggcagtgtcgaccattcttacaaattcagagcaagcagcctcactgccgaccattgtttccactttagaccaagaagcagcagtgtcaaccattctttcaaattcagagcaatcaacctcagtgtcgaccattatttccaatttagactaacatgcaacagtgtcaaccatttagtcaaccattctttccccaaggttctcttcttttcttttattaatcgtttgattactttttgtttcagctatttatgtggcaacaaactcactagacatatacccccaagactagggaacatgagtaattttagctacttgtaaattattgttaactaaataattgtgtgctgctgttgtccgtaattttaatgaaggttaatatttgttccatccatgcagctgaatgactagaggggcaattagcaggagcagaaggagcatgtgtcgctaatcatgttgttagccttttttattctttgctccagaaatttgttatcacatttcttttgccttgaaacttgaataaactttcttgtagcaattgctaatactagaggctaagcctatatttgggtgctttttcctcctatgattggcatacagacatgcagatggatattgataatatgtattatgaggtctcaggctcactttgagaggctagcagatttgcttacttcagatattttgaagccttataccaagccaccaaggagcagggttgcatcggtattactgccaatgatgatccatataattctaatgaaatgagcccaagtgaccaaagacaaaaccatgtttcaacatcgagaaaaaagcctatttccctcccaaaaagtgaagaagcaaaaactggtaaacctacataaaatctttgtagaaataaatttgatactgga

SEQ ID NO: 198691 - DNA, 2584 bp, Zea Mays
aggatggccttcgcttccgtccgaagtctcctcgctgccggggtgtcaagggagggcggccccagcacaagcgccgcccattgatcgctttcctctccttccctctcccctcccagtcgctcgcctaaacctcaccagcgaccagtcgccatcaccatggatggacccgcctccccctccgccgccgccgagactgatacgcggggaggagaagctccatccaaagccaagcgaggcaatgccgaggagaaatatcaacatggacaaccggtttactttcctgaggaactaatggacaattgggtttctttttctcttcgtggcttgtattattgctacaacatctcgttgcaagggtcttgcaacacaactgctgatccaacggacataattttagctgtcaaatgtgacatggggcctgacttctttcggtactcttttaacttgggtggtactgatattaccattaagtacctgtacaagattcatctgaatcaggaacaggtactttttgctagaagattccagatcacggttctttctttgctcattaacagtaacagttcggaggtcagcaatgctataaaatacttccgtgaatggcaggtagatttgggggttgtctatctacttctgcccacagcgtcaggcaaaattgattggtgcggtatcaagttctcaacatcatcagcatatgatgtgactgataaaaatatgagacattgccattcttgtaaagatgctgatatactgcagacaatggatgacccttgctgcaggtgcatacttcagaattctgttgtatatgcccctcgtgaacgaaaattttatattattacaggacttgacttaaatgcaaaccaacctctggatttgaacaataggagtgctgttagctgcaaaagaacctacgagtgttaagttgccacctgaactctgcaaaatagtcatggcaccggtgtcagcaaatactttgttcagcttctcatttgtgccttccataatgtaccgtatccagtgtctgcttctttctgcaaagttgaaaatccagttgggcccaagaatgcaacagttcaacataacagctatgaagattctggaagcacttacaacaaaggaatgccaggagaaattttcaatggaatcattagaaacacttggagattctttcattaagtatgttacaggccaaaatctttttaacaaatacaaacatcgagaggacatgctaacctctatgagagaagaaaaggtctccaacccagctctatgccagctagcttgcaaaagcgaaattgtgggatacattcgaggtgaactatttaacccccaaaaatggaccattccagggttcggttatgactcacgcggtaacaacaaggttttcttccgagcaaccaataatatgtacagtctgaagaaaatatccataaaaagcaagagaattgctgatacagtggaagccttgactggggcctacctcagtacttgtggtgaactggctgcagttcattttatcaaagcactaggaatggatgttgaactgcatagtaaaatgcaagttgaaaggactattacaacaaaatctgaagaattaattgacgcggaaagcttgcagacaatgctcaaatatgtgttctatgatacttcactgttagtagaagcattgacacatagttcttacaatattactggtattacagcttgcaatgagaggcttgaatttctcggagatgctgtattggactacatcttaacttattacttttacagaaaataccccaattgtacaccagcactgttgacaaatctacgaaaagcttctgtgaacaactgttgctatgcacatgcagctgttaaagcagggttacacaagcacattcttcattcatcgtcaaaacagatggttaacgatcttgagaattcagggcggtcattttcaggcccatcacatggttgggaagctggcattagtctcccggaggatctcgcagatttgtttgaagcaatagctggcgcaatttacgtggacagcgggaacgacaaagaggttgtctggagtgccatcaggcggctactggaacctcttgccacccccgggaccatggagcctgaccccgtgtcggaactgaaggaattatgcgagcacaaacactaccctaagccatcgtactctccaactcgtgacagtgtagctggagtgacaagggtggttgcacaggtgacggctgcgcggactgtgtactccgggactggaacaggccgcaaccaggatgtggcagaggttctcgctgcaaaggctctgctcaaaaagataaaggccgcagcaagaggatgaagcttggacttggcttggaccgggcgggcatttgatatttgggaatttgcgcacatgatagctgttctcgcagaggtaacaaaacaaactactgtagtatataaatgttgtgtatatgaatcaaggacagttgaactacccttggtttcgatagctgcaaaatacaaaacaaaaaaaaactcgaatctactatgcacagtggcttcatgtggtggacccttaatgaaatgatgaattctacgtggc

SEQ ID NO: 198692 - DNA, 1443 bp, Zea Mays
ctggctggaacacggaattcttttatgccccaactacctccactcacacgatgcgaggttggctccaagttattattcaagaaaaaagagaagccacaaaatctgcaggttcgagtatcacaaaatggagcagcaaatggaaatgatcccttgggccttcctcaactctgtgttcgcctgaatacacttcagtacatccgtggtgagcttgagaacatagagaagaagataaaaacaagcttgcgaaatgtcgagtcagctcaggcagatgtcactgatggattggacatcaagttcgagctttgtcaggcagcctgtctagagggcattcagcagatttgtgagacaactgcatataaggtgatgttctatgacttgggccatgttctctgggacaccctttatgttggtgatactgcatcaaacagggtggaggtactgttgagggaacttgaccctgtccttgagacgatatctggtatggtgcacaacaaagtgcggaaccgtgctattactgcactgatgaaagcaacttttgatggtttcttgctggtgcttcttgctggtgggcctttgcgtgctttcacccgccaagactctcagataatagaagatgacttcagggccctcagagatctgtatttagcagacggggatggtttgccagaggaattagttgacaaagcatcctcccaggtcaagaatgtcctacccctcttccgagcagactctgaaagtctcattgagcgattcagacgcatgatggttgaatctaatcggtctgcgtccaagaacaggttaccattgcctccaacaacggggcattggagtccaaatgagcctaacacagttctgcgagttctgtgctaccggagtgatgagacagctacaaagttcctcaagaaaacttacaacctaccgaagaagatatgacttgtgggatagatcacaaaccacatgtacattttcctgtcagtataaaaaggtttctctatgcctgtcacaatctctggctgaggaccgaggaaatacccactaaactttccacagcaaaggcgcctcctcaagtgattgtcaacaagaaggtttattctgtggtgctggagagatgtgactgggtgttttcggtggttcgtatcatggataggtttacttacagcttgatttgttcattatattatatatgtttgcctaatctagttcttttgctgaccttgcgctcatgtaatttgattcattctagtttgcgacagctatacccagcgtgtgaataagttgtgtactcgcgtgatactgtctggtgcctttgatgtgacaatatgaggagcatttgtatatttttactgcatcgtgcactccccactactttggtagttttctgtcatatccttgattccttgttgggttgaacgttctttggttatgcaactatttcaatttgca

SEQ ID NO: 198693 - DNA, 908 bp, Zea Mays
attcctctgaacaagcagtgcagaaatgcaccttcttgcttcttgttgcttcacgcggggcagccgggtgtcggcgaggaaccccctgatgagcaggaacctggagaggaatggcaggatcacctgcatgacgtttccccgggactggctgcggagggacctgagcgtcatcggcttcgggctcatcggctggatggggccgtccagcgtcccggccatcaacggcaacagcctcacggggctcttcttctccagcatcggccaggagctggcccacttccccacgcccccgcccgtcacctcccagttctggctgtggctagtgacgtggcacctgggcctgttcatcgtgctcaccttcggccagatcggattcaagggcaggaccgaggactacttcgagaagtgaagcggttaagatcctatccatcatccctggtgctgcgctgcgttgcgttgcgtgcgtgctcgccgctatcgaacctttgctgtatagggttccgatttcgtcgaatgtaatgtatgatgctacttttgagcttcaatgtaaaatctatgccgtccggccccaacgcgctcaggtttaatttgatgcatctagctactagtatccctctcagctacttattactctgataaaaaaagcattttttttctagactacatcaggtcaaacattaaaattactaccttcgtcgtaaaaaaaacatattgtgtttagggtttagggtatcaatctaggtagagcttgttggggcgaaggcaaaggcgccacccttcgctcgaagccttcgctgcagcagctgagctaacagaaacaaaacaggcagggacacccttcgcttgttccgcaccagacgaagaccggcgacgaagggcatcccacagtgcggccacgtccagctcag

SEQ ID NO: 198694 - DNA, 683 bp, Zea Mays
atggccgcacctcccacacagcagctcgcccgtcgacccgttccccaaaatctcgcctcgactaggcctgctgaagagccgatcccggaggacgaccagctagagcctgctgaccaggagcctgacgtcgaggaggagtacgtgagtgaaggcaagtctcatcgaccccttacgctgatggtgtttgctcctaagtgagggaaaatataaaacctgctatacataagagtggcatgaaatgatacacctaatactgagtggatgagagaaacctttgactgatgccttgatgcatgataattgcataaatatttgatacattgacacttgatgaaactggacgggaatgaaaccagagcagtggggtaagtgttggtgcatgcgctaccgtggtggtagacttgcgaccgagttgtcatggtgacatctcagaagagaaactttgggagcaagctgaccaccatagcaagctcctgagggacatatccttggtggaccgtgtcaagcgcaaagaccctcacccccagaactctgatggaaccaacatgcttgaaggaaccccggtgtacctgttccaaccccgtagaaggatttgtggaccggcatcacccacacctcctgcatcgcctcggacagatgatgaagaaggccctagagagaccatcgtagggaccaatgtttaa

SEQ ID NO: 198695 - DNA, 3055 bp, Zea Mays
ctcgtttatccacttgggctgccgcgccacttgactcgagcgtgacggctacacgtatgacgtagcttccgcgcctccctccgcctccttggcatccacggccgcgcgcgcggttctccgccgtccgtttcgtggctccggagatccggcctcatccgccccgccccgcccgcctcccggcctcgtcgtctcctcgtccccccactcccgtctcgtccgctttctttaatcaatcctccgcgccccacaaccccaagcaactcccactaatcgtcccctttccttccctttcccggcgggggcaacaatggtcggtgacggcgatcggtttgctgcatcggcggttcctgcggcgccgtgcaggtttctcggtcacctgtgagctcgatttgaccgcccccacctggcgtcgtgctggttccgttctgggtattcttggcgctggtctgggctctggggcgatcgggacacacctccgctctgcttatcgagggtcgaggcacccgacgatcttctccggaaaagcgccctactcttcataccatcagttcctgaaagatatgtttagaaaatgtgcatagttctgtgacggtggatggtggattggtggtcatggaagggacagtaatcagaatagctagtgagtcaaaacgaggcaatgagcaaacagactctttgacagaggtgcctagagctattgggactttagtaacacataatcgtgaagtagaaaacttaattgtacttgaagatgacacggaattaacaccttatgaaggaatggagtttgagtctgaagatgctgcaagggatttctacagcacatatgcaagaagtgcaggttttcggattcggatcagcaggtatactcgctcccgacgtgataattcagttatttctcgtcgaattgtgtgttcaaaagagggatttcatgaaacccgtgcttgtgatggcctccatcctgaacaaaaacaacaagaacgggcaggtactagagttggttgcaaggcaatgatattaattaaaaagtttagtcctggcaagtgggtggtaaccaaattcataaagaaccataatcatggaccagttccaccaagaaaacttgattccagactagtagaccaggactgtgatccaatggagaagccacattctattgaggtggaccctgttgaggagccatttgagggcatggaatttgaatcggaagaagctgcaaaattgttctatgtaaactatgcaaggctaaatggttttcgtgcacgtattagtagatattgtcgttcaaggcgtgataattcaattatttctcgccagattgtgtgttctaaggaaggcttccgtgaagttcggaccaagaaagtgttgacagatgaaggaaaaacaaagcgcccaagaatgataactagagttggttgcaaagctatgattgtagtgaaaaagatgaactctggaaagtggatggtttcgaaatttgagaaggagcataatcattcgctgtcatattctaaaatggtccctagtacctcaaacattacttctggagaaattgtcgatttagctgcaaagggtgcacatcctagtgaagtaaaaaatgaaggatacagtgcaggaacccaatgtaatcctgcagattccctcactatactttataacaacttatgccaggaggccataaaatttgcaaaagaaggttcagtcacagaagaaatttaccatgtggcagtttctgccttaaaagaggctgcagaaaaggttgctgaagtcaaaaggagtcgtccaacattgtcacattgtggtttcgttagagaaagcaaacatgatgtcttacaggagaaaagtatgagtgctttgcaatgttcaaatcaggttgaactgacaagaacatctcctgggtccaggcctcttcaagattctgcatcaaatcttctgctgataccaaccgacattttgactgattcaaggttatatagcggtgtcgatactgctcctctaacaggaggtttccccacaaatggtaaatatgctatgagagtgaaagtacacatgcatcagaaagttcttttatgcattttaagaacacaaagaaaacctcttcagaaaaatctcagaacacttgttttaatcaactcatccatggaaaggagcaaggtatccatggatcttctaaagataccatggttgctattcctgcgatacctcttgcactgtgcatgcctgtgacgcagagcttacctggatcttctacagaaggaccatatagattgttggctgcacctattgaagcagttccaatttcatactgccctgcagaacccataagacagacacaaaaaggtatttgtgctttaggtccatttggaggtgttctgtctgaactgaagaaccaaggaacagtccccaaatctatagttcatgctacagctcttgcttgtggtgctcgtgctgttcctcttgaagatgcagcttcgcttattagtgccattgaatccaaaatcagatctggaggggccataatagcgaaacttccttcaaacaacctagcacctctagttcctccagccattgctatgtcatcttctagtgaagatgacgaggagcatgaccacagtgagccctcgcaatgatcgatgtcgatcgcaacgttaatcatcagagctccaacgcgatgaagcttcagagggagctatcggagttcgaaactgaagctggcaactgacctggtctgaagacgaaagaaaatgatcatactgattgctaacatacgcgaagtgaaggactgaagttgttctaaagatcaaagcttccctgaaaggtggcagatctattctatgatttgagacattttttaaaagattggattaggattgtagtcacttgtttctgttgagtttatattgtaatcagattaactcaagttaatacctccagtggagaattgtagaaaggagtaaccatgctatgtacatgtcttctgcataaaagaaaggcgatagagtttaaaatccagctgtgctaaacatgatgttcataacctgaggcacccgtgtaaaac

SEQ ID NO: 198696 - DNA, 2284 bp, Zea Mays
ctccctccgcctccttggcatccacggccgcgcgcgcggttctccgccgtccgtttcgtggctccggagatccggcctcatccgccccgccccgcccgcctcccggcctcgtcgtctcctcgtccccccactcccgtctcgtccgctttctttaatcaatcctccgcgccccacaaccccaagcaactcccactaatcgtcccctttccttccctttcccggcgggggcaacaatggtcggtgacggcgatcggtttgctgcatcggcggttcctgcggcgccgtgcaggtttctcggtcacctgtgagctcgatttgaccgcccccacctggcgtcgtgctggttccgttctgggtattcttggcgctggtctgggctctggggcgatcgggacacacctccgctctgcttatcgagggtcgaggcacccgacgatcttctccggaaaagcgccctactcttcataccatcagattgtgtgttctaaggaaggcttccgtgaagttcggaccaagaaagtgttgacagatgaaggaaaaacaaagcgcccaagaatgataactagagttggttgcaaagctatgattgtagtgaaaaagatgaactctggaaagtggatggtttcgaaatttgagaaggagcataatcattcgctgtcatattctaaaatggtccctagtacctcaaacattacttctggagaaattgtcgatttagctgcaaagggtgcacatcctagtgaagtaaaaaatgaaggatacagtgcaggaacccaatgtaatcctgcagattccctcactatactttataacaacttatgccaggaggccataaaatttgcaaaagaaggttcagtcacagaagaaatttaccatgtggcagtttctgccttaaaagaggctgcagaaaaggttgctgaagtcaaaaggagtcgtccaacattgtcacattgtggtttcgttagagaaagcaaacatgatgtcttacaggagaaaagtatgagtgctttgcaatgttcaaatcaggttgaactgacaagaacatctcctgggtccaggcctcttcaagattctgcatcaaatcttctgctgataccaaccgacattttgactgattcaaggttatatagcggtgtcgatactgctcctctaacaggaggtttccccacaaatggtaaatatgctatggtaatgatcaattaatcaaatgcctttatacaactattgttttcttcatgacttgcttattccatcaaacagagagtgaaagtacacatgcatcagaaagttcttttatgcattttaagaacacaaagaaaacctcttcagaaaaatctcagaacacttgttttaatcaactcatccatggaaaggagcaaggtatccatggatcttctaaagataccatggttgctattcctgcgatacctcttgcactgtgcatgcctgtgacgcagagcttacctggatcttctacagaaggaccatatagattgttggctgcacctattgaagcagttccaatttcatactgccctgcagaacccataagacagacacaaaaaggtatttgtgctttaggtccatttggaggtgttctgtctgaactgaagaaccaaggaacagtccccaaatctatagttcatgctacagctcttgcttgtggtgctcgtgctgttcctcttgaagatgcagcttcgcttattagtgccattgaatccaaaatcagatctggaggggccataatagcgaaacttccttcaaacaacctagcacctctagttcctccagccattgctatgtcatcttctagtgaagatgacgaggagcatgaccacagtgagccctcgcaatgatcgatgtcgatcgcaacgttaatcatcagagctccaacgcgatgaagcttcagagggagctatcggagttcgaaactgaagctggcaactgacctggtctgaagacgaaagaaaatgatcatactgattgctaacatacgcgaagtgaaggactgaagttgttctaaagatcaaagcttccctgaaaggtggcagatctattctatgatttgagacattttttaaaagattggattaggattgtagtcacttgtttctgttgagtttatattgtaatcagattaactcaagttaatacctccagtggagaattgtagaaaggagtaaccatgctatgtacatgtcttctgcataaaagaaaggcgatagagtttaaaatccagctgtgctaaacatgatgttcataacctgaggcacccgtgtaaaac

SEQ ID NO: 198697 - DNA, 1643 bp, Zea Mays
taaccgcaaaccctctcgaacgagggaggacaggtgacggaacggtgatatgaggcggtggttatgttgtaactgccactatgacgtcgaggaagatgaccacgccaaggaacaggccaaagctcagagcaataagaccgactccaagcagaagtcttcaaagcctcctggtagtcaacctgagccagagttctcccctcctacaattgatgtccctgaattgtctttggatgatttgaaactaaagactgatgattttggatcaagtgctctgattggtgaaggttcttatggacgagtatatcatgccactttggacgatgggagacaagcagcagttaaaaaacttgatgcatctgaaaatgagcctaatgatgagtttctcaaacaggtctcactggcatcaaagctaaaacatgaaaatcttgttgagatgttgggttactgtgtcgatgggaattaccgtatactcgcatatgaatttgcaaccatgggttcgcttcatgatgttttacatggaagaaaaggcgttcaaggtgcgcagcctggacctgtacttgactggatgcagagggtcaaaattgctattgaggctgcaaaaggtatagaatatctgcatgaaaaggttcagccttcaatcatccatcgggacatcagatcaagcaatgtactgctgtttgaggatttcaaggcaaaaattgcagactttaatcttttgaaccaagcaccagatatggcagctcgtctccattcaactcgtgtattggggacttttggatatcatgctcctgagtatgctatgactggccagctgacacaaaaaagtgatgtctacagctttggtgtggttcttttggaacttttgactggaaggaaaccagtagatcacacaatgcctcgaggtcaacaaagtttagtcacatgggctactccaaggttaagtgaagacaaggtgaagcaatgtgtagatcccaggttgaagggagaatatcctccaaagggagtcgctaagcttgctgcagtggcagctctatgtgcacagtacgaagcagagttcaggcccaacatgagcatcgttgttaaggcgctttcgcctctccttcaacaaagacctgcaccaaccaccgaagagccagctccacaacctgggagctgaaaccagtcacatgtgatgggacccctaggcataagccatctccgcaaccattcaatcagcacattctataaatcattgagagtattttgggtatttgttctgtagcgttctcagttgggtatagcatacatgaacttgcccctgctgtttgtggccacctagttcgtggcttgatgttggcgccgcacaatggtatatgaagttggttcgaagtttttttttaccttctctataccaataccaagtgaccaactgtttgtaggttttcataattcgcggcttgaagaatagatgcaggatggtctggatttttttttgtccgtggcgtggtgttgctgcctgacctacgtgatgtacttcctctcttccaaatcccaattcaccttttcttgttctaagctagaattatcaaactttgacttgtttatataaatatatttatggacgtctacaacagtatcaaatgcaagagtttggagcaatatat

SEQ ID NO: 198698 - DNA, 877 bp, Zea Mays
tgaaggactgaaggtcaatttatctggtatgctatgactggccagctgacacaaaaaagtgatgtctacagctttggtgtggttcttttggaacttttgactggaaggaaaccagtagatcacacaatgcctcgaggtcaacaaagtttagtcacatgggctactccaaggttaagtgaagacaaggtgaagcaatgtgtagatcccaggttgaagggagaatatcctccaaagggagtcgctaagcttgctgcagtggcagctctatgtgcacagtacgaagcagagttcaggcccaacatgagcatcgttgttaaggcgctttcgcctctccttcaacaaagacctgcaccaaccaccgaagagccagctccacaacctgggagctgaaaccagtcacatgtgatgggacccctaggcataagccatctccgcaaccattcaatcagcacattctataaatcattgagagtattttgggtatttgttctgtagcgttctcagttgggtatagcatacatgaacttgcccctgctgtttgtggccacctagttcgtggcttgatgttggcgccgcacaatggtatatgaagttggttcgaagtttttttttaccttctctataccaataccaagtgaccaactgtttgtaggttttcataattcgcggcttgaagaatagatgcaggatggtctggatttttttttgtccgtggcgtggtgttgctgcctgacctacgtgatgtacttcctctcttccaaatcccaattcaccttttcttgttctaagctagaattatcaaactttgacttgtttatataaatatatttatggacgtctacaacagtatcaaatgcaagagtttggagcaatatat

SEQ ID NO: 198699 - DNA, 1017 bp, Zea Mays
gtcaactgtcgtatacccatccataatctaaggtctcgctcgtcggcgtggttcggagaggccacggccacccacccacccatggcggagaggctggaggcggccgcttccgacgagtacacgcaggacggcacggtggacctccacggaaacccggtgctccggtccaggcggggcgggtggagagcctgcggcttcgtcgtaggtatttggagcaactgtgagaagaactgcgagaagaacttaggcggcatgaggattacttgaagcaacaagctgcgcaacatgaatattatgctacacagattcaacaacagcaaacactcatacaacaactagcacaggcccaagggatacacgtctcggtgcccccccacctcccgttcattatccttggtcttcacctccacctatacctacatcttcatctaccgaacatcagacccctccagctaccttgccgacgcatgaacaagaagacgggttagactttgtcgaaaccctcttcactagtgaaggtatcgaccatcactcgacactgtaacccgatggttatcggcgaccatgagcttccatgttattgttttctgatacttgagacttttattatggctatgtatgagatattgtctcttattagttctggatgatgagatgtgtcttattatgactatggatgagacttttgtgatgtaattgatgagactatggattcaaatattgttatgtgattgtgtgtgagatgttttatgtgaaaatatgttgtgctatatagttgttgatatatttgttatgttgtggaatgtgatgtaaaataaaaataaacaacatttgtaatgatggtcaaattaacttcctagaggcttattgggtcgtaggaagttagtcgtaggaagttagtcagctaactttctaggggctacggtcagccgtaggaagttagtcgtaggaagttagtcagctgacggtgctgacggcgtgaagctactaacttccgagaatctactaacttctgag

SEQ ID NO: 198700 - DNA, 2112 bp, Zea Mays
gaggaacccttgtgtagttgtgtgcctgcctgtcaactgtcgtatacccatccataatctaaggtctcgctcgtcggcgtggttcggagaggccacggccacccacccacccatggcggagaggctggaggcggccgcttccgacgagtacacgcaggacggcacggtggacctccacggaaacccggtgctccggtccaggcggggcgggtggagagcctgcggcttcgtcgtagtgtacgaggtgttcgagcggatggcgtactacggcatctcctccaacctggtcctgtacctgaccaagaagatgcaccagggcgtggtgccgtcggcgaacaacgtcaccaactgggtcggcaccatctggatgacgcccatcatcggcgcctatgtcgccgacgcgcacctcggccgctaccggaccttcatggtcgcctccgtcatctacctcagggcatgatcctgctgacgctggcggtgtcgctgccggcgctgcggccgcccaagtgcggcgcgggaacggcggacccggactgcgtgcacaaggcgacgagcgagcagctgggcgtcttcttcctggccctgtacatcctcgccgtgggcacgggcggcaccaagcccaacatctccaccatcggcgccgaccagttcgacgacgcgcacccgcgggagcgcgcccacaagctctccttcttcaactggtggatgttcagcatcttcttcggcacgctcttcgccaacaccgtgctcgtctacatccaggacaccgtcggctgggccgtgggctacgcgctgcccacgctgggcctcgccgtctccatcgccgtcttcaccgccggcacgccattctaccgccacaagcccacctccgccgaaagccccttcgccaagatggccagggtcatcgtggcggccgccaggaagctggacgtccccgtgcccgtggacccgcgcgacctgcacgagctcgacgccgagcactacgccaagaggaacgtggccccgctcccgcacacgcccaacctcagcgtactcagcaaggcggcggtcaagaccggcgcggccacgtcgcggtggtcgctcagcaccgtcacgcaggtggaggagaccaagcagatgctcaagatgctccccgtgctggccatcacgttcgtgcccagcgccatgatggcgcagatcaacacgctgttcgtcaagcagggcaccacgctggaccgccacgtcggccgccacttcgagatcccgccggcgagcctccagggcttcgtcaccatctccatgctgctcgccgtcgtgctctacgaccgcgccttcatgccgttcgcgcgccgcgtcacggccaacccgcgcggcatctcgctgctgcagcgcatgagcgtcggcctcgtcatccacatcctcatcatggccatcgcgtcgctcacggagcgccaccgcctggcggtggcgcgcgaccacggcctctacgacagcaagggcaccacggtcccgctcaccatattcgtcctgctcccgcagttcgtgctcatgggcgtggccgacgccttccttgaggtggccaagatcgagttcttctacgaccaggcgcccgagggcatgaagagcctcggcacctcgtacgccatgaccagcctcggcatcggcaacttcctcagcagcgcgctgctctcagctgtgtcgcacatcaccaggcgccacggccggaccggctggatcctcaataacctcaacgcatcgcgcctggacaagtactacgccttcttcgccattctcaactgcgccaacctcgtcgccttcttcttcgtgtgccgcttctacgtgtacaacgccgaggtatcccacgtcgtcgacgccgggagcagtaagcagaagcgggaagtgcccatggcgatgcagccgccggccgtgggcgcagtggacgccaccctataggactagtgttccggtccattacaaatgtagttgtcatactcatacgtaccggtcatacatacgtgacgtgaaggatgaagcgccgcgtgtacagtgctgtaatctctacgtacatgcacctgcaatggatatgtgaaagtagtacgagaagctctgcagtgacggttaaaaagcgttttt

SEQ ID NO: 198701 - DNA, 535 bp, Zea Mays
gacggaggaccgggcttataaactgggtgcgcaggcccagctgctgccagagcgcagtctggagctgaggaacccttgtgtagttgtgtgcctgcctgtcaactgtcgtatacccatccataatctaaggtctcgctcgtcggcgtggttcggagaggccacggccacccacccacccatggcggagaggctggaggcggccgcttccgacgagtacacgcaggacggcacggtggacctccacggaaacccggtgctccggtccaggcggggcgggtggagagcctgcggcttcgtcgtagtgtacgaggtgttcgagcggatggcgtactacggcatctcctccaacctggtcctgtacctgaccaagaagatgcaccagggcgtggtgccgtcggcgaacaacgtcaccaactgggtcggcaccatctggatgacgcccatcatcggcgcctatgtcgccgacgcgcacctcggccgctaccggaccttcatggtcgcctccgtcatctacctcagcgccgtcaatattgtg

SEQ ID NO: 198702 - DNA, 810 bp, Zea Mays
cgcacgcggcacgaccgtcacggtacggcgtgggcaagaggatcaggcttccctacaccagaaagatcatcgacgccatccactccggcgagctcctcaccgccaactaccagaagaccgaggtgtttggcctggagatccccactgagatcaacggcgtgccgtcggaaatcctcgacccgatcaacacctggacggacaaggccgcgtacaaggagaatctcctgaggctcggcgggctcttcaagaagaacttcgaggtgttcgccagctacaagatcggggacgacagcagcctgactgacgagatcctcgccgcaggccccaacttctgaactaaagcaatggatccggatgaataaaacgatggcgtgcgtgcgtgggtgcgtgtgaagatgattacgacgacgacgacgaaaaaaaaggtgttggatcgatgagccaacatagtaatagattagctgggtattgtcatgggtgcgtctggtgttgttatctataaggctgtctgcctgtctcaagcagctatcatattctatttcaaattctattctgtaagcgtgtagttcaaaacaatgctttacacaaccatatgcacagtctatctaaggttggtctgttctatcagcttgttgggaaaagtttgcgtgtgcttgtatcttgccccctgtactctctctggtttctgaatttgaatacgaaacagcttgatcgcaatcaccattggttcggtgtgtgtgtgtgtgtgtcatggcaggagagtagcaattgattctgcctggaactgtcatagtttgaggccatcggtac

SEQ ID NO: 198703 - DNA, 2529 bp, Zea Mays
atttctacttgcaattcacttctccaggagcaggacctcgatcggccgagatggcgacgccgaacgggcttgcgcggatcgagacgaccgggaagaagaagcaggacaacggcgtgtggtacgacgacagctcggcgccggtgcgcgcgcagaccatcgacgagctgcactcgctgcagcggaagcggtcggcgcccagcacgcccaagcggtcggcgcccaccacgcccatcaagggcggtgcccactcgcccttcgccgtcgcgatctccgaggaggagcgccacacgcagcagatgcagtccatcagtgcgtcgttggcgtctctgacgcgtgaaaccgggccgaaagtggtcaagggcgacccggccgcgaagggcgaggccgccgcgcagggcgcgccatcgacgccgagggcgcaccagcagcaccgccaccccgccgcccccgccatcgccgtcagcgacagctccctcaagttcactcatgtgctcaacaacctctcgcctgctgagctgtacgagcaggccatcaagtacgagaaggggtcgttcatcacgtccaccggcgcgctggcgacgctgtccggtgccaagaccgggcggtctcccagggacaagcgcgtcgtcaaggacgaggtcaccgcgcaggacctgtggtggggcaagggctcgcccaacatcgagatggacgagaagacgttcctgatcaacagggagagggccgtcgactacctcaactccctggagaaggtgttcgtcaacgaccagtacctcaactgggaccccgagaaccggatcaaggtccgcatcatctccgccagggcgtaccactccctcttcatgcacaacatgtgcatccgccccacagacgaggagctggaggacttcggcacgccggacttcaccatctacaacgcagggcagttcccctgcaaccgctacacccactacatgacgtcgtccacgagcatagacctcaacctcgccaggagggagatggtcatcatgggcacgcagtacgccggcgagatgaagaaggggctcttcggcgtcatgcactacctcatgcccaagcgcggcatcctctcgctgcactccggctgcaatatgggcaaggacggcgacgtcgccctcttctttggcctctcaggtaccgggaagacgacgctgtcgacggatcacaacaggcttctgatcggcgacgacgagcactgctggagcgacaatggcgtgtccaacatcgagggcggctgctacgccaagtgcatcgacctggcgcaggagaaagaacctgatatttggaacgccatcaagtttggaactgtgctggagaacgtggtctttgatgagcatactcgtgaagtcgactacgccgacaactctgtcaccgagaacactcgggctgcctacccgatcgagtacatccccaacgccaagataccatgcgtcggcccgcaccccaagaacgtgatcctcctggcgtgcgacgccttcggcgtgctcccgccggtgagcaagctgaacctggcgcagaccatgtaccacttcatcagcggctacaccgctctggtcgccggcacggaggacggcatcaaggagccgcaggccaccttctccgcctgcttcggcgcggccttcatcatgctccacccgaccaagtacgccgccatgctcgccgagaagatgcagaagtacggcgccaccgggtggctcgtcaacaccggctggtcgggtggcaggtacggcgtgggcaagaggatcaggcttccctacaccagaaagatcatcgacgccatccactccggcgagctcctcaccgccaactaccagaagaccgaggtgtttggcctggagatccccactgagatcaacggcgtgccgtcggaaatcctcgacccgatcaacacctggacggacaaggccgcgtacaaggagaatctcctgaggctcggcgggctcttcaagaagaacttcgaggtgttcgccagctacaagatcggggacgacagcagcctgactgacgagatcctcgccgcaggccccaacttctgaactaaagcaatggatccggatgaataaaacgatggcgtgcgtgcgtgggtgcgtgtgaagatgattacgacgacgacgacgaaaaaaaaggtgttggatcgatgagccaacatagtaatagattagctgggtattgtcatgggtgcgtctggtgttgttatctataaggctgtctgcctgtctcaagcagctatcatattctatttcaaattctattctgtaagcgtgtagttcaaaacaatgctttacacaaccatatgcacagtctatctaaggttggtctgttctatcagcttgttgggaaaagtttgcgtgtgcttgtatcttgccccctgtactctctctggtttctgaatttgaatacgaaacagcttgatcgcaatcaccattggttcggtgtgtgtgtgtgtgtgtcatggcaggagagtagcaattgattctgcctggaactgtcatagtttgaggccatcggtac

SEQ ID NO: 198704 - DNA, 2235 bp, Zea Mays
cttgggcattagcaaggatgagtttgtgatttcaaagcttcaggacagattgaggctaggaaatgatgatgagctatcaattcaatgtttttatcctcttcaaccggctacttttcccaactgctagttggtcgatatcttacaacgaggttctattgaaggaacaattggatcgattccctcacattgattggtgccatctcatattcagcgacctatgtgaagctgcccagaaatggcacaataggagcactaataacgtctcagtgatggtatacgggtgttccatcgttgttctttttcggagaagcagtgagacttgttacgtcacaaaatctgcatttattggtcaatttgagtctacactaagcccagaatcaagtgaggcagacccaaatgaacatggtggacttcgcaacatatacattcaactgccacttatccaagacctgatgtcaactaagatccagcaactccttgtacatcaacgctccaagttccaagcaaagttgtttgcttatgactcagaggttggcaagatagtttccactatcacgcaatgtctgaatcagctagctgatacatttggagagttgattgacgaggttcttcgggctgagatatatagttcagacattgaaaatcacatgacccaaccttgcaatgtatctgtaccagaaccagccacacactctagtgatcaatttgtatctgaaccactgatgacacccacccagatggagtcgcagatgtctcatagtcaggtggaagaattagttcacagacaacaggaagtgcgacaagccttcgatagttgccctgatgaataggttacacctaatactctaggtcacaccatgctaggtggcatagtttaacctaactctggcctagttttcgacaagactcctagtgaaaatgttagtgtgtcaggcctcttcctatcaaaaatggaatgtgctcatgctctttgaaactacatgtgttctaaggtcatggacatggacagaaacatcattgactttggtgaatatcgtggcgattttcgtgacatacaacaatattttgctgatgccgcgtgcatcgacaatgtgtttatgcaatgcttcattgagtgtgtccacgatgacgctgctaaccgtattcctctaatgaccgctcaccacctcatcctagacgttaatgttggggtaataacttctactttaataattctcctcgtccttttgacccttccattttggagagtcacctttcaaacaaattgcctttgttcaagaagctggatgagtacaaatcggtaaatatcagttccctgaccacatcactctgtcatggcatgttttataacttgcgtacttacattttgattacctttatgcctcgggggtttttgctgcattttgtctaatgtaatgcggcaactcttaataaatttcaaccatattcatgcatatcaaccatagtgtactcaacaattttaattttagttttttacaagcagatcatggtatccatgctaccagcagacattggaccttatatgttgttaatttttagattggatgcatacatgtgttagattctatcccatatgggtcagaactgggtgggactacatggaagagttaccatgctacacctatggatctgggtgacaggcagttaccatgggccatgttaataatgagtaggctcaatctacccatacaacatgttcgaccaagatcacccctccctgccttttggaactaccctattgaactccccacgaactgcccaacaatgaaagcgggatctaacgattgtggattctttgttatgagatatatgcagtactacgactacatggatggagctatcaacgtagttattgatccggtacagaatcgtcggctagctgtttttgtgctatgacacaatcactgcgccatgttgaagaagaaacaacacctttctcatgttcgccggcgtctgctatggttcaattacgaaggagacgccgtcaggttcccttttttatatgcaccatgctgtccctttcagttattattatcgtttacgcaatatattgtgttcatttatggtccactttaacatgtacatgcatgcaccgcattattcccggaaacgtccctacatcgtgggcgattttatcgcgtcttgttacgaaacaaatttactatttatgctacaaaatgaatttgtttaagcaatactctctgtatatttatg

SEQ ID NO: 198705 - DNA, 2038 bp, Zea Mays
ggatgagtttgtgatttcaaagcttcaggacagattgaggctaggaaatgatgatgagctatcaattcaatgtttttatcctcttcaaccggctacttttcccaactgctagttggtcgatatcttacaacgaggttctattgaaggaacaattggatcgattccctcacattgattggtgccatctcatattcagcgacctatgtgaagctgcccagaaatggcacaataggagcactaataacgtctcagtgatggtatacgggtgttccatcgttgttctttttcggagaagcagtgagacttgttacgtcacaaaatctgcatttattggtcaatttgagtctacactaagcccagaatcaagtgaggcagacccaaatgaacatggtggacttcgcaacatatacattcaactgccacttatccaagacctgatgtcaactaagatccagcaactccttgtacatcaacgctccaagttccaagcaaagttgtttgcttatgactcagaggttggcaagatagtttccactatcacgcaatgtctgaatcagctagctgatacatttggagagttgattgacgaggttcttcgggctgagatatatagttcagacattgaaaatcacatgacccaaccttgcaatgtatctgtaccagaaccagccacacactctagtgatcaatttgtatctgaaccactgatgacacccacccagatggagtcgcagatgtctcatagtcaggtggaagaattagttcacagacaacaggaagtgcgacaagccttcgatagttgccctgatgaataggttacacctaatactctaggtcacaccatgctaggtggcatagtttaacctaactctggcctagttttcgacaagactcctagtgaaaatgttagtgtgtcaggcctcttcctatcaaaaatggaatgtgctcatgctctttgaaactacatgtgttctaaggtcatggacatggacagaaacatcattgactttggtgaatatcgtggcgattttcgtgacatacaacaatattttgctgatgccgcgtgcatcgacaatgtgtttatgcaatgcttcattgagtgtgtccacgatgacgctgctaaccgtattcctctaatgaccgctcaccacctcatcctagacgttaatgttggggtaataacttctactttaataattctcctcgtccttttgacccttccattttggagagtcacctttcaaacaaattgcctttgttcaagaagctggatgagtacaaatcggtaaatatcagttccctgaccacatcactctgtcatggcatgttttataacttgcgtacttacattttgattacctttatgcctcgggggtttttgctgcattttgtctaatgtaatgcggcaactcttaataaatttcaaccatattcatgcatatcaaccatagtgtactcaacaattttaattttagttttttacaagcagatcatggtatccatgctaccagcagacattggaccttatatgttgttaatttttagattggatgcatacatgtgttagattctatcccatatgggtcagaactgggtgggactacatggaagagttaccatgctacacctatggatctgggtgacaggcagttaccatgggccatgttaataatgagtaggctcaatctacccatacaacatgttcgaccaagatcacccctccctgccttttggaactaccctattgaactccccacgaactgcccaacaatgaaagcgggatctaacgattgtggattctttgttatgagatatatgcagtactacgactacatggatggagctatcaacgtagttattgatccgtataattcagaagaccttcgctctcttgtattgtattacatgatattccattgcctaaacaaaaacaaccccctcccttcaaatttagaaagattgtattatggatttgcaaaacgatggcgttcatgcgttaaaatgatggtacatgtcacattgtatctcacctgatgca

SEQ ID NO: 198706 - DNA, 2411 bp, Zea Mays
agacaagcggctcaaatctcaccctcccaccacatccacaaaaaatcaccctccccacctcgatcctcttccgcgagacggcaaaccgatcggtggaacggaacctccctcagtctcaaggcgagcgagcaagcgcggctcacgtccacagggccagcgacagtaggctgtaggccccgcccgctccagatccataggcagccgcgcgcgatcgcggcgtggtggataaaagcgtgcgcgctgcgccgctgccacgaggtaagagaggcgggacgagcgtcagtgcagtgcgcgtgtggtcgggtagcgatccgaggagcgcgcagcgatggcagcggcggccgtggcgactgtggccaccccatcccccgcctccaggcggctgttcccctccgccggcccgtctcttctccggctcccaaggccgaccaagcggctccggcgcgccctgcggttcgccgctgcgggggatgaagcggacgtgctgcctggcccgggggccgagggggaggccgtggtgcccgggaggctggaggagcagccggacgagcagctgggcggaagccagctcgacatcggagggctcgccttccagggcgacgtgggcgggggcttcaccggcggcggagcgggctccggggcctccggcggtggcggcggcaacaagatgctggaccggggcatcaacacggccatcgtgctcggggccagcacctacgctctcaccaagctgctcaccgtcgaccaggactactggcatgggtggacgatcttcgagatcctgcgctatatgccggagcacaactggtccgcatacgaggaggccctcaaagccaacccggttctagccaagatgatgatcagcggtgtcgtctactcccttggtgactggattgcacagtgctacgaaggcaagccgatatttgatttcgaccgtgctaggatgttccggtctggccttgttgggttcacgcttcatgggtcactttcacattactactaccatatatgcgaggcactgttcccattcaaggattggtgggttgtccctgcaaaggttgcattcgatcagaccatctggtctgcgatctggaacagtatctactttgtggtcttgggtttccttcggttggaatcacctaccactatctacaacgagctcaagtccacattctggcccatgcttactgctggatggaagttgtggccttttgcgcacttagttacatatggtgtggttcctgttgagcaaagacttctatgggtcgactgtgtggagcttgtctgggtcacaatactgtcgacttattcaaacgaaaagtcagaggcaaggaattctgatagtacctccacaccagcggcttcaaaggacaactccacatagcaaccccaaagatcttggaaagttgcttcgcccttccctcacttcaggggttatgtaaattgtacagttagctgcagcaactatgcaggtgtaaccttttttttttgtagctatatattcatgaaacatgaactgtgcagcatgtgctatagaataccatgaagaaattagcgtgctccgttcgtcccccaaataagtataaaagtgaactgcacttgttttgggacgtaaggtactctgcaacttgaattatcctatggaaccagagttggtcggtgtactcctagcaaactagtttccataaatctgtcatattggaagagttgatacaatttcattactctgctaagagttctaccaagaaagcatgtacagatgtgtttaatgtagaggtttttaatgtgcttaagggggatatttattaaaaaaaatcgttggacctgtctctctgtgaagagacatattaacaatagacgtctatcttttactgtaggaatctgttatctattctatcgatatgatattgtacagttatatttatttttatatttattaataaattatatttataaactttctattacataataaagtctcttagttgtgtcttatgctcgaagaatcgctttagtatctctctactgtacatcctctaaataaaaggagcattcggggatcccacgcaagtgttactttcatttcccttatcccaccggagagggtgccgacgctgggccacggcgtgttgggagcggaggttttcctgaccttgcacatggggacgtcaaggaacgcgtcgtcgctgtccggcccgggtcgtggcgaaggatgaggcgaatggcgtgcaacaccgagcggtacacgtcatgggtgaccgacttcacgtggcaccctcccatgttgcacgtcagccatcgtgggggtgacagggcaaaggtggccagcagatggtggtgctggatctgggtgggtggaacatgagaagagagtaaagacacgctacgtcacatattgaggtagatttttg

SEQ ID NO: 198707 - DNA, 2610 bp, Zea Mays
cttatggttaattaattagtaacataatggctatttccgttatcttcgagtctatactatacactagccctattctcattcgctgaaatatgggggtgggtggtgcaggtcctgaagaaattgccatgtccacaaaatgaaaatgcaataactctttagctcttatcttgtagggaatacattatacgctttaatgttagttttaggtttgaaacgctaccggcaggcaacatgcatcatacatggttaaccttagtcggggtttgtgattgtaatatatcttctcttcttcacattttgggaaatcattggaaagagggtgagtgttgaaatatgaagtgtacaaatataaagtgaactgccaccttccccatcagcttattggtttgaattaatcatgtatgtaacttaatagtaataataaatgattgttaaccagatatttctttgattccttagaagaactgagcacttagggccaggggagctcagccaaatgatattttacagagaagttatggtagagtatgatcctatgtaatgaactgagcggttgggagctgagaaaactaggggcatatttggatgtgcagtaagctttgcttgcctggcctcgctgctagtcaaggctaaccttgcccattgtggcaagccaattcggctctctcgctccagcaagaaaaactagcttgtacaagtatggaggcaacacgacaaggtaaccaaacatgtttctatatcctgtttctggctggtcaaggcgaggcaaggctcacatatggaaccaaaagtgctctcacttgtcctaattcttttcctacatagtttatcatagagaaccatttctccctgagaatcacttcctacatataatcaggagtagaagccttagcagccatgttaccggaagggaatgggaacatggactgatactttataatgtttttatactgtgggaatgtaattgttcctggtaatgtgaatgttcttgcaacgatgttcccgaaatggggaacgtggccatgttccacgtttccggctgctaaggcaggagccctagtaaactggcctcaagttttacatcatttgaaccacgaacttaagaactttcaagtttgttgtctccatttctattattctatattgtcttactgttagttatcatgaaaccttccataactgaaaaataaccagtttgactttggttaagatatttggcaggaagcctagtgtgagttaaagtatgatttgactgcttagctgaatgctactggagtctggatctcttaggctgtcattagagctgtggtataacatgcacttgaatggcagcattagcttccaacaaaaccacacaaagcattttttgtttccccctttgaattgtgggattgaagggcagcctctccgcatttgtagggggaaggcttgccttgatttatcccttacctagaccccaccattgtaggagcctccgacactagactggaaagtgggagtggaaattcgagaacaagccggtaaacatatactatgaggaacatgagcaggaggttgctgagaatatgaagaacattctcatgatccctacgatctctgatgtgagcactgtggaggagtggagggtggttgccaaagatattgttgggcggaaaggagaacttggctaccgtgttacaattgtcgattggcctggtcttggttattcagataggccatcactgaactacaatgctgatgtgatggagagctttctggttgaactaatgaattcaccaaacagtccagtcgcaaatgcagatgatgaactgatcattgttggaggtggtcatgcagcaaccatagctgttcgtgcagctggtaaagaccttataaaaccatctgctgttgctgctgttgcacctacttgggctggaccccttcccatcgtatttggccgcggttctgatatggaaactaggtatgggcttctacgaggaaccctcagggctccagccctgggctggatgatgtacaatgttctggtgagcaatgaaaagtcgatccagtctcagtacaagtcccacgtctacgccaaccctgacaacgtgacgccagctatcatcgagagccgatacgagttaaccaaaagaaaaggcgcacggttcgtccccgcggccttcctgacaggcctccttgatcctgtccaatcgagggaggagtttctgcagttgttcgccaagttagacggagacgtaccagttctggtagtgtcaacggtcaatgctcccaagagatccaaggccgagatggaggctctaaggggctctaaaggggtgacgaagtttgtggaggtcgcaggcgctcttctaccgcaggaagaataccccttggcagtcgcggaggaactctacagcttcctgcaggaatcattcgcagcaagaaggtgaatgtgcgtgcgtgcgtgcgcacaactgtgccagaagacaggttctcaagtcccacacatcgtgagtaaattcgttagcctgctacagtgtactggaggtttttagcaacaataaagcggcatcactcgttcacttccctagtgccacgattcaatagcctgcgacagagcagacagcagac

SEQ ID NO: 198708 - DNA, 3316 bp, Zea Mays
ctttgtcttgtttctaaaaaactgtttcgaagcgttgtagtttatttgtttataaaacagtttattcgtttggaaggtatctgcttgcgaattgcgatagcgagactcatgcaggcacacaagggggagttcccgagtccacggctgcacacgtcgtcgcctcctctccactcgcacactcgcaccctgcgtccgcctgccgcctaccccaggcggccccctcccatcgccatgcctccgtccgccgccgccaccgccgccgccttcctcttcccggccgtcgcgatcccctgccgcgtgttccctcaacggcgggcgaggagcctcgccgtccgtgccgtcgcctcccctccagccttcgcggtcaagcccgccccgctgccctccaaggtagcggaataagcccagattcgttgcgcttggttggaatgcgaactgcttcgatgtgctttgagatcccatattgcagggcacatggggttgcgattccgaacttcttatggttaattaattagtaacataatggctatttccgttatcttcgagtctatactatacactagccctattctcattcgctgaaatatgggggtgggtggtgcaggtcctgaagaaattgccatgtccacaaaatgaaaatgcaataactctttagctcttatcttgtagggaatacattatacgctttaatgttagttttaggtttgaaacgctaccggcaggcaacatgcatcatacatggttaaccttagtcggggtttgtgattgtaatatatcttctcttcttcacattttgggaaatcattggaaagagggtgagtgttgaaatatgaagtgtacaaatataaagtgaactgccaccttccccatcagcttattggtttgaattaatcatgtatgtaacttaatagtaataataaatgattgttaaccagatatttctttgattccttagaagaactgagcacttagggccaggggagctcagccaaatgatattttacagagaagttatggtagagtatgatcctatgtaatgaactgagcggttgggagctgagaaaactaggggcatatttggatgtgcagtaagctttgcttgcctggcctcgctgctagtcaaggctaaccttgcccattgtggcaagccaattcggctctctcgctccagcaagaaaaactagcttgtacaagtatggaggcaacacgacaaggtaaccaaacatgtttctatatcctgtttctggctggtcaaggcgaggcaaggctcacatatggaaccaaaagtgctctcacttgtcctaattcttttcctacatagtttatcatagagaaccatttctccctgagaatcacttcctacatataatcaggagtagaagccttagcagccatgttaccggaagggaatgggaacatggactgatactttataatgtttttatactgtgggaatgtaattgttcctggtaatgtgaatgttcttgcaacgatgttcccgaaatggggaacgtggccatgttccacgtttccggctgctaaggcaggagccctagtaaactggcctcaagttttacatcatttgaaccacgaacttaagaactttcaagtttgttgtctccatttctattattctatattgtcttactgttagttatcatgaaaccttccataactgaaaaataaccagtttgactttggttaagatatttggcaggaagcctagtgtgagttaaagtatgatttgactgcttagctgaatgctactggagtctggatctcttaggctgtcattagagctgtggtataacatgcacttgaatggcagcattagcttccaacaaaaccacacaaagcattttttgtttccccctttgaattgtgggattgaagggcagcctctccgcatttgtagggggaaggcttgccttgatttatcccttacctagaccccaccattgtaggagcctccgacactaggtctgccttttcattgtttcaactgactccattgtgtatctatttgttaaactgttaatgttaatgtgaatacaattactctagtggaagataccctacattagacttaagaatgttagaatgatataccttgacaaaaaggtcatattaccaattttgtcatgtctctctgctgttacctgtgctataacattgtcgatgtgtttccagactggaaagtgggagtggaaattcgagaacaagccggtaaacatatactatgaggaacatgagcaggaggttgctgagaatatgaagaacattctcatgatccctacgatctctgatgtgagcactgtggaggagtggagggtggttgccaaagatattgttgggcggaaaggagaacttggctaccgtgttacaattgtcgattggcctggtcttggttattcagataggccatcactgaactacaatgctgatgtgatggagagctttctggttgaactaatgaattcaccaaacagtccagtcgcaaatgcagatgatgaactgatcattgttggaggtggtcatgcagcaaccatagctgttcgtgcagctggtaaagaccttataaaaccatctgctgttgctgctgttgcacctacttgggctggaccccttcccatcgtatttggccgcggttctgatatggaaactaggtatgggcttctacgaggaaccctcagggctccagccctgggctggatgatgtacaatgttctggtgagcaatgaaaagtcgatccagtctcagtacaagtcccacgtctacgccaaccctgacaacgtgacgccagctatcatcgagagccgatacgagttaaccaaaagaaaaggcgcacggttcgtccccgcggccttcctgacaggcctccttgatcctgtccaatcgagggaggagtttctgcagttgttcgccaagttagacggagacgtaccagttctggtagtgtcaacggtcaatgctcccaagagatccaaggccgagatggaggctctaaggggctctaaaggggtgacgaagtttgtggaggtcgcaggcgctcttctaccgcaggaagaataccccttggcagtcgcggaggaactctacagcttcctgcaggaatcattcgcagcaagaaggtgaatgtgcgtgcgtgcgtgcgcacaactgtgccagaagacaggttctcaagtcccacacatcgtgagtaaattcgttagcctgctacagtgtactggaggtttttagcaacaataaagcggcatcactcgttcacttccctagtgccacgattcaatagcctgcgacagagcagacagcagac

SEQ ID NO: 198709 - DNA, 1221 bp, Zea Mays
cttatggttaattaattagtaacataatggctatttccgttatcttcgagtctatactatacactagccctattctcattcgctgaaatatgggggtgggtggtgcaggtcctgaagaaattgccatgtccacaaaatgaaaatgcaataactctttagctcttatcttgtagggaatacattatacgctttaatgttagttttaggtttgaaacgctaccggcaggcaacatgcatcatacatggttaaccttagtcggggtttgtgattgtaatatatcttctcttcttcacattttgggaaatcattggaaagagggtgagtgttgaaatatgaagtgtacaaatataaagtgaactgccaccttccccatcagcttattggtttgaattaatcatgtatgtaacttaatagtaataataaatgattgttaaccagatatttctttgattccttagaagaactgagcacttagggccaggggagctcagccaaatgatattttacagagaagttatggtagagtatgatcctatgtaatgaactgagcggttgggagctgagaaaactaggggcatatttggatgtgcagtaagctttgcttgcctggcctcgctgctagtcaaggctaaccttgcccattgtggcaagccaattcggctctctcgctccagcaagaaaaactagcttgtacaagtatggaggcaacacgacaagactggaaagtgggagtggaaattcgagaacaagccggtaaacatatactatgaggaacatgagcaggaggttgctgagaatatgaagaacattctcatgatccctacgatctctgatgtgagcactgtggaggagtggagggtggttgccaaagatattgttgggcggaaaggagaacttggctaccgtgttacaattgtcgattggcctggtcttggttattcagataggccatcactgaactacaatgctgatgtgatggagagctttctggttgaactaatgaattcaccaaacagtccagtcgcaaatgcagatgatgaactgatcattgttggaggtggtcatgcagcaaccatagctgttcgtgcagctggtaaagaccttataaaaccatctgctgttgctgctgttgcacctacttgggctggaccccttcccatcgtatttggccgcggttctgatatggaaactagatacatctggtgtagcatcctgatagg

SEQ ID NO: 198710 - DNA, 3392 bp, Zea Mays
ctgccactcctgctcacctccgccgaccgccatatcctcctctacatccaccgccgctgccgtataggtcccgtcccctcgtcgccgcggctgcgctggtggggagcggagcggacggacggagatccgcccgcctcgggctccgctacgccggctgaagccatggtgtctgctgttgaagagcttagttggttaacctctaaagaacttggtgagatgctcagggagtcagacaactttgttttgcagtccaagatagaagacggaggtccaaagcaagtacttgtggacatggaaaaagttgtgccctcgcttcctcttcatctccttgctgtatgtttggagcttgggcaaggcccggacttgacctatgtgcttcgtggcatccgttttttgcatagtttgtctgatctagcatcccgccatactagactggagcaggttctccttgatgatgtcaaattatccgaacaagtcatggacctgatattctttctactttctattcttgctgaacagaaggagaataacaatgttggtgcttctccgcttgtgcatgcgtcacttgtagcaggtagtcttcatctgttgacaaattacttctcttcccagtggcatgaacttgtccatattctgcttgcacatccaaaggttgatatctttatggacgtggcctttgatagtttgcatgaagatgtgaggctgttaagtatcagattatcatcaatgggcttcggtttctttcctgttggttctttggaatctcgtcttgctcacttcatctgtcaacagtgtgaagcatcattgcaatttctcttgttgttgtgccagcaaaagctatttcgagatcggattttaaaaaataaggaactctctagaaacggaggcatactgtcactttctcacactatactgaagttagttgtccctgaatgtttgaagcaatcaaccgaccttgttgcttctatttccaggctcaaggcaaagatactttctattctgttgcaactttgtgaggctgaaagtgtctcttaccttgatgaagttgccactaatccaaataacatgcggctagggcaaaccttggctctagaggttctaaatttgctgaagatttcatttggaagaaaaataaacattacttctgattctcatgacaaggatcattctttttgaccaacactgttccatttttaatccagattctagctgctcctcacgatgaatttgtttcgagttggtgcgctgtcaacttaccaacaattgaggaagatgcaagtctagattatgatccttttggtgcatctgaggtggcactattagcttctgataatatgttgactgaagctaaagctaactattcttgcccttttcgccctagcgtgccttcaatggcatatgcacagacaagaacatcatgcgtagtgaaaataatagcaaatttgcatgtttttattccaaacatatgtgaaggtagactatttctacatgttatgagtttaaatttattcacaacacattgttaaaataagttctgttctgacaacagagcaagaaagggatctttttcttcagaactttcaaaagcacttggcgtctgggagtcctaaactatcagcagatctgccagcttctagtgattttaaggccactaaagtctgtagaaacttaggatttttgtctgattatgctaaaacattggttcctaatttgttaaatggggaagacttggtgttattaagtgattttgctgataagctacaatcttggtgtaaatcacaagttgcagtaaagcaaaatctcatttttatcataataacacaactgcagagcgtgcacactaaatagaggttgtacaaaatgatattccaccagaaagcatggatgccatgtgcccggtgcagcagctcttgccaacacggacaagcactccagcctccaaaatgaataaccttccaaaggatgcacagaacatggaagtgtctacaccagtacccccaataaatccggaaggaaatgatgaggacgagactccaaagaacactgtctctagaaatggtggtttcctgcagaatgcagttggccaagacctagtccatcttggcgttgcaagaacaacaagtggtggcccttcggctgtcgcttccggtgttagcactggacaccagcacaacagaatggatcttgatccagcatccagcagcgtggataatttcaaaacaccagaacttacaaaagaaaacggtctcgaggaggatgggaaaggagagagtagtatgtatgatgagaggcaacctaagagaaggaagcggacccttatgaataatgagcaaatagatgaattagagaaggctctagtagatgagcctgagatgcacaaaaatcctgttctattgcagagttggtcagagaagttaagtctgcagggcccagagatcacagcatcacaacttaaaaactggttgaacaaccggaaagctaagcttgctcgcattgcaaaagaaagggcggagaatgctgataaaccatctacttcccatcccggcgagtcttcagaaagtgccggggaggacaactatctaccccctgcaggtgtgatgactgttctatccaaaggtggtagcctgttgagcccggactgcactgagcaaacgtcgcaggcagagctatccccgaacacgacgatgatggtccgtccattcacgagatccttctcgttggaacccggccgcctcgtttcattagtcgacagcgatgggaaggaggttggcaggggcaagatcttccaagcgccagggaagagcacaacggagagccgcgtttgcgtggttgatgtcactgagctcaggaccgagaagtggagggagctcccccacccttcggaggcatttgggtggacgttccaggaggcggaggcgaggaatggtggcatcatcagggtctcttgggacgccgtcaggttgttccctgtagcgtagcaaggccgattgtataacaagatgagtagagggaaactgtggcctaagtaacattatgttaaaagctgtggttaactgtgttgtattcatgaactaattgttttgagcaattcaggtggttactgattttacatttttactactggtgttagtgtcacctgcaatgtgctgtgagaaaccaatgctgagcattcagccatcctttgtatatcaatgggtaagtggccaggatcgtagcatgaacagaaagggcatgtttattgtggtttttatgtgtggagaaagataaatgagttcatagggtttggaatctagaaatccggtttagaatctagaaagtattactaattttgctagtagtgttagtgtcacctgctttgtgcgtcaaaggctatcattgaaaaaaagtgttat

SEQ ID NO: 198711 - DNA, 3297 bp, Zea Mays
ctgccactcctgctcacctccgccgaccgccatatcctcctctacatccaccgccgctgccgtataggtcccgtcccctcgtcgccgcggctgcgctggtggggagcggagcggacggacggagatccgcccgcctcgggctccgctacgccggctgaagatgatagccatggtgtctgctgttgaagagcttagttggttaacctctaaagaacttggtgagatgctcagggagtcagacaactttgttttgcagtccaagatagaagacggaggtccaaagcaagtacttgtggacatggaaaaagttgtgccctcgcttcctcttcatctccttgctgtatgtttggagcttgggcaaggcccggacttgacctatgtgcttcgtggcatccgttttttgcatagtttgtctgatctagcatcccgccatactagactggagcaggttctccttgatgatgtcaaattatccgaacaagtcatggacctgatattctttctactttctattcttgctgaacagaagcaggtagtcttcatctgttgacaaattacttctcttcccagtggcatgaacttgtccatattctgcttgcacatccaaaggttgatatctttatggacgtggcctttgatagtttgcatgaagatgtgaggctgttaagtatcagattatcatcaatgggcttcggtttctttcctgttggttctttggaatctcgtcttgctcacttcatctgtcaacagtgtgaagcatcattgcaatttctcttgttgttgtgccagcaaaagctatttcgagatcggattttaaaaaataaggaactctctagaaacggaggcatactgtcactttctcacactatactgaagttagttgtccctgaatgtttgaagcaatcaaccgaccttgttgcttctatttccaggctcaaggcaaagatactttctattctgttgcaactttgtgaggctgaaagtgtctcttaccttgatgaagttgccactaatccaaataacatgcggctagggcaaaccttggctctagaggttctaaatttgctgaagatttcatttggaagaaaaataaacattacttctgattctcatgacaagggtaagatttaccccatgggatctgtgcttatcagtgcattgcgtcttgttgatgtcttctctgatgattcgaacttcagatcattctttttgaccaacactgttccatttttaatccagattctagctgctcctcacgatgaatttgtttcgagttggtgcgctgtcaacttaccaacaattgaggaagatgcaagtctagattatgatccttttggtgcatctgaggtggcactattagcttctgataatatgttgactgaagctaaagctaactattcttgcccttttcgccctagcgtgccttcaatggcatatgcacagacaagaacatcatgcgtagtgaaaataatagcaaatttgcatgtttttattccaaacatatgtgaagagcaagaaagggatctttttcttcagaactttcaaaagcacttggcgtctgggagtcctaaactatcagcagatctgccagcttctagtgattttaaggccactaaagtctgtagaaacttaggatttttgtctgattatgctaaaacattggttcctaatttgttaaatggggaagacttggtgttattaagtgattttgctgataagctacaatcttggtgtaaatcacaagttgcagtaaaggttgtacaaaatgatattccaccagaaagcatggatgccatgtgcccggtgcagcagctcttgccaacacggacaagcactccagcctccaaaatgaataaccttccaaaggatgcacagaacatggaagtgtctacaccagtacccccaataaatccggaaggaaatgatgaggacgagactccaaagaacactgtctctagaaatggtggtttcctgcagaatgcagttggccaagacctagtccatcttggcgttgcaagaacaacaagtggtggcccttcggctgtcgcttccggtgttagcactggacaccagcacaacagaatggatcttgatccagcatccagcagcgtggataatttcaaaacaccagaacttacaaaagaaaacggtctcgaggaggatgggaaaggagagagtagtatgtatgatgagaggcaacctaagagaaggaagcggacccttatgaataatgagcaaatagatgaattagagaaggctctagtagatgagcctgagatgcacaaaaatcctgttctattgcagagttggtcagagaagttaagtctgcagggcccagagatcacagcatcacaacttaaaaactggttgaacaaccggaaagctaagcttgctcgcattgcaaaagaaagggcggagaatgctgataaaccatctacttcccatcccggcgagtcttcagaaagtgccggggaggacaactatctaccccctgcaggtgtgatgactgttctatccaaaggtggtagcctgttgagcccggactgcactgagcaaacgtcgcaggcagagctatccccgaacacgacgatgatggtccgtccattcacgagatccttctcgttggaacccggccgcctcgtttcattagtcgacagcgatgggaaggaggttggcaggggcaagatcttccaagcgccagggaagagcacaacggagagccgcgtttgcgtggttgatgtcactgagctcaggaccgagaagtggagggagctcccccacccttcggaggcatttgggtggacgttccaggaggcggaggcgaggaatggtggcatcatcagggtctcttgggacgccgtcaggttgttccctgtagcgtagcaaggccgattgtataacaagatgagtagagggaaactgtggcctaagtaacattatgttaaaagctgtggttaactgtgttgtattcatgaactaattgttttgagcaattcaggtggttactgattttacatttttactactggtgttagtgtcacctgcaatgtgctgtgagaaaccaatgctgagcattcagccatcctttgtatatcaatgggtaagtggccaggatcgtagcatgaacagaaagggcatgtttattgtggtttttatgtgtggagaaagataaatgagttcatagggtttggaatctagaaatccggtttagaatctagaaagtattactaattttgctagtagtgttagtgtcacctgctttgtgcgtcaaaggctatcattgaaaaaaagtgttat

SEQ ID NO: 198712 - DNA, 1316 bp, Zea Mays
ctgcaatccatttacattttggcaaagaaaaaaagaggatggtacgaacttgagagtttccaagttttgtgaacaaaaaagcatctaaggcaaatgtgcatagaaaattcttgtggaacataacagtttttttaggaagcatagcctatgtgaaactaaaaaatagcagacaaatttggttcagtcaaaggaaatgtcgaggcacactttatcagatgttttatggcaaaatgtggaacagagcacctcatcgggtatacaacttatctcttaaaagtatgggaaagccaaattatgaaagctaaatgatggctctaagaaagcgtggtgtgttacatctatggttacaattcaagcactgaatatgttatgaaaaagagcaccgagtaaaggagaatcaaaattgcaatgtgtgtcggtaaaagaaatagtcgaagggcaacatcaaccaatttgccacatttggtgaaaagctaaagggaaaggttttgacactcaagaggagctcatccaaagccactgatggagaagccaccaattctggaagggatcctgcccctgaaaaagcaccatcaatttcaaactctaacttagtgtttggctacctcaaccttttctcagatggtgttcataacttcactgatgggatggctctcgggagtgcctttctgctgcatggttctgttggtggctggtctaggactttatttctgcttgcacatgaacttccccaagaggtaggagattttggtatccttgtgcggtcaggcttcacggtatctaaggccctattcttcaatttcctctctgcgttggttgctcttgctggaacagcactagcattgtctttgggtaaagatccgggacattcctccctgattgagggtttcaccgccggtggtttcatttacattgctgtcgcgggagtcctaccacagatgaacgaccagaaaacaaccatcaagagctcagtagctcagctgatctccctggcaatggggatgctggtcgctctaggcatttctctggtagaataatctgaatccccatttcaccacttgcagctttaggtccaaccgagttaccccaagtcgatataatgctctagcagctccagactagaagcagggttttctgatcctctcgatatatagtaccaaaaagttttttttttttgaaattttggcatctggttatagattgcctcgcatcggtgttatttgaaggcaacccgtcgcactaactgaatactgtacaactttatggccggctggctgatgtcggctcataataaaataagtataaaaaagctaaaa

SEQ ID NO: 198713 - DNA, 1960 bp, Zea Mays
caaagggaccctaagtgtctatagacctggatgtggtgagtggtgatgctcgggtggtgattggcattgtcactcgggctcttctttgttctcgtcgtcgtggtcaccatagagcgcgtctgcaagcgctcccaccccaaaaccccgcggacgcaccgacgcgcgagccataatgcgccgccaaagcctcgccaccgtactgctgctcctggtggccgccgcggccctggccgcccccgccgctgggcactttgagtcctcctgccccttctacgaccacggcggccacggcgaaccacacgaacgccacgaccatggccacagctgcggcggcggcgcggaccatgagcaccaccatcaccatcaccacggccatggacacggcgagatccagcggctgctcccggaggagatggcggaggaggcggatctcgagctcgagtccttcggttacgaagaccatgaccacggccaccaccaccaccaccaccatcaccacagccacggcgacatggagacatcgcccatgggcgtgtggctgagcgcgatggggtgctcgctgctggtcagtatggcgtcccttgtctgcctcgtcctcttgccggtcatcttctttaaggggaaaccgtctaaggccatagtggattcgcttgcagtgtttggggcaggagctatgcttggagattcatttcttcatcagctgccacatgcttttggtggagggcattctcactcgcatgatcatgagggtcatgatcatgctcatgctcatgagcatgcacatgcacactcactgcaagatctatctgtgggtttgtctgtactatttggcattgtactgttttttattgtcgagaagattgtgaggtatgttgaagacaattctcaaaatggggctcatagcatgggtcatgggcaccatcatcataatcataaacggcacgattctagcgataaagccaaattgaattaccaaaagagtgatactgatggtaaagacattgatcatgctgaagaggaaccttcggttaatgataccactggaaaaataagtgatggccatgaatcagaagctactatacgcaagaggagctcatccaaagccactgatggagaagccaccaattctggaagggatcctgcccctgaaaaagcaccatcaatttcaaactctaacttagtgtttggctacctcaaccttttctcagatggtgttcataacttcactgatgggatggctctcgggagtgcctttctgctgcatggttctgttggtggctggtctaggactttatttctgcttgcacatgaacttccccaagaggtaggagattttggtatccttgtgcggtcaggcttcacggtatctaaggccctattcttcaatttcctctctgcgttggttgctcttgctggaacagcactagcattgtctttgggtaaagatccgggacattcctccctgattgagggtttcaccgccggtggtttcatttacattgctgtcgcgggagtcctaccacagatgaacgaccagaaaacaaccatcaagagctcagtagctcagctgatctccctggcaatggggatgctggtcgctctaggcatttctctggatcaacagcatatagtggaatccctgtttcctagccgaggtgaggcccttttggcggctacacccgcttgtcctggccccgtgcacggtgcaccggtgggtatgcatgccaccaccacgtcggtcaagatctgcccgtgcttcggcctggaactctggctttgccggactccggacgttcatagctgacgagcagtgcgtgtaattaatcgagcttgttctcgcgtaagttgttacttgatttggacgaccaaatctagccagcctactaaggtgtttgcatgcaatagatatattagcaaatagttttgaaaacagctgctgcccaaactagtattttcttag

SEQ ID NO: 198714 - DNA, 499 bp, Zea Mays
tccctcttttaattcccccgccgccgcccctcgccacgctccgccagccgctgccactcgccacgttccaccagccggcgccccttttccttctcactccgctggcgccggcgccgccttatccatggcgtcggagaagaagcaatccaacccgatgagggagatcaaggtgcagaagctggtgctcaacatctccgtcggagagagtggggatcgcctcacccgcgccgccaaggtcctggagcaactgagtggccagtcaccagtgttctctaaggctaggtacactgtccgttcctttggtatcaggcgtaatgagaagattgcctgctatgttactgtaaggggtgagaaggcaatgcagcttctggagagtggacttaaggtcaaggaatatgaactgctaaggaggaacttcagtgacacagggtgctttggtttcggaatccaggagcacattgatcttggcatcaagccagtgacttgaattaattgtccg

SEQ ID NO: 198715 - DNA, 737 bp, Zea Mays
agcatctggcgtcggagaagaagcaatccaacccgatgagggagatcaaggtgcagaagctggtgctcaacatctccgtcggagagagtggggatcgcctcacccgcgccgccaaggtcctggagcaactgagtggccagtcaccagtgttctctaaggctaggtacactgtccgttcctttggtatcaggcgtaatgagaagattgcctgctatgttactgtaaggggtgagaaggcaatgcagcttctggagagtggacttaaggtcaaggaatatgaactgctaaggaggaacttcagtgacacagggtgctttggtttcggaatccaggagcacattgatcttggcatcaagtatgatccttcaaccggtatctacggaatggatttctacgtcgtccttgagcgcgctgggtaccgtgtcgcccgacgccgaaggtgcaagtcccgtgttgggatccagcacagggtgaccaaggaggatgctatgaaatggttccaggtcaagtacgagggtgtcatcctcaacaaggctcagggcaacacttcttagggacgcacatgttacagcccagccgttagacatgtttaccagtagcaacagagttttcacctctactgaagttttgtcgatctcggatgatattatttgccaagactgtttggacagaggagcttatgatctctatactttgaaagctgaatgcgccgattcatttggttctgcaatgtgctt

SEQ ID NO: 198716 - DNA, 2191 bp, Zea Mays
cctctatcacagtctgaaaatgcagttaagctgaataaccattgctcagttttgttcctctctatcggtaatggattagacgttttttttactcgagagagccaaaactgagcagtagggcacggatttaagagtctcctactatttttcattactccaaaatgttgtgtcaaatcgctcactgtcttgactcttcatcgtctccactctccaccatcatctttgattcctgtctccgcagcttgacccacaaacgcgactagggcagtcaccgcggcgtagctgccgcgtcttgccccgaaacacaaccgtcaacgccgtcccggaccgcagcagcgcggcgcaaccccaatcggagccggagctagcgaagcgagcgcctcgcttccacaagtcgctagctgcatctggagcgccgccggcccgaccaacgcccgagccagccgtgggcgttcggccgccgattcctctgggctctgtcttgtaggaacacacttggatgaggttacaatacgcgtggaacgccatacccttcattctgctattttgtgctatctccacaaataaaatcttctccaacaacaaacctttcagcttcaccatagcgtctgctaggtcgttgcttcagattgacccaaattcaggacttgttcaggacaaggtaaaagttggacaaattttggaagaggacacccaaaacattgtcaatatgactatgaatgtgtcgtctggatggagcattgtgaaagaagaactcatacttcctgctagaggtgcccctttcaatagttgccatgcttctactattgtacagattgaggaagacaattttttggtagcatatttcggtggatccagggaaggtgccccggatgttaaaatctggttacagagatatagtgatggtcactggcatcctccagtggtggctgatgaacaagatggggtgcccatgtggaatcctgttttgtttcagcttccctcccgtgagctgcttctcttctacaagattggtcaagaagttcagaagtggagcggtgccatgaaaagatcgttagatggcggtgtaacctggtcacctagagagcagttacctcctggcatccttggtcctattaaaaataagcctttcttgcttgaagatgggcgcctactgtgtggatcatcagttgaaagttggaattcttggggtgcatggcttgaggttacgaaagatgccggatggacctggagaaagtatggccctatatgtataaaaggtcaaccacttggggtgattcagccagttccctacaggactgacgatggaactattcgagtgttgctgcgatcatttgaaacaattggtcatgtctgtatggccgattccattgatgaaggtgtgacatggagttatgtccgtgagactgagcttccaaacccaaattctgggattgatggagttaagatgaaggatggaagagtactgcttgcctacaacaccttctccagaggaacgctcaagcttgcagtatccttaaacgacggtgattcatgggacgaagtaatgacactagaggacacaaaaggtatggagttttcgtatcctgcagtgatccagtctatggatgagctcatacatgttacctatacatacaatcggacacaggttaagcatgttgttcttcgacctagttcgatggtgaaattgtgagcctgcaactgatgaaggcctacggctggcaacttcaggacacccaaatttatcaccaaatgtttggtgtgggggggggggggggggggggggggtcattgcatcggattggctagattatgctcagttgatgtcaaataaaatgctttcaggtgctacttaatggatttttcgaggttcatctaaaaaaagtaaatactgtttaaaatgttctgcttctttctcatctcggttattgttcaaatatacttttcctttggttgtgcgttggctttcacgctttaggactcctttggagcatagtggttttacagaaaccgtgtaacaaatttatatgaatcagttcattttcataaaaaaaagagaggaagaagcaggggaaaaaaactggcattcaaggggacatgggtaatggtaaatgtgtttctaagactgtccgcagaagatcatgtaaaatagacgatttacattgtagataatattatttgtagagtcaag

SEQ ID NO: 198717 - DNA, 2027 bp, Zea Mays
gttttttttactcgagagagccaaaactgagcagtagggcacggatttaagagtctcctactatttttcattactccaaaatgttgtgtcaaatcgctcactgtcttgactcttcatcgtctccactctccaccatcatctttgattcctgtctccgcagcttgacccacaaacgcgactagggcagtcaccgcggcgtagctgccgcgtcttgccccgaaacacaaccgtcaacgccgtcccggaccgcagcagcgcggcgcaaccccaatcggagccggagctagcgaagcgagcgcctcgcttccacaagtcgctagctgcatctggagcgccgccggcccgaccaacgcccgagccagccgtgggcgttcggccgccgattcctctgggctctggtggatgtcttgtaggaacacacttggatgagcttcaccatagcgtctgctaggtcgttgcttcagattgacccaaattcaggacttgttcaggacaaggtaaaagttggacaaattttggaagaggacacccaaaacattgtcaatatgactatgaatgtgtcgtctggatggagcattgtgaaagaagaactcatacttcctgctagaggtgcccctttcaatagttgccatgcttctactattgtacagattgaggaagacaattttttggtagcatatttcggtggatccagggaaggtgccccggatgttaaaatctggttacagagatatagtgatggtcactggcatcctccagtggtggctgatgaacaagatggggtgcccatgtggaatcctgttttgtttcagcttccctcccgtgagctgcttctcttctacaagattggtcaagaagttcagaagtggagcggtgccatgaaaagatcgttagatggcggtgtaacctggtcacctagagagcagttacctcctggcatccttggtcctattaaaaataagcctttcttgcttgaagatgggcgcctactgtgtggatcatcagttgaaagttggaattcttggggtgcatggcttgaggttacgaaagatgccggatggacctggagaaagtatggccctatatgtataaaaggtcaaccacttggggtgattcagccagttccctacaggactgacgatggaactattcgagtgttgctgcgatcatttgaaacaattggtcatgtctgtatggccgattccattgatgaaggtgtgacatggagttatgtccgtgagactgagcttccaaacccaaattctgggattgatggagttaagatgaaggatggaagagtactgcttgcctacaacaccttctccagaggaacgctcaagcttgcagtatccttaaacgacggtgattcatgggacgaagtaatgacactagaggacacaaaaggtatggagttttcgtatcctgcagtgatccagtctatggatgagctcatacatgttacctatacatacaatcggacacaggttaagcatgttgttcttcgacctagttcgatggtgaaattgtgagcctgcaactgatgaaggcctacggctggcaacttcaggacacccaaatttatcaccaaatgtttggtgtgggggggggggggggggggggggggtcattgcatcggattggctagattatgctcagttgatgtcaaataaaatgctttcaggtgctacttaatggatttttcgaggttcatctaaaaaaagtaaatactgtttaaaatgttctgcttctttctcatctcggttattgttcaaatatacttttcctttggttgtgcgttggctttcacgctttaggactcctttggagcatagtggttttacagaaaccgtgtaacaaatttatatgaatcagttcattttcataaaaaaaagagaggaagaagcaggggaaaaaaactggcattcaaggggacatgggtaatggtaaatgtgtttctaagactgtccgcagaagatcatgtaaaatagacgatttacattgtagataatattatttgtagagtcaag

SEQ ID NO: 198718 - DNA, 2106 bp, Zea Mays
ttttactcgagagagccaaaactgagcagtagggcacggatttaagagtctcctactatttttcattactccaaaatgttgtgtcaaatcgctcactgtcttgactcttcatcgtctccactctccaccatcatctttgattcctgtctccgcagcttgacccacaaacgcgactagggcagtcaccgcggcgtagctgccgcgtcttgccccgaaacacaaccgtcaacgccgtcccggaccgcagcagcgcggcgcaaccccaatcggagccggagctagcgaagcgagcgcctcgcttccacaagtcgctagctgcatctggagcgccgccggcccgaccaacgcccgagccagccgtgggcgttcggccgccgattcctctgggctctggtggatgtcttgtaggaacacacttggatgaggttacaatacgcgtggaacgccatacccttcattctgctattttgtgctatctccacaaataaaatcttctccaacaacaaacctttcagcttcaccatagcgtctgctaggtcgttgcttcagattgacccaaattcaggacttgttcaggacaaggtaaaagttggacaaattttggaagaggacacccaaaacattgtcaatatgactatgaatgtgtcgtctggatggagcattgtgaaagaagaactcatacttcctgctagaggtgcccctttcaatagttgccatgcttctactattgtacagattgaggaagacaattttttggtagcatatttcggtggatccagggaaggtgccccggatgttaaaatctggttacagagatatagtgatggtcactggcatcctccagtggtggctgatgaacaagatggggtgcccatgtggaatcctgttttgtttcagcttccctcccgtgagctgcttctcttctacaagattggtcaagaagttcagaagtggagcggtgccatgaaaagatcgttagatggcggtgtaacctggtcacctagagagcagttacctcctggcatccttggtcctattaaaaataagcctttcttgcttgaagatgggcgcctactgtgtggatcatcagttgaaagttggaattcttggggtgcatggcttgaggttacgaaagatgccggatggacctggagaaagtatggccctatatgtataaaaggtcaaccacttggggtgattcagccagttccctacaggactgacgatggaactattcgagtgttgctgcgatcatttgaaacaattggtcatgtctgtatggccgattccattgatgaaggtgtgacatggagttatgtccgtgagactgagcttccaaacccaaattctgggattgatggagttaagatgaaggatggaagagtactgcttgcctacaacaccttctccagaggaacgctcaagcttgcagtatccttaaacgacggtgattcatgggacgaagtaatgacactagaggacacaaaaggtatggagttttcgtatcctgcagtgatccagtctatggatgagctcatacatgttacctatacatacaatcggacacagcatgttgttcttcgacctagttcgatggtgaaattgtgagcctgcaactgatgaaggcctacggctggcaacttcaggacacccaaatttatcaccaaatgtttggtgtgggggggggggggggggggggggggtcattgcatcggattggctagattatgctcagttgatgtcaaataaaatgctttcaggtgctacttaatggatttttcgaggttcatctaaaaaaagtaaatactgtttaaaatgttctgcttctttctcatctcggttattgttcaaatatacttttcctttggttgtgcgttggctttcacgctttaggactcctttggagcatagtggttttacagaaaccgtgtaacaaatttatatgaatcagttcattttcataaaaaaaagagaggaagaagcaggggaaaaaaactggcattcaaggggacatgggtaatggtaaatgtgtttctaagactgtccgcagaagatcatgtaaaatagacgatttacattgtagataatattatttgtagagtcaag

SEQ ID NO: 198719 - DNA, 2026 bp, Zea Mays
ttttactcgagagagccaaaactgagcagtagggcacggatttaagagtctcctactatttttcattactccaaaatgttgtgtcaaatcgctcactgtcttgactcttcatcgtctccactctccaccatcatctttgattcctgtctccgcagcttgacccacaaacgcgactagggcagtcaccgcggcgtagctgccgcgtcttgccccgaaacacaaccgtcaacgccgtcccggaccgcagcagcgcggcgcaaccccaatcggagccggagctagcgaagcgagcgcctcgcttccacaagtcgctagctgcatctggagcgccgccggcccgaccaacgcccgagccagccgtgggcgttcggccgccgattcctctgggctctggtggatgtcttgtaggaacacacttggatgaggttacaatacgcgtggaacgccatacccttcattctgctattttgtgctatctccacaaataaaatcttctccaacaacaaacctttcagcttcaccatagcgtctgctaggtcgttgcttcagattgacccaaattcaggacttgttcaggacaaggtaaaagttggacaaattttggaagaggacacccaaaacattgtcaatatgactatgaatgtgtcgtctggatggagcattgtgaaagaagaactcatacttcctgctagaggtgcccctttcaatagttgccatgcttctactattgtacagattgaggaagacaattttttggtagcatatttcggtggatccagggaaggtgccccggatgttaaaatctggttacagagatatagtgatggtcactggcatcctccagtggtggctgatgaacaagatggggtgcccatgtggaatcctgttttgtttcagcttccctcccgtgagctgcttctcttctacaagattggtcaagaagttcagaagtggagcggtgccatgaaaagatcgttagatggcggtgtaacctggtcacctagagagcagttacctcctggcatccttggtcctattaaaaataagcctttcttgcttgaagatgggcgcctactgtgtggatcatcagttgaaagttggaattcttggggtgcatggcttgaggttacgaaagatgccggatggacctggagaaagtatggccctatatgtataaaaggtcaaccacttggggtgattcagccagttccctacaggactgacgatggaactattcgagtgttgctgcgatcatttgaaacaattggtcatgtctgtatggccgattccattgatgaaggtgtgacatggagttatgtccgtgagactgagcttccaaacccaaattctgggattgatggagttaagatgaaggatggaagagtactgcttgcctacaacaccttctccagaggaacgctcaagcttgcagtatccttaaacgacggtgattcatgggacgaagtaatgacactagaggacacaaaagcatgttgttcttcgacctagttcgatggtgaaattgtgagcctgcaactgatgaaggcctacggctggcaacttcaggacacccaaatttatcaccaaatgtttggtgtgggggggggggggggggggggggggtcattgcatcggattggctagattatgctcagttgatgtcaaataaaatgctttcaggtgctacttaatggatttttcgaggttcatctaaaaaaagtaaatactgtttaaaatgttctgcttctttctcatctcggttattgttcaaatatacttttcctttggttgtgcgttggctttcacgctttaggactcctttggagcatagtggttttacagaaaccgtgtaacaaatttatatgaatcagttcattttcataaaaaaaagagaggaagaagcaggggaaaaaaactggcattcaaggggacatgggtaatggtaaatgtgtttctaagactgtccgcagaagatcatgtaaaatagacgatttacattgtagataatattatttgtagagtcaag

SEQ ID NO: 198720 - DNA, 2036 bp, Zea Mays
ctccaaaatgttgtgtcaaatcgctcactgtcttgactcttcatcgtctccactctccaccatcatctttgattcctgtctccgcagcttgacccacaaacgcgactagggcagtcaccgcggcgtagctgccgcgtcttgccccgaaacacaaccgtcaacgccgtcccggaccgcagcagcgcggcgcaaccccaatcggagccggagctagcgaagcgagcgcctcgcttccacaagtcgctagctgcatctggagcgccgccggcccgaccaacgcccgagccagccgtgggcgttcggccgccgattcctctgggctctggtggatggaacacacttggatgaggttacaatacgcgtggaacgccatacccttcattctgctattttgtgctatctccacaaataaaatcttctccaacaacaaacctttcagcttcaccatagcgtctgctaggtcgttgcttcagattgacccaaattcaggacttgttcaggacaaggtaaaagttggacaaattttggaagaggacacccaaaacattgtcaatatgactatgaatgtgtcgtctggatggagcattgtgaaagaagaactcatacttcctgctagaggtgcccctttcaatagttgccatgcttctactattgtacagattgaggaagacaattttttggtagcatatttcggtggatccagggaaggtgccccggatgttaaaatctggttacagagatatagtgatggtcactggcatcctccagtggtggctgatgaacaagatggggtgcccatgtggaatcctgttttgtttcagcttccctcccgtgagctgcttctcttctacaagattggtcaagaagttcagaagtggagcggtgccatgaaaagatcgttagatggcggtgtaacctggtcacctagagagcagttacctcctggcatccttggtcctattaaaaataagcctttcttgcttgaagatgggcgcctactgtgtggatcatcagttgaaagttggaattcttggggtgcatggcttgaggttacgaaagatgccggatggacctggagaaagtatggccctatatgtataaaaggtcaaccacttggggtgattcagccagttccctacaggactgacgatggaactattcgagtgttgctgcgatcatttgaaacaattggtcatgtctgtatggccgattccattgatgaaggtgtgacatggagttatgtccgtgagactgagcttccaaacccaaattctgggattgatggagttaagatgaaggatggaagagtactgcttgcctacaacaccttctccagaggaacgctcaagcttgcagtatccttaaacgacggtgattcatgggacgaagtaatgacactagaggacacaaaaggtatggagttttcgtatcctgcagtgatccagtctatggatgagctcatacatgttacctatacatacaatcggacacaggttaagcatgttgttcttcgacctagttcgatggtgaaattgtgagcctgcaactgatgaaggcctacggctggcaacttcaggacacccaaatttatcaccaaatgtttggtgtgggggggggggggggggggggggggtcattgcatcggattggctagattatgctcagttgatgtcaaataaaatgctttcaggtgctacttaatggatttttcgaggttcatctaaaaaaagtaaatactgtttaaaatgttctgcttctttctcatctcggttattgttcaaatatacttttcctttggttgtgcgttggctttcacgctttaggactcctttggagcatagtggttttacagaaaccgtgtaacaaatttatatgaatcagttcattttcataaaaaaaagagaggaagaagcaggggaaaaaaactggcattcaaggggacatgggtaatggtaaatgtgtttctaagactgtccgcagaagatcatgtaaaatagacgatttacattgtagataatattatttgtagagtcaag

SEQ ID NO: 198721 - DNA, 1744 bp, Zea Mays
atttagtgtagtggtacactgcatgtgaagcatcttgtaggaacacacttggatgaggttacaatacgcgtggaacgccatacccttcattctgctattttgtgctatctccacaaataaaatcttctccaacaacaaacctttcagcttcaccatagcgtctgctaggtcgttgcttcagattgacccaaattcaggacttgttcaggacaaggtaaaagttggacaaattttggaagaggacacccaaaacattgtcaatatgactatgaatgtgtcgtctggatggagcattgtgaaagaagaactcatacttcctgctagaggtgcccctttcaatagttgccatgcttctactattgtacagattgaggaagacaattttttggtagcatatttcggtggatccagggaaggtgccccggatgttaaaatctggttacagagatatagtgatggtcactggcatcctccagtggtggctgatgaacaagatggggtgcccatgtggaatcctgttttgtttcagcttccctcccgtgagctgcttctcttctacaagattggtcaagaagttcagaagtggagcggtgccatgaaaagatcgttagatggcggtgtaacctggtcacctagagagcagttacctcctggcatccttggtcctattaaaaataagcctttcttgcttgaagatgggcgcctactgtgtggatcatcagttgaaagttggaattcttggggtgcatggcttgaggttacgaaagatgccggatggacctggagaaagtatggccctatatgtataaaaggtcaaccacttggggtgattcagccagttccctacaggactgacgatggaactattcgagtgttgctgcgatcatttgaaacaattggtcatgtctgtatggccgattccattgatgaaggtgtgacatggagttatgtccgtgagactgagcttccaaacccaaattctgggattgatggagttaagatgaaggatggaagagtactgcttgcctacaacaccttctccagaggaacgctcaagcttgcagtatccttaaacgacggtgattcatgggacgaagtaatgacactagaggacacaaaaggtatggagttttcgtatcctgcagtgatccagtctatggatgagctcatacatgttacctatacatacaatcggacacaggttaagcatgttgttcttcgacctagttcgatggtgaaattgtgagcctgcaactgatgaaggcctacggctggcaacttcaggacacccaaatttatcaccaaatgtttggtgtgggggggggggggggggggggggggtcattgcatcggattggctagattatgctcagttgatgtcaaataaaatgctttcaggtgctacttaatggatttttcgaggttcatctaaaaaaagtaaatactgtttaaaatgttctgcttctttctcatctcggttattgttcaaatatacttttcctttggttgtgcgttggctttcacgctttaggactcctttggagcatagtggttttacagaaaccgtgtaacaaatttatatgaatcagttcattttcataaaaaaaagagaggaagaagcaggggaaaaaaactggcattcaaggggacatgggtaatggtaaatgtgtttctaagactgtccgcagaagatcatgtaaaatagacgatttacattgtagataatattatttgtagagtcaag

SEQ ID NO: 198722 - DNA, 1014 bp, Zea Mays
ttttttgtgtacctgttccatgatgatgttacgaaagatgccggatggacctggagaaagtatggccctatatgtataaaaggtcaaccacttggggtgattcagccagttccctacaggactgacgatggaactattcgagtgttgctgcgatcatttgaaacaattggtcatgtctgtatggccgattccattgatgaaggtgtgacatggagttatgtccgtgagactgagcttccaaacccaaattctgggattgatggagttaagatgaaggatggaagagtactgcttgcctacaacaccttctccagaggaacgctcaagcttgcagtatccttaaacgacggtgattcatgggacgaagtaatgacactagaggacacaaaaggtatggagttttcgtatcctgcagtgatccagtctatggatgagctcatacatgttacctatacatacaatcggacacaggttaagcatgttgttcttcgacctagttcgatggtgaaattgtgagcctgcaactgatgaaggcctacggctggcaacttcaggacacccaaatttatcaccaaatgtttggtgtgggggggggggggggggggggggggtcattgcatcggattggctagattatgctcagttgatgtcaaataaaatgctttcaggtgctacttaatggatttttcgaggttcatctaaaaaaagtaaatactgtttaaaatgttctgcttctttctcatctcggttattgttcaaatatacttttcctttggttgtgcgttggctttcacgctttaggactcctttggagcatagtggttttacagaaaccgtgtaacaaatttatatgaatcagttcattttcataaaaaaaagagaggaagaagcaggggaaaaaaactggcattcaaggggacatgggtaatggtaaatgtgtttctaagactgtccgcagaagatcatgtaaaatagacgatttacattgtagataatattatttgtagagtcaag

SEQ ID NO: 198723 - DNA, 922 bp, Zea Mays
catagatttcacctggtgccttggttatccactgaaaactcagaagaggtttcggcttccatctgccatcgaagctcgcttggacatttgaaagacaaggtaccaagttggaatggcggtggaagctgcagccttcaccaaacacgcagcagactatatctgagatcctggattttcttatggatgcaaatatacgcttaagtgaagaggttgtgaggaaaacacaatcctttgacaagttgaaacaagaagctgagaagtgcttgcaacaaagtgaaagatttaacaatgagaaagctgagttcgaacaagccgccttttcaaagtttgtggccgtgttgaattcgaagaaggccaagctcagacaactcagagataaagttgtggagctcgaacccgctgtcaagcctccaaaggaggaggcaggtcaggagcaggaggaggaggaggagaactcaacggaccggacagagctcttcgagggagagaatgacaaagaagcaagcgccaaggatgaacactccggcgagacaggcagcggcaacgttcctagttctcctggggaatcggcagctacctccagaggaagaggacgagggagaggtcgtaagaaggcaagaagataggctgcctagactgacaatagcaggtcctactcggaaattcgctaatcgtcgtggtgcgtctttagccggctagtctcatttccaagagcacgtgtctttcatgtacctttgtgttcgcgtgctgttggcaggcagagtattgcctgtgaaactgattgtccgtctgcttcgtctcatcagtggaaaatattttccatttcatcacatgtgtcagtcatgtgacatgcttttcacctgcgcgtggaaaaaaaacgaatgaaaaaaggggggaggaatgtttgaccacgtgtttttag

SEQ ID NO: 198724 - DNA, 1179 bp, Zea Mays
aaactcagaagaggtttcggcttccatctgccatcgaaggcctcccgtgcgccccgcagccgtctccaacggccgatccatgcccgtctggcgtcttcctcagtcgcatcccctcgttgaggtcgacagcgacggccatggcggcggcctcttctgcggcgccggcgaggcacagctgcgcaaagctctcggtcccagtggaggaccccaaagcagtgacggcgggcggtggcaccgtcttcgtcaaagccacgtggctgccgtcccgcttctccctcgccgtgaccgatggtgccggcgcctgggtcgccgacgcctctgaccacgaggtgcgcctccgcgccgagcagtgggatcagcccgtcgccgattacatcgcccttgccgagcgctacctcgctttccaacagcctggttccacgtattccttccatgacgccggcaaaggccaacgcaggctcgcttggacatttgaaagacaaggtaccaagttggaatggcggtggaagctgcagccttcaccaaacacgcagcagactatatctgagatcctggattttcttatggatgcaaatatacgcttaagtgaagaggttgtgaggaaaacacaatcctttgacaagttgaaacaagaagctgagaagtgcttgcaacaaagtgaaagatttaacaatgagaaagctgagttcgaacaagccgccttttcaaagtttgtggccgtgttgaattcgaagaaggccaagctcagacaactcagagataaagttgtggagctcgaacccgctgtcaagcctccaaaggaggaggcaggtcaggagcaggaggaggaggaggagaactcaacggaccggacagagctcttcgagggagagaatgacaaagaagcaagcgccaaggatgaacactccggcgagacaggcagcggcaacgttcctagttctcctggggaatcggcagctacctccagaggaagaggacgagggagaggtcgtaagaaggcaagaagataggctgcctagactgacaatagcaggtcctactcggaaattcgctaatcgtcgtgtggaaaatattttccatttcatcacatgtgtcagtcatgtgacatgcttttcacctgcgcgtggaaaaaaaacgaatgaaaaaaggggggaggaatgtttgaccacgtgtttttag

SEQ ID NO: 198725 - DNA, 1144 bp, Zea Mays
ccacaggcctcccgtgcgccccgcagccgtctccaacggccgatccatgcccgtctggcgtcttcctcagtcgcatcccctcgttgaggtcgacagcgacggccatggcggcggcctcttctgcggcgccggcgaggcacagctgcgcaaagctctcggtcccagtggaggaccccaaagcagtgacggcgggcggtggcaccgtcttcgtcaaagccacgtggctgccgtcccgcttctccctcgccgtgaccgatggtgccggcgcctgggtcgccgacgcctctgaccacgagctcgcttggacatttgaaagacaaggtaccaagttggaatggcggtggaagctgcagccttcaccaaacacgcagcagactatatctgagatcctggattttcttatggatgcaaatatacgcttaagtgaagaggttgtgaggaaaacacaatcctttgacaagttgaaacaagaagctgagaagtgcttgcaacaaagtgaaagatttaacaatgagaaagctgagttcgaacaagccgccttttcaaagtttgtggccgtgttgaattcgaagaaggccaagctcagacaactcagagataaagttgtggagctcgaacccgctgtcaagcctccaaaggaggaggcaggtcaggagcaggaggaggaggaggagaactcaacggaccggacagagctcttcgagggagagaatgacaaagaagcaagcgccaaggatgaacactccggcgagacaggcagcggcaacgttcctagttctcctggggaatcggcagctacctccagaggaagaggacgagggagaggtcgtaagaaggcaagaagataggctgcctagactgacaatagcaggtcctactcggaaattcgctaatcgtcgtggtgcgtctttagccggctagtctcatttccaagagcacgtgtctttcatgtacctttgtgttcgcgtgctgttggcaggcagagtattgcctgtgaaactgattgtccgtctgcttcgtctcatcagtggaaaatattttccatttcatcacatgtgtcagtcatgtgacatgcttttcacctgcgcgtggaaaaaaaacgaatgaaaaaaggggggaggaatgtttgaccacgtgtttttag

SEQ ID NO: 198726 - DNA, 1120 bp, Zea Mays
tggtctgcatgcttcataaggtggtgcactggtgctggtgcatgttggggaggcttgacatatttcagaagtcccattgtgtaaaggtcaatcctgacacacctcagaagcaagttcggttcttaacattgtcaggtgataaaaagctgttgactccgcaacctcggctaaggacaggatttttctcagttatggactctcagatgatacctgttgggtgcattcctgaagcatgcacttctgttggtgcagctaaatatgggaggccaattggtttagatgaaagccttaaggtggatttgattgtgattgggtcagtggcagttgatccaagttcaggagcacggttagggaagggagagggatttgcagagctggaatatggaatgcttcgctatatgggagctatagatgattcaaccatgatagtaactactgtgcatgacaagcagttagttgatgacattccagtggagaagctgctagttcatgatgtgccagttgacattatctgcacccctactcaggtcatcttcacgaagactacgatcccaaagccacaagggatttactgggaaaagttatctccagaaaaattgggccaaatccgaattctaagagagctgaagcaacgtatagagcaagagacaggaactatgcttccttgtggaccttcggagaagctaccgccaacagctcagagaaagcagaggtggcagcggcgacgatgagacttttaaatgactgccccgtgcgttgcgacggcttacaacaatacccatgtaaactatccaccaaaaaaatttcaatattttttgtttattgtctccgctctccgtgtaatatttttttttgatttggctaactggtgttattatttactctatccaatatatcttgttacaacacaaccaatgaaatgagcgattagaagagagttcacaacgactgactgaacgaacaaatattataaaatgatataattccaccatacaaagaccaaataagaaaaaatttgtaagctcaagtttctaaaataagtcacatgaactcaaacttataaaaaagataaatcaaaatatggagtgattactaaagtcagacatcaataaaactggat

SEQ ID NO: 198727 - DNA, 1567 bp, Zea Mays
ctcgagggcgcacccaaacaaactggctccgcctccttcctccccacccccggcctccgccgctgccttcttttcctcgtgcgcatattcgcttgcagcggcgccgacaccatttcataaacaccggaaacgcgcgcgaagtgaggagcagcaccaaacgcccctctgcttctcctctatttctccctcttgcggagccgcctcttgtgtgtaggggtgtgtcgagtctatggcggcggcggcggatacctcggaggcgtctgcggccgggatcgcgcttgcggaggccaatatcaactgggagaggttggacaagacgaggtttcatgtgattggagctatcctgtttacggcccagcaaggtgctctgcacccaacagctgttgtgaagactaggatgcaggttgctgaagggcggcttgcacgtatgtctgggtttactgtttttaggaggatattgagaagcgatggaatccctggtattttcagaggatttggcacctctgctgttggagctctacctgggcgagtgctagctctaacatcactggagatatctaaagaaatgacatttaagtattgtgaacattttgatatgtcagaggcgtcacgaattgctgtagcaaatggcgttgcaggcctgatgtcgagtatctgttcatgttcatattatgtgcctctggatgtgatttgccaaaggctcatggttcaaggagtgccagggatggcaacgtacaggggaccatttgatgtgataaataaggttgtcagaacacaggggatccaggggctttaccgaggttttggaatcactatgttgactcagtcgccagcttcagccctttggtggagtgcatatggtggtgctcaacatgctatttggaggagtttgggttatggaaatgactcatcaacaaaaccatctcaatcagaacttgttgctgtccaagcaacagcaggaacaattgctggtgcttgctcgtcgattatcaccactccaatagatacaatcaagactaggcttcaggttatggacaactatggtaatggtaggccttctgtcatgaaaactaccaggctgctgcttgatgaagatggctggagggggctttatagaggttttggacccaggtttcttaacatgtctctctggggcacatcaatgatcgtgacatatgagctcataaagaggctatctgtgaagtcggaatgacacgttttggcagattctcaactgagttgatttactgttcagtatcatctttatgaatacaggcaatcaagttagtttgcctcgctaaaagtataggccagtattatgatagggatgttgtaggcttgtagccagcttctttaggatgcaacagatggaggccaagatacatgttgtgtctaatgaggcacattgtagctgtagctgtagctgttcatggtgcagcaaaattttggcagagttctgcgtccttttcgttcagtgaccagctctccagttgttgtcgtccaacttacatttttagaatctacagagattgtgttcgtcattgaggatgtgtctggtttgttcgtc

SEQ ID NO: 198728 - DNA, 4656 bp, Zea Mays
ctcctggcgtctgcgttggctgctggactggaccaaataatcgtctgcgcttccgttccacgcggcaaaaacatttcctgcggttgaccacaccacctgctccccccctccccccaccccccagccttcgcggcaccggcagacggggaggaagcaccgccgcccgcctccgcgggagagcaagcgggagaagacgaaccggatctggaagcgaacctaagctgcgcggtttgtcattgaaaacagtgcgaagagtgagatgggtgaagctctgctaagagattcttcaggtttcttcttggggatggaatcattgccgtgtccatcttggtcagttgagttggagatgggtgcaaccctgaacaaggaattgagaactcgagattgttcgtggggctggaatgttgggcccatctgttccagttcttgtgggggtgcgagcggcaaatacagcgccggctcttggtttccaagtggccccctacgtggaaccttctgagacggctatcctacgtgtacgctagcctccaaacttcaaagcgcgtctctgcagggctcgcacgtgctctttttccctcctcaccccgaattaacaatcgcgaaatcccaggtttgacctttcccccagccttgttgttccagtggggcccactacacccatgtccccttcttcctcgcacacgcgggacactgcacctgagcctctcaagccctcaacacgccaatttgaccacgtgaccgtaatcttgatccacggcctccttgcacttgcaccgcaccggtgcctatttaacccgcgctcgaacaactctctgccggcaacgcaaccaaaccgctctcgctctcggctctcggctctccaccagtctccgctctctggacgccggaaatgcagatggactcctacaactacaactacgccagtttcttccacgacgaggctccgtccttctacccgcacgttgcggtgccgccctccccggagctgcccatcggcctcattgcctcgccaggggagccggagccgcccttcgcgccgccgatgccggcctcgttccaggactacacgggcgccgtgggcgtgggcgtaggggtgagagcgccgttcgggggtgccagcgtgcacgggcaggcgatcgacgcgctgggcgggggcgacgggcagcgcgagcagagcatggcaatggcggaggacggggaagagccggcgccccggcggcggcagccggcgggaggccccgccgccgccgccgtcgagagcagccgcgggttccggcacatgatgcgggagcggcagcggcgcgagaagctgagccagagctacgccgacctgcacgcgctggtggcggcccggtccaggggcgacaagaactccatcgtgcaggccgccgccgtgtacatccacgagctcaggggcgcgcgggaccagctgcagcgccggaacgaggagctcaaggcccgcatcctgggccacgacgccgggcagcagtgcgtcaaggtgcagttcgaggtggacgagccggcgtccgccatcgactccatgatcggggcgctcaggcgcctcaagggcatggacgtcagggccaggggcatccgctccagcctgtccgggcgcaggctgtggacggagatgaatgtggagaccacgatggcggccgacgaggtggaaaggggcgtggaggaggctctgctgcaggaagtggagaggaagcagcagcagcagcttggagctgggagcgccgcccctggttttccaggcccgtcatcgcacgtgcaaaacgtgttttgacacgcgatcctcccccacaacaagaagcgaaaaagaaacatgaaccccgagcctcatttcttgattcttttttctttaagaaccggatgcgcaaaacgagcatccgcgtccctggctctattgatttatttttaagtagaaatcggtgctgtttgtgtacaagtgttgtcgcagcctccaagtgggattttgagcacgtgtataaagttatagggctcgtgttcttacaacacacacacacaaaaaaaaaaagagacgtgcggacagtgaggactgaggacatgtgggcagggatcaagtgggccggaggaagcgggcgagaaatggggtcgagggacaggcacgttccggtcgtgccgtgtggagattcctagccgcggcggcaaccggtcaccagtgtgctctcgttgtccttggtctctactactcctgctacaaatggtgacgcctttattttatcgtgtggagtggatgtaaatggacgccaccacaataaattagagtactaaattaattttagtttaaaaataaataaataaaaatagagtatgattctaatcctattcactcttaaatctctactactacttatgttagtatggtaggcgtgcacagttgtggttctgccgcgcctccacgtccctccgcgccgcccgaaatcttggatcgcatcaacagccgcaatgcctcgcctgcccctgtctccgcgaatctcgcctcccccgcccccacaaatctcgccgtcgccattatctcaagttctcaacccgtccacagcctcctctccaacagcaagcgccgccgccgcctcgcctcggcaaacccggctccagggcgacagctcccgccggcgggacaacatacttcagcgccgtgaagccgtccgtgatccagctgcgggggcccaccaaggtcagcgtcttcatcgccagcaacgacgccgagcaggcctgccgcctgcgacttcaggatcaccggaagctaccacgacagcgcctgtgccgtctccctcggtgactccgacaccgtcatcaccaaggacatggacatcggccaccatgtgaatggcctgcgtaagcacccatccaacgaggtctggcaactggtgaagctgctcgttaggaaatggaaggaaatagtggatgattgggtgaggctgcacaactcaggtggtgatggtagtggctccatcatatgcgatggtgactcacctgacaaagtccaatccaagtaccatcaaaatactcatgtaactattcttccacgctccaatttaggctgatcttctgtttcttgtatatagtaatttagtaattgcaaataaaataattgtgccacaccagataaaaaaactcgacctaccagtggtaagacaaccatatggtgtcggatagacaaggggaatttttttaacccacgaccggtgccaggaccttagaccagtgcttcggcaataggacagacgaagggattttttaacccccgcataaaatttgctctcacagggagtcaaattcagaacctgaggagtgctactcagatcacctaaccaactcagttaaatctttttttatgaaagatttgacaggtgtgtagctcaatttcccttaatgttgtcattctacataaaagcaccgccctcccgtggttgctgattccctgtaccaggcacttggtattcctcccacgttctttgcgatagggacttggtattcctctgagcacgacttcaacggcggcaactgcgaccaggcacgcaggcaccgggtggtggtcgaatcgagggaggccatgcccctgtccttcgacaactccaccaccgaggattcagcggctgccgtgaagcctaagcccaaggtcagggtcaggaagaaccccatgaagcagtcatgcttcgacttcaccaaggtggacgccgtgcttctccccatcgtcttcctcctcgtccgccccaatgttggcaagtcagccctcttcaacagattctagatgatggtacgacaaattattttaggagtgctttgccataatttaaagcttggaagggagctttctatgatttatttttctgactgtttcgtcacatgttctttccctagatgaaagtcttgatttatttttggttctgcaggatcattgcgtctctgcgagctaatcagctctgtgagcgtctccctagccccaatggcgagtcaactattgattgccatcagatctcaaagatgccaaatcttgcattcaccatagcaaataagactttcaccttaacaccagagcagtacatagtgaagctagagcaagcaggacaaactatctgcatcagtgggtttatggcatttgacgtaccgcctcctcgtggtcctctctggatacttggtgatgtttttatgggtgtctaccacactgtttttgacttcggcgagaacatgattgggtttgccaaatctgcatgaggactggagttctgcgctttagtagcatgtccagtttgttatcccggtattgtacatatatatgttgccaactggtgtaatccgcagtgtttaatagtatatattcatgcagaaatctagaagattgtggcatgatatgtgtttgcaaatggagctatgttatgtatggagctccaggacctagagttttatgtaaagggagacgatgaggattagggcttttaacctattctcatcacgttattgtcctgattactatgtgtaagtatggttgctgagcttgtttgggagcaagacaattggaggggatgagtggactaaaattcccttcctatcaaaattgaatataaagagtattttagctctctcaatcttcttcaattctcttgctcccaaacatatccttatagtttg

SEQ ID NO: 198729 - DNA, 448 bp, Zea Mays
atggaggcggccctggaggcggcgcgcgccaaggacaccaaggagcgtctggccagggtcgagcggctgcacgaggcgctcaacgccgcggcgtgccgcgggctgaccgcggctgagggtggcctccaggcgctctccgtcgccgccatcgtcggcggcaaccacttcaagatccacctcaacgccctcgtcccggctgccgtcgaacgcctcggcgacggcaagcagcccgttcacgacgccgcacgacagctcctcattactctgatggagataacttacataaggatagtggtcagccataatattttggaatatcatcttccttttagaaacaggcctgaagataataagtatactgaagaggaacttcttctgttgaaaaataaagatatgggatatatccttcagagcattcaaagtgaaaaaaaggaaaatagcctcttcg

SEQ ID NO: 198730 - DNA, 1436 bp, Zea Mays
ccgccggtgtggagcgagcgacgcagacaccgacaattctaggatggaaggaaattcagaggccacgagcaccaaatccgctcgaagcgagccggaaatatcaaaatttccggaatccgccgccgccgccgccaggctgaccaatggacctctccgtcgtgccatccctctccctctccccgcgccgtgcccttccactcccggccaggagggctgcgcggcgtccggccttcgtctgccgctgcagttgctccctggacgcgtccccggtggccacccggcggttgttcgcctccctcctcgccaccgcagcagcggtgggggttggcgtggccggaggcggaggggaagccggcgcggtgtccacgagcaggagggcgctcagggcgtccaagattcctgagagcgaattcaccaccctgcccaatggcctcaagtactacgacatcaaggtaggaagtggggctgaagctgttaaaggatcccgtgttgcggtacattatgtggccaagtggaagggcatcacattcatgacaagtaggcagggtcttggtgttggtggtggaacgccatatgggtttgacgtaggcaattctgagagaggcaatgttttaaaaggattggatcttggggttgagggaatgaaagtcggaggccagaggttgataatagttcctcctgaactggcgtatggaaagaagggtgtccaggaaattcctccaaacgcaactattgagttttggttttctccatctatttttttattgttcccatttttcaatagctggatgtcgagcttctatcaatcaaacagagtccattcgggactcctgtgaagatcgttgaaggatagctttgcatagagttctgaaagaaatggtacatatctgcatggacagtagagtactagagtgttgctattgaaaaaggctagtttactaaaatatgctggttgtattctcttgatagtacactcttgtaagatttcgacttcactgaaacatagattttttttttcaccgcttatattcaacagttatctacgtgtctaaatcttaatttatggcttctgctatgtttgaacttcaatctactcttaacttatttgagagtaaaagatttttgttattgatgttatatttaataatgtatccttaccaatttcttcattacatgtattgcttagaagaatccttgtagtaaacatttagttgcaaagaaaaaaaaacataaatggttgcctaccatgaatccatgatagttatatgaataaagataaattggtgtttgggattccatgtgcagttagttattctagttaaaagaagtgaatgtatacttcctctgtctctaaaaaaatacgacgatcctcacttctcgagtagtcaaacaattttaagtttaatcaaatgtatataaaacctactaacatttat

SEQ ID NO: 198731 - DNA, 2360 bp, Zea Mays
atggcggtatggcctgtcctagcctctcactcagcctttggccgggttcgtgcgcctgacacagacacagatctggagacagatgggttggctacttcctcctccagtgcctttgccgagcggcaggacgacgaagcggaggagttgctgtgcggggtgaaggaagaggagtcggctcaggtacaagaaccggccaagaatccggcaggacgtcccaccccactaccccaggaaggggtcgaaacagcggccggccccggccttacttgacctcggcagcactgggttaattccacggagccacgttttctacaagtttcgtgattggtggtgtggggttgatgaacaaaggacttgaagcattactcatccggtcagacgtgtttcgtagaccttgacgctgagctatcggagttgggtttccaaaaaaaggtggagctctgagagagttccgcattcttctaaaggaagtaggagatacccaggaagcagcatggcattttcttacagcaatgggaggacattgccctcgaaatgggaggatgcagagaggtggatcttcagtcccaattccagcgacatgcgtggaagaactacggttgctcatggtcggaggccaaagtctaaaagtggccccctggggcctccaggaagacttggtggacagtattcatctgtttcttcggtgtcattgcttgatagtgagagagttggacctattacatcaaattctcatttttcagcaggagtactaatgccaggacatgtttgtggaggaaaaaatacaaatggggcctattcaggtagaccaattggtgacgaaatcaacattggagaaggagtcagaatttgtccactgaatggtgggtctcatcctattcgaactcccagagttcgcaagcgattagattctgcagtcgaatcatctgcttcattgcctagcacacaagaatctatccaagacgagcaggttgaaatcacagaagattcagcttcaactattgcctgtataatttccaggaaagatgttgcaacacagaccagcccagagctaagtaggtcctcttcacccaacaatagaccaacatttaatcgttccctgtcgacggaacaaatgaaagagagggggagctgtttctcagatcttgatatcagggatgttcagatggatgatcgagtgactctgactaggtggtcaaagcaaaatgtaacacggttgcctaacaagaattcaacaaacataatagagtggaaggaaaaagctgtggaatcaaaatctttgtcctggggctttgccgaagcgaagtgcatatccaagattggtagagaggacacaaaaattactgcatgggaaagtattcaaaaagcaaaagctgaggcagcaattcagaagttaatgattaagatggagaagaaaggatcatcttcgctggataagattttgaacaccctcaagtctgctcagagaaaagcccaggtgatgcttgagcatgagcttgatgcagtaacagcaaaccaagatggaaaaggctctaggaaggcaaaaaagggagcacagcgtagcaagaatggccaaatcagttccctgagtggctgcttcacttgccatgctttttgatacatgtaattccaaaactgagaatcaggatctgagaaattccttcgtactgcctacatcaccgtcatgttctccacatcgaaatctaggtgaacttcagatatctatcagatgtcagtacataatacgataatcccacagctggaaatcagactcggatctttccaagatgctagctgcaggctcttcatctgccatgatagggataatgcaatatctgcagtgccgctctgtgttagtttcgattctgccaatgagacagagaaaatggagcacgaaggaaaaggaggaacggttctgcgtacacctcatgtgcccggttgatgtctcctttatcattgtgtcattacctggcctgccttgtagctaggcactgctgatgtcgatcttgttgccaaaaaggctgtatggatcatacattcacacaaagtgcaattccattccaagatacagcgaaatcttcaggtacgaggagaaagcatggcctgcttgtgcgtgtgactagttgggcaccctgctgggtactggaatggaaccacgctcccttgttgcttttgtttggtacagtgctggttgttgctacctatatttgctttacagcagcgtcggtgtgtagctcttttaggaaactgagatgttggtttggcctggaaacttaacaatatcgtcacacacatatatgtacatatggggatgaagatatgatcgtcagtatgccatcctttaaaaaaaaagattctca

SEQ ID NO: 198732 - DNA, 2623 bp, Zea Mays
cctgtcctagcctctcactcaggtgaccgcaacccttccacagagagcaagcgaatggtacacaagaatttgttatcagcgaagtagacaaagtaggatggccccgaattcttttgacttgagctataggcatcatcaccgtcaccatcctagacccttgtagcaacaaaaacgagggtgctttttttttttctgacacgagaaaatgagcgccgttggattatcttcacctttcactccccctctttctgagatctgctttttaaacactgattgtatgatggtggttgcatgcagcctttggccgggttcgtgcgcctgacacagacacagatctggagacagatgggttggctacttcctcctccagtgcctttgccgagcggcaggacgacgaagcggaggagttgctgtgcggggtgaaggaagaggagtcggctcaggtacaagaaccggccaagaatccggcaggacgtcccaccccactaccccaggaaggggtcgaaacagcggccggccccggccttacttgacctcggcagcactgggttaattccacggagccacgttttctacaagtttcgtgattggtggtgtggggttgatgaacaaaggacttgaagcattactcatccggtcagacgtgtttcgtagaccttgacgctgagctatcggagttgggtttccaaaaaaaggtggagctctgagagagttccgcattcttctaaaggaagtaggagatacccaggaagcagcatggcattttcttacagcaatgggaggacattgccctcgaaatgggaggatgcagagaggtggatcttcagtcccaattccagcgacatgcgtggaagaactacggttgctcatggtcggaggccaaagtctaaaagtggccccctggggcctccaggaagacttggtggacagtattcatctgtttcttcggtgtcattgcttgatagtgagagagttggacctattacatcaaattctcatttttcagcaggagtactaatgccaggacatgtttgtggaggaaaaaatacaaatggggcctattcaggtagaccaattggtgacgaaatcaacattggagaaggagtcagaatttgtccactgaatggtgggtctcatcctattcgaactcccagagttcgcaagcgattagattctgcagtcgaatcatctgcttcattgcctagcacacaagaatctatccaagacgagcaggttgaaatcacagaagattcagcttcaactattgcctgtataatttccaggaaagatgttgcaacacagaccagcccagagctaagtaggtcctcttcacccaacaatagaccaacatttaatcgttccctgtcgacggaacaaatgaaagagagggggagctgtttctcagatcttgatatcagggatgttcagatggatgatcgagtgactctgactaggtggtcaaagcaaaatgtaacacggttgcctaacaagaattcaacaaacataatagagtggaaggaaaaagctgtggaatcaaaatctttgtcctggggctttgccgaagcgaagtgcatatccaagattggtagagaggacacaaaaattactgcatgggaaagtattcaaaaagcaaaagctgaggcagcaattcagaagttaatgattaagatggagaagaaaggatcatcttcgctggataagattttgaacaccctcaagtctgctcagagaaaagcccaggtgatgcttgagcatgagcttgatgcagtaacagcaaaccaagatggaaaaggctctaggaaggcaaaaaagggagcacagcgtagcaagaatggccaaatcagttccctgagtggctgcttcacttgccatgctttttgatacatgtaattccaaaactgagaatcaggatctgagaaattccttcgtactgcctacatcaccgtcatgttctccacatcgaaatctaggtgaacttcagatatctatcagatgtcagtacataatacgataatcccacagctggaaatcagactcggatctttccaagatgctagctgcaggctcttcatctgccatgatagggataatgcaatatctgcagtgccgctctgtgttagtttcgattctgccaatgagacagagaaaatggagcacgaaggaaaaggaggaacggttctgcgtacacctcatgtgcccggttgatgtctcctttatcattgtgtcattacctggcctgccttgtagctaggcactgctgatgtcgatcttgttgccaaaaaggctgtatggatcatacattcacacaaagtgcaattccattccaagatacagcgaaatcttcaggtacgaggagaaagcatggcctgcttgtgcgtgtgactagttgggcaccctgctgggtactggaatggaaccacgctcccttgttgcttttgtttggtacagtgctggttgttgctacctatatttgctttacagcagcgtcggtgtgtagctcttttaggaaactgagatgttggtttggcctggaaacttaacaatatcgtcacacacatatatgtacatatggggatgaagatatgatcgtcagtatgccatcctttaaaaaaaaagattctca

SEQ ID NO: 198733 - DNA, 2400 bp, Zea Mays
ccgttggattatcttcacctttcactccccctctttctgagatctgctttttaaacactgattgtatgatggtggttgcatgcagcctttggccgggttcgtgcgcctgacacagacacagatctggagacagatgggttggctacttcctcctccagtgcttctgcagcctttgccgagcggcaggacgacgaagcggaggagttgctgtgcggggtgaaggaagaggagtcggctcaggtacaagaaccggccaagaatccggcaggacgtcccaccccactaccccaggggtcgaaacagcggccggccccggccttacttgacctcggcagcactgggttaattccacggagccacgttttctacaagtttcgtgattggtggtgtggggttgatgaacaaaggacttgaagcattactcatccggtcagacgtgtttcgtagaccttgacgctgagctatcggagttgggtttccaaaaaaaggtggagctctgagagagttccgcattcttctaaaggaagtaggagatacccaggaagcagcatggcattttcttacagcaatgggaggacattgccctcgaaatgggaggatgcagagaggtggatcttcagtcccaattccagcgacatgcgtggaagaactacggttgctcatggtcggaggccaaagtctaaaagtggccccctggggcctccaggaagacttggtggacagtattcatctgtttcttcggtgtcattgcttgatagtgagagagttggacctattacatcaaattctcatttttcagcaggagtactaatgccaggacatgtttgtggaggaaaaaatacaaatggggcctattcaggtagaccaattggtgacgaaatcaacattggagaaggagtcagaatttgtccactgaatggtgggtctcatcctattcgaactcccagagttcgcaagcgattagattctgcagtcgaatcatctgcttcattgcctagcacacaagaatctatccaagacgagcaggttgaaatcacagaagattcagcttcaactattgcctgtataatttccaggaaagatgttgcaacacagaccagcccagagctaagtaggtcctcttcacccaacaatagaccaacatttaatcgttccctgtcgacggaacaaatgaaagagagggggagctgtttctcagatcttgatatcagggatgttcagatggatgatcgagtgactctgactaggtggtcaaagcaaaatgtaacacggttgcctaacaagaattcaacaaacataatagagtggaaggaaaaagctgtggaatcaaaatctttgtcctggggctttgccgaagcgaagtgcatatccaagattggtagagaggacacaaaaattactgcatgggaaagtattcaaaaagcaaaagctgaggcagcaattcagaagttaatgattaagatggagaagaaaggatcatcttcgctggataagattttgaacaccctcaagtctgctcagagaaaagcccaggtgatgcttgagcatgagcttgatgcagtaacagcaaaccaagatggaaaaggctctaggaaggcaaaaaagggagcacagcgtagcaagaatggccaaatcagttccctgagtggctgcttcacttgccatgctttttgatacatgaatcaggatctgagaaattccttcgtactgcctacatcaccgtcatgttctccacatcgaaatctaggtgaacttcagatatctatcagatgtcagtacataatacgataatcccacagctggaaatcagactcggatctttccaagatgctagctgcaggctcttcatctgccatgatagggataatgcaatatctgcagtgccgctctgtgttagtttcgattctgccaatgagacagagaaaatggagcacgaaggaaaaggaggaacggttctgcgtacacctcatgtgcccggttgatgtctcctttatcattgtgtcattacctggcctgccttgtagctaggcactgctgatgtcgatcttgttgccaaaaaggctgtatggatcatacattcacacaaagtgcaattccattccaagatacagcgaaatcttcaggtacgaggagaaagcatggcctgcttgtgcgtgtgactagttgggcaccctgctgggtactggaatggaaccacgctcccttgttgcttttgtttggtacagtgctggttgttgctacctatatttgctttacagcagcgtcggtgtgtagctcttttaggaaactgagatgttggtttggcctggaaacttaacaatatcgtcacacacatatatgtacatatggggatgaagatatgatcgtcagtatgccatcctttaaaaaaaaagattctca

SEQ ID NO: 198734 - DNA, 2407 bp, Zea Mays
ccgttggattatcttcacctttcactccccctctttctgagatctgctttttaaacactgattgtatgatggtggttgcatgcagcctttggccgggttcgtgcgcctgacacagacacagatctggagacagatgggttggctacttcctcctccagtgcctttgccgagcggcaggacgacgaagcggaggagttgctgtgcggggtgaaggaagaggagtcggctcaggtacaagaaccggccaagaatccggcaggacgtcccaccccactaccccaggggtcgaaacagcggccggccccggccttacttgacctcggcagcactgggttaattccacggagccacgttttctacaagtttcgtgattggtggtgtggggttgatgaacaaaggacttgaagcattactcatccggtcagacgtgtttcgtagaccttgacgctgagctatcggagttgggtttccaaaaaaaggtggagctctgagagagttccgcattcttctaaaggaagtaggagatacccaggaagcagcatggcattttcttacagcaatgggaggacattgccctcgaaatgggaggatgcagagaggtggatcttcagtcccaattccagcgacatgcgtggaagaactacggttgctcatggtcggaggccaaagtctaaaagtggccccctggggcctccaggaagacttggtggacagtattcatctgtttcttcggtgtcattgcttgatagtgagagagttggacctattacatcaaattctcatttttcagcaggagtactaatgccaggacatgtttgtggaggaaaaaatacaaatggggcctattcaggtagaccaattggtgacgaaatcaacattggagaaggagtcagaatttgtccactgaatggtgggtctcatcctattcgaactcccagagttcgcaagcgattagattctgcagtcgaatcatctgcttcattgcctagcacacaagaatctatccaagacgagcaggttgaaatcacagaagattcagcttcaactattgcctgtataatttccaggaaagatgttgcaacacagaccagcccagagctaagtaggtcctcttcacccaacaatagaccaacatttaatcgttccctgtcgacggaacaaatgaaagagagggggagctgtttctcagatcttgatatcagggatgttcagatggatgatcgagtgactctgactaggtggtcaaagcaaaatgtaacacggttgcctaacaagaattcaacaaacataatagagtggaaggaaaaagctgtggaatcaaaatctttgtcctggggctttgccgaagcgaagtgcatatccaagattggtagagaggacacaaaaattactgcatgggaaagtattcaaaaagcaaaagctgaggcagcaattcagaagttaatgattaagatggagaagaaaggatcatcttcgctggataagattttgaacaccctcaagtctgctcagagaaaagcccaggtgatgcttgagcatgagcttgatgcagtaacagcaaaccaagatggaaaaggctctaggaaggcaaaaaagggagcacagcgtagcaagaatggccaaatcagttccctgagtggctgcttcacttgccatgctttttgatacatgtaattccaaaactgagaatcaggatctgagaaattccttcgtactgcctacatcaccgtcatgttctccacatcgaaatctaggtgaacttcagatatctatcagatgtcagtacataatacgataatcccacagctggaaatcagactcggatctttccaagatgctagctgcaggctcttcatctgccatgatagggataatgcaatatctgcagtgccgctctgtgttagtttcgattctgccaatgagacagagaaaatggagcacgaaggaaaaggaggaacggttctgcgtacacctcatgtgcccggttgatgtctcctttatcattgtgtcattacctggcctgccttgtagctaggcactgctgatgtcgatcttgttgccaaaaaggctgtatggatcatacattcacacaaagtgcaattccattccaagatacagcgaaatcttcaggtacgaggagaaagcatggcctgcttgtgcgtgtgactagttgggcaccctgctgggtactggaatggaaccacgctcccttgttgcttttgtttggtacagtgctggttgttgctacctatatttgctttacagcagcgtcggtgtgtagctcttttaggaaactgagatgttggtttggcctggaaacttaacaatatcgtcacacacatatatgtacatatggggatgaagatatgatcgtcagtatgccatcctttaaaaaaaaagattctca

SEQ ID NO: 198735 - DNA, 2404 bp, Zea Mays
ccgttggattatcttcacctttcactccccctctttctgagatctgctttttaaacactgattgtatgatggtggttgcatgcagcctttggccgggttcgtgcgcctgacacagacacagatctggagacagatgggttggctacttcctcctccagtgcttctgcagcctttgccgagcggcaggacgacgaagcggaggagttgctgtgcggggtgaaggaagaggagtcggctcaggtacaagaaccggccaagaatccggcaggacgtcccaccccactaccccaggaaggggtcgaaacagcggccggccccggccttacttgacctcggcagcactgggttaattccacggagccacgttttctacaagtttcgtgattggtggtgtggggttgatgaacaaaggacttgaagcattactcatccggtcagacgtgtttcgtagaccttgacgctgagctatcggagttgggtttccaaaaaaaggtggagctctgagagagttccgcattcttctaaaggaagtaggagatacccaggaagcagcatggcattttcttacagcaatgggaggacattgccctcgaaatgggaggatgcagagaggtggatcttcagtcccaattccagcgacatgcgtggaagaactacggttgctcatggtcggaggccaaagtctaaaagtggccccctggggcctccaggaagacttggtggacagtattcatctgtttcttcggtgtcattgcttgatagtgagagagttggacctattacatcaaattctcatttttcagcaggagtactaatgccaggacatgtttgtggaggaaaaaatacaaatggggcctattcaggtagaccaattggtgacgaaatcaacattggagaaggagtcagaatttgtccactgaatggtgggtctcatcctattcgaactcccagagttcgcaagcgattagattctgcagtcgaatcatctgcttcattgcctagcacacaagaatctatccaagacgagcaggttgaaatcacagaagattcagcttcaactattgcctgtataatttccaggaaagatgttgcaacacagaccagcccagagctaagtaggtcctcttcacccaacaatagaccaacatttaatcgttccctgtcgacggaacaaatgaaagagagggggagctgtttctcagatcttgatatcagggatgttcagatggatgatcgagtgactctgactaggtggtcaaagcaaaatgtaacacggttgcctaacaagaattcaacaaacataatagagtggaaggaaaaagctgtggaatcaaaatctttgtcctggggctttgccgaagcgaagtgcatatccaagattggtagagaggacacaaaaattactgcatgggaaagtattcaaaaagcaaaagctgaggcagcaattcagaagttaatgattaagatggagaagaaaggatcatcttcgctggataagattttgaacaccctcaagtctgctcagagaaaagcccaggtgatgcttgagcatgagcttgatgcagtaacagcaaaccaagatggaaaaggctctaggaaggcaaaaaagggagcacagcgtagcaagaatggccaaatcagttccctgagtggctgcttcacttgccatgctttttgatacatgaatcaggatctgagaaattccttcgtactgcctacatcaccgtcatgttctccacatcgaaatctaggtgaacttcagatatctatcagatgtcagtacataatacgataatcccacagctggaaatcagactcggatctttccaagatgctagctgcaggctcttcatctgccatgatagggataatgcaatatctgcagtgccgctctgtgttagtttcgattctgccaatgagacagagaaaatggagcacgaaggaaaaggaggaacggttctgcgtacacctcatgtgcccggttgatgtctcctttatcattgtgtcattacctggcctgccttgtagctaggcactgctgatgtcgatcttgttgccaaaaaggctgtatggatcatacattcacacaaagtgcaattccattccaagatacagcgaaatcttcaggtacgaggagaaagcatggcctgcttgtgcgtgtgactagttgggcaccctgctgggtactggaatggaaccacgctcccttgttgcttttgtttggtacagtgctggttgttgctacctatatttgctttacagcagcgtcggtgtgtagctcttttaggaaactgagatgttggtttggcctggaaacttaacaatatcgtcacacacatatatgtacatatggggatgaagatatgatcgtcagtatgccatcctttaaaaaaaaagattctca

SEQ ID NO: 198736 - DNA, 743 bp, Zea Mays
cacacactttctgttacataaggaatcaggatctgagaaattccttcgtactgcctacatcaccgtcatgttctccacatcgaaatctaggtgaacttcagatatctatcagatgtcagtacataatacgataatcccacagctggaaatcagactcggatctttccaagatgctagctgcaggctcttcatctgccatgatagggataatgcaatatctgcagtgccgctctgtgttagtttcgattctgccaatgagacagagaaaatggagcacgaaggaaaaggaggaacggttctgcgtacacctcatgtgcccggttgatgtctcctttatcattgtgtcattacctggcctgccttgtagctaggcactgctgatgtcgatcttgttgccaaaaaggctgtatggatcatacattcacacaaagtgcaattccattccaagatacagcgaaatcttcaggtacgaggagaaagcatggcctgcttgtgcgtgtgactagttgggcaccctgctgggtactggaatggaaccacgctcccttgttgcttttgtttggtacagtgctggttgttgctacctatatttgctttacagcagcgtcggtgtgtagctcttttaggaaactgagatgttggtttggcctggaaacttaacaatatcgtcacacacatatatgtacatatggggatgaagatatgatcgtcagtatgccatcctttaaaaaaaaagattctca

SEQ ID NO: 198737 - DNA, 760 bp, Zea Mays
atttttataattattcccacataaagcacccaatttttcgaatcaggatctgagaaattccttcgtactgcctacatcaccgtcatgttctccacatcgaaatctaggtgaacttcagatatctatcagatgtcagtacataatacgataatcccacagctggaaatcagactcggatctttccaagatgctagctgcaggctcttcatctgccatgatagggataatgcaatatctgcagtgccgctctgtgttagtttcgattctgccaatgagacagagaaaatggagcacgaaggaaaaggaggaacggttctgcgtacacctcatgtgcccggttgatgtctcctttatcattgtgtcattacctggcctgccttgtagctaggcactgctgatgtcgatcttgttgccaaaaaggctgtatggatcatacattcacacaaagtgcaattccattccaagatacagcgaaatcttcaggtacgaggagaaagcatggcctgcttgtgcgtgtgactagttgggcaccctgctgggtactggaatggaaccacgctcccttgttgcttttgtttggtacagtgctggttgttgctacctatatttgctttacagcagcgtcggtgtgtagctcttttaggaaactgagatgttggtttggcctggaaacttaacaatatcgtcacacacatatatgtacatatggggatgaagatatgatcgtcagtatgccatcctttaaaaaaaaagattctca

SEQ ID NO: 198738 - DNA, 2112 bp, Zea Mays
  misc_feature (2111)..(2112): n is a, c, g, or t
ctaatcataaaaatcgaagacgtttgattcccgcaccacgagtccacggcacaaggaaatgaaacaatccacgcggaacgccgccgccgccattcccatggttttccatgctcggttgcgagccagcaattccatttcagtgtcctccctcgtctcgagaccttgccccatccagcccaacgctccgtccatcaactgaatagcttggcggtgtaaccctgtcgtgtgcgatgagctcctcgccgttgatcaccgccgcggcgtcggctgccgtggtggcgctggctgtcgccaaccgcgtgctctacaagctcgcgcttgtgcctctcaaggcgtaccctttcttcctcgcccagctcaccaccttcgggtacgttgccgtgtacttctcgatgctctacacgaggtaccgcactgggttggtgactagagacatgctggcgctccccaagcaccggttcgtcgctatcggtttgctggaggcacttggagtctttgctggcatgtctgctggagctatgctaccagggcctgcgattcctatactgtcccagtcattcttggtctggcagcttatcttctctgccctgcttttagggaggacatattcggccagacaagtcattggttgcttcctagtagtttctggtgtgattcttgctgttgcaagatgtaaagttaatttggccagcactcatgatcgcttcatcagcatttcacgctggtgcatctattctgaaggaagctgttttcattgatggtgcaaaacgtcttaaggttgatgcatcttttctccatggtgcttttatttgttcatcagtaaacattaatctatgaactcatggtctaatgttcataagacaaaatatttatgcaggggaagcggccagacatatttgtggtcaattcatttggatctggatttcaggctgtttttgtctttcttcttcttccattcctttctaatttgaggggaattaagtttgctgagcttcctgcttatttaaatggtggtgctgagtgcttcttaaatgtcgcagaaagtccaatcgactgcggaggagctccattcctgcctttgctgtttatagtggtgaatatggcattcaatgtctctctcctcaatttggtgaagatgtcatctgccattgtggcttcacttacagcaacatcagcaggtcctttattgttttttgacccttgattaccccgcctgcattttcatcttctttcttggtgttattgctggtgggtagaccgaatggaggaatataaccatacaatactaattatgcttgttttgaattttagtgccaatatcgatctatattctttcacttcctttgccctacatccctcatggcacggaattaagcacgtctttcatcattggtgccgtgatattgctgatgggcctgattctgtataaccttcctcaatcgtcactgaaacaattgaaggctgattgaaggtaaagtgacacactgccacatgccttgtaacagagagtttactgattgatattttatggtgaaattgatttccacactgaactatacgaagcatgtgactcattcagattttgtattatgaatgttatcgaaattaagattttctaaaacgcaagcaacatgtgtatgtagtagggacatttttaatacttaccctatagtctggaagtgtgatctaaatgcaagttcagtgagcttggtgcttagaacgatgctttgtgttcagtgattacattgtgctatgatgatgatgtgtgttcaattacgtgtaatccatagttattaaggcggtaaggtgaccaaccctctttttaccttttaggcgataaagcaccctagactgtcagggattaggttttagtggcggcgacggttcctcgaccgtgcgagcggcggcgatctcaggggcgagtgagggcaggggctccccccgaggcgcgtgatcggcggcggcaacgctcccccggatcgagcgacggcgatgccctcgaggcggatgagcagcgacgcaccctaggttcggtggtgacggtggttgcatgaagcgcggtaggcttcgacagtagcggtggcatccatgagagacatgggtggcttcgnn

SEQ ID NO: 198739 - DNA, 2515 bp, Zea Mays
aataggtggtgcttcagtctggacccgcccctgatatttttccggtgactctcttcctctgcacttgggtcccaccacttttccctcccctacctttcttccttcttccccaagaccgcgagtaaaaatttcgcttaaaattcgattccacgaagcagcaatcgcaagctcgaagctctaaaataatctcttcccgacgcctctggaaggtcatcatctgaacccaggtagcctccagcgctggagacgtgccgtactcaaaccctagccaccaatggcagccggcggcggggctccgtgggcggagcgcgcgcgggtggtggggacgcagatccgcaacaggttccgcgtggcgcccgtggaccaccggtcgctgtggctgcgggcggacggtcgtgtcgccactgaggcggtccggcggtggtcggatcgcgttcgggccctgctgcagaggggccggagcgcggatcggaactccacatcgacggatacatcacctgaggcggtggcaaagccttcgtccagcgttttgagattctacagaaagagagtgggcaaagaagttaatgggattgaagactctgttattttccgttcgcttcaagcattggctgttcctcttattggcaatgcatgctatgtttttatgcatggtcttaactcagttcaggtttatggtgtagagaagcttcatcaggcattacatgggagacctaaaggcaaggctcttctaacggtcagcaatcatgtggcagcgatggatgaccctttcgtaattgcttcccttctcccaccatctgttatgctggaagcacaaaagctgagatggacactgtgtgccactgatcggtgctttacaaatccagttttgtctacattcttcaggtctgttaaggtgttacctgtttctcgtggtgatggcatctaccaaaagggaatggacatggcactttcaaagcttaacagtggtggatgggttcatatattccctgaaggaagccgttcaagggatggagggaaaaccattgctcctgccaagagaggtgttggaaggatataatgcctgttggaaaacgaatccccagagcaggaaaaagggtgattgtggtcgtgggtgacccaatcaactttgatgacctgctcatcgacaactgtggtgacacccaagatatccctagagggatcttgtacgacaaagtgacacagagaattgggcagcgattgcaggaactcaaggtcgaagtcgacagactggctgcagagcaggaacctgaactccaaaaccacaacgtgggtgatgatggataccggctgtggcagcaggtcgattgggaaggatttgggatagggagttccatgttgccatcagaaccttcagctgctgcgcaagtgccatcaagggaagccgagcctgaaccgcacgtggaagtggagcaaagcgtgtctccagccccaagtgcagcgacctcatacaatgttgctgttccacactggttccagcgccatgcggacccttctgaactcatggggttcgcttcccgtggcctgatcaagcatggcaagttcttggaggaaggctacagggaattccaacagtcggctactactctgcacaccttttgggtttctcgtgctaacaatgctgcacaccgatggagcactgcttaggctgcccgcagcgcttcccgtggcgcgcccctccgtcggctttagtggctacagtagcgacaaaacggtgcatcagatcactctactagctcctatacacagaacaaggacaaagcagcgcactacgccagattgagggggcactgttctaccccttacctgcgcgctacagtgcgcgtatgagtttgatagttggaaaaaattgatattggataaaaaatagatatagaaaatgatattttatagttgtggggtatatgagaaactttagagggaacattttatctcatacttttttatcttccgcagcggtttccttatattcccccactataccccactacaactataaaatattattacctaacattattcatcttttattactatttttcaactattaaataagagagcattgtgtaaggggtgctacagtgcttcccttgatctagggacgggcgttgcctccccttgcgctgcagcgcgtagggggccatttggagacagtcgctgcccacgtagagacccgtacgcatacacagtgcaaggtgaggggcatatggaggcagccttaagactatccgcagcggttccttctaaatttcttcccctatatcactttttagtcacatcatcaacagttatcctctattttttcatctctcgcagtggttccccctaaatactctccctataccccactacaactataaaatatcattttctatacgtatttttcatctactatcaatttttcatctactaacaattactcgtgtacccacaacatagtgttggaggggatgaacagtgaaccactgaattgagggggagagagaagagggtc

SEQ ID NO: 198740 - DNA, 3070 bp, Zea Mays
cctgatatttttccggtgactctcttcctctgcacttgggtcccaccacttttccctcccctacctttcttccttcttccccaagaccgcgagtaaaaatttcgcttaaaattcgattccacgaagcagcaatcgcaagctcgaagctctaaaataatctcttcccgacgcctctggaaggtcatcatctgaacccaggtagcctccagcgctggagacgtgccgtactcaaaccctagccaccaatggcagccggcggcggggctccgtgggcggagcgcgcgcgggtggtggggacgcagatccgcaacaggttccgcgtggcgcccgtggaccaccggtcgctgtggctgcgggcggacggtcgtgtcgccactgaggcggtccggcggtggtcggatcgcgttcgggccctgctgcagaggggccggagcgcggatcggaactccacatcgacggatacatcacctgaggcggtggcaaagccttcgtccagcgttttgagattctacagaaagagagtgggcaaagaagttaatgggattgaagactctgttattttccgttcgcttcaagcattggctgttcctcttattggcaatgcatgctatgtttttatgcatggtcttaactcagttcaggtttatggtgtagagaagcttcatcaggcattacatgggagacctaaaggcaaggctcttctaacggtcagcaatcatgtggcagcgatggatgaccctttcgtaattgcttcccttctcccaccatctgttatgctggaagcacaaaagctgagatggacactgtgtgccactgatcggtgctttacaaatccagttttgtctacattcttcaggtctgttaaggtgttacctgtttctcgtggtgatggcatctaccaaaaggtatccatcttatgaaaacatcagtatggcctaaattttttaatgttgatgaaccgatttatccacgcgattcatattgtgaaagcatcatgaataatgggggcaatacataaggaaattgaacaccaggcttcacaatattttgaatagggaagttgcaaccggaggtgtgctattctttaagcaattagcagatgtggatttgagaattattcttatagaattgcttggtttaactttaacgtaagaaattagatgacaaacataacaaagtctctggtagttaaagcactatagtgagtcctaaggtatttatatattggtattccttgctgcatgggtttacagacttccttttgccctcttctcagatatacaattttaatgccttcatgccttgaatatcataagtcatcctttccaatctaaatcgtgaatatgatcgattacatttggactattgaatgaaatgcatcaccagatccactcttcacttgtacccttttttgttttctttgttcagggaatggacatggcactttcaaagcttaacagtggtggatgggttcatatattccctgaaggaagccgttcaagggatggagggaaaaccattgctcctgccaagagaggtgttggaagattggtaatggatgctgacagccttccagttgtaataccctttgtccatactgggatgcaggatataatgcctgttggaaaacgaatccccagagcaggaaaaagggtgattgtggtcgtgggtgacccaatcaactttgatgacctgctcatcgacaactgtggtgacacccaagatatccctagagggatcttgtacgacaaagtgacacagagaattgggcagcgattgcaggaactcaaggtcgaagtcgacagactggctgcagagcaggaacctgaactccaaaaccacaacgtgggtgatgatggataccggctgtggcagcaggtcgattgggaaggatttgggatagggagttccatgttgccatcagaaccttcagctgctgcgcaagtgccatcaagggaagccgagcctgaaccgcacgtggaagtggagcaaagcgtgtctccagccccaagtgcagcgacctcatacaatgttgctgttccacactggttccagcgccatgcggacccttctgaactcatggggttcgcttcccgtggcctgatcaagcatggcaagttcttggaggaaggctacagggaattccaacagtcggctactactctgcacaccttttgggtttctcgtgctaacaatgctgcacaccgatggagcactgcttaggctgcccgcagcgcttcccgtggcgcgcccctccgtcggctttagtggctacagtagcgacaaaacggtgcatcagatcactctactagctcctatacacagaacaaggacaaagcagcgcactacgccagattgagggggcactgttctaccccttacctgcgcgctacagtgcgcgtatgagtttgatagttggaaaaaattgatattggataaaaaatagatatagaaaatgatattttatagttgtggggtatatgagaaactttagagggaacattttatctcatacttttttatcttccgcagcggtttccttatattcccccactataccccactacaactataaaatattattacctaacattattcatcttttattactatttttcaactattaaataagagagcattgtgtaaggggtgctacagtgcttcccttgatctagggacgggcgttgcctccccttgcgctgcagcgcgtagggggccatttggagacagtcgctgcccacgtagagacccgtacgcatacacagtgcaaggtgaggggcatatggaggcagccttaagactatccgcagcggttccttctaaatttcttcccctatatcactttttagtcacatcatcaacagttatcctctattttttcatctctcgcagtggttccccctaaatactctccctataccccactacaactataaaatatcattttctatacgtatttttcatctactatcaatttttcatctactaacaattactcgtgtacccacaacatagtgttggaggggatgaacagtgaaccactgaattgagggggagagagaagagggtc

SEQ ID NO: 198741 - DNA, 2857 bp, Zea Mays
cgtttctttatgtgcatttttgtgatgaggtcacttctaagtgcattttcctttgctgcaaaaggtgctgaataaactgtctgcacaagtcagtggtccttgaactacagggacctgatctgcagattcttccattgggtactgtttcatatttgaccactttgtaaattatatgggaataaaagttgagggtgagacctatattccaggatactttgacatggaagattctagtgtaaattataatggcaatgtgctgccgtatcacaaggagaacaaaccaagtgtgtttcttactgagaagttcacaataatagcttcaaatggacgagtacattacgacaaggaaatgataaagcggacaatgcttgtacatgaagctacattccggaaacaggtatatgaacttcaccagctttacaaaattcagaaggaactaatggcacggttccaaatagaagagatcaatggttgtcctagttatgctggtttattgcagccaagatcctctccatcacaggcactgcttgatgatgttaaaggaatgcgaaaaactgtgaatcctatttctggacatgatcctaagcagtcatgcatcgatttgataaatgaaagtagttcacaatatagtgtgagtggaactcctttgaggcataacaatgttaggcctcaaaagaaaatgattgacctgcaggttccagcagatgtatacactgacaatgatgatgatgtggagatattagaagtgaggccttccaaaagattgcctggggctaatgggtctgttcttttaggaaatgtcaacctcagccttcaaaatagtgagggctattcacatatgaagagttggagtactgatatacaagcacatcacagctcaactgcgcatatactgaataaaccagttgaagattcatctagtatgaatagatctaattttcttggtgtgggaatatctgctctgcagaaccatcattatgcatcacagggagtaaacttgaaccccataagcttggaagcaaaactaaaggaacaatgtgctggtaaagcatctggttcaaggttctttggaacaaatgaggaaataaggaacaacaatccatttcaacacagaaaggatgactccaactctagcatggcattgtacaaacaaaattgcattggttcctcaatggggaattacgctcccaatgctagcaccttcaatcactccattctttctccgcttggcttcaaccatgcactgaatcttccatggcaaagcaacaacacgagctacttgactaagagtcattgtggtgctgctgaaacattcattcctaaggatgccctttccaatggtatctcagtggattctactccaaaggcgccctatcatcattcactaaagattcacggaggtgccggatatcaaaaacctcctgcactacatgataacctgaaggatatagatctgaatgacacaccagttgatgtcgctgccacttgggaacagggaagcgagaaatcagtggttgatatctcttggctcagcaagaaaccagtaagcctgatggaatcacaagtcccatcaagttatgcaaaggaccactcccagattttgccaagccccacattatattcagaaagtagaactcccacaagagttcctgccttccctttcagtgttggtgctgaaaaagattctcggtgctcacccactctactatatgacctaaacaatggaccatcgattaagcatgaaactgacatggaaattcagtccctgtgcaaggaaagtgacacagatactaggaatctcattgacctgaatgaaaccttgccaataatcgacgatccagaaatagagtctcatgaatcaggtgaaattgttcctcatgaacccaatggcccttcacaggattctatcgctatagcagcagcagcagagacgttggtagaaatgtggaataatagtgatcggcctgcatatcaaccggacattttgcattggtttgctgacctagctatatccaaagataacacattgttggacaaggacagcgatgacgactttgaggctgcaacactgaagctgcgagaaacaaagagcaacgagtaccattcaacaccaagaaccacccaggaggataacactaactttggtcattgctctgcagcttcacttgtctcaaaacctcagagaggtagagggcgaggacgccgacagaggaaacactttcagagggacatcttgccaggccttgcgtcattgccaaagcacgaggtatcagaggatcttcgtgcgctcggaaggtccaagctagtcaccccgacgaaacgtggccgtaacaggcagcaaccgagagggaggcgtcgggcaagaagcgtggctgtcgccatggaggtagaggaaagcgaggtcagcccaccactgcaggcatcaccatctcctgtccctgctgacttggacgcagatgcattggcaataacaaggtggggaaggaccaccagacgttgtcgaaggccgagatgcccgccggtgaacaatgcatcgctgcgtgtagcttgagagagttttaggcatcttagctgatgagaattggtcagaattcagaaattcttttttttccatgactagttggagggaaaactcgaagtagtagattaaaagtaaccagtcacaattgtatatgcatctcagcattaatttggctccctgggacctggatcgaatcaaaacagtttgtacatctctttgaaatgaactctaatcctagagaaatgcacagaattagcatttctacgagtttgctagaattcagtttctcgtagtgcatcttattgttgatcaggccgacatgccactgatatcatg

SEQ ID NO: 198742 - DNA, 3085 bp, Zea Mays
gtctccttgtttgaggaagtggggagaggcggaatcttttgttggatcatggcagttccaatgcggccggtgggcttcgcccccccgtgacatggtctcttgttgctgacactacctggacttttcttctgcttatgacaaagacgaactgataagctggcattcgtagatcggtttcttgggagatacacatacagaagctttagggtcggctcgtagaatctctcagacaccgtcgttttgcatccgagaacttggtcacttctaagtgcattttcctttgctgcaaaaggtgctgaataaactgtctgcacaagtcagtggtccttgaactacagggacctgatctgcagattcttccattgggtactgtttcatatttgaccactttgtaaattatatgggaataaaagttgagggtgagacctatattccaggatactttgacatggaagattctagtgtaaattataatggcaatgtgctgccgtatcacaaggagaacaaaccaagtgtgtttcttactgagaagttcacaataatagcttcaaatggacgagtacattacgacaaggaaatgataaagcggacaatgcttgtacatgaagctacattccggaaacaggtatatgaacttcaccagctttacaaaattcagaaggaactaatggcacggttccaaatagaagagatcaatggttgtcctagttatgctggtttattgcagccaagatcctctccatcacaggcactgcttgatgatgttaaaggaatgcgaaaaactgtgaatcctatttctggacatgatcctaagcagtcatgcatcgatttgataaatgaaagtagttcacaatatagtgtgagtggaactcctttgaggcataacaatgttaggcctcaaaagaaaatgattgacctgcaggttccagcagatgtatacactgacaatgatgatgatgtggagatattagaagtgaggccttccaaaagattgcctggggctaatgggtctgttcttttaggaaatgtcaacctcagccttcaaaatagtgagggctattcacatatgaagagttggagtactgatatacaagcacatcacagctcaactgcgcatatactgaataaaccagttgaagattcatctagtatgaatagatctaattttcttggtgtgggaatatctgctctgcagaaccatcattatgcatcacagggagtaaacttgaaccccataagcttggaagcaaaactaaaggaacaatgtgctggtaaagcatctggttcaaggttctttggaacaaatgaggaaataaggaacaacaatccatttcaacacagaaaggatgactccaactctagcatggcattgtacaaacaaaattgcattggttcctcaatggggaattacgctcccaatgctagcaccttcaatcactccattctttctccgcttggcttcaaccatgcactgaatcttccatggcaaagcaacaacacgagctacttgactaagagtcattgtggtgctgctgaaacattcattcctaaggatgccctttccaatggtatctcagtggattctactccaaaggcgccctatcatcattcactaaagattcacggaggtgccggatatcaaaaacctcctgcactacatgataacctgaaggatatagatctgaatgacacaccagttgatgtcgctgccacttgggaacagggaagcgagaaatcagtggttgatatctcttggctcagcaagaaaccagtaagcctgatggaatcacaagtcccatcaagttatgcaaaggaccactcccagattttgccaagccccacattatattcagaaagtagaactcccacaagagttcctgccttccctttcagtgttggtgctgaaaaagattctcggtgctcacccactctactatatgacctaaacaatggaccatcgattaagcatgaaactgacatggaaattcagtccctgtgcaaggaaagtgacacagatactaggaatctcattgacctgaatgaaaccttgccaataatcgacgatccagaaatagagtctcatgaatcaggtgaaattgttcctcatgaacccaatggcccttcacaggattctatcgctatagcagcagcagcagagacgttggtagaaatgtggaataatagtgatcggcctgcatatcaaccggacattttgcattggtttgctgacctagctatatccaaagataacacattgttggacaaggacagcgatgacgactttgaggctgcaacactgaagctgcgagaaacaaagagcaacgagtaccattcaacaccaagaaccacccaggaggataacactaactttggtcattgctctgcagcttcacttgtctcaaaacctcagagaggtagagggcgaggacgccgacagaggaaacactttcagagggacatcttgccaggccttgcgtcattgccaaagcacgaggtatcagaggatcttcgtgcgctcggaaggtccaagctagtcaccccgacgaaacgtggccgtaacaggcagcaaccgagagggaggcgtcgggcaagaagcgtggctgtcgccatggaggtagaggaaagcgaggtcagcccaccactgcaggcatcaccatctcctgtccctgctgacttggacgcagatgcattggcaataacaaggtggggaaggaccaccagacgttgtcgaaggccgagatgcccgccggtgaacaatgcatcgctgcgtgtagcttgagagagttttaggcatcttagctgatgagaattggtcagaattcagaaattcttttttttccatgactagttggagggaaaactcgaagtagtagattaaaagtaaccagtcacaattgtatatgcatctcagcattaatttggctccctgggacctggatcgaatcaaaacagtttgtacatctctttgaaatgaactctaatcctagagaaatgcacagaattagcatttctacgagtttgctagaattcagtttctcgtagtgcatcttattgttgatcaggccgacatgccactgatatcatg

SEQ ID NO: 198743 - DNA, 1729 bp, Zea Mays
caaagatttttcttctcggtccctctctctcgtccgtcctagccaccagcacataacaaagcaggcaggcaggctcatacagtacgctcaaagcggaaacagagcgaagaactcagcaggacagtcagctgcaaccgcaactggtctgcttgtcagcaggatcagttggatggccttgttcttcatccttgcttgcaccctcatttttgtagccatcgcctcctacgcccagtacgcgcgctggcagaaggggaaaggccgcctcggcggccatgagaaggcttcttcttcctcctcgaagctgcctcctggctccatgggctggccttacctcggtgacacccttcagctctactcccaggaccccaacgtcttcttcgcctccaaacagaagcggtatggcgagatcttcaagacgcaccttctggggtgcccgtgcgtgatgctggcgagcccggaggcggcgcggttcgtcctggtgacgcaggcgcacctgttcaagccgacttaccctcggagcaaggagcgcatgatcgggccgtcggctctcttcttccaccagggcgactaccacctccggctccgcaagctcgtccagggcgcgctcgggcccgacgcgctgcgcgcgctcgttcctgaggtcgagtccgccgtgcgctccaccctcgctgcctgggacggccaggtcaggagcacgttcgacgccatgaagacggtttcgaagcatgcgtgggcgtggccaatggtgtccgtaatgatgtcaacacaatatatatcggatgatgctgagaacattattgcctgccggctcgatctgttgctacgtttattccagctgtcgttcgatgtgggcatcctggcgatcttcggcggcggcgggctggacgagcggcgcaaggcggagctgaggaagaactactccatcgtggagaaggggtacaactccttccccaacagcatacccgggacgctctactacaaggcgatgcaggtgattttggagagcttaaggatggcgagcatcatctcgttcacgttcagggaggccgtggccgacgtggagtacaaagggttccttatccccaaggggtggaaggtgatgccgctgttcaggaacatccatcacagcccggactacttccaggatccacacaagttcgacccttctagattccaggtggcgccgcggccgaacacgttcctgccatttgggagcggcgtgcacgcgtgccccgggaacgagctggccaagctcgagatgctggtcctcatccaccatctggtcaccgcctacaggtgggagactgttggatccagcgacgaggtcgagtacaggccgttccccgtgcccaagcaaggcttgcctgtcagattatggagagaaagcagtgcggcggtggacagaaatggccgccatgagaccgatgacgatgtggaggacataatagtttgacccttaaactagctagctaggcattaatttaaccaagctagctagacaggtttttgtctttgctagctagctctcgccagctgccctcctcttctcctcgatcaaattattaccttgagggggagaagaaatggcggcttttctctttccgtttccttctcgcctttcttccctgataatgatgaaaaatgtaagatatgcagataccaatgatcattgtatcattgagatatatctatatatatagtcacccgaaacagggagctagcggtatta

SEQ ID NO: 198744 - DNA, 1971 bp, Zea Mays
ggctgcacctcaagcgcttcggcaaggtggacagcgccaacaagtacgagaccttgctggaggtggtttaggtgatgaccgacctgaagttgatcatcaagcgggcctacatttcctccgacgacgagtggttcatgaacggttatatacttatagagtgtggatacatgtttgcaatagctccagatcaattgcaaatgaaccttgttgatatcgtgattattcacggcattgtcttattggatgttcttgacaaggagctcatcacttatgccattagagttcgctaatgatgtaattgttgacatctatgtatgatctccttgactactatgggaactgtttagtgagaaactatattgttttcagatattgtctgatgaagagctagaaacatatctaaaggtgattgcagtaatatccatgggaacagaagttattgaacatgacttgttaaatatcagagagctatatgatcatgtgttggccctactatatgactatttaagaagcaagatgaacactatcaccgcaattctaacagcactggtgggtgaatcagttggtgccatattgtgcatggtggaagtttggtaaacttggccaagcaacctggtagcataatttaaatacttggtgtagagaaggtttgttattgcttatggataattctggaatcttgtaatttttagctctttttttggtgtgtatctgaaccttatgtgcatcaatgcttagtatgacataagtaaacattacttatttgcttatgttgtctgctaaaacagtctaacatcttgtaaatcatgtggatttcatatttgttacttatttcttttaattggttgtttactaataatgctgtagtggttttactcgatggcgtgcgtcaactttatttgccgatgttgtctgctataattttctttctccactaagaactaaaggttatgtttctctacaggctttattcagagctctaaagaaaagcattctacacccaagtatgggctcatctaccatgcatcctcaattgggaaggcttctcaaaagcataacggaaaaactctcggtctctatctgcaaaagctgctcttgctatccgataggatgcccttggtgttgatgaggacaactccattggcactaagagtcgactgaaggttgagacacagtttcaaattcttgaaggtcgtgacggttgggctggagagcacgctggtaggggaggacctcaacgaccgtgcctttgtctatggcttccttagcttcctggacaagatctcttgcgtaatcgtcctatttgtcttggaattgtacgaagacacgaatgagatgtagcgagatgaggggacacggtgagcaggtacgagatgggcctgatctcctcatacttcaccgtcctctccctggtggtcacatccattctgaggctataggtcaccactccgaaagccattgcaatggaagccccactgcttgtctgacaaactgaagaaaccggtgagtgtagatgtcgatcgggttggaagaaagaagaaagaaatgtgcatcctcttcaattagtttcaattagatttgaaagcaggtcactttgtaatagtatgtgtcttgtcatcgtgttggcacaacacagatgtgtatgatgtagttacgtataactcaagattctcattgctatgctttattataccaacaaagttcagatgtttggatatttctagcttattagggtctgatgcggaacatgtttaaacaaatatatcaaatttgaataatgtcaacatgtgtgatatatagaaactatagcaacacatgagccacattagattttgtcattaaattttcttgttacaacttatataatacacaacattttgaatgatgctaacaaaagaagaataacaattaatgtttttaattattggttccatagcaacgcacgggcatacacctagtaaggtagaaaag

SEQ ID NO: 198745 - DNA, 1680 bp, Zea Mays
tacggtggctgcacctcaagcgcttcggcaaggtggacagcgccaacaagtacgagaccttgctggaggtggtttaggtgatgaccgacctgaagttgatcatcaagcgggcctacatttcctccgacgacgagtggttcatgaacggttgatatcgtgattattcacggcattgtcttattggatgttcttgacaaggagctcatcacttatgccattagagttcgctaatggtatggctggcactttccaaagctcatcaaaatagttttagataatatttagtatgccaaagctgtgaaggtgatgggcaacagagctaatgcaatcaaccttgacttctcagatgtaattgttgacatctatgtatgatctccttgactactatgggaactgtttagtgagaaactatattgttttcagatattgtctgatgaagagctagaaacatatctaaaggtgattgcagtaatatccatgggaacagaagttattgaacatgacttgttaaatatcagagagctatatgatcatgtgttggccctactatatgactatttaagaagcaagatgaacactatcaccgcaattctaacagcactggtgggtgaatcagttggtgccatattgtgcatggtggaagtttggtaaacttggccaagcaacctggtagcataatttaaatacttggtgtagagaaggctttattcagagctctaaagaaaagcattctacacccaagtatgggctcatctaccatgcatcctcaattgggaaggcttctcaaaagcataacggaaaaactctcggtctctatctgcaaaagctgctcttgctatccgataggatgcccttggtgttgatgaggacaactccattggcactaagagtcgactgaaggtcgtgacggttgggctggagagcacgctggtaggggaggacctcaacgaccgtgcctttgtctatggcttccttagcttcctggacaagatctcttgcgtaatcgtcctatttgtcttggaattgtacgaagacacgaatgagatgtagcgagatgaggggacacggtgagcaggtacgagatgggcctgatctcctcatacttcaccgtcctctccctggtggtcacatccattctgaggctataggtcaccactccgaaagccattgcaatggaagccccactgcttgtctgacaaactgaagaaaccggtgagtgtagatgtcgatcgggttggaagaaagaagaaagaaatgtgcatcctcttcaattagtttcaattagatttgaaagcaggtcactttgtaatagtatgtgtcttgtcatcgtgttggcacaacacagatgtgtatgatgtagttacgtataactcaagattctcattgctatgctttattataccaacaaagttcagatgtttggatatttctagcttattagggtctgatgcggaacatgtttaaacaaatatatcaaatttgaataatgtcaacatgtgtgatatatagaaactatagcaacacatgagccacattagattttgtcattaaattttcttgttacaacttatataatacacaacattttgaatgatgctaacaaaagaagaataacaattaatgtttttaattattggttccatagcaacgcacgggcatacacctagtaaggtagaaaag

SEQ ID NO: 198746 - DNA, 1741 bp, Zea Mays
atccatcgtcaaaccgcccgcggtccaaaatccaaaccctgcgagtgtatagaagaagaaccccccaccccatcgcaacccgcaatggtcgcggcggaagatccggaacacttcttcgccgcctcgccgccgctgcgcgacgctgccgttgtcgccgccagcctgcaggagttcgtcgcgcgcaattcgcacgcatcatcagacggcgtcgggcggcggcgcatcgtctgcgtcacgtcgggcgggaccacggtgccgctggagcagcgatgcgtgcgctacatcgacaacttcagctccggccaccgcggcgccgcgtccaccgagtatttcttaaaggctggctatgcggtcattttcgtccatcggcggtaatccacaaagctacatcagctgcttcgttgcaaaaacaatcccacaacttttacttctcgtctttcagctttatcaactgttcagtatccacataatgcaaaaaaaaagaagaaagattcttcacataaatcccattatgcttgcatgaacgcagagggagttgccagcctttctccaggttcctgcctgatgactcgtttctccacttctttgatgtcacaacagattcgaaggttcaaggttggttgtggccgagtcccaggcaacggtggtaaagagagcaattggggattatcgcaaggctactgaaggaggctctctgctgaaactcccattcaccacgatatttgagtatcttcagttactgaagatggttgctacatccatgagctgtgtgggtctccacgggatgttctatctcgctgcagctgtgtctgacttctatgttccatgggatagcatggcaaaacataagatccagtcagccggaggcccactggatatgaagctcagccaggttccaaaaatgctccccgttctgcgcaaccattgggcccccttggccttctgcgtatccttcaagctggagacggatccagacattctagttcagaaagcagagacggctctgagcaagtacaggatggacgttgttgtggccaatctacttgcaacgtacaaggaggaggtcgtcatcatctcgaatggcaaaagcaacaccattcgaaggtgcagcaaaggcgaggatctggaggagcatatcatcaagctcctagagaagagccactccaagtttatttacagcagcacggaagggtgcagtaagaacgactacgaaaagcttataccgttaggcatcaaaagtctggcttaagggaaacattgatcggttctggagctcaaattaatagggaagccccatcagcactcttgtagtgtttggatggatggacgaggaaggatgaagagggatgggataggatcattctaagttgacccatgtttggtttggaggtctagagtcacggtcaaggaatatttttcaaaaatagtggatggggccatcccttaaaaaataagggacggagtcaactcagagttgatcccatcccatctctcgttgacaccgaaccaaacacatcataaagctctacatgcagtgtgtacatttgctggtaatgtatatgtaagcaggactaataggattgttctgttctcacacgcacacaaacacgccaccaaaaaagatggtccaaagttgtatgtatcgtttgctattcacctgttaattaatggctttgtaatcagaaatgattattgttcaaattgtttcttaacttctccgatggcaatggacctcgcctag

SEQ ID NO: 198747 - DNA, 2205 bp, Zea Mays
gcatacatctatgagtatggcacatggaaaacaaagaccttggggcggacaatggtctaattggtcagtttggtgttggattttactcagcttttcttgttgcagagaaggttgtggtgtccaccaagagcccaaaatcagataaacagtatgtgtgggaagctgtggctgacagtagctcttatgtcataaaggaagagactgatcctgagaaaatgcttacacgtggaactcagattaccctgtttctaagacctgatgataagtacgagtttgcggacccttcaaggattcaaggcttagtaaaaaattactctcagtttgtgtctttccccatatacacatggcaggagaaatcaagaactgttgaggttgaagaggatgaagagccgaaagaagttgaagaggcaacaaaggcatactttgacatacagggtgagaaaaagaagaagactattacagagaaatattgggattgggaactagccaatgagacaaaacccatatggatgagaaatccaaaggaaattgagaacaccgaatacaatgagttctataagaagacattcaatgagtttttggaccctcttgctcacactcacttcacaactgagggtgaggtggaattcaggagtgttctttatgttccgggcatggcgcctcttagtaatgaggagataatgaaccccaagaccaaaaatatccggctatatgttaaaagagtattcatctctgatgactttgatggtgaactgtttccaagatacttgagctttgtgaaaggtgtggtggattcaaatgaccttcccctcaacgtttctcgggagattcttcaagaaagtcgaattgtaagaattatgcgcaagcgacttgtcagaaagacctttgatatgattgaagagattgcggaaaaggaagataaggaggactataagaagttttgggagagctttggcaagtttatcaagcttggttgcatcgaggacacagggaatcacaagcgccttgctccattgttgcgcttccactcttctaaaaacgagggagatttgataagtcttgatcaatatgtagagagcatgcctgaaagtcaaaaggcaatctactacatcgctacagatagtctccagagtgcaaagactgctcctttcctggaaaagctggtccagaaagatattgaagttctctaccttattgagccgatagatgaggttgccattcagaacttgcagacctacaaagagaagaaatttgtggatatcagcaaagaggatctggaattgggtgatgaagaagaagagactaaagaaaccaaacaggagttcactctcctatgtgattgggttaaacaacagcttggcgacaaggttgcgaaggtccaaatatcaaagcgtttaagttcatctccatgtgttctcgtatctggcaagttcggttggtccgccaatatggaaaggctcatgaaggctcaaacacttggtgacacatcaagtttggaattcatgaggggaagaaggatcttcgaaatcaaccctgaccacccaattatcaaggatttgagcgctgcttgcaaaaatgagcccgaaagcacagaagccaggagggctgttgagctcctatacgaggctgctttaatctcgagtggatatactccggagagtccagcggagttgggtggcaagatctatgagatgatggcgattgccctcggcgggagatggggaaggtccgacatggaggaggccgaagcgtcgacgggtgaggccagcgcagaggcagactcatctgaaggcaccgtagcagaggtgattgagccctcggaagttagacccgagagcgatccgtggagggaccagtgagttctcccacgggcatcctttgttagaactccatatttagcagtgccggggaaaaaaactaagccatgggcaagaacatatttggtcacagttgcttctatatgggttcttgccgtggcaattttttgtaggcttagactttgccggccactaaaatcttattgaggaggtagtggccttagaaaagaataataaagcatgaagactgatgattacatagcaaaattgtgctgtccctctcaataatatttataatgaaaagaacttatttctgcaagcagctgtctcctcccccctttatatacgtacgtagttgttaatgtcagactgcctctttagatcagat

SEQ ID NO: 198748 - DNA, 2823 bp, Zea Mays
ccacagcttactacgaaaaccctaaccccttcccttatcctctgctccctctccacgtttccacgaacgttggcgcgcaagctcgtggtgtgagcggtcactgtctcccatcccatggctccggcgctgagcgggactctgggcgcgtcgtcggtggcggcgctgcggccctgcgcggggaggagggcgccgtccgccgcgagctcggttgcgccgcgcgggagcggggtggtgaggtgctccagagggctcaggtgggacgcccacagaagcagggggaggttgctcagggtgaggtgcgatgcggccgtcgtggagaagcccgccggggaggaggcggctggggagaagttcgagtaccaggcggaggtgagccgcttaatggacttgatcgtccatagtctgtacagtcataaggaggtatttctccgggagcttgttagcaatgcgagtgatgcgctggataagctgaggttcctcggcgtcactgattcttctttgcttgctgatggcggcgagctagaaataagaattaagcctgaccttgatgctggaacgattactatcactgacactggtgttggtatgactaaagatgagctcaaggactgccttggtaccattgctcagagtggtacctcaaaatttctgaaggccctcaaggaaaacaaagaccttggggcggacaatggtctaattggtcagtttggtgttggattttactcagcttttcttgttgcagagaaggttgtggtgtccaccaagagcccaaaatcagataaacagtatgtgtgggaagctgtggctgacagtagctcttatgtcataaaggaagagactgatcctgagaaaatgcttacacgtggaactcagattaccctgtttctaagacctgatgataagtacgagtttgcggacccttcaaggattcaaggcttagtaaaaaattactctcagtttgtgtctttccccatatacacatggcaggagaaatcaagaactgttgaggttgaagaggatgaagagccgaaagaagttgaagaggcaacaaagggtgagaaaaagaagaagactattacagagaaatattgggattgggaactagccaatgagacaaaacccatatgatgagaaatccaaaggaaattgagaacaccgaatacaatgagttctataagaagacattcaatgagtttttggaccctcttgctcacactcacttcacaactgagggtgaggtggaattcaggagtgttctttatgttccgggcatggcgcctcttagtaatgaggagataatgaaccccaagaccaaaaatatccggctatatgttaaaagagtattcatctctgatgactttgatggtgaactgtttccaagatacttgagctttgtgaaaggtgtggtggattcaaatgaccttcccctcaacgtttctcgggagattcttcaagaaagtcgaattgtaagaattatgcgcaagcgacttgtcagaaagacctttgatatgattgaagagattgcggaaaaggaagataaggaggactataagaagttttgggagagctttggcaagtttatcaagcttggttgcatcgaggacacagggaatcacaagcgccttgctccattgttgcgcttccactcttctaaaaacgagggagatttgataagtcttgatcaatatgtagagagcatgcctgaaagtcaaaaggcaatctactacatcgctacagatagtctccagagtgcaaagactgctcctttcctggaaaagctggtccagaaagatattgaagttctctaccttattgagccgatagatgaggttgccattcagaacttgcagacctacaaagagaagaaatttgtggatatcagcaaagaggatctggaattgggtgatgaagaagaagagactaaagaaaccaaacaggagttcactctcctatgtgattgggttaaacaacagcttggcgacaaggttgcgaaggtccaaatatcaaagcgtttaagttcatctccatgtgttctcgtatctggcaagttcggttggtccgccaatatggaaaggctcatgaaggctcaaacacttggtgacacatcaagtttggaattcatgaggggaagaaggatcttcgaaatcaaccctgaccacccaattatcaaggatttgagcgctgcttgcaaaaatgagcccgaaagcacagaagccaggagggctgttgagctcctatacgaggctgctttaatctcgagtggatatactccggagagtccagcggagttgggtggcaagatctatgagatgatggcgattgccctcggcgggagatggggaaggtccgacatggaggaggccgaagcgtcgacgggtgaggccagcgcagaggcagactcatctgaaggcaccgtagcagaggtgattgagccctcggaagttagacccgagagcgatccgtggagggaccagtgagttctcccacgggcatcctttgttagaactccatatttagcagtgccggggaaaaaaactaagccatgggcaagaacatatttggtcacagttgcttctatatgggttcttgccgtggcaattttttgtaggcttagactttgccggccactaaaatcttattgaggaggtagtggccttagaaaagaataataaagcatgaagactgatgattacatagcaaaattgtgctgtccctctcaataatatttataatgaaaagaacttatttctgcaagcagctgtctcctcccccctttatatacgtacgtagttgttaatgtcagactgcctctttagatcagat

SEQ ID NO: 198749 - DNA, 2915 bp, Zea Mays
gacagtagtgttcgggcccgatcgactgctcctagaagcttcggccgcgcctctatctcatctccttcctcctgttgagcccgccggcctcccacagcttactacgaaaaccctaaccccttcccttatcctctgctccctctccacgtttccacgaacgttggcgcgcaagctcgtggtgtgagcggtcactgtctcccatcccatggctccggcgctgagcgggactctgggcgcgtcgtcggtggcggcgctgcggccctgcgcggggaggagggcgccgtccgccgcgagctcggttgcgccgcgcgggagcggggtggtgaggtgctccagagggctcaggtgggacgcccacagaagcagggggaggttgctcagggtgaggtgcgatgcggccgtcgtggagaagcccgccggggaggaggcggctggggagaagttcgagtaccaggcggaggtgagccgcttaatggacttgatcgtccatagtctgtacagtcataaggaggtatttctccgggagcttgttagcaatgcgagtgatgcgctggataagctgaggttcctcggcgtcactgattcttctttgcttgctgatggcggcgagctagaaataagaattaagcctgaccttgatgctggaacgattactatcactgacactggtgttggtatgactaaagatgagctcaaggactgccttggtaccattgctcagagtggtacctcaaaatttctgaaggccctcaaggaaaacaaagaccttggggcggacaatggtctaattggtcagtttggtgttggattttactcagcttttcttgttgcagagaaggttgtggtgtccaccaagagcccaaaatcagataaacagtatgtgtgggaagctgtggctgacagtagctcttatgtcataaaggaagagactgatcctgagaaaatgcttacacgtggaactcagattaccctgtttctaagacctgatgataagtacgagtttgcggacccttcaaggattcaaggcttagtaaaaaattactctcagtttgtgtctttccccatatacacatggcaggagaaatcaagaactgttgaggttgaagaggatgaagagccgaaagaagttgaagaggcaacaaagggtgagaaaaagaagaagactattacagagaaatattgggattgggaactagccaatgagacaaaacccatatggatgagaaatccaaaggaaattgagaacaccgaatacaatgagttctataagaagacattcaatgagtttttggaccctcttgctcacactcacttcacaactgagggtgaggtggaattcaggagtgttctttatgttccgggcatggcgcctcttagtaatgaggagataatgaaccccaagaccaaaaatatccggctatatgttaaaagagtattcatctctgatgactttgatggtgaactgtttccaagatacttgagctttgtgaaaggtgtggtggattcaaatgaccttcccctcaacgtttctcgggagattcttcaagaaagtcgaattgtaagaattatgcgcaagcgacttgtcagaaagacctttgatatgattgaagagattgcggaaaaggaagataaggaggactataagaagttttgggagagctttggcaagtttatcaagcttggttgcatcgaggacacagggaatcacaagcgccttgctccattgttgcgcttccactcttctaaaaacgagggagatttgataagtcttgatcaatatgtagagagcatgcctgaaagtcaaaaggcaatctactacatcgctacagatagtctccagagtgcaaagactgctcctttcctggaaaagctggtccagaaagatattgaagttctctaccttattgagccgatagatgaggttgccattcagaacttgcagacctacaaagagaagaaatttgtggatatcagcaaagaggatctggaattgggtgatgaagaagaagagactaaagaaaccaaacaggagttcactctcctatgtgattgggttaaacaacagcttggcgacaaggttgcgaaggtccaaatatcaaagcgtttaagttcatctccatgtgttctcgtatctggcaagttcggttggtccgccaatatggaaaggctcatgaaggctcaaacacttggtgacacatcaagtttggaattcatgaggggaagaaggatcttcgaaatcaaccctgaccacccaattatcaaggatttgagcgctgcttgcaaaaatgagcccgaaagcacagaagccaggagggctgttgagctcctatacgaggctgctttaatctcgagtggatatactccggagagtccagcggagttgggtggcaagatctatgagatgatggcgattgccctcggcgggagatggggaaggtccgacatggaggaggccgaagcgtcgacgggtgaggccagcgcagaggcagactcatctgaaggcaccgtagcagaggtgattgagccctcggaagttagacccgagagcgatccgtggagggaccagtgagttctcccacgggcatcctttgttagaactccatatttagcagtgccggggaaaaaaactaagccatgggcaagaacatatttggtcacagttgcttctatatgggttcttgccgtggcaattttttgtaggcttagactttgccggccactaaaatcttattgaggaggtagtggccttagaaaagaataataaagcatgaagactgatgattacatagcaaaattgtgctgtccctctcaataatatttataatgaaaagaacttatttctgcaagcagctgtctcctcccccctttatatacgtacgtagttgttaatgtcagactgcctctttagatcagat

SEQ ID NO: 198750 - DNA, 2917 bp, Zea Mays
ctttgtccccccctaatccgtgagttgggccttcgggttcggcttccatggcgcgggcgcgaggccggctacgccgttgctgctttgttcgtgagtcgtgaatctggatcaaggcgattcgaaaaaaaaaagaatctggatcaaggcatcaagctcaggttctcccgttcttgctgtccagaccagagatattgctcactgacttcggcctcggcgtttgaagccgccaccggtggggtgacgccgatggcttggaggatacctacggcggcggcggcggcgtgcagcaggttagcgagcgtgagccgaatgcctggagccgttcgtcgcgaaacgagctgaagctagtcgtctcgactcccacgtcctagcaagcggttgtcggccgtcggtcgtcggatcaagaatgagtccacgcgtcagtaatctgctagtatgcacgggagggagtttgggttggggaccggatccaccaatttttcttccggcgatgggaaaacgaaagagacctgcatctgattccattctggaagcaccccactccaatccactctacatgtcccacgctcagacccgggtccctcaccgccgtctctcgcgctccggtaaccgcctccacctccgcacctgacccctccgcctccgcctccttgaaaattccttttgctgctccaacctgcgaagctagttcactgtactcttgcttgcttataacgtagcgtgcggtggacggggtttgccagcgacttcaagaaaggctgctacgttttgccatcataagggtcgttaggagatggtagaattgaggcttcctatgttcagtatacaataatacggccctgttgtttccatgaacgcttgctacctcgtccagaagtccctggaacagtagtttggacctttgaatccagttcctcaatagattgccccatgtttgaagagatgagtcatattcagtaatcagtattcagtacccactaaattttccaacgagtttaaatatcttttatccattcacaggtagatataatttgatgggaagatgaatggtgcagaggaggaggagccgcctcacgtcagcagcatgcccaagacacaagacggtgttaccaagcccagtctagggaaagagcccatcccagggagcgagctctggacggatgggctcatctgtgcttttgagctggtcaagagtcacaggaagcctgttcagcacaaatcatggctggcaactgagcagatacaggagaagggccccactatgtgcacgaggaagcactcaagaaggaatgggcaccagatcactgagccgaaagtggatgagagcattgtgttggaaaacccccagcagactgatttcagtaacgatccttcagtgctcaaagataggccattgtatgctggggagattttggatcataaatgggtgcctattggatggaataggatcgccgagctggtcctgagggttcagtcagactccagctgggagaatgagttgatggagatgagtgatagcgaggatgattacaccgtggctgatcttgcagctccatactggcagcgccctgtgggacctacttggtggtgtcatgtcaccgcaggccatccttcaatagatgcatggttgaatagcgctcactggatgcatcctgccatcagaattgcactgagagatgagagcaaactgataagcgaccggatgaagtacctgctctacgaggtcccagttagagttgcaggagggctgttatttgagcttcttggccagtcaataggagacccaaatcatgaagaggaagatatacctattgtgcttaggtcttggcaagcacaaaattttcttgttacaacaatgcatgtcaaaggcccttcatccaatataaatgtgttaggagtgactgaagtgcaggagttgcttcttgctggtggaagccaaacacctagatcagtgcatgaagtaattgcacatttggtcagccgtctttcacgttgggatgacagattattccggaaatatgtatttggggaagcagatgaaattgaattgaaatttgtgaataggagaaatcatgaagatcttaatcttgttagcatcatactgaatcaggaaatcagaaggttagcaacacaggtaatcagggttaaatggtcacttcatgcaagggaagagatattaattgagcttctcagacatttgaggggtaatgccacaagagctattctagagagtattagaaagtgtacgagggacatgttggaagagcaggaagctgtgcgcgggcgcttgttcactattcaggatgttatgcagagcactgtccgtgcatggctacaagatagaagcctcagagttacacataatctggcaatttttggcggcggtggcatggttttatccataatcactggccttttcggaatcaacgtcgatggcatacctggagcgcagaacaccccctacgcttttggtttgttcgcgggacttctcttctttgtagggatcgtcctaatcggcatggggatgctgtatcttgggttacagaatccagttaacagtgagaaggtgaaggtgaggaagctggagctccagcacctggtttcgatgttccagcacgaagcggagcagcatggcaaggtcagggaaggtgttagccggcatggcgcctcgccgagttcatccacggcctctgatgaagggtacattcttatctcctgagatgggagatttatttgctgacgtgcaaggtcttgttttgaaaggctggaactgaagagaagtcgggtaaatggtatacttacacgtgtcttaagaattgtaattgggggatttgacatcgaaacgttggatatgataattgtagcagcagattggctttcctctgttgcttgagatcgcggctgtgatcgtttctta

SEQ ID NO: 198751 - DNA, 2236 bp, Zea Mays
gggccttcgggttcggcttccatggcgcgggcgcgaggccggctacgccgttgctgctttgttcgtgagtcgtgaatctggatcaaggcgattcgaaaaaaaaaagaatctggatcaaggcatcaagctcaggttctcccgttcttgctgtccagaccagagatattgctcactgacttcggcctcggcgtttgaagccgccaccggtggggtgacgccgatggcttggaggatacctacggcggcggcggcggcgtgcagcaggtagatataatttgatgggaagatgaatggtgcagaggaggaggagccgcctcacgtcagcagcatgcccaagacacaagacggtgttaccaagcccagtctagggaaagagcccatcccagggagcgagctctggacggatgggctcatctgtgcttttgagctggtcaagagtcacaggaagcctgttcagcacaaatcatggctggcaactgagcagatacaggagaagggccccactatgtgcacgaggaagcactcaagaaggaatgggcaccagatcactgagccgaaagtggatgagagcattgtgttggaaaacccccagcagactgatttcagtaacgatccttcagtgctcaaagataggccattgtatgctggggagattttggatcataaatgggtgcctattggatggaataggatcgccgagctggtcctgagggttcagtcagactccagctgggagaatgagttgatggagatgagtgatagcgaggatgattacaccgtggctgatcttgcagctccatactggcagcgccctgtgggacctacttggtggtgtcatgtcaccgcaggccatccttcaatagatgcatggttgaatagcgctcactggatgcatcctgccatcagaattgcactgagagatgagagcaaactgataagcgaccggatgaagtacctgctctacgagtttttcaggtcccagttagagttgcaggagggctgttatttgagcttcttggccagtcaataggagacccaaatcatgaagaggaagatatacctattgtgcttaggtcttggcaagcacaaaattttcttgttacaacaatgcatgtcaaaggcccttcatccaatataaatgtgttaggagtgactgaagtgcaggtaccaaactcaaagtgtttagtgtttaagcttactagttaattcatgcttacgaacatctgtccaggagttgcttcttgctggtggaagccaaacacctagatcagtgcatgaagtaattgcacatttggtcagccgtctttcacgttgggatgacagattattccggaaatatgtatttggggaagcagatgaaattgaattgaaatttgtgaataggagaaatcatgaagatcttaatcttgttagcatcatactgaatcaggaaatcagaaggttagcaacacaggtaatcagggttaaatggtcacttcatgcaagggaagagatattaattgagcttctcagacatttgaggggtaatgccacaagagctattctagagagtattagaaagtgtacgagggacatgttggaagagcaggaagctgtgcgcgggcgcttgttcactattcaggatgttatgcagagcactgtccgtgcatggctacaagatagaagcctcagagttacacataatctggcaatttttggcggcggtggcatggttttatccataatcactggccttttcggaatcaacgtcgatggcatacctggagcgcagaacaccccctacgcttttggtttgttcgcgggacttctcttctttgtagggatcgtcctaatcggcatggggatgctgtatcttgggttacagaatccagttaacagtgagaaggtgaaggtgaggaagctggagctccagcacctggtttcgatgttccagcacgaagcggagcagcatggcaaggtcagggaaggtgttagccggcatggcgcctcgccgagttcatccacggcctctgatgaagggtacattcttatctcctgagatgggagatttatttgctgacgtgcaaggtcttgttttgaaaggctggaactgaagagaagtcgggtaaatggtatacttacacgtgtcttaagaattgtaattgggggatttgacatcgaaacgttggatatgataattgtagcagcagattggctttcctctgttgcttgagatcgcggctgtgatcgtttctta

SEQ ID NO: 198752 - DNA, 2138 bp, Zea Mays
gtcggtcgtcggatcaagaatgagtccacgcgtcagtaatctgctagtatgcacgggagggagtttgggttggggaccggatccaccaatttttcttccggcgatgggaaaacgaaagagacctgcatctgattccattctggaagcaccccactccaatccactctacatgtcccacgctcagacccgggtccctcaccgccgtctctcgcgctccggtagatataatttgatgggaagatgaatggtgcagaggaggaggagccgcctcacgtcagcagcatgcccaagacacaagacggtgttaccaagcccagtctagggaaagagcccatcccagggagcgagctctggacggatgggctcatctgtgcttttgagctggtcaagagtcacaggaagcctgttcagcacaaatcatggctggcaactgagcagatacaggagaagggccccactatgtgcacgaggaagcactcaagaaggaatgggcaccagatcactgagccgaaagtggatgagagcattgtgttggaaaacccccagcagactgatttcagtaacgatccttcagtgctcaaagataggccattgtatgctggggagattttggatcataaatgggtgcctattggatggaataggatcgccgagctggtcctgagggttcagtcagactccagctgggagaatgagttgatggagatgagtgatagcgaggatgattacaccgtggctgatcttgcagctccatactggcagcgccctgtgggacctacttggtggtgtcatgtcaccgcaggccatccttcaatagatgcatggttgaatagcgctcactggatgcatcctgccatcagaattgcactgagagatgagagcaaactgataagcgaccggatgaagtacctgctctacgagtttttcaggtcccagttagagttgcaggagggctgttatttgagcttcttggccagtcaataggagacccaaatcatgaagaggaagatatacctattgtgcttaggtcttggcaagcacaaaattttcttgttacaacaatgcatgtcaaaggcccttcatccaatataaatgtgttaggagtgactgaagtgcaggagttgcttcttgctggtggaagccaaacacctagatcagtgcatgaagtaattgcacatttggtcagccgtctttcacgttgggatgacagattattccggaaatatgtatttggggaagcagatgaaattgaattgaaatttgtgaataggagaaatcatgaagatcttaatcttgttagcatcatactgaatcaggaaatcagaaggttagcaacacagacatccctgctgtaggtaatcagggttaaatggtcacttcatgcaagggaagagatattaattgagcttctcagacatttgaggggtaatgccacaagagctattctagagagtattagaaagtgtacgagggacatgttggaagagcaggaagctgtgcgcgggcgcttgttcactattcaggatgttatgcagagcactgtccgtgcatggctacaagatagaagcctcagagttacacataatctggcaatttttggcggcggtggcatggttttatccataatcactggccttttcggaatcaacgtcgatggcatacctggagcgcagaacaccccctacgcttttggtttgttcgcgggacttctcttctttgtagggatcgtcctaatcggcatggggatgctgtatcttgggttacagaatccagttaacagtgagaaggtgaaggtgaggaagctggagctccagcacctggtttcgatgttccagcacgaagcggagcagcatggcaaggtcagggaaggtgttagccggcatggcgcctcgccgagttcatccacggcctctgatgaagggtacattcttatctcctgagatgggagatttatttgctgacgtgcaaggtcttgttttgaaaggctggaactgaagagaagtcgggtaaatggtatacttacacgtgtcttaagaattgtaattgggggatttgacatcgaaacgttggatatgataattgtagcagcagattggctttcctctgttgcttgagatcgcggctgtgatcgtttctta

SEQ ID NO: 198753 - DNA, 2072 bp, Zea Mays
cacgggagggagtttgggttggggaccggatccaccaatttttcttccggcgatgggaaaacgaaagagacctgcatctgattccattctggaagcaccccactccaatccactctacatgtcccacgctcagacccgggtccctcaccgccgtctctcgcgctccggtagatataatttgatgggaagatgaatggtgcagaggaggaggagccgcctcacgtcagcagcatgcccaagacacaagacggtgttaccaagcccagtctagggaaagagcccatcccagggagcgagctctggacggatgggctcatctgtgcttttgagctggtcaagagtcacaggaagcctgttcagcacaaatcatggctggcaactgagcagatacaggagaagggccccactatgtgcacgaggaagcactcaagaaggaatgggcaccagatcactgagccgaaagtggatgagagcattgtgttggaaaacccccagcagactgatttcagtaacgatccttcagtgctcaaagataggccattgtatgctggggagattttggatcataaatgggtgcctattggatggaataggatcgccgagctggtcctgagggttcagtcagactccagctgggagaatgagttgatggagatgagtgatagcgaggatgattacaccgtggctgatcttgcagctccatactggcagcgccctgtgggacctacttggtggtgtcatgtcaccgcaggccatccttcaatagatgcatggttgaatagcgctcactggatgcatcctgccatcagaattgcactgagagatgagagcaaactgataagcgaccggatgaagtacctgctctacgagtttttcaggtcccagttagagttgcaggagggctgttatttgagcttcttggccagtcaataggagacccaaatcatgaagaggaagatatacctattgtgcttaggtcttggcaagcacaaaattttcttgttacaacaatgcatgtcaaaggcccttcatccaatataaatgtgttaggagtgactgaagtgcaggagttgcttcttgctggtggaagccaaacacctagatcagtgcatgaagtaattgcacatttggtcagccgtctttcacgttgggatgacagattattccggaaatatgtatttggggaagcagatgaaattgaattgaaatttgtgaataggagaaatcatgaagatcttaatcttgttagcatcatactgaatcaggaaatcagaaggttagcaacacaggtaatcagggttaaatggtcacttcatgcaagggaagagatattaattgagcttctcagacatttgaggggtaatgccacaagagctattctagagagtattagaaagtgtacgagggacatgttggaagagcaggaagctgtgcgcgggcgcttgttcactattcaggatgttatgcagagcactgtccgtgcatggctacaagatagaagcctcagagttacacataatctggcaatttttggcggcggtggcatggttttatccataatcactggccttttcggaatcaacgtcgatggcatacctggagcgcagaacaccccctacgcttttggtttgttcgcgggacttctcttctttgtagggatcgtcctaatcggcatggggatgctgtatcttgggttacagaatccagttaacagtgagaaggtgaaggtgaggaagctggagctccagcacctggtttcgatgttccagcacgaagcggagcagcatggcaaggtcagggaaggtgttagccggcatggcgcctcgccgagttcatccacggcctctgatgaagggtacattcttatctcctgagatgggagatttatttgctgacgtgcaaggtcttgttttgaaaggctggaactgaagagaagtcgggtaaatggtatacttacacgtgtcttaagaattgtaattgggggatttgacatcgaaacgttggatatgataattgtagcagcagattggctttcctctgttgcttgagatcgcggctgtgatcgtttctta

SEQ ID NO: 198754 - DNA, 1990 bp, Zea Mays
cacgggagggagtttgggttggggaccggatccaccaatttttcttccggcgatgggaaaacgaaagagacctgcatctgattccattctggaagcaccccactccaatccactctacatgtcccacgctcagacccgggtccctcaccgccgtctctcgcgctccggtagatataatttgatgggaagatgaatggtgcagaggaggaggagccgcctcacgtcagcagcatgcccaagacacaagacggtgttaccaagcccagtctagggaaagagcccatcccagggagcgagctctggacggatgggctcatctgtgcttttgagctggtcaagagtcacaggaagcctgttcagcacaaatcatggctggcaactgagcagatacaggagaagggccccactatgtgcacgaggaagcactcaagaaggaatgggcaccagatcactgagccgaaagtggatgagagcattgtgttggaaaacccccagcagactgatttcagtaacgatccttcagtgctcaaagataggccattgtatgctggggagattttggatcataaatgggtgcctattggatggaataggatcgccgagctggtcctgagggttcagtcagactccagctgggagaatgagttgatggagatgagtgatagcgaggatgattacaccgtggctgatcttgcagctccatactggcagcgccctgtgggacctacttggtggtgtcatgtcaccgcaggccatccttcaatagatgcatggttgaatagcgctcactggatgcatcctgccatcagaattgcactgagagatgagagcaaactgataagcgaccggatgaagtacctgctctacgaggtcccagttagagttgcaggagggctgttatttgagcttcttggccagtcaataggagacccaaatcatgaagaggaagatatacctattgtgcttaggtcttggcaagcacaaaattttcttgttacaacaatgcatgtcaaaggcccttcatccaatataaatgtgttaggagtgactgaagtgcaggagttgcttcttgctggtggaagccaaacacctagatcagtgcatgaagtaattgcacatttggtcagccgtctttcacgttgggatgacagattattccggaaatatgtatttggggaagcagatgaaattgaattgaaatttgtgaataggagaaatcatgaagatcttaatcttgttagcatcatactgaatcaggaaatcagaaggttagcaacacaggtaatcagggttaaatggtcacttcatgcaagggaagagatattaattgagcttctcagacatttgaggggtaatgccacaagagctattctagagagtattagaaagtgtacgagggacatgttggaagagcaggaagctgtgcgcgggcgcttgttcactattcaggatgttatgcagagcactgtccgtgcatggctacaagatagaagcctcagagttacacataatctggcaatttttggcggcggtggcatggttttatccataatcactggccttttcggaatcaacgtcgatggcatacctggagcgcagaacaccccctacgcttttgaatccagttaacagtgagaaggtgaaggtgaggaagctggagctccagcacctggtttcgatgttccagcacgaagcggagcagcatggcaaggtcagggaaggtgttagccggcatggcgcctcgccgagttcatccacggcctctgatgaagggtacattcttatctcctgagatgggagatttatttgctgacgtgcaaggtcttgttttgaaaggctggaactgaagagaagtcgggtaaatggtatacttacacgtgtcttaagaattgtaattgggggatttgacatcgaaacgttggatatgataattgtagcagcagattggctttcctctgttgcttgagatcgcggctgtgatcgtttctta

SEQ ID NO: 198755 - DNA, 2029 bp, Zea Mays
cacgggagggagtttgggttggggaccggatccaccaatttttcttccggcgatgggaaaacgaaagagacctgcatctgattccattctggaagcaccccactccaatccactctacatgtcccacgctcagacccgggtccctcaccgccgtctctcgcgctccgaggaggaggagccgcctcacgtcagcagcatgcccaagacacaagacggtgttaccaagcccagtctagggaaagagcccatcccagggagcgagctctggacggatgggctcatctgtgcttttgagctggtcaagagtcacaggaagcctgttcagcacaaatcatggctggcaactgagcagatacaggagaagggccccactatgtgcacgaggaagcactcaagaaggaatgggcaccagatcactgagccgaaagtggatgagagcattgtgttggaaaacccccagcagactgatttcagtaacgatccttcagtgctcaaagataggccattgtatgctggggagattttggatcataaatgggtgcctattggatggaataggatcgccgagctggtcctgagggttcagtcagactccagctgggagaatgagttgatggagatgagtgatagcgaggatgattacaccgtggctgatcttgcagctccatactggcagcgccctgtgggacctacttggtggtgtcatgtcaccgcaggccatccttcaatagatgcatggttgaatagcgctcactggatgcatcctgccatcagaattgcactgagagatgagagcaaactgataagcgaccggatgaagtacctgctctacgaggtcccagttagagttgcaggagggctgttatttgagcttcttggccagtcaataggagacccaaatcatgaagaggaagatatacctattgtgcttaggtcttggcaagcacaaaattttcttgttacaacaatgcatgtcaaaggcccttcatccaatataaatgtgttaggagtgactgaagtgcaggagttgcttcttgctggtggaagccaaacacctagatcagtgcatgaagtaattgcacatttggtcagccgtctttcacgttgggatgacagattattccggaaatatgtatttggggaagcagatgaaattgaattgaaatttgtgaataggagaaatcatgaagatcttaatcttgttagcatcatactgaatcaggaaatcagaaggttagcaacacaggtaatcagggttaaatggtcacttcatgcaagggaagagatattaattgagcttctcagacatttgaggggtaatgccacaagagctattctagagagtattagaaagtgtacgagggacatgttggaagagcaggaagctgtgcgcgggcgcttgttcactattcaggatgttatgcagagcactgtccgtgcatggctacaagatagaagcctcagagttacacataatctggcaatttttggcggcggtggcatggttttatccataatcactggccttttcggaatcaacgtcgatggcatacctggagcgcagaacaccccctacgcttttggtttgttcgcgggacttctcttctttgtagggatcgtcctaatcggcatggggatgctgtatcttgggttacagaatccagttaacagtgagaaggtgaaggtgaggaagctggagctccagcacctggtttcgatgttccagcacgaagcggagcagcatggcaaggtcagggaaggtgttagccggcatggcgcctcgccgagttcatccacggcctctgatgaagggtacattcttatctcctgagatgggagatttatttgctgacgtgcaaggtcttgttttgaaaggctggaactgaagagaagtcgggtaaatggtatacttacacgtgtcttaagaattgtaattgggggatttgacatcgaaacgttggatatgataattgtagcagcagattggctttcctctgttgcttgagatcgcggctgtgatcgtttctta

SEQ ID NO: 198756 - DNA, 2171 bp, Zea Mays
cacgggagggagtttgggttggggaccggatccaccaatttttcttccggcgatgggaaaacgaaagagacctgcatctgattccattctggaagcaccccactccaatccactctacatgtcccacgctcagacccgggtccctcaccgccgtctctcgcgctccggtagatataatttgatgggaagatgaatggtgcagaggaggaggagccgcctcacgtcagcagcatgcccaagacacaagacggtgttaccaagcccagtctagggaaagagcccatcccagggagcgagctctggacggatgggctcatctgtgcttttgagctggtcaagagtcacaggaagcctgttcagcacaaatcatggctggcaactgagcagatacaggagaagggccccactatgtgcacgaggaagcactcaagaaggaatgggcaccagatcactgagccgaaagtggatgagagcattgtgttggaaaacccccagcagactgatttcagtaacgatccttcagtgctcaaagataggccattgtatgctggggagattttggatcataaatgggtgcctattggatggaataggatcgccgagctggtcctgagggttcagtcagactccagctgggagaatgagttgatggagatgagtgatagcgaggatgattacaccgtggctgatcttgcagctccatactggcagcgccctgtgggacctacttggtggtgtcatgtcaccgcaggccatccttcaatagatgcatggttgaatagcgctcactggatgcatcctgccatcagaattgcactgagagatgagagcaaactgataagcgaccggatgaagtacctgctctacgaggtcccagttagagttgcaggagggctgttatttgagcttcttggccagtcaataggagacccaaatcatgaagaggaagatatacctattgtgcttaggtcttggcaagcacaaaattttcttgttacaacaatgcatgtcaaaggcccttcatccaatataaatgtgttaggagtgactgaagtgcaggagttgcttcttgctggtggaagccaaacacctagatcagtgcatgaagtaattgcacatttggtcagccgtctttcacgttgggatgacagattattccggaaatatgtatttggggaagcagatgaaattgaattgaaatttgtgaataggagaaatcatgaagatcttaatcttgttagcatcatactgaatcaggaaatcagaaggttagcaacacaggactgtatctggtctacaagggctctactgatcatctaatgtgtagctcaacactcaacagcctaccagatgtagtattatattcttttcttgcttcacaaaataatgtaatcagggttaaatggtcacttcatgcaagggaagagatattaattgagcttctcagacatttgaggggtaatgccacaagagctattctagagagtattagaaagtgtacgagggacatgttggaagagcaggaagctgtgcgcgggcgcttgttcactattcaggatgttatgcagagcactgtccgtgcatggctacaagatagaagcctcagagttacacataatctggcaatttttggcggcggtggcatggttttatccataatcactggccttttcggaatcaacgtcgatggcatacctggagcgcagaacaccccctacgcttttggtttgttcgcgggacttctcttctttgtagggatcgtcctaatcggcatggggatgctgtatcttgggttacagaatccagttaacagtgagaaggtgaaggtgaggaagctggagctccagcacctggtttcgatgttccagcacgaagcggagcagcatggcaaggtcagggaaggtgttagccggcatggcgcctcgccgagttcatccacggcctctgatgaagggtacattcttatctcctgagatgggagatttatttgctgacgtgcaaggtcttgttttgaaaggctggaactgaagagaagtcgggtaaatggtatacttacacgtgtcttaagaattgtaattgggggatttgacatcgaaacgttggatatgataattgtagcagcagattggctttcctctgttgcttgagatcgcggctgtgatcgtttctta

SEQ ID NO: 198757 - DNA, 2102 bp, Zea Mays
cacgggagggagtttgggttggggaccggatccaccaatttttcttccggcgatgggaaaacgaaagagacctgcatctgattccattctggaagcaccccactccaatccactctacatgtcccacgctcagacccgggtccctcaccgccgtctctcgcgctccgcgtgcggtggacggggtttgccagcgacttcaagaaaggtagatataatttgatgggaagatgaatggtgcagaggaggaggagccgcctcacgtcagcagcatgcccaagacacaagacggtgttaccaagcccagtctagggaaagagcccatcccagggagcgagctctggacggatgggctcatctgtgcttttgagctggtcaagagtcacaggaagcctgttcagcacaaatcatggctggcaactgagcagatacaggagaagggccccactatgtgcacgaggaagcactcaagaaggaatgggcaccagatcactgagccgaaagtggatgagagcattgtgttggaaaacccccagcagactgatttcagtaacgatccttcagtgctcaaagataggccattgtatgctggggagattttggatcataaatgggtgcctattggatggaataggatcgccgagctggtcctgagggttcagtcagactccagctgggagaatgagttgatggagatgagtgatagcgaggatgattacaccgtggctgatcttgcagctccatactggcagcgccctgtgggacctacttggtggtgtcatgtcaccgcaggccatccttcaatagatgcatggttgaatagcgctcactggatgcatcctgccatcagaattgcactgagagatgagagcaaactgataagcgaccggatgaagtacctgctctacgaggtcccagttagagttgcaggagggctgttatttgagcttcttggccagtcaataggagacccaaatcatgaagaggaagatatacctattgtgcttaggtcttggcaagcacaaaattttcttgttacaacaatgcatgtcaaaggcccttcatccaatataaatgtgttaggagtgactgaagtgcaggagttgcttcttgctggtggaagccaaacacctagatcagtgcatgaagtaattgcacatttggtcagccgtctttcacgttgggatgacagattattccggaaatatgtatttggggaagcagatgaaattgaattgaaatttgtgaataggagaaatcatgaagatcttaatcttgttagcatcatactgaatcaggaaatcagaaggttagcaacacaggtaatcagggttaaatggtcacttcatgcaagggaagagatattaattgagcttctcagacatttgaggggtaatgccacaagagctattctagagagtattagaaagtgtacgagggacatgttggaagagcaggaagctgtgcgcgggcgcttgttcactattcaggatgttatgcagagcactgtccgtgcatggctacaagatagaagcctcagagttacacataatctggcaatttttggcggcggtggcatggttttatccataatcactggccttttcggaatcaacgtcgatggcatacctggagcgcagaacaccccctacgcttttggtttgttcgcgggacttctcttctttgtagggatcgtcctaatcggcatggggatgctgtatcttgggttacagaatccagttaacagtgagaaggtgaaggtgaggaagctggagctccagcacctggtttcgatgttccagcacgaagcggagcagcatggcaaggtcagggaaggtgttagccggcatggcgcctcgccgagttcatccacggcctctgatgaagggtacattcttatctcctgagatgggagatttatttgctgacgtgcaaggtcttgttttgaaaggctggaactgaagagaagtcgggtaaatggtatacttacacgtgtcttaagaattgtaattgggggatttgacatcgaaacgttggatatgataattgtagcagcagattggctttcctctgttgcttgagatcgcggctgtgatcgtttctta

SEQ ID NO: 198758 - DNA, 2037 bp, Zea Mays
cacgggagggagtttgggttggggaccggatccaccaatttttcttccggcgatgggaaaacgaaagagacctgcatctgattccattctggaagcaccccactccaatccactctacatgtcccacgctcagacccgggtccctcaccgccgtctctcgcgctccgaggaggaggagccgcctcacgtcagcagcatgcccaagacacaagacggtgttaccaagcccagtctagggaaagagcccatcccagggagcgagctctggacggatgggctcatctgtgcttttgagctggtcaagagtcacaggaagcctgttcagcacaaatcatggctggcaactgagcagatacaggagaagggccccactatgtgcacgaggaagcactcaagaaggaatgggcaccagatcactgagccgaaagtggatgagagcattgtgttggaaaacccccagcagactgatttcagtaacgatccttcagtgctcaaagataggccattgtatgctggggagattttggatcataaatgggtgcctattggatggaataggatcgccgagctggtcctgagggttcagtcagactccagctgggagaatgagttgatggagatgagtgatagcgaggatgattacaccgtggctgatcttgcagctccatactggcagcgccctgtgggacctacttggtggtgtcatgtcaccgcaggccatccttcaatagatgcatggttgaatagcgctcactggatgcatcctgccatcagaattgcactgagagatgagagcaaactgataagcgaccggatgaagtacctgctctacgagtttttcaggtcccagttagagttgcaggagggctgttatttgagcttcttggccagtcaataggagacccaaatcatgaagaggaagatatacctattgtgcttaggtcttggcaagcacaaaattttcttgttacaacaatgcatgtcaaaggcccttcatccaatataaatgtgttaggagtgactgaagtgcaggagttgcttcttgctggtggaagccaaacacctagatcagtgcatgaagtaattgcacatttggtcagccgtctttcacgttgggatgacagattattccggaaatatgtatttggggaagcagatgaaattgaattgaaatttgtgaataggagaaatcatgaagatcttaatcttgttagcatcatactgaatcaggaaatcagaaggttagcaacacaggtaatcagggttaaatggtcacttcatgcaagggaagagatattaattgagcttctcagacatttgaggggtaatgccacaagagctattctagagagtattagaaagtgtacgagggacatgttggaagagcaggaagctgtgcgcgggcgcttgttcactattcaggatgttatgcagagcactgtccgtgcatggctacaagatagaagcctcagagttacacataatctggcaatttttggcggcggtggcatggttttatccataatcactggccttttcggaatcaacgtcgatggcatacctggagcgcagaacaccccctacgcttttggtttgttcgcgggacttctcttctttgtagggatcgtcctaatcggcatggggatgctgtatcttgggttacagaatccagttaacagtgagaaggtgaaggtgaggaagctggagctccagcacctggtttcgatgttccagcacgaagcggagcagcatggcaaggtcagggaaggtgttagccggcatggcgcctcgccgagttcatccacggcctctgatgaagggtacattcttatctcctgagatgggagatttatttgctgacgtgcaaggtcttgttttgaaaggctggaactgaagagaagtcgggtaaatggtatacttacacgtgtcttaagaattgtaattgggggatttgacatcgaaacgttggatatgataattgtagcagcagattggctttcctctgttgcttgagatcgcggctgtgatcgtttctta

SEQ ID NO: 198759 - DNA, 3227 bp, Zea Mays
tgcgatgcaacgaacagcgtaaacgggttgaaatgagttctatgggctgggtcaccgggtggaagtggaaatggctttcaatagctagcgggtcggggcggttgggttcacaatgcgggttagggcgggtcgggctgggttaccctgggcacctcgggtcgctctctgctgttcgctcccagctcccgcagaaagagaaagacaacgccgccgctcgccgccgtcgttccccggcgacctcctccaacgaagtccgttgatccagatatggatcacttggacgaacatgacagtgatgacatgaatgtaggggtagcttcagatggcccctccagactcagaaagaagaggtccaaggtttgggacgactacaagcccatcattgtagatggagcaattcagagcgcggaatgtcgctactgtcatattcacatgagttgcagaggtgctgatggtcaatccaatgggacaagccatttgtggcgacaccagaaaatttgccgagcaaaagatgggatttttccaaacccacttcaacaggacgcatacttgccatatgtggtgaatgaagtagacccgctggaccaaattcttccagattcacttgatgagattaatttagtgactcaaagtgagaatagcaaattcaggtcaaaggtttggaaggattttataccattctatgttcgagggagagtccagggtgctgactgtgttcattgccacaagcgattcagtgcagataaaggtagaagccatttgaaccggcacactcaaacttgtccggcacggagtggaaatagcctaaatcaccagaaaggtgtgttgtaccagtctagtctaccgagttctaaatctagctttcaagatgagctttcaccagcattgacaaatggcaaagttcagattgcagaatatgctagtaagttcctcaaagacagccgaggcgatgcaagccttgtggaacatcatgttctagctttaccagcaatggatgatatgaatccctcagagcagaatacttcatcagctcaggctgctactgatataaccaggaaacctgaccaagaagcatcttatcatgagttaactagaatgattatttcacatggctatcccttgtcgattgtcgagcatgaagaaatgagaaggtttgcaaagatcctaaaccccacatttaacatggcttcaagcattgatatagaagagtattcaactcttttgtttcagaaagaaaagtctgagcttaaggaaagaattgcacttttgtcccatcgggtttccttgtcagcaagtgtttgggttcctcatggagctgaagcctcagtaaagtatctctgtttggcagtgcattttgtagattcaaactggaaacttcaaaggaaaaccatcaaatttggtgtgttctggtcctcatctactagtttggaaaggatgatacagtttaaggaggcctgtgtgctagattctgatattggaccatttaatgtcatacaggaagctataagagattggaatcttgatcagaagcatttcagcttgacatctggtagtgaaattagaaatgacgaggggacctcaaaactgatggacttgctcatccaaaggaaatgccttcctattagaggcaagctatacaatatcgcttgtgtgaatgatgtgcttaacggcattgtctcaaaaggtcaaccggtgctttatcatgttggtaacatactagagaaatttattcaggcacaaatgtcctcatctctgactcgacagcaacttctagaagttgttgcacatatgggattgaagtgcccacaggaagaagctaaatggtggcacataatttactttaggcttgaagttcttctgcatttcaagaaggcatttccctcggaagacttgttatctgcagaagataacaaaacttttgagtctgtttgcaggatactcagggctttttatcgcgctgttgaagtgatttgtggtcctgtttgccccacagcaaatatgtacttcaatgaactgtggaaagttagaactgttttgcaagaagaagcatcaactgatcgtgctgcacttgctaacatggttttggagatgctggaagcattcaatgagtattggaaaaattcatatgtgtggctgtcaatacctgttgttcttgatcccagattcaaaattacttttattgagttccgtttaaagcgagcttttggtaccaatgcagaaaaacatgtatctgccattcgtgatacaataagggagctgtttcatgaatattgtggactttcagataacttgggtgccgatacatcaactcgtgaagctcatgatgttgagttgtatggatttgacagtgattcattggaagattgggatgagcatcttaatgcacagacaaggaaccaacaattgacagaacttgacaactatctagaagatggtcttgtcccaaggaaggatgattttgatatcctgaactggtggatgagtaattgtacaaagtatccaaccctttcagttatggcacgcgatgtcctggcgattccagcttctgccgataattttgaggctgcgttaagtggtgaggcaaatgtgatacataagcaatggagtacattaagtatcaaaacaattgaggctcttgtatgtacccgagattggggtaaatagaatgaagtttacaagcagttcataaccatagtgcttctaacccgggaatacaggatgatacagaaagagtacaccagccatttattgtgcagtatatcagacatctcgcagccaactgtgccaatgacgtgctgctgctttagcctgattgagaattcttgtacaacgtctctagaaagccatttgatgactgatgttctgttcatgttatcctggcgtgctggatgtgctgtgcccccttcaaaagctgaattttggggcaaccaccagtgctcaaatttgatctacgggtcctgtggctgacatcaccatgaaatgattgctggcttcaaatcacatttaggacaatgtggttggttaaacgttgcattaatcttgagtagcatatcaatactgcaaaagagcggaagaattagaatacctttcgctcaaggtctatattcatataggaatgtaaatattactgtcaccagtaagacatcttacaccttccttctgttcaaatcaatagatgcccattccgctggcaaacttttttctcactgaactctaaagtctcaacg

SEQ ID NO: 198760 - DNA, 3034 bp, Zea Mays
ctcagccagcagaccaaagcagaccgccctcggcctccacgaactgtggcactgcgcccacagcagaccatattgatatggatcacttggacgaacatgacagtgatgacatgaatgtaggggtagcttcagatggcccctccagactcagaaagaagaggtccaaggtttgggacgactacaagcccatcattgtagatggagcaattcagagcgcggaatgtcgctactgtcatattcacatgagttgcagaggtgctgatggtcaatccaatgggacaagccatttgtggcgacaccagaaaatttgccgagcaaaagatgggatttttccaaacccacttcaacaggacgcatacttgccatatgtggtgaatgaagtagacccgctggaccaaattcttccagattcacttgatgagattaatttagtgactcaaagtgagaatagcaaattcaggtcaaaggtttggaaggattttataccattctatgttcgagggagagtccagggtgctgactgtgttcattgccacaagcgattcagtgcagataaaggtagaagccatttgaaccggcacactcaaacttgtccggcacggagtggaaatagcctaaatcaccagaaaggtgtgttgtaccagtctagtctaccgagttctaaatctagctttcaagatgagctttcaccagcattgacaaatggcaaagttcagattgcagaatatgctagtaagttcctcaaagacagccgaggcgatgcaagccttgtggaacatcatgttctagctttaccagcaatggatgatatgaatccctcagagcagaatacttcatcagctcaggctgctactgatataaccaggaaacctgaccaagaagcatcttatcatgagttaactagaatgattatttcacatggctatcccttgtcgattgtcgagcatgaagaaatgagaaggtttgcaaagatcctaaaccccacatttaacatggcttcaagcattgatatagaagagtattcaactcttttgtttcagaaagaaaagtctgagcttaaggaaagaattgcacttttgtcccatcgggtttccttgtcagcaagtgtttgggttcctcatggagctgaagcctcagtaaagtatctctgtttggcagtgcattttgtagattcaaactggaaacttcaaaggaaaaccatcaaatttggtgtgttctggtcctcatctactagtttggaaaggatgatacagtttaaggaggcctgtgtgctagattctgatattggaccatttaatgtcatacaggaagctataagagattggaatcttgatcagaagcatttcagcttgacatctggtagtgaaattagaaatgacgaggggacctcaaaactgatggacttgctcatccaaaggaaatgccttcctattagaggcaagctatacaatatcgcttgtgtgaatgatgtgcttaacggcattgtctcaaaaggtcaaccggtgctttatcatgttggtaacatactagagaaatttattcaggcacaaatgtcctcatctctgactcgacagcaacttctagaagttgttgcacatatgggattgaagtgcccacaggaagaagctaaatggtggcacataatttactttaggcttgaagttcttctgcatttcaagaaggcatttccctcggaagacttgttatctgcagaagataacaaaacttttgagtctgtttgcaggatactcagggctttttatcgcgctgttgaagtgatttgtggtcctgtttgccccacagcaaatatgtacttcaatgaactgtggaaagttagaactgttttgcaagaagaagcatcaactgatcgtgctgcacttgctaacatggttttggagatgctggaagcattcaatgagtattggaaaaattcatatgtgtggctgtcaatacctgttgttcttgatcccagattcaaaattacttttattgagttccgtttaaagcgagcttttggtaccaatgcagaaaaacatgtatctgccattcgtgatacaataagggagctgtttcatgaatattgtggactttcagataacttgggtgccgatacatcaactcgtgaagctcatgatgttgagttgtatggatttgacagtgattcattggaagattgggatgagcatcttaatgcacagacaaggaaccaacaattgacagaacttgacaactatctagaagatggtcttgtcccaaggaaggatgattttgatatcctgaactggtggatgagtaattgtacaaagtatccaaccctttcagttatggcacgcgatgtcctggcgattccagcttctgccgataattttgaggctgcgttaagtggtgaggcaaatgtgatacataagcaatggagtacattaagtatcaaaacaattgaggctcttgtatgtacccgagattggggtaaatagaatgtttacaagcagttcataaccatagtgcttctaacccgggaatacaggatgatacagaaagagtacaccagccatttattgtgcagtatatcagacatctcgcagccaactgtgccaatgacgtgctgctgctttagcctgattgagaattcttgtacaacgtctctagaaagccatttgatgactgatgttctgttcatgttatcctggcgtgctggatgtgctgtgcccccttcaaaagctgaattttggggcaaccaccagtgctcaaatttgatctacgggtcctgtggctgacatcaccatgaaatgattgctggcttcaaatcacatttaggacaatgtggttggttaaacgttgcattaatcttgagtagcatatcaatactgcaaaagagcggaagaattagaatacctttcgctcaaggtctatattcatataggaatgtaaatattactgtcaccagtaagacatcttacaccttccttctgttcaaatcaatagatgcccattccgctggcaaacttttttctcactgaactctaaagtctcaacg

SEQ ID NO: 198761 - DNA, 1809 bp, Zea Mays
  misc_feature (1)..(2): n is a, c, g, or t
nnaagctttacaggcctggatctgttggttttgtgtctaaatcgggtggcatgtcaaatgagatgtacagcaccattgccagagtgacagatggtatttatgaaggaattgcaattggaggggatgttttccctggatcaactctgtcagaccacattctgcgttttaataacataccacaggttaaaatgatggttgttcttggggagcttggtggaaaagacgagtattcacttgtggaagcattgaaacaaggaaaggtccagaaaccagttgttgcatgggttagtgggacatgtgcacgtctattcaaatcagaagtgcagtttggccatgctggtgccaagagtggtggtgagttagaatcagcacaagctaagaatcaggcactaaaggaagctggtgcaattgtgcctacttcatatgaagctcttgaaagtgcaattaaggaaacatttgacaaactgtttgaggaaggaaaaatttctcctgttactgaaattacaccgcctctcattcctgaggaccttaaaactgcaatcaagagtgggaaggtccgagctcctacccacatcatctccactatttctgatgacagaggcgatgaaccatgctatgctggtgtccctatgtctacaattattgaacagggttatggagttggtgatgttatttctcttttgtggttcaagcgcagccttcctcgctattgcactcagtttattgagttactgctagggccggaaaggaccttgtttccagcttggtgtctggattattgacgattggtccccgtttcggtggagcaattgatgatgcagcccgatacttcaaagatgcatgtgataggagcctcacgccatacgagtttgttgaaggcatgaaaaagaagggaatccgtgtgcctgggattggtcacaggattaagagcagagacaacagggataagcgtgtgcagcttctacagaaatatgctcacacacatttcccttcagtcaagtacatggaatacgctgttcaggttgagacctacaccttgtcaaaagccaacaatttggttatgaatgtcgatggtgcgatcgggtcccttttcttggatcttctatctggaagtggaatgttcaccaaacaggagatcgatgagattgtggagatcggttatctcaatgggctctttgtgcttgcacgatcaattggcctgatcgggcataccttcgaccagaagaggctcaagcagccactctaccgtcacccatgggaggatgtactttacaccaagtgagaaagccattctttgcaaggcataataaagtattattatcgcctagagcttccagttgcctgtacacttcattaaatcgagcacttgcaaaaaagaaagccagagagagaggaagacgaacatcactagtcagcactagattgtgtgttttatgttgagttgcaaattcaggtcctgatttttgtcctgccatgaaccgttaggcgatattgtattggaaaggatgcttcctttattgtttcacgatatatggcctcagaatagaaatttccattaaaaatgaactctgatttgttcgtcgataaagtgcatttgtacagacacgcattacgaaactaggcattttcaatagcatattaatccagaaaaggatacaagttggtgacaacaaaaagatacacgtgtgaacttagtaagattttatgatgaatgtgagcatagtactgggaaatgtgacatgaaaccaaacaaaagaaatatatccaatagcagatattgtgcgagtcgatgtaaccgtggttgatgca

SEQ ID NO: 198762 - DNA, 1759 bp, Zea Mays
  misc_feature (1)..(2): n is a, c, g, or t
nnaagctttacaggcctggatctgttggttttgtgtctaaatcgggtggcatgtcaaatgagatgtacagcaccattgccagagtgacagatggtatttatgaaggaattgcaattggaggggatgttttccctggatcaactctgtcagaccacattctgcgttttaataacataccacaggttaaaatgatggttgttcttggggagcttggtggaaaagacgagtattcacttgtggaagcattgaaacaaggaaaggtccagaaaccagttgttgcatgggttagtgggacatgtgcacgtctattcaaatcagaagtgcagtttggccatgctggtgccaagagtggtggtgagttagaatcagcacaagctaagaatcaggcactaaaggaagctggtgcaattgtgcctacttcatatgaagctcttgaaagtgcaattaaggaaacatttgacaaactgtttgaggaaggaaaaatttctcctgttactgaaattacaccgcctctcattcctgaggaccttaaaactgcaatcaagagtgggaaggtccgagctcctacccacatcatctccactatttctgatgacagaggcgatgaaccatgctatgctggtgtccctatgtctacaattattgaacagggttatggagttggtgatgttatttctcttttgtggttcaagcgcagccttcctcgctattgcactcagtttattgagatatgcgtcatgctttgtgctgaccatggtccctgtgtatctggtgctcataactctatagttactgctagggccggaaaggaccttgtttccagcttggtgtctggattattgacgattggtccccgtttcggtggagcaattgatgatgcagcccgatacttcaaagatgcatgtgataggagcctcacgccatacgagtttgttgaaggcatgaaaaagaagggaatccgtgtgcctgggattggtcacaggattaagagcagagacaacagggataagcgtgtgcagcttctacagaaatatgctcacacacatttcccttcagtcaagtacatggaatacgctgttcaggagatcgatgagattgtggagatcggttatctcaatgggctctttgtgcttgcacgatcaattggcctgatcgggcataccttcgaccagaagaggctcaagcagccactctaccgtcacccatgggaggatgtactttacaccaagtgagaaagccattctttgcaaggcataataaagtattattatcgcctagagcttccagttgcctgtacacttcattaaatcgagcacttgcaaaaaagaaagccagagagagaggaagacgaacatcactagtcagcactagattgtgtgttttatgttgagttgcaaattcaggtcctgatttttgtcctgccatgaaccgttaggcgatattgtattggaaaggatgcttcctttattgtttcacgatatatggcctcagaatagaaatttccattaaaaatgaactctgatttgttcgtcgataaagtgcatttgtacagacacgcattacgaaactaggcattttcaatagcatattaatccagaaaaggatacaagttggtgacaacaaaaagatacacgtgtgaacttagtaagattttatgatgaatgtgagcatagtactgggaaatgtgacatgaaaccaaacaaaagaaatatatccaatagcagatattgtgcgagtcgatgtaaccgtggttgatgca

SEQ ID NO: 198763 - DNA, 709 bp, Zea Mays
  misc_feature (1)..(1): n is a, c, g, or t
naagctttacaggcctggatctgttggttttgtgtctaaatcgggtggcatgtcaaatgagatgtacagcaccattgccagagtgacagatggtatttatgaaggaattgcaattggaggggatgttttccctggatcaactctgtcagaccacattctgcgttttaataacataccacaggttaaaatgatggttgttcttggggagcttggtggaaaagacgagtattcacttgtggaagcattgaaacaaggaaaggtccagaaaccagttgttgcatgggttagtgggacatgtgcacgtctattcaaatcagaagtgcagtttggccatgctggtgccaagagtggtggtgagttagaatcagcacaagctaagaatcaggcactaaaggaagctggtgcaattgtgcctacttcatatgaagctcttgaaagtgcaattaaggaaacatttgacaaactgtttgaggaaggaaaaatttctcctgttactgaaattacaccgcctctcattcctgaggaccttaaaactgcaatcaagagtgggaaggtccgagctcctacccacatcatctccactatttctgatgacagaggcgatgaaccatgctatgctggtgtccctatgtctacaattattgaacagggttatggagttgagttcaagctgtagtgcctgttgataatcctgaacaacagtggttat

SEQ ID NO: 198764 - DNA, 1857 bp, Zea Mays
  misc_feature (1)..(1): n is a, c, g, or t
naagctttacaggcctggatctgttggttttgtgtctaaatcgggtggcatgtcaaatgagatgtacagcaccattgccagagtgacagatggtatttatgaaggaattgcaattggaggggatgttttccctggatcaactctgtcagaccacattctgcgttttaataacataccacaggttaaaatgatggttgttcttggggagcttggtggaaaagacgagtattcacttgtggaagcattgaaacaaggaaaggtccagaaaccagttgttgcatgggttagtgggacatgtgcacgtctattcaaatcagaagtgcagtttggccatgctggtgccaagagtggtggtgagttagaatcagcacaagctaagaatcaggcactaaaggaagctggtgcaattgtgcctacttcatatgaagctcttgaaagtgcaattaaggaaacatttgacaaactgtttgaggaaggaaaaatttctcctgttactgaaattacaccgcctctcattcctgaggaccttaaaactgcaatcaagagtgggaaggtccgagctcctacccacatcatctccactatttctgatgacagaggcgatgaaccatgctatgctggtgtccctatgtctacaattattgaacagggttatggagttggtgatgttatttctcttttgtggttcaagcgcagccttcctcgctattgcactcagtttattgagatatgcgtcatgctttgtgctgaccatggtccctgtgtatctggtgctcataactctatagttactgctagggccggaaaggaccttgtttccagcttggtgtctggattattgacgattggtccccgtttcggtggagcaattgatgatgcagcccgatacttcaaagatgcatgtgataggagcctcacgccatacgagtttgttgaaggcatgaaaaagaagggaatccgtgtgcctgggattggtcacagagacaacagggataagcgtgtgcagcttctacagaaatatgctcacacacatttcccttcagtcaagtacatggaatacgctgttcaggttgagacctacaccttgtcaaaagccaacaatttggttatgaatgtcgatggtgcgatcgggtcccttttcttggatcttctatctggaagtggaatgttcaccaaacaggagatcgatgagattgtggagatcggttatctcaatgggctctttgtgcttgcacgatcaattggcctgatcgggcataccttcgaccagaagaggctcaagcagccactctaccgtcacccatgggaggatgtactttacaccaagtgagaaagccattctttgcaaggcataataaagtattattatcgcctagagcttccagttgcctgtacacttcattaaatcgagcacttgcaaaaaagaaagccagagagagaggaagacgaacatcactagtcagcactagattgtgtgttttatgttgagttgcaaattcaggtcctgatttttgtcctgccatgaaccgttaggcgatattgtattggaaaggatgcttcctttattgtttcacgatatatggcctcagaatagaaatttccattaaaaatgaactctgatttgttcgtcgataaagtgcatttgtacagacacgcattacgaaactaggcattttcaatagcatattaatccagaaaaggatacaagttggtgacaacaaaaagatacacgtgtgaacttagtaagattttatgatgaatgtgagcatagtactgggaaatgtgacatgaaaccaaacaaaagaaatatatccaatagcagatattgtgcgagtcgatgtaaccgtggttgatgca

SEQ ID NO: 198765 - DNA, 1773 bp, Zea Mays
  misc_feature (1)..(1): n is a, c, g, or t
naagctttacaggcctggatctgttggttttgtgtctaaatcgggtggcatgtcaaatgagatgtacagcaccattgccagagtgacagatggtatttatgaaggaattgcaattggaggggatgttttccctggatcaactctgtcagaccacattctgcgttttaataacataccacaggttaaaatgatggttgttcttggggagcttggtggaaaagacgagtattcacttgtggaagcattgaaacaaggaaaggtccagaaaccagttgttgcatgggttagtgggacatgtgcacgtctattcaaatcagaagtgcagtttggccatgctggtgccaagagtggtggtgagttagaatcagcacaagctaagaatcaggcactaaaggaagctggtgcaattgtgcctacttcatatgaagctcttgaaagtgcaattaaggaaacatttgacaaactgtttgaggaaggaaaaatttctcctgttactgaaattacaccgcctctcattcctgaggaccttaaaactgcaatcaagagtgggaagggttatggagttggtgatgttatttctcttttgtggttcaagcgcagccttcctcgctattgcactcagtttattgagatatgcgtcatgctttgtgctgaccatggtccctgtgtatctggtgctcataactctatagttactgctagggccggaaaggaccttgtttccagcttggtgtctggattattgacgattggtccccgtttcggtggagcaattgatgatgcagcccgatacttcaaagatgcatgtgataggagcctcacgccatacgagtttgttgaaggcatgaaaaagaagggaatccgtgtgcctgggattggtcacaggattaagagcagagacaacagggataagcgtgtgcagcttctacagaaatatgctcacacacatttcccttcagtcaagtacatggaatacgctgttcaggttgagacctacaccttgtcaaaagccaacaatttggttatgaatgtcgatggtgcgatcgggtcccttttcttggatcttctatctggaagtggaatgttcaccaaacaggagatcgatgagattgtggagatcggttatctcaatgggctctttgtgcttgcacgatcaattggcctgatcgggcataccttcgaccagaagaggctcaagcagccactctaccgtcacccatgggaggatgtactttacaccaagtgagaaagccattctttgcaaggcataataaagtattattatcgcctagagcttccagttgcctgtacacttcattaaatcgagcacttgcaaaaaagaaagccagagagagaggaagacgaacatcactagtcagcactagattgtgtgttttatgttgagttgcaaattcaggtcctgatttttgtcctgccatgaaccgttaggcgatattgtattggaaaggatgcttcctttattgtttcacgatatatggcctcagaatagaaatttccattaaaaatgaactctgatttgttcgtcgataaagtgcatttgtacagacacgcattacgaaactaggcattttcaatagcatattaatccagaaaaggatacaagttggtgacaacaaaaagatacacgtgtgaacttagtaagattttatgatgaatgtgagcatagtactgggaaatgtgacatgaaaccaaacaaaagaaatatatccaatagcagatattgtgcgagtcgatgtaaccgtggttgatgca

SEQ ID NO: 198766 - DNA, 1811 bp, Zea Mays
  misc_feature (1)..(1): n is a, c, g, or t
naagctttacaggcctggatctgttggttttgtgtctaaatcgggtggcatgtcaaatgagatgtacagcaccattgccagagtgacagatggtatttatgaaggaattgcaattggaggggatgttttccctggatcaactctgtcagaccacattctgcgttttaataacataccacaggttaaaatgatggttgttcttggggagcttggtggaaaagacgagtattcacttgtggaagcattgaaacaaggaaaggtccagaaaccagttgttgcatgggttagtgggacatgtgcacgtctattcaaatcagaagtgcagtttggccatgctggtgccaagagtggtggtgagttagaatcagcacaagctaagaatcaggcactaaaggaagctggtgcaattgtgcctacttcatatgaagctcttgaaagtgcaattaaggaaacatttgacaaactgtttgaggaaggaaaaatttctcctgttactgaaattacaccgcctctcattcctgaggaccttaaaactgcaatcaagagtgggaagggttatggagttggtgatgttatttctcttttgtggttcaagcgcagccttcctcgctattgcactcagtttattgagttactgctagggccggaaaggaccttgtttccagcttggtgtctggattattgacgattggtccccgtttcggtggagcaattgatgatgcagcccgatacttcaaagatgcatgtgataggagcctcacgccatacgagtttgttgaaggcatgaaaaagaagggaatccgtgtgcctgggattggtcacaggtatatagcacccatgttcttttcatgagtcaatcataaatgatctttgcacctgaatggttttgtgagacagaaagttcacttgcctgtgtcaattaggattaagagcagagacaacagggataagcgtgtgcagcttctacagaaatatgctcacacacatttcccttcagtcaagtacatggaatacgctgttcaggttgagacctacaccttgtcaaaagccaacaatttggttatgaatgtcgatggtgcgatcgggtcccttttcttggatcttctatctggaagtggaatgttcaccaaacaggagatcgatgagattgtggagatcggttatctcaatgggctctttgtgcttgcacgatcaattggcctgatcgggcataccttcgaccagaagaggctcaagcagccactctaccgtcacccatgggaggatgtactttacaccaagtgagaaagccattctttgcaaggcataataaagtattattatcgcctagagcttccagttgcctgtacacttcattaaatcgagcacttgcaaaaaagaaagccagagagagaggaagacgaacatcactagtcagcactagattgtgtgttttatgttgagttgcaaattcaggtcctgatttttgtcctgccatgaaccgttaggcgatattgtattggaaaggatgcttcctttattgtttcacgatatatggcctcagaatagaaatttccattaaaaatgaactctgatttgttcgtcgataaagtgcatttgtacagacacgcattacgaaactaggcattttcaatagcatattaatccagaaaaggatacaagttggtgacaacaaaaagatacacgtgtgaacttagtaagattttatgatgaatgtgagcatagtactgggaaatgtgacatgaaaccaaacaaaagaaatatatccaatagcagatattgtgcgagtcgatgtaaccgtggttgatgca

SEQ ID NO: 198767 - DNA, 1822 bp, Zea Mays
aagctttacaggcctggatctgttggttttgtgtctaaatcgggtggcatgtcaaatgagatgtacagcaccattgccagagtgacagatggtatttatgaaggaattgcaattggaggggatgttttccctggatcaactctgtcagaccacattctgcgttttaataacataccacaggttaaaatgatggttgttcttggggagcttggtggaaaagacgagtattcacttgtggaagcattgaaacaaggaaaggtccagaaaccagttgttgcatgggttagtgggacatgtgcacgtctattcaaatcagaagtgcagtttggccatgctggtgccaagagtggtggtgagttagaatcagcacaagctaagaatcaggcactaaaggaagctggtgcaattgtgcctacttcatatgaagctcttgaaagtgcaattaaggaaacatttgacaaactgtttgaggaaggaaaaatttctcctgttactgaaattacaccgcctctcattcctgaggaccttaaaactgcaatcaagagtgggaaggcgatgaaccatgctatgctggtgtccctatgtctacaattattgaacagggttatggagttggtgatgttatttctcttttgtggttcaagcgcagccttcctcgctattgcactcagtttattgagatatgcgtcatgctttgtgctgaccatggtccctgtgtatctggtgctcataactctatagttactgctagggccggaaaggaccttgtttccagcttggtgtctggattattgacgattggtccccgtttcggtggagcaattgatgatgcagcccgatacttcaaagatgcatgtgataggagcctcacgccatacgagtttgttgaaggcatgaaaaagaagggaatccgtgtgcctgggattggtcacaggattaagagcagagacaacagggataagcgtgtgcagcttctacagaaatatgctcacacacatttcccttcagtcaagtacatggaatacgctgttcaggttgagacctacaccttgtcaaaagccaacaatttggttatgaatgtcgatggtgcgatcgggtcccttttcttggatcttctatctggaagtggaatgttcaccaaacaggagatcgatgagattgtggagatcggttatctcaatgggctctttgtgcttgcacgatcaattggcctgatcgggcataccttcgaccagaagaggctcaagcagccactctaccgtcacccatgggaggatgtactttacaccaagtgagaaagccattctttgcaaggcataataaagtattattatcgcctagagcttccagttgcctgtacacttcattaaatcgagcacttgcaaaaaagaaagccagagagagaggaagacgaacatcactagtcagcactagattgtgtgttttatgttgagttgcaaattcaggtcctgatttttgtcctgccatgaaccgttaggcgatattgtattggaaaggatgcttcctttattgtttcacgatatatggcctcagaatagaaatttccattaaaaatgaactctgatttgttcgtcgataaagtgcatttgtacagacacgcattacgaaactaggcattttcaatagcatattaatccagaaaaggatacaagttggtgacaacaaaaagatacacgtgtgaacttagtaagattttatgatgaatgtgagcatagtactgggaaatgtgacatgaaaccaaacaaaagaaatatatccaatagcagatattgtgcgagtcgatgtaaccgtggttgatgca

SEQ ID NO: 198768 - DNA, 1489 bp, Zea Mays
gtttgcattctacctgcttcaggaatatgggctgggctgcggggttatgcagttgacagagcgtgcctgcccagcgtgctggcggctggcccgcgcgacttgcaagtctagacgtgggccagctcggtgctaaagagaagattaccgttgcgacaatgccaccccttccctgcctactctactcccggtaccggagctatccaattcccttcccacccagaccgcgatccctaaccctacccaatgtcctcgccgccgccggcttcgcccatggccgccgagaacgaggcctgcgactgggcggagatgccgtcggacgcgctcgcggccgtgttcgcgaagctggacgtggccgagatcctgtccggcgccgggctggtctgccgctcgtggcgccgtctcgcggcctcggaccctacgctgtggcgccgcgtcgacatgtgctaccagggggaccagctgcagaccgaggaggtcgaggccatggcgcgcgccgcggtcgaccgctccgcgggcaccatggaggcgttctgtgccgagaccttcgtcaacgacgacctgctccgctacatctctcagagggccccctcattgaagagcctccatctctgcctgtgccattacgtcactaatcaaggttttgcagaggcagttaattgcttccctcagctcgaggagctagacattacattctgctcattgtatggcatcgtgtgtgagactgctgggagagcctgcccgcagcttaaatgcttcaggttgaatgagcgctggtctattcttcaaagcgagtttgcaccctacgagggcatggatgatgacacggaagcattagggatcgctagcaccatgcctgggctccaagaacttcagttgatcgatggacgacgcgctgagatcgaaatgcgctaggatacgatatctgaagcttcctcacgactccatctccgacttcaagtatcgggcttacatcgtcagcagcatagccaactcgggctctgattttgaggttgatatgtatgatgatctgctggatgtggtcactgaagatgatgatgctgatttcgatgacatggatgatttcgatgatacagtctcagatggaggcatgtacgatgatgacttggatatctgaaattaggaatcggttcaaacagcttttccgtggaccatgtaagtgctgttagctggaatggtttcccatcccttttctttgagattcgggtagctatgatggaatctccctgatgttcatacttctgcgcctctccatttgttaagaagctggagtagctgaactggttttaatcgatgtacaactgttgtttttttattctgaacctttgttaattggtattttaataataacctagggcaaaaaatgtgtatatatacctcctggccatgttagggatgtgtctagatgtttctatgcattatgcatgtgacaaatttcaatttttttgacttcctaaaatatgcatttgtg

SEQ ID NO: 198769 - DNA, 1439 bp, Zea Mays
ccggtttggtgaaccctgcgttcaatacgcagcagcggcggctaaccctaacttcaaaggcataggagtaacagtcttcgcacaaatattccctcccccaaggcccgaagccccgaaactttccggatctttcttccgccgcttcatcttctttgcgcaaaactagttttgtttctcgttcttctcttcgatttcggccgaataaagatggcgtcggctgcgcgcctcctcgcgccgatctccaggcgcggcgtcgtctctgtggctctggcgggggtggagaggcggcggccggaggcggcgtcgctcctgggggcgcctgtgctggctacggtggaagcctgcgcttcgatcaaggtcattcctttgtcgaatcagctggctcgatactcgacaactgcatttcagaggtttgggttttcaacttcagccccccaacaagatgataaggagacaaacaagcacacagatgatggggttaatagaagtgttggagcaagtactggagcttcaagtgaagccaataatgtgcctggaaccgagaaggcacaggaagcagattcagaagacctagacctatcaaaggaggaccttgtgaagctgcttcttgagaaagacgaatcattgaagtctaaagatgaagagtttaaagatatgaaggataaggtcctacgcagctatgctgagatggagaatgtccttgccagaacaaagcgtgagtcagagaacaccaagaagtatgccatacagagcttctccaagagcttgttagatgttgcagacaatttgtctcgggcatcatctgttgtcaaggcaagtttctcaaagatagattcatctaacgattctgatgaagctgtaacactactgaaaaccctactagagggtgttgagatgactgagaagcaacttggagaggtcttcaagaagtttggagttgaaaagtttgatcctttgaatgagaagtttgatccaaataggcactatgccattttccaaattcctgatccttcaaaaccatcaggaactgttgctgctgttgtgaagttggtgtcactgaaggtggtccaactgaagaagagccagaggagtaatctagatcaaacggaggttgctggctgcacgtatatctatgactactgccctttattggttggataagcatacatatcataggttatgtttttaactagatctgtgaggcaaatcactatttttgtagcatgttcaacgaggcaatttgttcaagctagtccagaactctcctttttcttgctcggtaataaaaacgagattgtagaacatgtacatcaccgaaattgcttgccaaagacggattattgcagcctgcattaataggaatactgacaatgagcgtgccacaatcaaaggtggtctgttttgaatgataatgtttgaatgaagatgggactgccgag

SEQ ID NO: 198770 - DNA, 1224 bp, Zea Mays
ggaaggtgaattatttatcaattatgtgaagcctctctctgaaaacaaacaagggatgtcaaaactcaacaggacaaccgggtcacgtcgatgtgatatgactatatgaggcacctggttttcttgctgcttccgctgtttcttcctcaacctctccagctcagctgccgcaggctgcgactgccatggattccaaatccatggaagcatttgtggcaagtgaggcctccgtcttcatgaatcagccccctccacatatgtctagaccaacaattattatcaagctcattttgtggttgctgtggaccatcacccacttagcaatcagcattttaaatttatgatagcaaagaagctaaaagtactgtgaaggtcaagcgactgttatgctggctctcatctatgggtgtgaagtatgtatgtctctacgacattgagggagttctgaagaaatcttttgaacctgctgtgaatgtttcaagagataggactgcaggagaacattttggcattggagcaaacatcaaagatctacactgtagccaaagagagatgatgatagattgtctttctggctctgatggcaaggagggtattgctaaagcagccagtttactttgctcaacttacctcaatggtgatactcatggagatgacaaaaggaaaccagcatttacagaagctgacatggctggtgcactgaaggctgtaggttgtggtggaccagaacctgatctccttctcatgtatggtcctgctagatgccatttaggatttcctacatggagattacggtatactgaaattatgtatatggggccactgaaatcaatgaaatatggtgcaattgtgaaagccttatataacttctcaaagaaacaccaaaattatgggaaatgatagctgatactagtttaaagaagaccatttgatcatggagaatcgacaccttggaactactggacagttactctgcggcccgcatccatttgcttctgctgctgcttactggagcacaggagtatttaacgttagacataccattgacactcatttcatgtttgcttgtaataagataaaaagtgctgtcgatagaacatacatacgggacaacatcccactgaaagttccacccatagcaatgagcaatgaaagaaacacaagaaatcttaccatctcatctattatttcctatgctatgattcctaatgatttatctgtttt

SEQ ID NO: 198771 - DNA, 372 bp, Zea Mays
gcgcgatgtcgcccgagacgcgtaggggtagagagaagaggacgacgctgctgctcgttactgttggaaagggctgctgcatatggataggagcatcatgaactaatggtgaacatcatttgcaaattttacttgaccaaggatcattctatacaacggaggaagatcacgagaagtaaaagtgttgtctaagatgtacattctttggctgtggagtctgtagactatacatatacacccattgttctggcgaggctgtgtacactgtacatcaaatgaattttacgatacttcttgttgcgttttacgctacaattatctcaaatcacttgttgtattgtacactacattttttgcctcgcatggaaactt

SEQ ID NO: 198772 - DNA, 375 bp, Zea Mays
gtgagaagagcccctgtttctctagtaggggtagagagaagaggacgacgctgctgctcgttactgttggaaagggctgctgcatatggataggagcatcatgaactaatggtgaacatcatttgcaaattttacttgaccaaggatcattctatacaacggaggaagatcacgagaagtaaaagtgttgtctaagatgtacattctttggctgtggagtctgtagactatacatatacacccattgttctggcgaggctgtgtacactgtacatcaaatgaattttacgatacttcttgttgcgttttacgctacaattatctcaaatcacttgttgtattgtacactacattttttgcctcgcatggaaactt

SEQ ID NO: 198773 - DNA, 2005 bp, Zea Mays
atggacttgtgtggccatggtgggaggtgttggcttgccagagaacgagaaaggaaagaccgaggaaggaggggggcctttgattctttattggctgccctcgatacacgtggcacccgggaggcacagctgcattcaatgttgcaagtgatcgagccaaccttcaaggaagctattaaaagaaattgaggttggaagctcaagcagtactcctagtgctacatctgacagtataacagcatattctgattcttttaaagtagagcttgggcgtaatgattttgagaagacagctatctcaaaaagggcagatatatttttaaaatggatgtggagggaattctacaatcaggaattgacatgtgccatgaaatacggcaagaaaagatgctctgaattgttgcattcgtgtaattgctgctatcagatttacctagcagaagaaaggcactgttcttcttgccataagactttcaaatccatttacaatttttctgatcatacaacacaatgcgaagagaaacagagaacagaacctttctggaacatgcaaaacactgattattctgtcccaataggaatggcatatataccatcagaagcacttcaaccattttggactgatgtgtatcgaaaatcttggagtgtgaagctgtacactaccaaatctattgctgaaatattccagcttttgactgttctggaaggtgcaataagaccagattgcctctcttctgattttgaaacaaatggatagagatgatggaggtttcatgaaatttccgtcaaggtatacagttgctaagagcaaacaagaaacaacacctgaaacagctggtttggatctgtatgatggaaggtggcttcctggtagtggccgtaggggtcgtggacgtggaagtagaggaggtagcaggggaggcagaggtcgaagtcgaggtggaaggatcccaagaggtgttagcagctcatcaaggatcgagttcaagggtggtattgttgcttctgataaagcgccaaggaagaatgtacgccgagggcgtggtcgtggtcgtggtcgtagacgtggacgtcgaactgtgaggcctcggcagccatctgttggcagagccagatcaattccaaaggaaaatttgttgggaagctttagcatgcttagcagctcaaaggctgctaccattgaggagtctccacgaagctctggcgcagacgagtggggcttggagaccagaacgacatacactgaatgtgatgagaacagctctggatcacagtcagaagataacgaggaaaatggccagcccatggatgatgattatgaagatcaagttccagattactcaataggctattctaccggctcgaggcaccatgtaatgatgtccatgatggaccatgatagtgacgaggaggatgaagatgctgaaggtgatgagaatgtggaagaagatgcagaccttgcagttgacgatgccgatgttgagatggacgaagatgatgaaattggtgatgatggagaggatggtggcgttggaggggagatgaatgcggatgaggatccggatgctacttcatattcatccgattacagcgactaagaaagcagaaataagggaaccttatcccagattcctccctcggcatggaatgcatgtagtaccgagtaggcattcccccccgttgtgagccaaaagggagcttagatgcttaggttcgaaggagcgaggaactgttttttaggcaccgcaggttttaatagaatttctgacgcattcgacgaagtgtttggttgtaccgtggtagttgtgttactggggaattccccgagttattatacaatgtgttaagacaaaatactgtcatatcgcatctggttgccatgcgtctaactggttcacggttttaccgttattgtagtccctctccacatattagagcatctccaacaacgtgacctataaaaataccttataatttaaaaataagtaaattttatagaatttag

SEQ ID NO: 198774 - DNA, 1937 bp, Zea Mays
attggctcgcgctcggcagtcggcacgacggtacttggacttggctattcccaacgccaccccgcaaccgcaacgtctctctagcgtctagcctctgcctgcgctcccacaccagaacaccacaccgctccgcgtgcgtcgcccgcactcctcgcctctgcccgtctgcctaccgtgccgtgccgtgccgtgctccccacccgatgcagccgccgacgcgggccgtgccgagccacagccggagatgagctccaggaaccgttccgccgccgcctcgtccgctgccccggctctccggacaccgcgccgcctgaagcggcggccagttaaggcgtcggcgccggggccgggcagcgggcggcggagcgggcccgcgacgccgctgctgaaatgggacgtcggtggcggcggcgggcgcggtgaggggaggaaggctggcgccgacgaagcgggggacgccgcgcgggcgcgggagaccaaggcgaaggcgacggaggtgtcggtgcggaggctcgcggccggggtttggcggctgcgcccgccggaggccgtggccggcggcgggagcggggtccgcgtgggcgtcgagcatatcccaaggcatctacaagtccagcttctgaagcagaacacttcaggtcatcaccagagttcgaagaatgaggtttcaagccccatatctgttttggagcggaagagtggagagctccacaagggacaacttcatgctacttctgctatgctgcctgtcgctaccatggagaaggcaacgaaatgggagcctggggacataaagggaatggaatcgcatgatgcgtatctgatagccagccagctgaatcttcttgatgaacacagagacaccgcgtatgttgctgacctccagatggagcttcagcaagcacgtgataggataagtgcgatggaaactgagcgacggtcagctaagaagaggcttgaccacttgttcaagaaacttgcggaggagaaagcggcttggaggaacagagagcatgaaaaggtgcgtgctatcctcgaagatatgaaggcagaccttgaccacgagaagaaaaaccggaggcggctggagatgattaacatgaaactcgtcaacgagctgaaggaggccaagatgtcagcaaaacagctgttacaagagtatgagacagagaggaaagcacgtgagctcactgaggaggtgtgcaacgagctagcaagagaggtggatgaagacaaagctgagatcgaggccctgaaacgggactcccagaggttgcgagaggaggtagacgaggagcggaagatgctgcagatggcggaggtgtggcgtgaagaacgggtgcagatgaagcttgttgatgcaaaacttactctcgacgcaaaatacacacagctgagcaaactgcaacaggatgttgaggcgtttattgctgcatgcagtactgctaatggagacgtcacggtagtagagcaagcagagagcataatacaggcaatcaagtcagtcagagcccaagatgctgagttcaggtacgagccaccggccgcatcagaagacatattttccatttttgaagagctgcgtccaagtgaggagcctgtcatcaaggagatcgagccatgttacaagaatagctctgccaaatgtgaaccagaaattcaagaggttagcccaatgaccgatatattcctcgaaaagaaagccaaggcaaactcgaacaaaagccctaaagatgaaagcgacactgaagatggcagcagctgggagacaataagccacgaagatgtccagggttcaagcggttcacctgatggaagcgagccttcggtcagcaacaaggtctgcgacggaagcattccttggaagagcagaaatggattcgagcgtatggagagcgcgccttggcggccttgcaggcttcgaccttcttgtcccg

SEQ ID NO: 198775 - DNA, 7002 bp, Zea Mays
ggaaaacgtcaaagccagccccaactcgaccacagatccaacgcggtggcaagcgagatggcagccgcagcccgcagcccacaagcgcagggtgccatgtctgaaccatgcgtccacgcctgtcaccatgatcagccgatcactgctagtgctagcagactagcatcacaccgcgacccaccggcgtgttttagctttcaaggctactctccgtcatagtagcaccatcctcttccggagggaagtcgagcccgccacctgcttgtgcaaatgcgcaagacgacggccgtaacggcagcgccactcgtcatgcaccagattactctgggaaccacagtggataacgggggaccgaggacaagattgacattaggggaaccgaattccagcactcagacgcacttctgctttactcgtagtttgaagctaggcaattcgtcaagagccaggtacatgcagctccttgctgacgaggggcgcgcaggagcagcaattttcgcatgtgcagatatgttccaatgagaccatctcatggaaccacagaagaaagaaaagaccggcgatcttctctctctcaagtggatggcacagaactagcacacggttacatgctgagctatgccccatggatcacttccgtcgtaaaggtcagaactatcaactgccagttcgtcttgtagatgtgtcactaattaggcatttagatagtagatgatgcttcagacagatagcgtcgcacttgggcaattgagctatccgtaggcatagctgggactcatagccatagggttgtctcgaatggtgtaaaggtatgaatctgattgactattactgattaggctttgctctcacacagttttagtactagaagctgtactccgctttgcctaattacagagaacacgtgtcagaaaccattggagtactaggagcggcagactctgctttatctattcccttgcacatacctaaactttattttaaacaaatatgcccgagattgtgcctatttctgttaaaattatcttagaaactagtgcataaactattagtatctttaatcgtgctgctgttcatgggaatgtggtgaaactctgaatagaaatactgcatgtgatctgcttaacaaccggtatatctgccaaggtggaatagtgccagaacccagaagtatgctaactaagcatgtttttttaatgagaaacatcagaggacaaattggacaccacaaaaatcacactagatttggtgaaaagggaaggcatgatgtacctataagcaggcatgatgtagctataaaccagttaacaatatcatgtagatgtatagtctggtctttctagccacagttctgcttcgctaaatgttaatcattctttgacatttcttagtcacctaggcataaataatgtgtggtaggtttagctttgtggcccaccaattcatgcatggcaatataacaattgtaggctgatatttattagcttaggtgtggaccgaaccatctaaaagcgtaaatatgaatcacatttatctagtgcatgctggcttaccctccggtgggtgggcatgttgggcacaacaagatgggaccatatcctggaattctctgatggcaacaaggatataaatgaccttttcccctgatattggttgaccattaagtcagatcactgcagcatatctatgactgagcagaactttggctgcattctctggtagccttgtccttcccagttctcttttgcaaaattcccaaactcagaacattctaaccttctgtatccactgagcagaacttttgcaaaattccaaaaatcatactttaaaattgctccgtgtccatttcttacagtcttccaactctccttctcaacttgtatatacaagcactcactagattgctatttaagctgaacaccttctcaacgagtgtactgtgtactatgtgatactagtcctactcatacttaacacttgttatggccttttaatttttctttattaattgctagactagttataggctaagccaagttaaagtaacgaatacagtctagaattgattgtatgtggttagggggtacggcagaatacatagtcggtgcttgccagtagtttgagaaggtcagcttgttagtttgggttaccccaagaaagtaagtagcttgacctctcggccttaaaaacacaatgccaataggcatgaaaaattctcagcattggtagtgatatcatctagcatcgtactaaattgtcaactcaaactctgaatatacaagagaaaccaaaaatacaaatttgaatgctcgttattgtcctttcctgattccatgaaaagttatcctttttctcgtttcctcctggtcactgtttgaattggaatatgtttggatgtttgatgctagcatactgcacaccaatgatttttcttgaaacttttcatgactcgtttaggccctgtttgtttccttccaggattatataatccagcttatggattatataagcacctagacctgcttatggattatcataatctaggtatctagattacataatccacataataatgtatattgtttgtttacctctcaacttatttggtgtttcaaagcttgggatagtttttggaatgcaggattatctcctaatgccgtctaagaactgaaatgcttggatattctgttgcctaggccatttatggtgtgtttggtttgtggagtcactatgcttcatgaggtgatgcatcataagttcattccataaattttagtggaatcaacccactcctcatgtatatactaattattagcttatgaggaatgaggtggtgatagatcaacccattctattccacaaaccaaataaaaaagtgagcagtgagaagaaaatagatcacttcattactcgaaccaaacacactcttaataggtgcttggcaggcaccacttcaggtgggtgcatacactgacctactggcgctgagtgcggcagcaaacctgaaacgaagtgcacagtcctgttgcttcgtttcagtcctgttgcaatccttcccacaatcttctgtgctgtgctcgccggagcccaccagcgctgctgacacccgtcactttcgccaccgtcgctgtctcctggcgcggctgcgcacagctgctccccgtcctccccaacccactcatcatgcacaaaccgggttaaaaagccgcgcgtcgtgcgctgggcaatcatggcatccccgaagacgtctgctacatccgttccaacccacggaaggcagacctgcagcagcaccaatgcttcgctctctccagtttggttgtttcataacaaggtcggttgatctcgatcgagctagcggccgatctgattgtccgtcgttgccacccccgtggtgttttacaagtgccatccgacgaggagacgatgagggtccgcatggacattctcctcctgctaatccttgtcgtccccttcctcgccgcatcgacgtcggcggacgggaaggccggagacatgcagcggcggcggcggcgacaggtcctgctgcgggacaaggcgactctgctggacctgaagcaggggctcaggctgtcatcttcagcggccctggcggactggaacgagtccaacggcgacgtctgcggcttcaccggcgtcacctgcgactggcggcgggagcacgttgttgggctctctctcgccaacttgggcatcagtgttgctattccacgggtcattggcaatctctcgcacctccggggcctcgacgtgtccaacaacacaatctctggccagataccgacgtccgtcggcaacctcacgcgactggagcgcctcttcatgaacaacaacgacatctcgggcaccatctcttcaatcttcagcaacctcttaccactccagaggctccggaaactagacctctcctacaatagcatctccggtgccattccgctggacatcggcagatttgggcaactccaaagctttaacatcacctacaacaacatctccggcgccgtccctccgtccatcggcaacctgactctccttgagtacctctacgtgcaaaccaacttcatctctggagaaatatctctggccatctgcaacctaacaagcctcgtggagcttgaaatgtccggcaaccacctcacggggcagattccagccgagctctccaacctccgcaacattcaggcgattcatctcggcaccaacaatttccacggggggataccaccttccctgtccgagctgacgggcttgttctatctcggactcgagcaaaacaacctgtccgggaccatcccaccagctatcttcctgaacctcacagggttgcatctcttcgacgtcggcagtaacgatgtttctggcgagatccccggcgccatctcgagcaccggctgcgcgttcttcgtcatcaacctctactccaacaagctccatgggacgcttccacggtggatcgccaactgcaccgatcttatgacgctagatgtagagagcaacttgctggacgacgagctgcctacgagtatcatctcgggcaagaaggggttcaagttcctgcatttgtctaacaaccgtttccagagccatgacggcaacagcaacctggagccattcttcgtcgcgctgtccagctgcacgagcttgcaggaggtggaggccgccgccgtcggcatgggagggcagctgccaagtcggctgggctcgctgctcccgagcaacatgtggcacctcaacctggagctgaacgccatcgagggcccaatcccggagtctatcggggaagttatcaacatgacgtggatgaacctgtcgagcaacttcctgaacgggacgatcccgacgtccctttgccggctgaagtgcctgcagcagctcgtgctgtcaaacaactccctgacaggcgaaattccggcgtgtattggcagcgccacgcagcttatcgcgctcgatctgtcggccaacgtgctgtcaggggccatcccaagcagcatagggagccttgccgagctccaatctctcttcctgcagggaaacaagctgtctggggtcatacctccgagcctcggccattgtgccgctctgttgcacatcgacctctccagcaacagcttgactggggtgatatcagaggagatcgccggcatcgtgacactgaacctgtcgcgcaatcagcttgggggcatgctgccggctggcctcagcagcatgcagcatgtgcaagagatcgacctgtcctggaataacttcaacggtgagatcttggccaacatcggaaactgcattgagttgacagtgctcgacctctcacacaactcgcttgccggcaacctcccttcgacactcagccagctgaagaacctggaaagcctcaatgtcgcgaacaacaacctcagtggtgagatccccattagcctggccaattgcgacaggctgaaatatctcaatctgtcatacaacgacttcagcggcggcgtccccaccaccggccctttcgtgaatttcagctgtctctcctacctcggcaaccgtcgcctctctggtcctgtgctcaggcgttgcggaggtcgccaccgctcgtggtaccagtcccggaagttcgtagtcatcttgtgtgtctgctcggcggctctggcgttcgcgctgacgatcctctgcactgtcagcgtccgcaagatccgcgagcgggtcgcggcaatgcgggaggacatgttcagtggccgccgcggcggcggctcgtcgccagtgatgaagtacaagttcccccggatcacgtacagggagctggtcgaggccaccgaggagttcagcgaggaccggcttgtcgggacgggcagctacgggcgggtgtaccgcggcacgctacgcgacggcaccatggtggccgtgaaggtgctgcagctccagacggggaactcgaccaagagcttcaaccgcgagtgccaggtcctgaagcgcatccggcaccggaacctcatgcgcatcgtcacggcgtgtagcctgccggacttcaaggcgctggtgctgccgttcatggccaacggcagcctcgagcggtgcctctacgcggggccaccggcggagctgagccttgtgcagcgggtcaacatctgtagcgacatcgccgaggggatggcctacctgcaccaccactcgccggtcaaggtcatccactgcgacctcaagccgagcaacgtcctcatcaacgacgacatgaccgcgctcgtctctgacttcggcatctccaggctcgtcatgagcatcggcggggtggccaacactgccgacgtcggcgcctccacggcgaacatgctgtgcggctccatcggatacatccctccagagtacggctacggctcgaatccgacgacaaagggcgacgcgtacagcttcggtgtgctggtgctggaaatggtgacaaggaggaagccaaccgacgacatgttcgacgccggactgagcctgcacaagtgggttaagacccactaccacggccgcgccgacgcagtggtcgaccaggcactggtgcgcatggtccgggaccagacgcccgaggtgagaaggatgtcggacgtggccatcggtgagctactggagcttggcatcctctgtacccaagagcaatcgtccgctcggccaaccatgatggacgcagccgacgacctggaccgcctcaagcggtacctcggcggcgacaccacggccaccttcgcgtcatcgctgggattctcctccaccacgctagaagtggaagacatcgattgaccacgagatccataggcgtgtgtggcgtaagcggctccctcagacgcgagcgatacttagacgcgagcatggctctgtttttgttatattttgtatacatatttatatcaatgtcaatagattttttacgatatattttagtttatagctccgcttccatctattatctgtttattgtacacaaacgatttattgattttataaattatcttgttacct

SEQ ID NO: 198776 - DNA, 1086 bp, Zea Mays
gacaataactaaactttaatctgggacatgaggagatgattctcccaaagcagcccttatcggaaagatttccactgggccgtctagataacaagcggccccaccacaccgctgcagtcgccgtgctcgcgcatggagcttggaggcggagggcgaggcggcggcgaccgggtccggcggcagttgcagtcggtggggcggctggcagcgtatctcggcggcggtttcctcctcctctccgccacctcttccgtcgccgtccgcgccctccgcgccatctccgacgccaaccagaggaagttcgcgaagccgtgcggtgcctgcgaggggaagggcagctactcgtgcaggctctgcaggggcagcgccaccatcgagtggtctccgatgcacgacccggtgttcgtgaatccgtgcctctgccctacctgcgatgggactcgggtgcagcgctgcttgaactgcctgggaaatggttacgcttgaagaagcgatgtcagttttcattatcgatgatagatggttgttggggagttgacttcttacaagttgtacaggcaagtattcgtcgtcgttgtgcaagaatagtctgaagggtgatgtctagtgcccacagagagaatttaatagagccattccatctgaaagatgtccagatatgtggcgggatgccctgtgaatgatgtcagtgttctttcatctgacgaacatcacttgcatttatgttttggccctttttttctgagggtggatttgtttacgcaacacaaacaaaaaaaaaatataccattgtgtgcactcgcaatcaaattctggtaaaaatgctcgaattcctcagcatcaaggagattcagaggttgttggtcctatagtgcaggtattgcatgcagttgacctgcatgccaatcagtgacgtccagaaactatggatcagattgtcctccatcgtaaccaccatttttttttgtttgcgattttcttcaacttgggccttccaatgatgtctgaaaacgagttacaggaaatctgttggtcagctgttcttggtatctgccacttgtgtactgttgaaggtgaaaatatctt

SEQ ID NO: 198777 - DNA, 1726 bp, Zea Mays
atcggaaagatttccactgggccgtctagataacaagcggccccaccacaccgctgcagtcgccgtgctcgcgcatggagcttggaggcggagggcgaggcggcggcgaccgggtccggcggcagttgcagtcggtggggcggctggcagcgtatctcggcggcggtttcctcctcctctccgccacctcttccgtcgccgtccgcgccctccgcgccatctccgacgccaaccagaggaagttcgcgaagccgtgcggtgcctgcgaggggaagggcagctactcgtgcaggctctgcaggggcagcgccaccatcgagtggtctccgatgcacgacccggtgttcgtgaatccgtgcctctgccctacctgcgatgggactcgggtgcagcgctgcttgaactgcctgggaaatggttacgcttgaagaagcgatgtcagttttcattatcgatgatagatggttgttggggagttggtaaggaaacaattggaaatttactgatgaattcgttgccttgtgtgattataattgctgtgagtctatgatttttgggtctgtttatgtcgttctgtgactatgaattgtgggcatgatgctaaatttacaaatctctcgttgaagagtcacagttggaactttagccattagtacagggaaagtaaagctgttctttcttgctgttgcttagtgtacctgacggattgttaaaactgaatagtttttgttgggaatttctgtgaagggaagagagtgtggaatcaactcaagctgaaaggtttctgttgggattttgtgtcaaggcaaaagattgccgtttcaactcaactcaaaatgagagataacgggtgaaatggaagtgatatgcttccatgtatccccttatgtgcaagagtccagaagtacaatttctatttgtcaggggaagctgtactcctatagatggttgttatgaagctcatcgtgggccatgcgtacatgccaagatcatggtgtcaagccgttggatgatttctcctatatgttagtttacgaaatagttgattgcatctttgtagtatgtatcttcttggctgtgtttattctaaccacataacaatggtttgttttgcttcaactgaaaccgaagacctgtcgggaaatgagagatgcaggtcaattaatccgattctgatacttcttacaagttgtacaggcaagtattcgtcgtcgttgtgcaagaatagtctgaagggtgatgtctagtgcccacagagagaatttaatagagccattccatctgaaagatgtccagatatgtggcgggatgccctgtgaatgatgtcagtgttctttcatctgacgaacatcacttgcatttatgttttggccctttttttctgagggtggatttgtttacgcaacacaaacaaaaaaaaaatataccattgtgtgcactcgcaatcaaattctggtaaaaatgctcgaattcctcagcatcaaggagattcagaggttgttggtcctatagtgcaggtattgcatgcagttgacctgcatgccaatcagtgacgtccagaaactatggatcagattgtcctccatcgtaaccaccatttttttttgtttgcgattttcttcaacttgggccttccaatgatgtctgaaaacgagttacaggaaatctgttggtcagctgttcttggtatctgccacttgtgtactgttgaaggtgaaaatatctt

SEQ ID NO: 198778 - DNA, 1026 bp, Zea Mays
atcggaaagatttccactgggccgtctagataacaagcggccccaccacaccgctgcagtcgccgtgctcgcgcatggagcttggaggcggagggcgaggcggcggcgaccgggtccggcggcagttgcagtcggtggggcggctggcagcgtatctcggcggcggtttcctcctcctctccgccacctcttccgtcgccgtccgcgccctccgcgccatctccgacgccaaccaggaagttcgcgaagccgtgcggtgcctgcgaggggaagggcagctactcgtgcaggctctgcaggggcagcgccaccatcgagtggtctccgatgcacgacccggtgttcgtgaatccgtgcctctgccctacctgcgatgggactcgggtgcagcgctgcttgaactgcctgggaaatggttacgcttgaagaagcgatgtcagttttcattatcgatgatagatggttgttggggagttgacttcttacaagttgtacaggcaagtattcgtcgtcgttgtgcaagaatagtctgaagggtgatgtctagtgcccacagagagaatttaatagagccattccatctgaaagatgtccagatatgtggcgggatgccctgtgaatgatgtcagtgttctttcatctgacgaacatcacttgcatttatgttttggccctttttttctgagggtggatttgtttacgcaacacaaacaaaaaaaaaatataccattgtgtgcactcgcaatcaaattctggtaaaaatgctcgaattcctcagcatcaaggagattcagaggttgttggtcctatagtgcaggtattgcatgcagttgacctgcatgccaatcagtgacgtccagaaactatggatcagattgtcctccatcgtaaccaccatttttttttgtttgcgattttcttcaacttgggccttccaatgatgtctgaaaacgagttacaggaaatctgttggtcagctgttcttggtatctgccacttgtgtactgttgaaggtgaaaatatctt

SEQ ID NO: 198779 - DNA, 872 bp, Zea Mays
cacggttctgcctcccgctcccacccgcgacatctccctcccacacccgcgcatggccgtcgtgccttcgcccccagatctcgcgcatgcccacgcctgaacccagcaccagccatacctccgcagagcccccgcccccggatcccacacatcatggtcgtcgagttctacgccccctggtgtgggcactgcaagaaacttgctccagagtatgagaatgcggccaaggcacttagcaagcatgacccactgattattctcgctaaggttgatgctaacgaggagaagaacatgccacatgctaccaagtacgaggtccaagggttcccaaccatcaagatcttcagggaccaggggaagaacattcaggaatacaagggccctagggaggctgatggcattgtggattacttgaagaagcaggttggccctgcatccaaggagatcaagtcaccggaagatgcgactgcccttatcgatgacaagaagatctacattgttggtatcttcgctcagcgacaccgaatttacaaacttcatggaggtcgcagagaagctgacgtatgactacgactttggccacactttgcatgccaaccacctcccacgtggtgatgcagcggtggaaaggccattggtcaggctgctgaagccatttgatgagcttgttgctgacagcaaggtttttgtcccgcgagaatggaatctctatttgtaggcttgtctcataacaagccaaaaaatcggtggcaaccgcaatagttcgagaatgtattataatttttgtagtattttatgtatcaatttgtattttttatgataactaatttcagctttatgtcacgactggttgctcctagactatatttgca

SEQ ID NO: 198780 - DNA, 3709 bp, Zea Mays
ggtaatctctcagcttctcgttgcgcaacctccccggtttcccagtcccgctcaccgccgccatcgccggcgcccatggcggcctcaccaggggcagacgaaccgctggagagctcaacagtggagcatcctgaggcggtccagccgccttcactgccgattgttgaggcggaaccgcctccgcctcttataggggcggcggctgcacatgaagcgatctctccgaagaagtcctcttccccttcgccgcatccggcgaacttggcggtcgaagtttctccagaggtggaggcctcttcctcgtctccgtccccgtcgtcttctccctctccatatccccaaatcatggaggtgttgccgggtgcgccgcaaccactgtctcctccacgtgcttctccgtctgttgcggcgcgtgcttcgacggacctctccattacagaggcgatgtcaatggcgtcccaggaagcagctcgcccacccccgtcccccgagtctacggacgcgcacttgcacaccgcgtccgcgctgccgacgtcgctgatggagattgggcctggagtgttggtgccacagcagcagccgcgaccaccatctccggaaatggcccctccactatgtgattattcagagtccgcacagccatcgccgctgtgtcatccggatggatgcacaggcgcctcgccagacgcaccgatggacgaggtaatgacaggaacgtcaggaaaagcagctgggccgtcgccaggtgaaaactcggagttagcacagtcacagctgccgcatcttccagctgaaaacacatatgtctgttcaaatgcagcgggcaagatatcagcagtgacttcagaagaaggtactcagcctgcgatggcgtcaattgatggtgaggggccattagagattggggcgcagagatcattgcaggagctagaggagacaacaacatccttcaagatggaagctgagccttgttcgccggagatggctcctccagggtttgaagattgtaagtctcaatggttgccactgtcacatcctaatcctctggttgaatccacacacactgtggtacaagtgactactaccaatgccatgggaacgactccagatgcagcaactgggtcactgtcttcacctcgcctacttccactgttgaagagagatacagaggggcaaacacttccaagatcatgctctccaacaacagaagctgcaccatgttcaccagatatgccacctccaggctttgagaattgtaagtcatcgtggctaccactaccaactcttcaacccatagctgaaaccacgcatgtgttgcacgacgtggctcccaccaagtcaatggtagtgggacttatggaaaaggcatgctcagtgctggcattggagcggacagatgtgaagatagactcggagcagagcctattgccgccattggagagtgaaactgagagttcattgcaagggccactgccaaggtcaccttcttccatgatgaaagccattccctgttcaccagatactgcacctccagggtttgaaaatttaaagttcacacagttacagcctccctgtccacctctggtgcagactgcacatgttttgcaaaattcagccaataatgaggccatgcctgtgatatcaaaggaagctcctcagccattgcctgcattggatgcaacggatttagacattgatgccaaacctgtcctggcaccaccatcagagagtaaaccagggcaattgtcaccggaacctccccttctgctacctcatgtagcacagcatacaacgtgttcgccagggatgacacttttagggtctgagaatatcgagtcctcgcagctgctgccacgagctctggttcttcctcttgatcagacttcagacatcttggctgatgcagggaccaagaagacagtcacaatggaagaagtgtgtcatccgctgcctgtagcaggagtggcggaagaagccaataggtctgttcttctaccagtaacggaaaatggctgtgagggccaatcaccacacctagagctacagacttcttcccctgcagtgaatgctgcagctacatcactggagatagctcccggaagttttgagaattcagagtcctctcagttgatctctccttgtctagctcagacaatagaccccactactcatgcatcaggtattatgcctactattgttaagtcagagaaaacgaatctgccactatcttcattacaggctacatgcacagacatggaaagtgcaatcctgtgtcagtcgccatcgaagagtgaagagagatcactgccacaggcagagcaacacccgtcttctccatctgttaaggacactacttgttcaccagaggttgcacccccaggttatgaaaattttgactctttggatcagctgccaccatcaccacctctttgctcaaaatttgaaattggtcaaatggtatgcggatcttgtcgtcagcttgttgcatatcctacgggtgctgttcatgttcagtgttttggttgcttgacaataaatcttgtactggaagaacatcaagttggtaaggtatattgtggacaatgtgatacactcttgatgtatccttttggggctcctgctgtgaaatgttccaactgtctttttgtcactgaaatcggagaacgcaatgttcggccacggatattgatggaacagagtgtctcacctgcggcacaagaggaggttcactagagagctaggtcaggctttaacaacggctggtagtggaacctagatgatatcgctcgtagtaactccagacgctgccatggaaaactcgcaagtcatccggcatgatcctgtagctgtaacctcaaatggcctgtggtctgtggaagtgtggagtggcaccttcagatgcagcctgtagtttagggatgaaaaaggcggatgcagtatggccaggatcaactgctaagcgaaaagattatatccagccgtagccttatcatagggaagataaactgcttaagctcggctgtaactggagcaggttaatcatggttgacggtacggtggtctcagatgatcctcaagttaagtatttgttggggacgagcagagtgcttcagtgcttgggtttgtctacgaaccatggaacaacccacttgtatctttagcgtcacagcacaatcacaagcgctgttgtggcccttcgagggcaacaggaggtaaaaaagtactttatgaaggtaggaatatttggtagcatctcctctctttttttgacaaaagggaaattcattcatttgtcatgagcacaacaaactccattctaagttttgaagccaattggatgttacaacgttgagattgtgctaaagcttgacaagaataaagacaatctcctgtaattgatgccctgccttgcctgttttgttaaactgtctgcaactttgttcatctctctttggatcttgagcacttagtagttccttcctggtgtggcatcaatcagtgccgcaagggttggtccgaggcactaatggctgggttgcggagcacgaagccggaggtagcagcattagccaagtagccaacaccttattatctgttagaatgttggtcacctgcaaatatagagttgacggctagtttggcacctagcagtagaacatgtcctgcctccaatgggtccatgagttgagttatggcaactagaaagaat

SEQ ID NO: 198781 - DNA, 3596 bp, Zea Mays
tctctcagcttctcgttgcgcaacctccccggtttcccagtcccgctcaccgccgccatcgccggcgcccatggcggcctcaccaggggcagacgaaccgctggagagctcaacagtggagcatcctgaggcggtccagccgccttcactgccgattgttgaggcggaaccgcctccgcctcttataggggcggcggctgcacatgaagcgatctctccgaagaagtcctcttccccttcgccgcatccggcgaacttggcggtcgaagtttctccagaggtggaggcctcttcctcgtctccgtccccgtcgtcttctccctctccatatccccaaatcatggaggtgttgccgggtgcgccgcaaccactgtctcctccacgtgcttctccgtctgttgcggcgcgtgcttcgacggacctctccattacagaggcgatgtcaatggcgtcccaggaagcagctcgcccacccccgtcccccgagtctacggacgcgcacttgcacaccgcgtccgcgctgccgacgtcgctgatggagattgggcctggagtgttggtgccacagcagcagccgcgaccaccatctccggaaatggcccctccactatgtgattattcagagtccgcacagccatcgccgctgtgtcatccggatggatgcacaggcgcctcgccagacgcaccgatggacgaggtaatgacaggaacgtcaggaaaagcagctgggccgtcgccaggtgaaaactcggagttagcacagtcacagctgccgcatcttccagctgaaaacacatatgtctgttcaaatgcagcgggcaagatatcagcagtgacttcagaagaaggtactcagcctgcgatggcgtcaattgatggtgaggggccattagagattggggcgcagagatcattgcaggagctagaggagacaacaacatccttcaagatggaagctgagccttgttcgccggagatggctcctccagggtttgaagattgtaagtctcaatggttgccactgtcacatcctaatcctctggttgaatccacacacactgtggtacaagtgactactaccaatgccatgggaacgactccagatgcagcaactgggtcactgtcttcacctcgcctacttccactgttgaagagagatacagaggggcaaacacttccaagatcatgctctccaacaacagaagctgcaccatgttcaccagatatgccacctccaggctttgagaattgtaagtcatcgtggctaccactaccaactcttcaacccatagctgaaaccacgcatgtgttgcacgacgtggctcccaccaagtcaatggtagtgggacttatggaaaaggcatgctcagtgctggcattggagcggacagatgtgaagatagactcggagcagagcctattgccgccattggagagtgaaactgagagttcattgcaagggccactgccaaggtcaccttcttccatgatgaaagccattccctgttcaccagatactgcacctccagggtttgaaaatttaaagttcacacagttacagcctccctgtccacctctggtgcagactgcacatgttttgcaaaattcagccaataatgaggccatgcctgtgatatcaaaggaagctcctcagccattgcctgcattggatgcaacggatttagacattgatgccaaacctgtcctggcaccaccatcagagagtaaaccagggcaattgtcaccggaacctccccttctgctacctcatgtagcacagcatacaacgtgttcgccagggatgacacttttagggtctgagaatatcgagtcctcgcagctgctgccacgagctctggttcttcctcttgatcagacttcagacatcttggctgatgcagggaccaagaagacagtcacaatggaagaagtgtgtcatccgctgcctgtagcaggagtggcggaagaagccaataggtctgttcttctaccagtaacggaaaatggctgtgagggccaatcaccacacctagagctacagacttcttcccctgcagtgaatgctgcagctacatcactggagatagctcccggaagttttgagaattcagagtcctctcagttgatctctccttgtctagctcagacaatagaccccactactcatgcatcaggtattatgcctactattgttaagtcagagaaaacgaatctgccactatcttcattacaggctacatgcacagacatggaaagtgcaatcctgtgtcagtcgccatcgaagagtgaagagagatcactgccacaggcagagcaacacccgtcttctccatctgttaaggacactacttgttcaccagaggttgcacccccaggttatgaaaattttgactctttggatcagctgccaccatcaccacctctttgctcaaaatttgaacatcaagttggtaaggtatattgtggacaatgtgatacactcttgatgtatccttttggggctcctgctgtgaaatgttccaactgtctttttgtcactgaaatcggagaacgcaatgttcggccacggatattgatggaacagagtgtctcacctgcggcacaagaggaggttcactagagagctaggtcaggctttaacaacggctggtagtggaacctagatgatatcgctcgtagtaactccagacgctgccatggaaaactcgcaagtcatccggcatgatcctgtagctgtaacctcaaatggcctgtggtctgtggaagtgtggagtggcaccttcagatgcagcctgtagtttagggatgaaaaaggcggatgcagtatggccaggatcaactgctaagcgaaaagattatatccagccgtagccttatcatagggaagataaactgcttaagctcggctgtaactggagcaggttaatcatggttgacggtacggtggtctcagatgatcctcaagttaagtatttgttggggacgagcagagtgcttcagtgcttgggtttgtctacgaaccatggaacaacccacttgtatctttagcgtcacagcacaatcacaagcgctgttgtggcccttcgagggcaacaggaggtaaaaaagtactttatgaaggtaggaatatttggtagcatctcctctctttttttgacaaaagggaaattcattcatttgtcatgagcacaacaaactccattctaagttttgaagccaattggatgttacaacgttgagattgtgctaaagcttgacaagaataaagacaatctcctgtaattgatgccctgccttgcctgttttgttaaactgtctgcaactttgttcatctctctttggatcttgagcacttagtagttccttcctggtgtggcatcaatcagtgccgcaagggttggtccgaggcactaatggctgggttgcggagcacgaagccggaggtagcagcattagccaagtagccaacaccttattatctgttagaatgttggtcacctgcaaatatagagttgacggctagtttggcacctagcagtagaacatgtcctgcctccaatgggtccatgagttgagttatggcaactagaaagaat

SEQ ID NO: 198782 - DNA, 1736 bp, Zea Mays
gcttccgcagttccgcttcaaaattccggtgaaaaaggaagacgacagctccagacccctaggcccctagccatggccggagaggcgggaaaagacccccaagcgtggctagccgccaacgagacggcgtcggccttcctctcccgttcactctcctcgcggccccccatcaccctcccgccaccactgcaccgcgcgcctctccgcccgggcaacgtcgtcgagatcgccggcccgtccaactctggcaagtcccacctcctcctcatggctgcagtgcagtgcatattaccaaaggagtgggagggaatctactttggggggctggggagggcggtcatgtacttggacttggactgccgatttgatgtgctacggctggctcaaattctgaggaatcgtattgcagagggctgccgtttagcacaccttagaaatggagaccctgaaaatgatgtcactaaagatgagtttcagtgttctcttcaaaatacactgttttctgattgtatgcagcgcttcttgtatgctcgatgttgcaaaagtcctgaattcatagatgctttgaagactgtacagtctcaatcaaggagggaagtgtccggcgctggtatatattttgttatgatagacagcattggtgcgttctactggatagatcgtggttctcaagcttcacgagagaataaagggaaaacactgcaaagcatttttgaaagtgttgtccacgagttacgcaagattttgcaacttgaacctgcattggttttggtcacaaaggcatccgtttatggggaaggcaccacaacagcaaatgacttcaatcgggattcttcaaaatacatgctggaggatcctagcggtttgggatattcaagacgggaggaagaaagaactctctctaatcgggaatatatgccatcaatatggcagtcttttgtcacacacaggataaaccttcaagaagcagaagttccctctgtgctggaaagtgaggtgcttcctttgcatacttctgagtgggtgcaaccttgcctcaaaatgaaggagaagttttctattatggatgatggtgttaaccttatccactgaatttaccagtctggcattctgtgatgaacatgtcgaacctcactgaattgttgtgatctgattaagaaaacagtatgcccacagcacgcctacaggatgttatgtggcagtgtctctatcttggttcttttattctttggcatggcacacatacagaacacagaagcatagaacgtgtgatggctgagtactgtatgattttaaagtttatccaatagtaccaaaaaatggaaactgttctcacgttcaagaattcttaacatagtggagctgagtaacctctactgatgtaagtctcttatttttaattattttctatttgtgcgtgtgtaattcgctgcaaggtgagacgtgagtgactggtgttttgtatgggggtcaatcccccttttttcccttcttaatataattatacatggcttctgtgtgatggagattttttccatttgtgggctttacttgccaatttcaaattgtccagcttttgtacctactttcagtgtgcttttatattgagcttgttcgctgcggcttgctgcggctgcaatccggctgcggctgcggcttctacagtatttttctctctatggattgcagctgcagcagtccaaacagctgcaacagtgtcggcttgtagccagccg

SEQ ID NO: 198783 - DNA, 1937 bp, Zea Mays
gcgtccgccccttgccccctccctctccgtgtctccgattctggatctgcccatgccgtaacccgcaggctcccggcatctcgctcttgcctccaaaattcaccttcgccgattgccgtcgtgggccgccgcgatggcgttgcggacgcctcgtaccacctccgtcgcattctccgctgactcccccctcggcggcgtcccaatacgctcctcaacagcctgctccgttcccacgccacctcctctcgctccgctgcgaccaccgaggaccaccagagcgggacgccgcggaactcgtcggccacgtcctggccgtcgcgcatgctgacgacgaggctgttgccctcccgggcgccctcggcgcggagctcgcacgcgtcctgcgagcgcgcggcgccgctgaggcaccgggcgcgccggcggaggaacaagttgaagtaggtccggaacagaggacagggagggacctaaaattcaagcccaaaggaccaaagcccgaagtttcttttcttccccgcaaagaaagaaggcaagagttctcggcttctcgcaagtcgcgacagagaaagaggcggagttgcggagaagatgcagagcagcagcatgaagagggagatcagcgaggcccacgacaccattcgcttcggcatcaacgccggcgtcaaagcggacctcgccccgccgcacccgaatgaaatccagaaatcatttcttcgttctaaattgtgtttggtgacaggaaagtctagaaataggtgtttatagattcatcgcgacacgaattcaccagaaaaggttacaagagaaatgcagagatttattctatggagaaagcatcagggcattctgctttgcgtcacaaagtttcaaacccagcaaaacccccagtcgatatatcagataggatgattggtgataccaaaggaagcaaactcaaacacacaaagtttcagaagcacagctactgcttgctccctcaggcgaccttgacctcgatggtcttgggcttcttgggctccggcgggggcagcttctcgacggtcaccgtgagcacgccgtccctgcacacggtgtcgcatcgggcggctcgacgaggcggacaaagccggtggcagaccatgggtgcaatgggtgcagagacttaggtggatggttctaaatgttcacgacaaaaaaatgtgtggcgcatgggtttctgtcctgagggtgcgcagatcggtcgccattagaaagatgcagcttcaactactttggaccaggtgcaaagtcatggcagttctgatagggcaccctacacaaatctggagtttgaacacacgacaggtgatatgcttatcttttgtggatggactgttcgcttggcttttgctgattgaattggagctgcacttgtagtttggtaacgtttatatacataactatgcggattgcgttagctagaatatgtcttccagtacctgggtgacaatgggctctaaattttagagtgttgtagatttgttttgttgcaaatgtggcatggcatggcttggcttgcagcttcgagtactggtcgttcgagatccttgtgctgtttgcagggctgatgcccgactctcatctcagcacttccatcattgcaatgtgccaaaacaccgaagccatatcatacatgatcacctatggcttcgccgctgtcatcagcacaagggtgtccaacgagctgggagcccggaacatcgccaacgccaggaaggcgctcactgtgtcgctggcgctgtccctgatgctgggggtggcgttcctgctgctcctgggcctcggccacgacctctgggtgcgcctcttcatcaccagcgaggccgtggtcagcgccttcgcctccatgacgccgctgctcatcggctccgtcgtgctggactccacgcaggggtactctgcggcgtcgccaggggcta

SEQ ID NO: 198784 - DNA, 2088 bp, Zea Mays
gatcttgcatcgttttacggtgaggagtacgcgtggagcgggtcctgggccgaacgcccgaacccgtgcatcacaaaggagcaaagacgacaataatttgtttctgggtcgacaacaatttgccgggcacacccaagacccgcggaagccacgacgacaagcctccatcgcctcttgttgtttgcgggccccatacgtcagagaccacaagcccgaggcttaactctccctgccgctaatccctcgcgccgccggagggaagcaagagatagatctgtccgcggccatggcggcggcggcggcggcggcggagcaaggcgtggacgccgcgaggaaagaggaggaggaggagcaggtagtgaatccgtgggaggtgtcggcggggaagggcggcatcgactacgacaagctcgtggaccagttcggctgccagcgcatcgacgacgcgctcgtggaccgcatcgcacgcctcaccgcccgaccaccgcactgcttcctccgccgaggcctcttcttcgcccaccgtgatttgaacgagatactggatttgtatgagaacgggcagaagttctacctctacacggggagggggccctcgtcggaggccctgcacctcggccacctcatccccttcatgttcacaaaatacttgcaggaggcttttaaggtgcccctagttatacaactgactgacgatgagaagtacttgtggaaaaacttgactattcaggaaagtaaaaggcttgcccgtgaaaatgctaaagatattatagcatgtggttttgacattgaaagaacattcattttctctgatttttcttttgttggagggtaagattactcttcctaattttgattgatattttaatttttgactgattttttggtccatccctaaggaagtcaataccatgctgtaaatcttggttttgattgttatttgcaaactaataaaccctctggccttgtctcacagtgctttttatgaaaacatgatgcaagttgccagatgtgtaactatgaataaggctattggaatatttgggttcaatcttgaggatcacataggaaaggttagctttcctccagtgcaggcagtcccatcattcccttcttcatttccccatctcttcgctggcaaggaccaactgcggtgtcttatcccatgtgcaatagatcaggcagacttagtgatggaggctcccacatggacgggggaaagggataaacaaggcgggccctttccctgcaaatgtggagatgatgtttcgaatccacgacctggtgactcagatccatattttaggatgactcgtgatgttgctcctagaattggttatcagaaaccatcactgattgaatctagattttttcctgctcttcagggggagaacacaaaaatgtcagctagtgacgcaaattcggcgatatacgtgacagatagtgctaaagaaataaagacaaaggtgaataaatatgccttctcaggtggccaggactcaatagagctccatagaaaacttggcgctaaccttgatgtggatgtcccaatcaaatacctgaacttcttccttgaagatgatgacgagcttgcgcacataaaaaaggagtacaaggagggaaggatgttgactggtgaagtgaagcaacggcttattgcagttctatctgagattgttgctagacaccagagagctagagctcaagtgaccgaagagatggtcgatgcattcatggcagtgaggcctcttcccaatatgtttggctgagcatcacggcgacaacttgaacaaacatttttgttatcagggagaattttaagagtctttagaattgtcgtgccaccataagtatcccctgtgttttacttcttcgggatttaggcaaacctggccaaacatcccatgtggtggctgtggttgattttgtaaactcatacttgatatggtatcaatgattcaattcagacattttttttcaagcatatgcatgccattgtaatagagagcacctcttttttagttataaacggatgttgcttttgttcaattcaataaccactgtgtttgaatggaagatgaacaatca

SEQ ID NO: 198785 - DNA, 1382 bp, Zea Mays
cttgatgaacaaacttttaccaaacttaggcatgagctcaatattcttgattcacgcaacttcttttgctagattgcacacatagctcatttatacttttaatcatatatgctatgactaatgtgttttcaagtctatttcaaaccaagtcataggtatattgaaagggaattggagtcttcggtgaaagacaaaggcttccactcggtaactcatccttcgccatcgctccaataaaggaccttgtctttggggagagagtaagaacccaaagctaaaagaccggatttcgtctttggtataatcttaactcatttacttatgaccaaaggggacgatagtacttcgataggctctaatgattccgtttttggcgattcatgccaaagggggagaaagtatgagcccaaagcaaaaaggaccgcaccacaaccaatttcaaaaacttagtgttttccaagagtatttatcaattggtatcctattgtgttcaaaagggggagaaagtagtatttcaaaaatgatatatcaaaaccctcttgaacactaagaggaggatctcttttagggggagttttgtttagtcaaaggaaaagcatttgaaacagggggagaaaatttcaaatcttgaaaatgctttgcaaactcttattcatttacctttgaccatttgcaaaagatctttgaaatggatttacaaaaagaatttgcaaaaacaaaacatgtggtgcaagcgtggtccaaaataatatataagaaagaaacaatccctgcatatcttgttgctgcacaagctgtgcagtccgaataaaatcaggacagataaggcagcctgaagcacttgggatatctgcagaactaaaagataagggctatgctttgttgtgtgttggtttcccatctggcgatgttgaagtcgagactcaagatgaagatgaggtatattggctccaattcgggagatactttgcacgagggccagtggaaagagatgattacgcgctagaacttgcaatgggagacgaatgagctgtgcctaagagaccttgccatctaaaatttgaataccatctcaaatttggacccatgtagttctgagttgcccccttcccgcctttccttgttcggttgtcacttattagcctggtgcgttgctgcgtgcagttctcgtttctcctctaatagatggcacacgttatgaagtgtgtaaaggtgtcaaaatccaaaaacatccagcattcacaatctttgtcgtgatgaagtgtgtaaacttgtaaaaaattatccaaaatctttaccatgaagctacgagtggctaactagggctggttgaagttgttccaagctgttgtgtcgctagggtatatttagttcgccatctt

SEQ ID NO: 198786 - DNA, 745 bp, Zea Mays
gaactcctaaccggttgctgcacaagctgtgcagtccgaataaaatcaggacagataaggcagcctgaagcacttgggatatctgcagaactaaaagataagggctatgctttgttgtgtgttggtttcccatctggcgatgttgaagtcgagactcaagatgaagatgaggtatattggctccaattcgggagatactttgcacgagggccagtggaaagagatgattacgcgctagaacttgcaatgggagacgaatgagctgtgcctaagagaccttgccatctaaaatttgaataccatctcaaatttggacccatgtagttctgagtatgccggttatctttttgtggctccaaatctcactctcagccttctttccttcggctgttagcgtttagagtgacaaggacacttcctgagaggaggaataaagttctgctctgctctctattttccaggttgcccccttcccgcctttccttgttcggttgtcacttattagcctggtgcgttgctgcgtgcagttctcgtttctcctctaatagatggcacacgttatgaagtgtgtaaaggtgtcaaaatccaaaaacatccagcattcacaatctttgtcgtgatgaagtgtgtaaacttgtaaaaaattatccaaaatctttaccatgaagctacgagtggctaactagggctggttgaagttgttccaagctgttgtgtcgctagggtatatttagttcgccatctt

SEQ ID NO: 198787 - DNA, 1283 bp, Zea Mays
gtcgcgctagaattcagtctcgtcttgctcgctcacgcagttggcactcgtcgcggcagtcggcgctgtcccctcccctcccctcccgccggtcgctgcagtcggcgcccaacccgtccctccgtccgccagagcacatctcacgctgcgggtcgaacagcccgaacgtcaatcaggtttcaggccgacggcggcacgatgacctgccccgccgccaccgccaccgccaccacggctcgcatcggggcgcggagaggaccgtgcctgtggaggagcgagaggagggccagcttcctcgtccgttccacgtccctgctcccggaccgcccggcccgggacacgagggcgcgcgccgcctcggagctgcagcaagcgcctcgaccagcctccgctaccgtccccgctcacaaggtcaccgtccacgaccgccagcgcggggtcatccacgaattcgtcgtgcccgaggaccagtacattctgcacacggcggaggcgcaggacatcaggctgccgttcgcgtgccgccacggttgctgcacaagctgtgcagtccgaataaaatcaggacagataaggcagcctgaagcacttgggatatctgcagaactaaaagataagggctatgctttgttgtgtgttggtttcccatctggcgatgttgaagtcgagactcaagatgaagatgagcatgttgtttgtcaatttgcaggtatattggctccaattcgggagatactttgcacgagggccagtggaaagagatgattacgcgctagaacttgcaatgggagacgaatgagctgtgcctaagagaccttgccatctaaaatttgaataccatctcaaatttggacccatgtagttctgagtatgccggttatctttttgtggctccaaatctcactctcagccttctttccttcggctgttagcgtttagagtgacaaggacacttcctgagaggaggaataaagttctgctctgctctctattttccaggttgcccccttcccgcctttccttgttcggttgtcacttattagcctggtgcgttgctgcgtgcagttctcgtttctcctctaatagatggcacacgttatgaagtgtgtaaaggtgtcaaaatccaaaaacatccagcattcacaatctttgtcgtgatgaagtgtgtaaacttgtaaaaaattatccaaaatctttaccatgaagctacgagtggctaactagggctggttgaagttgttccaagctgttgtgtcgctagggtatatttagttcgccatctt

SEQ ID NO: 198788 - DNA, 1138 bp, Zea Mays
gtcgcggcgtcgcgctagaattcagtctcgtcttgctcgctcacgcagttggcactcgtcgcggcagtcggcgctgtcccctcccctcccctcccgccggtcgctgcagtcggcgcccaacccgtccctccgtccgccagagcacatctcacgctgcgggtcgaacagcccgaacgtcaatcaggtttcaggccgacggcggcacgatgacctgccccgccgccaccgccaccgccaccacggctcgcatcggggcgcggagaggaccgtgcctgtggaggagcgagaggagggccagcttcctcgtccgttccacgtccctgctcccggaccgcccggcccgggacacgagggcgcgcgccgcctcggagctgcagcaagcgcctcgaccagcctccgctaccgtccccgctcacaaggtcaccgtccacgaccgccagcgcggggtcatccacgaattcgtcgtgcccgaggaccagtacattctgcacacggcggaggcgcaggacatcaggctgccgttcgcgtgccgccacggttgctgcacaagctgtgcagtccgaataaaatcaggacagataaggcagcctgaagcacttgggatatctgcagaactaaaagataagggctatgctttgttgtgtgttggtttcccatctggcgatgttgaagtcgagactcaagatgaagatgaggtatattggctccaattcgggagatactttgcacgagggccagtggaaagagatgattacgcgctagaacttgcaatgggagacgaatgagctgtgcctaagagaccttgccatctaaaatttgaataccatctcaaatttggacccatgtagttctgagttgcccccttcccgcctttccttgttcggttgtcacttattagcctggtgcgttgctgcgtgcagttctcgtttctcctctaatagatggcacacgttatgaagtgtgtaaaggtgtcaaaatccaaaaacatccagcattcacaatctttgtcgtgatgaagtgtgtaaacttgtaaaaaattatccaaaatctttaccatgaagctacgagtggctaactagggctggttgaagttgttccaagctgttgtgtcgctagggtatatttagttcgccatctt

SEQ ID NO: 198789 - DNA, 2394 bp, Zea Mays
gaagccgtaaccattacgctaaagacccttttgcgtttgttaggatatggggtgatcaaggccaaactgcactggagaaggccagcatatgcttgcttaactgtggtcctaccggaacagaagcattgaagaatctcgtgcttggaggaataggaagtgtgactgctgttgatggctccaaagttgaagcatctgatctggggaacaattttatgtgtaatttctttgctatgtgattccacctgttcttctgaattcatccccagaaattgatggaactcatattctggtaccttatatttgcattcagtggatgaaggatgtttggggcaaccaagagctaaatctatatgttcattcctacaagagcttaatgacgctgttaaagccaagtttgttgaggagtttccaacgcatttgatagacactaatccttcattcttttcccagtttactgttgtcattgctactcaggaaagcagacatcgttttggttgctgcacgttcatatggtctaactggtttggtcagggttagcgtcaaggagcactgtgttatagaatcaaaaccagatcacttcttggatgatttgcgacttcacaatccatggactgaactaaagcaatttgcaaaatcaattgatataaatgataaagatcctgttgtccacaaacatactccatacattgttgtccttgtgagacttgctgaaaaatgggcagatgcccatgatggtaacatgccttcaactaggcaagaaaagaaggaatttaaggacctaattcgagcccacatgcttaatgtagatgaagaaaattacaaagaagctgtggactcatcatataaagtctcagtcactccaggaatcagtaatgagatccatcagataattgatgatgactctgcggaagtcaattcatcatcagaagatttctggattttagtagctgctttaaaggagtttatttccaaggagggtaatggtgagctacctctggagggaacaatacctgatatgacttcccttactgagtattatgtaagcttacaaaagatttaccaagctaaggcagaatttgactgtcttgccctggagcatcatgtaaaggaaatcttgaaacagattggtagagatccggattctatttcaagagcatatatcaaaacattttgtaaaaattctaggaaactaaggatttgtagatatcgtagtttcaaggaggaatttagctccccgattgtctctgagattcagaggtatttcagcgatgaagactgcagttacgcaatgaacttctacattctactacgggctgtcgatcgattggctgccaattatagccgattacctggaatcttcgacaggctgaagacagttgcggcttcagtgctaagcgagatgggtttgaacggagcatccttatcccaagacctggtaaccgagatgtgccggttcgggggtgcggagattcatccagtggctgctttcatcggtggagtcgcttcacaagaagtgattaagctggtcaccaagcagtttgtgcctttggggggaacattcatttttaatggaatcgatctcaaatctcaagttttggtgctataacatggatgtggagcgttggatttgagctggtccagattttgtgccagggcaccgcgctgcccaacgagtacccaagtctcgcagaaaatatcaatacttgcttcgtatgattttttgccaaatgactagcaaattcctagctcacgcggctgttatgcgtaaaaccagaagagctgctgcttttagactacgcctgttatatattagtaggcgaagtaatatgtcagtggggctgatgtgataagatggatggtgttaaagactagcgtgtgcgcgatttgacgaagacgactacgagacgggatgagcaatgagcatgtcggccgagctatggacgcttccatcatatcatggaccgacatcaatgtgcatatgatctcaggtgtccatcgacagaccgaatcttccgtggccagtattccttcggcgacgcggttgccgttagacgaaggaaactgtcgtgtgacagcgaaatgtggttgctacatgctggtagcgcacatagcacactttgggcgtgtttggttcggcttttttctaaatagcttttctgaaaagctggctgtggagaaaagctggctgttgggaaaaactggtggttagaatttaggtgtttggttcgccagctgtgcaaaaaagttgttcgttagaatataggtgtttggatacacagattctcagactgcagattctgtttgaaaaaactatacacattaacaccgaaccaacaaaaggtcattacatataattagtagagttcattacaacataactaccgttacatttac

SEQ ID NO: 198790 - DNA, 2417 bp, Zea Mays
cagaaaatcgcccccgagggagatcgaacccaggacctgtaggtgctactcggaagccgtaaccattacgctaaagacccttttgcgtttgttaggatatggggtgatcaaggccaaactgcactggagaaggccagcatatgcttgcttaactgtggtcctaccggaacagaagcattgaagaatctcgtgcttggaggaataggaagtgtgactgctgttgatggctccaaagttgaagcatctgatctggggaacaattttatgttggatgaaggatgtttggggcaaccaagagctaaatctatatgttcattcctacaagagcttaatgacgctgttaaagccaagtttgttgaggagtttccaacgcatttgatagacactaatccttcattcttttcccagtttactgttgtcattgctactcagcttccagagagttctttactgaagctagatgatatttgcaggaaagcagacatcgttttggttgctgcacgttcatatggtctaactggtttggtcagggttagcgtcaaggagcactgtgttatagaatcaaaaccagatcacttcttggatgatttgcgacttcacaatccatggactgaactaaagcaatttgcaaaatcaattgatataaatgataaagatcctgttgtccacaaacatactccatacattgttgtccttgtgagacttgctgaaaaatgggcagatgcccatgatggtaacatgccttcaactaggcaagaaaagaaggaatttaaggacctaattcgagcccacatgcttaatgtagatgaagaaaattacaaagaagctgtggactcatcatataaagtctcagtcactccaggaatcagtaatgagatccatcagataattgatgatgactctgcggaagtcaattcatcatcagaagatttctggattttagtagctgctttaaaggagtttatttccaaggagggtaatggtgagctacctctggagggaacaatacctgatatgacttcccttactgagtattatgtaagcttacaaaagatttaccaagctaaggcagaatttgactgtcttgccctggagcatcatgtaaaggaaatcttgaaacagattggtagagatccggattctatttcaagagcatatatcaaaacattttgtaaaaattctaggaaactaaggatttgtagatatcgtagtttcaaggaggaatttagctccccgattgtctctgagattcagaggtatttcagcgatgaagactgcagttacgcaatgaacttctacattctactacgggctgtcgatcgattggctgccaattatagccgattacctggaatcttcgacagtgagattgacgaggatatccctaggctgaagacagttgcggcttcagtgctaagcgagatgggtttgaacggagcatccttatcccaagacctggtaaccgagatgtgccggttcgggggtgcggagattcatccagtggctgctttcatcggtggagtcgcttcacaagaagtgattaagctggtcaccaagcagtttgtgcctttggggggaacattcatttttaatggaatcgatctcaaatctcaagttttggtgctataacatggatgtggagcgttggatttgagctggtccagattttgtgccagggcaccgcgctgcccaacgagtacccaagtctcgcagaaaatatcaatacttgcttcgtatgattttttgccaaatgactagcaaattcctagctcacgcggctgttatgcgtaaaaccagaagagctgctgcttttagactacgcctgttatatattagtaggcgaagtaatatgtcagtggggctgatgtgataagatggatggtgttaaagactagcgtgtgcgcgatttgacgaagacgactacgagacgggatgagcaatgagcatgtcggccgagctatggacgcttccatcatatcatggaccgacatcaatgtgcatatgatctcaggtgtccatcgacagaccgaatcttccgtggccagtattccttcggcgacgcggttgccgttagacgaaggaaactgtcgtgtgacagcgaaatgtggttgctacatgctggtagcgcacatagcacactttgggcgtgtttggttcggcttttttctaaatagcttttctgaaaagctggctgtggagaaaagctggctgttgggaaaaactggtggttagaatttaggtgtttggttcgccagctgtgcaaaaaagttgttcgttagaatataggtgtttggatacacagattctcagactgcagattctgtttgaaaaaactatacacattaacaccgaaccaacaaaaggtcattacatataattagtagagttcattacaacataactaccgttacatttac

SEQ ID NO: 198791 - DNA, 996 bp, Zea Mays
acaccgcgcaggaacaaccaccaggcacagccaacaagcttgctagtgtgtggtttctctcatcaggtcaggaggagcatggccgaccataaggaggagcagtctgtgatggacaagatctccgagaagttccacggcggggactcctcgtcgtcgtctgactcggacgacgagaagaagaaggggtcttcttcggcgtcggcgacggaggccatgaaagccaagatctaccgtctcttcggccgcgagaggcccgtccactctgtcctcggcggcggcaagcccgccgatcttgtcctatggaggaacaagaagatctcaggcggggtactcgctggtgccacggccatctggctcctgttcgaggttatggagtaccatctcctcaccttggtgtgccactgtctcatcgtctcgctggccatcctgttcctgtggtccaacgcctccagtttcatcaacaagtccccaccaaacattcctgaggtgaaaatccctgaggatgtgtctgttaatgttgcactgacactgagatacgagatcaacaggggctttgctaccttgagggagattggacatggacacgatctaaagaaattcctaattgtctctggctcttttcagttcttgggagctgttgcaacttcctgacactgttctatattgtctttgtggcactgtacactatacctgttctgtatgagaaatatgaggacaaggttgatgcttttggtgagaaggctatgatcgaactgaagaagtattatgccatcttcgatgagaagtgcctatcgaagattccaaagggcctcaaggataagaagcactagattggtagtaaggatttgctacacctctataacaagacacaagagcctgatttttcgcctttgtactagaggattccaataacatttttacatgccttgcgggagtacgcccttggacttttgctgatggaatctgcgaccgaaaacttatggtcttatttccatg

SEQ ID NO: 198792 - DNA, 963 bp, Zea Mays
ccaaggtcgccgaagtcgacggtgaggatcgaatcatgcgccgtttataaaaaacgtcttagcctgctacacgcacaccgcgcaggaacaaccaccaggcacagccaacaagcttgctagtgtgtggtttctctcatcaggtcaggaggagcatggccgaccataaggaggagcagtctgtgatggacaagatctccgagaagttccacggcggggactcctcgtcgtcgtctgactcggacgacgagaagaagaaggggtcttcttcggcgtcggcgacggaggccatgaaagccaagatctaccgtctcttcggccgcgagaggcccgtccactctgtcctcggcggcggcaagcccgccgatcttgtcctatggaggaacaagaagatctcaggcggggtactcgctggtgccacggccatctggctcctgttcgaggttatggagtaccatctcctcaccttggtgtgccactgtctcatcgtctcgctggccatcctgttcctgtggtccaacgcctccagtttcatcaacaagtccccaccaaacattcctgaggtgaaaatccctgaggatgtgtctgttaatgttgcactgacactgagatacgagatcaacaggggctttgctaccttgagggagattggacatggacacgatctaaagaaattcctaattgttatcgcaggtctctggctcttttcagttcttgggagctgttgcaacttcctgacactgttctatattgtctttgtggcactgtacactatacctgttctgtatgagaaatatgaggacaaggttgatgcttttggtgagaaggctatgatcgaactgaagaagtattatgccatcttcgatgagaagtgcctatcgaagattccaaagggcctcaaggataagaagcactagattggtagtaaggtgtgtgtgcatcccctatgcatagtgaaggtcccag

SEQ ID NO: 198793 - DNA, 959 bp, Zea Mays
gtttttatttgggcacacactaggctaggtcttgtggctactattaaggaccgagcaaatgaaatcttcaagaaaattgaagatctcaagtctattaggggaagaaatcaagatgccatattagccgcatgtctatatattgcttgtagacaagaagatcgccctagaactgtgaaagaaatatgttcggttgctaatggggccacgaaaaaagaaattggcagagccaaagaatttatagtgaaacaactggaagttgagatggggcaatctatggagatgggaaccattcatgctggagattttctgaggcgtttctgttcaactcttggaatgaccaatcaagctgttaacgcagccaaggaggcagttcagcgctcagaggagcttgatataaggaggagcccaatctcaattgcagccgccgtcatttacatgataacccaactctcagaggacaagaagccacttaaagatatatccttggctactggtgtggcagaaggcaccatcagaaattcgtacaaggatctgtatccctacgcctcaaggctcatcccgaatacctacgccaaggaagaagacctgaagaatctctgcacaccttaggaagctttactttttttcccttctgttatataaatcggaattagatttgtcaaagaggagtgagtgaagttgttcctgttgtgaccgactgtactgagcaatgtgtcgtcgccggcgcgcttaactttgtggatggaccaatgagaacataagttgtcatcatcagatcgaatttcttttcagagcacctgccacctgaagatttttttgggatagcaaaggtgtcgttttcgtatactccctttgggaaaggatgtagatagcaagcagtccttggaagtgcacaagattttatttaaaagaacaggattctgttccccatcttcagaagaaaccgtcatttatccatc

SEQ ID NO: 198794 - DNA, 1241 bp, Zea Mays
acaagatatcccaaatgctagccgcaaaagatggggagccatggtgggatagcccatggggcccaggaaggccaggatggcacatagaatgcagtgccatgagtgcacattatttgggtcattcttttgacatacatggtggtggggaggatctcatctttccacaccatgagaatgagattgctcagagccgtgcggcatgttgtgacagtaccataaattactggatacacaatggttttgtcaatgtaaatagccaaaaaatgtctaaatcgcttggtaattttgtcaccatacgaaaggttatagagatgtaccatccgctggctttgagaatgttcttacttggcacacactacaggtccccaattaactacacaatagaacaactcaatgtcacatcagacagattgtactacacatatcagaccttgcttgattgtgaagagatttgtcagcagcaacaaagcaacactggaaattcattgcctgctaataccttaaattacatccaaaaacttcatgaggaatttgagacctcaatgtcagatgatcttcacacttcagtggcattggctgctatttctgagccattgaaagttatgaatgatctgttgcacactcgtaagggaaagaagcaggacaaaaggctggaatctctttctgccttagaagagaaaataagagtagttctctctgttctaggattgctaccttcaagttatcatgaggctttgcaacagctgcgggataaggcactgagacgagcttccatcaccgaggagcttgtggtgcagaagattgaagagaggactgcagcaaggaaggcaaagcagtatgaaaaatccgacgagatccggaaagaactggctgccataggaattgccctcatggatggccccgacggaaccacttggagaccatctttgccaattttagaggaagcggtggttgcgaaaacatgatctgtgcaagggattccaatacgacccatggacaccagttctagtcggtaatcatggatttgctatatgtgacgaacttgttcgtttgactttcattcataccggcttgtaatgcttctataatgttttttcataattctctgctcccattagatctatagtagttactagctgaatgcacgtgtgttgtaatgaaaatatataatatgagtatactatgataacttatatacaaaatgtatgttataccgttatgagaaaatgtttcataatcaa

SEQ ID NO: 198795 - DNA, 2020 bp, Zea Mays
ggctcggcctcgttcctcgcgcgtactgccgcttgccggctaccagaaaaatggccgcggcggcggcggcggctaggcgtgccgctggccttctccctctcctcctatcctcgcggtccggtgctcgcatacccctccaccgggctgtatcccagatccctccgccttgctcctatcgcctactctcgcagcaagccaagcccttctccgcctctgcctctgcctctgcctcagcctccgcgtcgaatggcgcgaccgcggaaagaacccgtgagctgcatctgtacaacacgaagtcgcggaagaaggagcagtttcggccgcgcgatccaggcggggaggtcggcatgtacgtctgcggcatcactccctacgacgacagtcacatcggccatgcccgcgcatacgtagcctttgacgtcgtctacaggtacttgcgctatttggactatgaagttcgctatgttcggaacttcaccgacattgatgacaagataatcgcaagagcaaatcagctgggggaagatccttttaacttaagtaaaaggttctctgatgacttcttgttagacatggccaatcttcaatgtttaccaccatctgtggagccccgtgtttcagatcatattgatgagattataaatatgattaaacagtgggtggggatgtttatttctctgtagacagttttcctgactacggagaattatctggtcgaaaattagatgataatagagctggtgaaagggtttctgttgatgagaggaagagaaatccagctgattttgctctatggaaggccgcaaaagatggggagccatggtgggatagcccatggggcccaggaaggccaggatggcacatagaatgcagtgccatgagtgcacattatttgggtcattcttttgacatacatggtggtggggaggatctcatctttccacaccatgagaatgagattgctcagagccgtgcggcatgttgtgacagtaccataaattactggatacacaatggttttgtcaatgtaaatagccaaaaaatgtctaaatcgcttggtaattttgtcaccatacgaaaggttatagagatgtaccatccgctggctttgagaatgttcttacttggcacacactacaggtccccaattaactacacaatagaacaactcaatgtcacatcagacagattgtactacacatatcagaccttgcttgattgtgaagagatttgtcagcagcaacaaagcaacactggaaattcattgcctgctaataccttaaattacatccaaaaacttcatgaggaatttgagacctcaatgtcagatgatcttcacacttcagtggcattggctgctatttctgagccattgaaagttatgaatgatctgttgcacactcgtaagggaaagaagcaggacaaaaggctggaatctctttctgccttagaagagaaaataagagtagttctctctgttctaggattgctaccttcaagttatcatgaggctttgcaacagctgcgggataaggcactgagacgagcttccatcaccgaggagcttgtggtgcagaagattgaagagaggactgcagcaaggaaggcaaagcagtatgaaaaatccgacgagatccggaaagaactggctgccataggaattgccctcatggatggccccgacggaaccacttggagaccatctttgccaattttagaggaagcggtggttgcgaaaacatgatctgtgcaagggattccaatacgacccatggacaccagttctagtcggtaatcatggatttgctatatgtgacgaacttgttcgtttgactttcattcataccggcttgtaatgcttctataatgttttttcataattctctgctcccattagatctatagtagttactagctgaatgcacgtgtgttgtaatgaaaatatataatatgagtatactatgataacttatatacaaaatgtatgttataccgttatgagaaaatgtttcataatcaa

SEQ ID NO: 198796 - DNA, 3696 bp, Zea Mays
ggcaagagagagaagagaagagaagagaagaggggagtcgaggtcgagagcagcagggagagggaaaatccactaatccccccaccccggctctctcgaaacccgccattcccctccgccgcaaacacgcgtcggagctcgtggcgagcgccgccaccccgcactcgggctggggggcgtccctccgcccccttcgatctagagccggcggccgcgatcccgccgcgggtcctcgcggccgccgcgaattgggtttgtactgacgttaccggtgggcggaggcgctttgatcctgtagctgccgggttgggttcagtagatggcgggcaaggagcagggcggtggaggcccgccgcagaggcctcccatgcccgcagcgtccatgcagccgccaatcaagaagctggtaaggcagctggacttcaactcggcggcgttggcggggaaccccgcgatggcggcagcggcggccgccgtgtctagggctcttcagccgagggcgttgcccgcggggttccagcatccgcagcacgtgagggctgccgtgccgatggtggtgccgcagcagctgcaccagcgggcgctgccggtgatgcgcccgcatccggtggtgggtcatgtgccgcggcacgcggtgccgctggcggtccctgtaccgcagctccgtccgatgccgccacagccagtccagcgtcccccggtcgccgttcccttgaaaccagactcaccaaaaccgtgggcaagactttacgaagggaaagatagcactcccacgaagaaaaagtgctgcaactgcaggaactccagatgtttgaagttatactgtgaatgcttcgcttctggtactcactgtgatggttgcaactgcaccaactgttttaataatcctgagaatgaggttgccagacgtgaagctattgaagctacattggagcgtaatccagatgcttttaggcctaagatcgggagcagtccacatacgaataggaataatgaggtgtctagtgatctccctttagtagggaagcataataaagggtgccattgcaagaagtcaggatgcctcaagaagtactgtgagtgcttccaagctaatatactatgctctgaaaactgcaagtgtatggattgcaagaattttgaaggaagtgaagagagaagaaatcttttccaaggggatcataaaaatgcaattaacattcagcaggcgacaaatgcagctgtaaatggtgctattggaaccacaggattcccttctccctccacgtcaaggaagaggaaacatattgatccttcacttgaccattcaaacaaggaacatgcagcgcacaggaattgtcacatacctcagaaaaatgcagtgcctgatggttcaattccaataagccagtctgcacatcctccaactctgggcccctttaaagttacctacaggccccttttagcagacattgtccaagcagaggacgtaaaggagctatgcaagcttttagtggtggtatcaggagaagccgccaaaacatatgctgaccggaaagcgaaggaagagagggttggcaagaaggaagatgaaagggcagaacaaaaggaagatgacagggcaggttccctagcattgacaaaccatgacagagaaggaaataatcaagatccagataaaaaagcatcaatcgatgaccattcaagcagaggaactcatacgggcaaagctaatcaagaagaatccagacctaactgcgctgatgatcagaagtccaatagacctatgtctcctggaacactagcactgatgtgtgacgaacaagcgttcgagaaaatgtgtgacgaacaagatacagtgtttacggcttctcaaaatgctgttcctcagcagacagttactgtcaaccaaaaccaatctgcactgtacgcagaacaagaaagaattgtgctgacagaattccgtgattgcctccgcaaacttgtgacatacggaagaatgaaagaggaaaggtacgccatggaaatcaaatctgaaacatctggccatcctggacagctactcaaatgtccaaactgggaaacggaatcggctcgagtgaaaatggtccacgacttccgcaaattactggctcaacagtatctggagctaccctcactctcaagccatatgatgttcaaccagccatcggaaaagaacataccgtggtatcagaaaacgttgaggacaacccaaggaccataagaaggtcattctcttttagagcagaggatgttcacgttgttctaggcgatcacaaaaagaagggcaaccatgggagtaacatcttgtcatttctcaagaaaaccaggcgataagcataagaactttgctaaagaaataaacataagaatcaatgcaccaacgggatagagtggaactgtagaggagtaccttttcccccctttggatagtcttttctttcgtggtactattggtcctaccggtcatgcagcgctttcactgtttcgcaataagtactgatatactgaaagcatttcttcaatgatatgtctaggttatcttcaacaacttatcaattctcatactcatatttaaactctactctatcaatattgcaacctacaatataaaacaatgttttgggtgactatattagtgaaccgctggacacggtcgatctaagtcctagggtcccttatgtcctagagtgctataaagaatagctattcaggacagttgagcaacattttaaggtattaggaccataccattttatttgtcaatcgataaggagaaagaggacacatgatacatacacactgcaatctggacctctctaactatgcgcacgctggctcccactcgtgtccaggtttagcatgaccatcaacttgtgtcatgctccctcttaactctctttctagtactctatgtatcctgatgttgttacactacaataacattcatcaatgtaaaagaagttttgatcttttattggtgtgccacacaatttaagaccatagttccaaggaagacatctcatacaatcatacagaacgtgattgttgaaaccacatatgtcacatatcattctatggtagtctcttgtatgatttctcaaaccacaaataagaatcaagtaaaaagtcttacttgcttgaataaatgacttgaccaaataagaatctggagctactgttaatgatatatatcaggggtaccaagatcaacctttatgaagaaggacatgtacggatgagcctatgggcttggccgagagcccaaagactcgatgatcaagactagaaggaggcctgaagtgacaaggatttcagaagcgtatatatggaaaagatcttatcaaaatagaagatatgccaaatgttctaacacttgtaacgatatagttcgattcacatacaaatttgggaccaactcggtcacatgttcaactaggtaccgagtctgtgtctatcctataactgatgtcgctccttagactataaaggagggtcaatgagtgattacgggcctgtttggttcactacctcagttgccacactttgcctaacttttctgtctaaggttagttattcaattcgaacgactaaccttaggcaaagtgtggcatatttagccacaaaccaaacaggcccatatatattctttgtaatctcacatgtctgtatatatgtgaggtcgaagtcttttag

SEQ ID NO: 198797 - DNA, 1973 bp, Zea Mays
ggacacgaaaccaaacaaaacaaaacgctagacacaagaatccaaccggcaccatctgagcaagtaccagcgcgcccgtgacgagccctgcccctgcgcacggcgccgcgccgtccgagcctctcggtcggtcctcgacctcgagctcgaggagggaaggaaaccccgtcgtcttcgcgccatcgcgtgtgcggacccgccgccccgcgccaaagggaggtcacgcgaccgcctgcgcgccttgtctccttgcccccggtttatttgtccccgaacgctcacaacttcgcgctcgtctgcgtttgccatttctgtgcaaggtagcttgcacccatcgtgaagccgagggagcggcgacacattggtacctgctgtgctgcagtgctctcgtcctggtcggagatggacgctgaggccggcgaggcgggggtgcagcagccggccggggcggcgtccacgagcaccgcggcggtgccgttcgacaggtcgtcgtcgcggctaggcgcgccgggtgccgagagcttcgacggcgcgctcagggagctcaaggatctgcggtctcagctgcacgaagcggcggactgctgcgccaaggcgttcctcagcaccgacaagaagaagatctctactctcatgcatgcgaaggattctggagggtacaaagggttacatatgcgatgcggtggtagctgtgatcgatcacctggggacagtttcgtccaagcttgagcacaagctgcaggagaggactgaagtcgcacagacggaacgaaagatcaacttcttgaaacaggtgatcttcggaccagagcttcattcttctctgtcactgcgattttatcaggagatcagcatagacatctgcatgcggcaaggaggcttttgacatgcgagcagtacgccgtttctctgaagcttttgtctgtacgaggggaccctgacgccattcgatatcatcgccgttacatctcacaatctactcaaatgtccaaactgggaaacggaatcggctcgagtgaaaatggtccacgacttccgcaaattactggctcaacagtatctggagctaccctcactctcaagccatatgatgttcaaccagccatcggaaaagaacataccgtggtatcagaaaacgttgaggacaacccaaggaccataagaaggtcattctcttttagagcagaggatgttcacgttgttctaggcgatcacaaaaagaagggcaaccatgggagtaacatcttgtcatttctcaagaaaaccaggcgataagcataagaactttgctaaagaaataaacataagaatcaatgcaccaacgggatagagtggaactgtagaggagtaccttttcccccctttggatagtcttttctttcgtggtactattggtcctaccggtcatgcagcgctttcactgtttcgcaataagtactgatatactgaaagcatttcttcaatgatatgtctaggggtaccaagatcaacctttatgaagaaggacatgtacggatgagcctatgggcttggccgagagcccaaagactcgatgatcaagactagaaggaggcctgaagtgacaaggatttcagaagcgtatatatggaaaagatcttatcaaaatagaagatatgccaaatgttctaacacttgtaacgatatagttcgattcacatacaaatttgggaccaactcggtcacatgttcaactaggtaccgagtctgtgtctatcctataactgatgtcgctccttagactataaaggagggtcaatgagtgattacgggcctgtttggttcactacctcagttgccacactttgcctaacttttctgtctaaggttagttattcaattcgaacgactaaccttaggcaaagtgtggcatatttagccacaaaccaaacaggcccatatatattctttgtaatctcacatgtctgtatatatgtgaggtcgaagtcttttag

SEQ ID NO: 198798 - DNA, 1397 bp, Zea Mays
cgccatctctccatccttctcctcctccctggttcagatctctcatcgtcccccgctgcattccatcccgaccccgtttgccactggtcacaccctctccatcgcttcctgccaccgaccacaccctctcgatcgccattcgccaccggccaaatggaggccatccggaagcaggcctcaaagttccgggagcaggtggctcggcagcagcaggcggtgatgaagcagttcgggggcgggtacggcgcagacggcgtgttcgcgaacgaggccgaggcgcaacagcactccaagctcgagaagctctacatctccacgcgcgccgccaagcacttccaaagggatatagttcggggcgtcgagggctacatcgtcacggggtcgaagcaagtcgaaatcgggaacaagttatgtgaggatggcaagaagtacggcaccgagaacacttgtagcagtggaagcacactgtcgaaggcggcgttaagttttgctaaggcacgatccatgatggaaaaggaaaggggtaacctgctgaaagcccttggcacacaggttgcagaacctctgagggctatggttatgggagctcctttggaggatgctcgccaccttgctcaaaggtacgacagaatgcgtcaagaagctgaagcgcaggctattgaagtttcgaagcgccaaatgaaactaagagaggcgtctggaaatagtgatatggtttcaaggctagaagcagctgagtcaaagctgcaagagttgaaatcgaatatgggggtattgggcaaagaagctgttgcagcaatgactgccgttgaggcccaacagcaaagattgaccttgcagcgtcttattgcattggttgaatcagagagaaactaccaccaaaaggtcctacaaattcttgatcaacttgagagagagatggtatctgagcgccaaagaatcgaaggagcacctccggtggttgagagttccatgcctccaccgcctgcatatgaagaagtcaatggtatattcatgagaaatacagttgcagaattggtcgagactgtggagtatttcttggctgaggcaatccagtcataccaagccgaaagcgataccgagctcaacctttcaactggtgactacatcgagaaacgggagcgtgtgcttgcaagtaaagtcgcccaagttttctaagtcttccgctgagccatgtagtatccccggggttgtacaatgtgtgttgtttatgcttgtcatcttcagagaatcagaggagatctgtaatttttgctgaaagctgcctgttgggtggtttgtttctgcctggccgcctcaattgttcaaattcatgtggcaggaactgaatatattcattcttcagttatcctgtctatatatatatatatacatat

SEQ ID NO: 198799 - DNA, 2221 bp, Zea Mays
gccaggacgggtcgcgcgtgggcccgcttatccctttcccttcgcttcgacaaaacctccaatacacacacacacctccgttcctccctcacgccggcggcctgtatccctctccccatggctgctggactgggagcgcgcccctccgccaccttcgtggccggaaggttccggcctctcgctgcccctctccgccccgtccgctccggcaagttcgttgtgccaaagcgatgcttcattgtatcaagcaggcttgcatgggtggaagatgagcttatggagatacaaaagtcacaagagcaaagttcagtaaaatcaaagaaaaggccacctttgaggcgtggaaaggtctccccacaacttcctgtaccagggcacattccaagaccatcttatgttggtgcgaaaggattgcctgaactatgcaagggccaattacatgatgctcaaggaattactggaatgagagctgcttgcaaacttgctgcccgtgttcttgacttcgctgggactttagttaagccatccattactacaaatgaaattgacgcagcagtccataatatgatcattgaggctggtgcttatccttctccacttggctatcatggatttcctaagagtatatgtacatcagtaaatgagtgtgtctgtcatggggtacctgattcaactcagctgcagaatggggatattataaatattgatgtaaatgtgttcctgaatggataccatgggggtacctccagaacatttgcatgtggacaagtggatgattctatcaaacattttctcaatgcagctgaagaatgcttggagaaaggcatttctatctgcagggatggtgtgaactacagaaagattggcaagaaaataagcaagcttgcctatttttatggctattatgtggtggaacgctttgttgggcatgggattggaactatgtatcattctgagccactaattctacatcatggtgggtaccatttttgacatttaaacctactttagtattggcattttgttttatcatacaataataattcatggagtgtggcttctcgtattgctagatttactggtttcgtgttcagatgtcctaaattttcaattccatcgcttgctaggcacattggcttctttagactgacaatatgtggtactaaacattttagctacatgtatgcttaaattatcactggcaagatggaaacgtcttatttccttgcagaactgtctacgctgtcattataagccagtttatcttgatttacactggttagaccattgaaatccagggatcaatgaaacccccatgaccaatccaggtttgaaagctggcatgaacttcttgagaacaaaatcagtgggatgtctctcttgcctaccaacgaaaactcagggcgtatggttgagggccaaacatttacaattgaacctatactcacaatggagaaaacagagtgtgttacatgggaagatggatggacgactgtcactgctgatggtagctgggctgcgcagtttgagcataccatactggtgactagggacggtgcagaaatactgacgaaagtctgagctattctcctgcccgataattattgtcagaagtgagtcatccattttcccagcgcgatggttcagagttttgagatctgctgcaggccgacatacgggaaaggtttcccccatgtagcagcaacttgcaggtgataggtgagggcacacacacacacagagacacggctgcatctctgtgattaacacattactggtctcctgcagcctgctgtagtggtgttgctgtgcctttggattctagaagacattctgtatataaaacagcactcctaacagttcagtctagaacctagaagtagaaactgttattgttatgatacggaagcactttaggggaacagttggagacacatttttatgtttttcaaaaaaaaaatgatttagaaaagacttatagggagctcttggaaatgctctaataaaaacatctcctaaaattttgtttttggacgtataacattacaagccatgtccaacagatcccagtgtgtgctcccaatttgacggtgtcccaaaatcagacctcttttggcgtaaattttagcacacatacggacgctcccaatctttttttttaaaaaaaattggtctacggccccgcagctagaccccagcacaccgcccccgggatcttcgg

SEQ ID NO: 198800 - DNA, 2153 bp, Zea Mays
cttcaggtccttgatgctaccaacaggtgaaaaaaatgcagaatggactacttagagatagctacactatcgatgcatctacatcattttggactatatgggacaccatcagtaatggttgatcttgtctactgtgctttggagttcctttcaactttgcttggagcctttcatgccactgatggagtcatatgcctctgcccagaaattcagtttctgactgaactaaacggtggtggtttgaatcatcgtggttcactggttttcacaatattgggattcttggcaaccatgaggacattatgagattcttggctaccatgaggacaaattgttcaattacattttctacgtctatttcgaagcgtcgatggcggatgtccgcacacaaaatgccttgaagggtctggaggaagttgcaagtttcctgcgtgtccttggctactatccgtgcaacacaataacgatatgagctgttgcgtcacactgtctatcttggttgctccgccttggaagaccagagtgggagatggttgctatttctgctcaagttagcgagaataaatactttgtttcgatggcatatcgttgaataaaaggttcctcttcccttgtttggaagagattatggtcattatacactcccgactgaatatgaacactcttgaaatacattgcgaagctgcagaggatcgtcattagaattgcatgaaggttgtatgcgaaaccactggattgaacaattcgagaaatctacagaggaagtcgtgaacagctatgcacaagattgagtctaaggtataggcatctgatggaggacatgttgtctctactcccgcatatgaaggacaaccaggacaaggtcgagtccaagcagagcaaggggaacacgccgagcaagctgcttgagctcaggagttgctccagctgcctttcttcgagattctggctgttgaccatgcgtcggatgagggcgcgattgtaccaattggttcgcagcatgatgcacatttgaccaaactgatgaatatggaaaatgaccaacctttgttgccggcaccaccagttaatctggaatcagccatccttgagcaaaatgcaaatatggtggctctcaaggaaggctgttctgtgggaagtgagctgccacctggtctgcagggtaattttggtggtaacaaagcaaacacgtgtacttcagcactgcattctattgatgaaggtgaagaaataacttgtggtttcattaaacatgagaggagttatgatttacagaatttgactatggataagtcaattcaagtgtctaatgaaacaaagtacaagtttcttgctcataagcccagagtaggctgtgaaactgctattcaaaactgtgagttggcttctgcattgccagatacagaatttcatggccctgttgcaaccatttcaactacgggtcaatcagaaggatctgacactgagattaatgttccaaactattctgacctagaagcactgatacttgatctggacctgattccatgggatcaagaatctgacttcatccaaccagaaggaaggatttgataagattagagaaaggtgtctgctcttatatgaaccgatctatcatgtctaagggtgctttcgcaattctttatggccaacgcacgaaatactacataagagagcccgaggtaagtcttgggagagaaacagaagaagtacatgttgatatcgatttgagtaaagaaggaaaggcaaacaaaatatcccgtcgacaggcagttattaagatggacgatggtggatctttctacataaacaatactgggaagttttcaattttcgtgaatagcaaagaagtaccctgcagtaaacgtataaacttaatgtcagactcattaattgagataaggaacctgaaattcatttttcacgtgaaccacgaggctgcaaggcaatacatagttcgaaaaaggagaggaagctcccaaggcgggatcacggcgtttgattggagtcagaacccatgagtagttaacgttatgatcaaggttgtttataatctgcgatagctacctctctcttcaagaaagtattggataagcgtaaagttatttataatttccgatagctaatatttctctcttccagttagcactgtt

SEQ ID NO: 198801 - DNA, 1926 bp, Zea Mays
atccgatctcggaatgaggatagtgactgggccatgggaatttgatcgagaaagaaagggaaaggtagagatagtggggacaatcgatttaattgtagctggaacatttctaaaggtattagtaggtgacttgctgcagcaaacttgaacacacaagcaacaaacatatgcttcaggtccttgatgctaccaacagatgatataccacaaatgttttcgacctaacaaagagggcatagaaagtagaagttgattgttcaattacattttctacgtctatttcgaagcgtcgatggcggatgtccgcacacaaaatgccttgaagggtctggaggaagttgcaagtttcctgcgtgtccttggctactatccgtgcaacacaataacgatatgagctgttgcgtcacactgtctatcttggttgctccgccttggaagaccagagtgggagatggttgctatttctgctcaagttagcgagaataaatactttgtttcgatggcatatcgttgaataaaaggttcctcttcccttgtttggaagagattatggtcattatacactcccgactgaatatgaacactcttgaaatacattgcgaagctgcagaggatcgtcattagaattgcatgaaggttgtatgcgaaaccactggattgaacaattcgagaaatctacagaggaagtcgtgaacagctatgcacaagattgagtctaaggtataggcatctgatggaggacatgttgtctctactcccgcatatgaaggacaaccaggacaaggtcgagtccaagcagagcaaggggaacacgccgagcaagctgcttgagctcaggagttgctccagctgcctttcttcgagattctggctgttgaccatgcgtcggatgagggcgcgattgtaccaattggttcgcagcatgatgcacatttgaccaaactgatgaatatggaaaatgaccaacctttgttgccggcaccaccagttaatctggaatcagccatccttgagcaaaatgcaaatatggtggctctcaaggaaggctgttctgtgggaagtgagctgccacctggtctgcagggtaattttggtggtaacaaagcaaacacgtgtacttcagcactgcattctattgatgaagatacagaatttcatggccctgttgcaaccatttcaactacgggtcaatcagaaggatctgacactgagattaatgttccaaactattctgacctagaagcactgatacttgatctggacctgattccatgggatcaagaatctgacttcatccaaccagaagtttcaaggtttcagtatcctgaaagcaggaaggatttgataagattagagaaaggtgtctgctcttatatgaaccgatctatcatgtctaagggtgctttcgcaattctttatggccaacgcacgaaatactacataagagagcccgaggtaagtcttgggagagaaacagaagaagtacatgttgatatcgatttgagtaaagaaggaaaggcaaacaaaatatcccgtcgacaggcagttattaagatggacgatggtggatctttctacataaacaatactgggaagttttcaattttcgtgaatagcaaagaagtaccctgcagtaaacgtataaacttaatgtcagactcattaattgagataaggaacctgaaattcatttttcacgtgaaccacgaggctgcaaggcaatacatagttcgaaaaaggagaggaagctcccaaggcgggatcacggcgtttgattggagtcagaacccatgagtagttaacgttatgatcaaggttgtttataatctgcgatagctacctctctcttcaagaaagtattggataagcgtaaagttatttataatttccgatagctaatatttctctcttccagttagcactgtt

SEQ ID NO: 198802 - DNA, 1934 bp, Zea Mays
atccgatctcggaatgaggatagtgactgggccatgggaatttgatcgagaaagaaagggaaaggtgacttgctgcagcaaacttgaacacacaagcaacaaacatatgcttcaggtccttgatgctaccaacagaaattcagtttctgactgaactaaacggtggtggtttgaatcatcgtggttcactggttttcacaatattgggattcttggcaaccatgaggacattatgagattcttggctaccatgaggacaaattgttcaattacattttctacgtctatttcgaagcgtcgatggcggatgtccgcacacaaaatgccttgaagggtctggaggaagttgcaagtttcctgcgtgtccttggctactatccgtgcaacacaataacgatatgagctgttgcgtcacactgtctatcttggttgctccgccttggaagaccagagtgggagatggttgctatttctgctcaagttagcgagaataaatactttgtttcgatggcatatcgttgaataaaaggttcctcttcccttgtttggaagagattatggtcattatacactcccgactgaatatgaacactcttgaaatacattgcgaagctgcagaggatcgtcattagaattgcatgaaggttgtatgcgaaaccactggattgaacaattcgagaaatctacagaggaagtcgtgaacagctatgcacaagattgagtctaaggtataggcatctgatggaggacatgttgtctctactcccgcatatgaaggacaaccaggacaaggtcgagtccaagcagagcaaggggaacacgccgagcaagctgcttgagctcaggagttgctccagctgcctttcttcgagattctggctgttgaccatgcgtcggatgagggcgcgattgtaccaattggttcgcagcatgatgcacatttgaccaaactgatgaatatggaaaatgaccaacctttgttgccggcaccaccagttaatctggaatcagccatccttgagcaaaatgcaaatatggtggctctcaaggaaggctgttctgtgggaagtgagctgccacctggtctgcagggtaattttggtggtaacaaagcaaacacgtgtacttcagcactgcattctattgatgaagatacagaatttcatggccctgttgcaaccatttcaactacgggtcaatcagaaggatctgacactgagattaatgttccaaactattctgacctagaagcactgatacttgatctggacctgattccatgggatcaagaatctgacttcatccaaccagaagtttcaaggtttcagtatcctgaaagcaggaaggatttgataagattagagaaaggtgtctgctcttatatgaaccgatctatcatgtctaagggtgctttcgcaattctttatggccaacgcacgaaatactacataagagagcccgaggtaagtcttgggagagaaacagaagaagtacatgttgatatcgatttgagtaaagaaggaaaggcaaacaaaatatcccgtcgacaggcagttattaagatggacgatggtggatctttctacataaacaatactgggaagttttcaattttcgtgaatagcaaagaagtaccctgcagtaaacgtataaacttaatgtcagactcattaattgagataaggaacctgaaattcatttttcacgtgaaccacgaggctgcaaggcaatacatagttcgaaaaaggagaggaagctcccaaggcgggatcacggcgtttgattggagtcagaacccatgagtagttaacgttatgatcaaggttgtttataatctgcgatagctacctctctcttcaagaaagtattggataagcgtaaagttatttataatttccgatagctaatatttctctcttccagttagcactgtt

SEQ ID NO: 198803 - DNA, 2510 bp, Zea Mays
ttctatactgctgtcttcctcatccatttctgcttcctctgctgtaactactactagttcttagttgaatcaatacctattgtgagtaggtcgctgactggtagccgcctcgggcgtggcgggatggaccgtggaggacgacgtcctcctcgccatcgagcgccaggctaccaatgatgctggtaggattgaagggcttgtggttatgaggattatcaatgagcccactgctgcggccttgtcatatggaatgaacagcaaggagggccttgtcggtgaagtgtgttcgtgccggagagcgtggagtgcgaggcctcatgacgcgaagcaagttcggtctgctcgtgcatgtcacccgtcgcgtgcgcgtgtgccggagagcgaggaggagtgcaaggcctcacgacgcgctgccaggtccgtgctgctcgtgcgcgtcacccattgctgatgatataccacaaatgttttcgacctaacaaagagggcatagaaagtagaagttggttgctcctttaaagcatcagtttcaagtagccatcagctgaaatctaccattgctgaaacaaggtgaaaaaaatgcagaatggactacttagagatagctacactatcgatgcatctacatcattttggactatatgggacaccatcagtaatggttgatcttgtctactgtgctttggagttcctttcaactttgcttggagcctttcatgccactgatggagtcatatgcctctgcccagaaattcagtttctgactgaactaaacggtggtggtttgaatcatcgtggttcactggttttcacaatattgggattcttggcaaccatgaggacattatgagattcttggctaccatgaggacaaattgttcaattacattttctacgtctatttcgaagcgtcgatggcggatgtccgcacacaaaatgccttgaagggtctggaggaagttgcaagtttcctgcgtgtccttggctactatccgtgcaacacaataacgatatgagctgttgcgtcacactgtctatcttggttgctccgccttggaagaccagagtgggagatggttgctatttctgctcaattgaataaaaggttcctcttcccttgtttggaagagattatggtcattatacactcccgactgaatatgaacactcttgaaatacattgcgaagctgcagaggatcgtcattagaattgcatgaaggttgtatgcgaaaccactggattgaacaattcgagaaatctacagaggaagtcgtgaacagctatgcacaagattgagtctaaggtataggcatctgatggaggacatgttgtctctactcccgcatatgaaggacaaccaggacaaggtcgagtccaagcagagcaaggggaacacgccgagcaagctgcttgagctcaggagttgctccagctgcctttcttcgagattctggctgttgaccatgcgtcggatgagggcgcgattgtaccaattggttcgcagcatgatgcacatttgaccaaactgatgaatatggaaaatgaccaacctttgttgccggcaccaccagttaatctggaatcagccatccttgagcaaaatgcaaatatggtggctctcaaggaaggctgttctgtgggaagtgagctgccacctggtctgcagggtaattttggtggtaacaaagcaaacacgtgtacttcagcactgcattctattgatgaagatacagaatttcatggccctgttgcaaccatttcaactacgggtcaatcagaaggatctgacactgagattaatgttccaaactattctgacctagaagcactgatacttgatctggacctgattccatgggatcaagaatctgacttcatccaaccagaagtttcaaggtttcagtatcctgaaagcaggaaggatttgataagattagagaaaggtgtctgctcttatatgaaccgatctatcatgtctaagggtgctttcgcaattctttatggccaacgcacgaaatactacataagagagcccgaggtaagtcttgggagagaaacagaagaagtacatgttgatatcgatttgagtaaagaaggaaaggcaaacaaaatatcccgtcgacaggcagttattaagatggacgatggtggatctttctacataaacaatactgggaagttttcaattttcgtgaatagcaaagaagtaccctgcagtaaacgtataaacttaatgtcagactcattaattgagataaggaacctgaaattcatttttcacgtgaaccacgaggctgcaaggcaatacatagttcgaaaaaggagaggaagctcccaaggcgggatcacggcgtttgattggagtcagaacccatgagtagttaacgttatgatcaaggttgtttataatctgcgatagctacctctctcttcaagaaagtattggataagcgtaaagttatttataatttccgatagctaatatttctctcttccagttagcactgtt

SEQ ID NO: 198804 - DNA, 3296 bp, Zea Mays
ttctatactgctgtcttcctcatccatttctgcttcctctgctgtaactactactagttcttagttgaatcaatacctattgtgagtaggtcgctgactggtagccgcctcgggcgtggcgggatggaccgtggaggacgacgtcctcctcgccatcgagcgccaggctaccaatgatgctggtaggattgaagggcttgtggttatgaggattatcaatgagcccactgctgcggccttgtcatatggaatgaacagcaaggagggccttgtcggtgaagtgtgttcgtgccggagagcgtggagtgcgaggcctcatgacgcgaagcaagttcggtctgctcgtgcatgtcacccgtcgcgtgcgcgtgtgccggagagcgaggaggagtgcaaggcctcacgacgcgctgccaggtccgtgctgctcgtgcgcgtcacccattgctgttgaaatccatcccaccccaatgtttccaagtagagtaacagatatccgatctcggaatgaggatagtgactgggccatgggaatttgatcgagaaagaaagggaaaggtagagatagtggggacaatcgatttaattgtagctggaacatttctaaaggtattagtaggtgacttgctgcagcaaacttgaacacacaagcaacaaacatatgcttcaggtccttgatgctaccaacagatgatataccacaaatgttttcgacctaacaaagagggcatagaaagtagaagttggttgctcctttaaagcatcagtttcaagtagccatcagctgaaatctaccattgctgaaacaaggtgaaaaaaatgcagaatggactacttagagatagctacactatcgatgcatctacatcattttggactatatgggacaccatcagtaatggttgatcttgtctactgtgctttggagttcctttcaactttgcttggagcctttcatgccactgatggagtcatatgcctctgcccagaaattcagtttctgactgaactaaacggtggtggtttgaatcatcgtggttcactggttttcacaatattgggattcttggcaaccatgaggacattatgagattcttggctaccatgaggacaaattgttcaattacattttctacgtctatttcgaagcgtcgatggcggatgtccgcacacaaaatgccttgaagggtctggaggaagttgcaagtttcctgcgtgtccttggctactatccgtgcaacacaataacgatatgagctgttgcgtcacactgtctatcttggttgctccgccttggaagaccagagtgggagatggttgctatttctgctcaagttagcgagaataaatactttgtttcgatggcatatcggttgtggttctattatgacatatataacatactgatgttattattactcacattatctatgctatgttgaataatcatgtttttagttatatttctccttcaattctattctttcgtactaattatgtcttgtagcgttaagcaagggcaatatacaaattggtttcaatgattcattgcatcatattactcctgtctttaagcaatatagtttggattcacattagccttgtaacaaaagtaatttctaaacgttattatgatactcctaattggattgttacgctagacaatgtgacatacaactaagtcatttgaattttgcatgcagttgaataaaaggttcctcttcccttgtttggaagagattatggtcattatacactcccgactgaatatgaacactcttgaaatacattgcgaagctgcagaggatcgtcattagaattgcatgaaggttgtatgcgaaaccactggattgaacaattcgagaaatctacagaggaagtcgtgaacagctatgcacaagattgagtctaaggtataggcatctgatggaggacatgttgtctctactcccgcatatgaaggacaaccaggacaaggtcgagtccaagcagagcaaggggaacacgccgagcaagctgcttgagctcaggagttgctccagctgcctttcttcgagattctggctgttgaccatgcgtcggatgagggcgcgattgtaccaattggttcgcagcatgatgcacatttgaccaaactgatgaatatggaaaatgaccaacctttgttgccggcaccaccagttaatctggaatcagccatccttgagcaaaatgcaaatatggtggctctcaaggaaggctgttctgtgggaagtgagctgccacctggtctgcagggtaattttggtggtaacaaagcaaacacgtgtacttcagcactgcattctattgatgaaggtgaagaaataacttgtggtttcattaaacatgagaggagttatgatttacagaatttgactatggataagtcaattcaagtgtctaatgaaacaaagtacaagtttcttgctcataagcccagagtaggctgtgaaactgctattcaaaactgtgagttggcttctgcattgccagatacagaatttcatggccctgttgcaaccatttcaactacgggtcaatcagaaggatctgacactgagattaatgttccaaactattctgacctagaagcactgatacttgatctggacctgattccatgggatcaagaatctgacttcatccaaccagaagtttcaaggtttcagtatcctgaaagcaggaaggatttgataagattagagaaaggtgtctgctcttatatgaaccgatctatcatgtctaagggtgctttcgcaattctttatggccaacgcacgaaatactacataagagagcccgaggtaagtcttgggagagaaacagaagaagtacatgttgatatcgatttgagtaaagaaggaaaggcaaacaaaatatcccgtcgacaggcagttattaagatggacgatggtggatctttctacataaacaatactgggaagttttcaattttcgtgaatagcaaagaagtaccctgcagtaaacgtataaacttaatgtcagactcattaattgagataaggaacctgaaattcatttttcacgtgaaccacgaggctgcaaggcaatacatagttcgaaaaaggagaggaagctcccaaggcgggatcacggcgtttgattggagtcagaacccatgagtagttaacgttatgatcaaggttgtttataatctgcgatagctacctctctcttcaagaaagtattggataagcgtaaagttatttataatttccgatagctaatatttctctcttccagttagcactgtt

SEQ ID NO: 198805 - DNA, 2839 bp, Zea Mays
ttctatactgctgtcttcctcatccatttctgcttcctctgctgtaactactactagttcttagttgaatcaatacctattgtgagtaggtcgctgactggtagccgcctcgggcgtggcgggatggaccgtggaggacgacgtcctcctcgccatcgagcgccaggctaccaatgatgctggtaggattgaagggcttgtggttatgaggattatcaatgagcccactgctgcggccttgtcatatggaatgaacagcaaggagggccttgtcggtgaagtgtgttcgtgccggagagcgtggagtgcgaggcctcatgacgcgaagcaagttcggtctgctcgtgcatgtcacccgtcgcgtgcgcgtgtgccggagagcgaggaggagtgcaaggcctcacgacgcgctgccaggtccgtgctgctcgtgcgcgtcacccattgctgttgaaatccatcccaccccaatgtttccaagtagagtaacagatatccgatctcggaatgaggatagtgactgggccatgggaatttgatcgagaaagaaagggaaaggtagagatagtggggacaatcgatttaattgtagctggaacatttctaaaggtattagtaggtgacttgctgcagcaaacttgaacacacaagcaacaaacatatgcttcaggtccttgatgctaccaacagatgatataccacaaatgttttcgacctaacaaagagggcatagaaagtagaagttggttgctcctttaaagcatcagtttcaagtagccatcagctgaaatctaccattgctgaaacaaggtgaaaaaaatgcagaatggactacttagagatagctacactatcgatgcatctacatcattttggactatatgggacaccatcagtaatgaaattcagtttctgactgaactaaacggtggtggtttgaatcatcgtggttcactggttttcacaatattgggattcttggcaaccatgaggacattatgagattcttggctaccatgaggacaaattgttcaattacattttctacgtctatttcgaagcgtcgatggcggatgtccgcacacaaaatgccttgaagggtctggaggaagttgcaagtttcctgcgtgtccttggctactatccgtgcaacacaataacgatatgagctgttgcgtcacactgtctatcttggttgctccgccttggaagaccagagtgggagatggttgctatttctgctcaattgaataaaaggttcctcttcccttgtttggaagagattatggtcattatacactcccgactgaatatgaacactcttgaaatacattgcgaagctgcagaggatcgtcattagaattgcatgaaggttgtatgcgaaaccactggattgaacaattcgagaaatctacagaggaagtcgtgaacagctatgcacaagattgagtctaaggtataggcatctgatggaggacatgttgtctctactcccgcatatgaaggacaaccaggacaaggtcgagtccaagcagagcaaggggaacacgccgagcaagctgcttgagctcaggagttgctccagctgcctttcttcgagattctggctgttgaccatgcgtcggatgagggcgcgattgtaccaattggttcgcagcatgatgcacatttgaccaaactgatgaatatggaaaatgaccaacctttgttgccggcaccaccagttaatctggaatcagccatccttgagcaaaatgcaaatatggtggctctcaaggaaggctgttctgtgggaagtgagctgccacctggtctgcagggtaattttggtggtaacaaagcaaacacgtgtacttcagcactgcattctattgatgaaggtgaagaaataacttgtggtttcattaaacatgagaggagttatgatttacagaatttgactatggataagtcaattcaagtgtctaatgaaacaaagtacaagtttcttgctcataagcccagagtaggctgtgaaactgctattcaaaactgtgagttggcttctgcattgccagatacagaatttcatggccctgttgcaaccatttcaactacgggtcaatcagaaggatctgacactgagattaatgttccaaactattctgacctagaagcactgatacttgatctggacctgattccatgggatcaagaatctgacttcatccaaccagaagtttcaaggtttcagtatcctgaaagcaggaaggatttgataagattagagaaaggtgtctgctcttatatgaaccgatctatcatgtctaagggtgctttcgcaattctttatggccaacgcacgaaatactacataagagagcccgaggtaagtcttgggagagaaacagaagaagtacatgttgatatcgatttgagtaaagaaggaaaggcaaacaaaatatcccgtcgacaggcagttattaagatggacgatggtggatctttctacataaacaatactgggaagttttcaattttcgtgaatagcaaagaagtaccctgcagtaaacgtataaacttaatgtcagactcattaattgagataaggaacctgaaattcatttttcacgtgaaccacgaggctgcaaggcaatacatagttcgaaaaaggagaggaagctcccaaggcgggatcacggcgtttgattggagtcagaacccatgagtagttaacgttatgatcaaggttgtttataatctgcgatagctacctctctcttcaagaaagtattggataagcgtaaagttatttataatttccgatagctaatatttctctcttccagttagcactgtt

SEQ ID NO: 198806 - DNA, 936 bp, Zea Mays
agccctcgctcagttggccggcctcgccttcgcatccgtccggccgcagtcaacctccggttcggagttcccattccccaccaaccaccgtctccatcgcaccgtcgcactgtcgcctcgccggccgcacctacgccgttgaagtcgctgtcgcagctgcaggacggaaagggcttcaacaagtgtgctaccaactgtccaactaccaagataagcatgcattgctgttttttctgtagtgatagatgcttttatgccaccatttggttcattttcacatgttttctttagcagaatcagtatggaaatactgctctttttttgctgtctttgttccattttctgtactatcttctccttttcatgatctttgttttggaaattgcgacatcaaatcccagtcaatctaaactttgtatgcttgcttggtttatctagtcatgtattaatactcatcacatttcagtgtctgctttgcaaaccaaattgatggttaagtgcttgcctatttgttctgcctgatttcatcgcagctcagttgtatgattgctgggtttcctacttttcagcttttgttttccgtttcatgttgtagtgttgctgtgtttcatgttttgatgagttttgttcatttatttgtagaacaacactctgtgttggtgtcaagatctatagagcaggcatttctatgggcagtgcatcaggactcgaaggaagcatagcatcatcggtttttgtgtttcattaattctcatttcaagatggcatctgctggcctaaagccaggggtgcctgttattctacgggagctggagccatcctcagagatgttcaagcaaggagcgtcccttcgagtcacaggaagtctccagtcattcgatgtggagtccgcgactgccaccattcaagacggcagccctgtttgatgctagcgag

SEQ ID NO: 198807 - DNA, 1419 bp, Zea Mays
agccctcgctcagttggccggcctcgccttcgcatccgtccggccgcagtcaacctccggttcggagttcccattccccaccaaccaccgtctccatcgcaccgtcgcactgtcgcctcgccggccgcacctacgccgttgaagtcgctgtcgcagctgcagcatccatgtttaggacggaaagggcttcaacaagtgtgctaccaactgtccaactaccaagataagcatgcattgctgttttttctgtagtgatagatgcttttatgccaccatttggttcattttcacatgttttctttagcagaatcagtatggaaatactgctctttttttgctgtctttgttccattttctgtactatcttctccttttcatgatctttgttttggaaattgcgacatcaaatcccagtcaatctaaactttgtatgcttgcttggtttatctagtcatgtattaatactcatcacatttcagtgtctgctttgcaaaccaaattgatggttaagtgcttgcctatttgttctgcctgatttcatcgcagctcagttgtatgattgctgggtttcctacttttcagcttttgttttccgtttcatgttgtagtgttgctgtgtttcatgttttgatgagttttgttcatttatttgtagaacaacactctgtgttggtgtcaagatctatagagcaggcatttctagtaagtataggcttgagatgtgatgtttaccttctttatctaaataacattattgtaatgagctgtcaatgttacaagactacagaacaaatgcactgcattctattttagctaataggtttattctttggaaaagaaaatgatgtgctaattagcttagttctggggacttcaggggttccatgccggcctaacctattggaacgacttgttagttgttattccattgcatccaaagtccacatgttattttgttaagctccataatgctgtggcatcgtgttgcgaaaacattaattgggagaacattagtacatgaatacttgatcttcatagttcagttttcgtgcatgtgcacttgttagttgcgaaaatgaactaatttcccttggggaaataggtatcccttggaaaaatgggtttgccaaactagcccttagaggaactaattcctggcatatggtgctcagtgggcagtgcatcaggactcgaaggaagcatagcatcatcggtttttgtgtttcattaattctcatttcaagatggcatctgctggcctaaagccaggggtgcctgttattctacgggagctggagccatcctcagagatgttcaagcaaggagcgtcccttcgagtcacaggaagtctccagtcattcgatgtggagtccgcgactgccaccattcaagacggcagccctgtttgatgctagcgag

SEQ ID NO: 198808 - DNA, 1982 bp, Zea Mays
agccctcgctcagttggccggcctcgccttcgcatccgtccggccgcagtcaacctccggttcggagttcccattccccaccaaccaccgtctccatcgcaccgtcgcactgtcgcctcgccggccgcacctacgccgttgaagtcgctgtcgcagctgcagcatccatgtttaggacggaaagggcttcaacaagtgtgctaccaactgtccaactaccaagataagcatgcattgctgttttttctgtagtgatagatgcttttatgccaccatttggttcattttcacatgttttctttagcagaatcagtatggaaatactgctctttttttgctgtctttgttccattttctgtactatcttctccttttcatgatctttgttttggaaattgcgacatcaaatcccagtcaatctaaactttgtatgcttgcttggtttatctagtcatgtattaatactcatcacatttcagtgtctgctttgcaaaccaaattgatggttaagtgcttgcctatttgttctgcctgatttcatcgcagctcagttgtatgattgctgggtttcctacttttcagcttttgttttccgtttcatgttgtagtgttgctgtgtttcatgttttgatgagttttgttcatttatttgtagaacaacactctgtgttggtgtcaagatctatagagcaggcatttctagtaagtataggcttgagatgtgatgtttaccttctttatctaaataacattattgtaatgagctgtcaatgttacaagactacagaacaaatgcactgcattctattttagctaataggtttattctttggaaaagaaaatgatgtgctaattagcttagttctggggacttcaggggttccatgccggcctaacctattggaacgacttgttagttgttattccattgcatccaaagtccacatgttattttgttaagctccataatgctgtggcatcgtgttgcgaaaacattaattgggagaacattagtacatgaatacttgatcttcatagttcagttttcgtgcatgtgcacttgttagttgcgaaaatgaactaatttcccttggggaaataggtatcccttggaaaaatgggtttgccaaactagcccttagaggaactaattcctggcatatggtgctcagtgggcagtgcatcaggactcgaaggaagcatagcatcatcggtttttgtgtttcattaattctcatttcaagatggcatctgctggcctaaagccaggggtgcctgttattctacgggagctggagccatcctcagagatgttcaagcaaggagcgtcccttcgagtcacaggaagtctccagtcattcgatgtggagtccgcgactgccaccattcaagacggcagcgtaagtctgaaggttgacacccagcatctgagggatgtcagtttccgcacgaactcggtgtaccaattcattggtgaacttcagatccgtgaagttgatgatgcgattctactcgcgcgcatcggaaggaacgtcgatggcctcgacatgaacctttaccagcaggctctactcatccgacggcagcacgaagcaaagctgctgagctccaggagagcatgatctgcttgctatcttggagcaggaggcgcatggtggttgtagttattaggtttctttgtttctcaacagtgcaattgcatatgtaaacgtgaagagaactggaccaagaactggttaattgagagggtctgctgcatatgatttgcgatctctcttgccctccaaagggctgccatggcatgtgtagatgtgactgccaatttgtgatcatcttacttgcagcagaatgctggttttattttattgacatgagaacagccttgtggatcatgtttactgggatgctttgttgtgttaaaagttgggtcatgttcttttgttgtaaaggtataaataatggaggaggtcatggtgtgaaga

SEQ ID NO: 198809 - DNA, 1826 bp, Zea Mays
acgtgacctctctcaagcatccatgtttaggacggaaagggcttcaacaagtgtgctaccaactgtccaactaccaagataagcatgcattgctgttttttctgtagtgatagatgcttttatgccaccatttggttcattttcacatgttttctttagcagaatcagtatggaaatactgctctttttttgctgtctttgttccattttctgtactatcttctccttttcatgatctttgttttggaaattgcgacatcaaatcccagtcaatctaaactttgtatgcttgcttggtttatctagtcatgtattaatactcatcacatttcagtgtctgctttgcaaaccaaattgatggttaagtgcttgcctatttgttctgcctgatttcatcgcagctcagttgtatgattgctgggtttcctacttttcagcttttgttttccgtttcatgttgtagtgttgctgtgtttcatgttttgatgagttttgttcatttatttgtagaacaacactctgtgttggtgtcaagatctatagagcaggcatttctagtaagtataggcttgagatgtgatgtttaccttctttatctaaataacattattgtaatgagctgtcaatgttacaagactacagaacaaatgcactgcattctattttagctaataggtttattctttggaaaagaaaatgatgtgctaattagcttagttctggggacttcaggggttccatgccggcctaacctattggaacgacttgttagttgttattccattgcatccaaagtccacatgttattttgttaagctccataatgctgtggcatcgtgttgcgaaaacattaattgggagaacattagtacatgaatacttgatcttcatagttcagttttcgtgcatgtgcacttgttagttgcgaaaatgaactaatttcccttggggaaataggtatcccttggaaaaatgggtttgccaaactagcccttagaggaactaattcctggcatatggtgctcagtgggcagtgcatcaggactcgaaggaagcatagcatcatcggtttttgtgtttcattaattctcatttcaagatggcatctgctggcctaaagccaggggtgcctgttattctacgggagctggagccatcctcagagatgttcaagcaaggagcgtcccttcgagtcacaggaaggagttttactctgcttttaagaaagcaaatattcaagggtacaggcaaagctgggacaccatctcacaagcaagtcaaaggcctctaacaacagcaacgacaagctagatttctattacatcagacaacatggtgtcactcgcttggtagttctgtagccatgcagcaattctcttctccatgtcttgcacttcagctttgtccttctatagcagcacgcaccacttctgcacgaaggagatagcaatgtatatgacatcagtaggtctgttcaggaaccacttctctattgccatcttatttgtataggtcagatcatccaagttagccctgcaaacataaacatacctagccacttaaaggcaccaagttttgtttccacccagttctcaacaaaatcagccaaagaagatgggaaccccacccaaccaaaggcatctatgataatgcaccatgcaagatgagcttttgtgaaaattaatcttcagatcagtcatccattcgaagcaatatagactaagcttaggttgaaaatatattggacagacccactatcacgatagctgtatcatcggcatattgtatatgtgtgtcacacccgggttttaggggtccaaagcccg

SEQ ID NO: 198810 - DNA, 2283 bp, Zea Mays
ctctctcaagatcgttccgtaagggcacccatcgtcatagatacgattcatagcttctgccactacttgtgcgcgaagagccaagaaatgcgtcaggggttgtgaagggaaggagtgccgatggccggtggccacccggcgccgctgcggccggtggtggttgcgatgaaaggccacccagggtctggcaagtccacggcggcgcgcgccatcgcgaccgcgctttgctgtccgctcctggacaaggacgatgtgagggactgcatgttgcccctagagggcttggctgctgctgggatgctcaacgacctctcctacgccgtgctgtggcggatggctgagcgccagccggtgtgcttgtggtcgtcgtggagtgtcgccctggtgataacgaggaatggcgccggaggctggagagccgtgggtcggctgttgccaatggtggcggtggtgatggatggcataagccaaagacatgggctgagctggagaggcttctggaagggtaccaaggttgcacagactatgaaattggggatgtaccgaggattgtagtggatacaactgatccgacagttgatgcacaggtggcagctgaaaaggttgtggttttcattagatcccatcttgcttgtagccaaccatcttgtgggagacaggattcacctgtttgccattagaaaccaaaatgtacactagcttaagcattaggtaaagtttcgttgcaaaaggttgatctgttgtactgcaatgctcaaagttcttttttttatgggtgtaacctaaaggttctgttactgttgggacttcaaagggattttgttgttgttgttgtgtgatctagaggtttcgtaaaaagatgttcttttttctggggttgttcctcaatctcctatctccattacatctttcacattccaatgaaatggaatatgacttttcagcatccatgtttaggacggaaagggcttcaacaagtgtgctaccaactgtccaactaccaagataagcatgcattgctgttttttctgtagtgatagatgcttttatgccaccatttggttcattttcacatgttttctttagcagaatcagtatggaaatactgctctttttttgctgtctttgttccattttctgtactatcttctccttttcatgatctttgttttggaaattgcgacatcaaatcccagtcaatctaaactttgtatgcttgcttggtttatctagtcatgtattaatactcatcacatttcagtgtctgctttgcaaaccaaattgatggttaagtgcttgcctatttgttctgcctgatttcatcgcagctcagttgtatgattgctgggtttcctacttttcagcttttgttttccgtttcatgttgtagtgttgctgtgtttcatgttttgatgagttttgttcatttatttgtagaacaacactctgtgttggtgtcaagatctatagagcaggcatttctatgggcagtgcatcaggactcgaaggaagcatagcatcatcggtttttgtgtttcattaattctcatttcaagatggcatctgctggcctaaagccaggggtgcctgttattctacgggagctggagccatcctcagagatgttcaagcaaggagcgtcccttcgagtcacaggaaggagttttactctgcttttaagaaagcaaatattcaagggtacaggcaaagctgggacaccatctcacaagcaagtcaaaggcctctaacaacagcaacgacaagctagatttctattacatcagacaacatggtgtcactcgcttggtagttctgtagccatgcagcaattctcttctccatgtcttgcacttcagctttgtccttctatagcagcacgcaccacttctgcacgaaggagatagcaatgtatatgacatcagtaggtctgttcaggaaccacttctctattgccatcttatttgtataggtcagatcatccaagttagccctgcaaacataaacatacctagccacttaaaggcaccaagttttgtttccacccagttctcaacaaaatcagccaaagaagatgggaaccccacccaaccaaaggcatctatgataatgcaccatgcaagatgagcttttgtgaaaattaatcttcagatcagtcatccattcgaagcaatatagactaagcttaggttgaaaatatattggacagacccactatcacgatagctgtatcatcggcatattgtatatgtgtgtcacacccgggttttaggggtccaaagcccg

SEQ ID NO: 198811 - DNA, 1339 bp, Zea Mays
ttaccggttacaaacccacacgaattgccgccaccaccccacacgacatcctacaaccccagcctcattccaccgggcccgcacctcagaccacaggtggacgaggccacctgccggccagcttctccggccaccaccgtcgaccgtgtaaaacttgcactgacgaagcctaccttcttatccggcggcggggccatggggttctcgctgtaccccaccaagtcgtcgacgcgcacgccgtggagcaccagcttcttccgccacaagttcccggccgccgcggtgtccttctgatcaggctagctccggccgcccggcggtcgacctcgctccgcgcttcaagaagaggtggaggagcgtacatacagacacgagcgccgccgttggtgggtggtgcggcggacgggcggcgcaagcggccgttccagctgacggcgcacgatgagctgcagctgcagctgcagctccagctggacgacgagctgtgcggcctggactacgagctccatgggccgcagcaggagcggacaacgaagcggcggctgacggcggagcaggtgcgggagctggagctgagcttcgaggaggagaagcggaagctggagcccaagcggaagctggagcccgagcggaagagcgagctggcgcggaggctcgggatcgcgccgcgccaggtggccgtgtggttccagaaccgccgcgcgcggtggaggagcaagcagctggagcaggacttcgaccgcctcagggccgcgcacgacgacctcatcgccggccgcgacgcgctcctcgccgataacgatcgtctccgctcacaggtgatcacgttaactgagaaactgcaaacgaaagagtcggcggcggcggcggcagagcctggagagcagacagttgccgcccaagcgacagcctacgctgtcttggaaggagacaagctctgctccggcagcgctgcagcgccggcggcggcagggaccaacgacagcccggagtcgtacttcgccggggcgcgctcgccaccgtcgtcgccagaggacgacgaccgcgccttcttcttccccccggacgccctgctcaacaactgggcatgggtatggaacgatcggcagtattaggggatgcacgcatatggctaggagtgcaaagttgactaaatttgctggttctaaatgtcatatatatcacccttgatcaaacgaacatggttcttataaagtttattaattacctgttggttctgtacttgattccttgttagatacggatgttccatgtcttcattatcatcgagaagatgttctatttcatccctaacctggtaagataccataaataaatg

SEQ ID NO: 198812 - DNA, 134 bp, Zea Mays
atggcaaaggcaatcagcattaagtctgtctctttctctggtttaaggaaggataatgtagccttccgcttgcagccagtgccacaaagattcgcagtctgctgtcctctccgatgaaagaaattttcaagaga

SEQ ID NO: 198813 - DNA, 272 bp, Zea Mays
atggcaaaggcaatcagcattaagtctgtctctttctctggtttaaggaaggataatgtagccttccgcttgcagccagtgccacaaagattcgcagtctgctgtcctgctaaaaaggagactgtggatcgggtttgtgatattgtcaagaagcagcttgcacttcctgagggcactgaggtctgtggctcctctaagtttcaagacctcggtgctgattcgttggacactggaataacatctaggatcagtgctctggttctctactcaag

SEQ ID NO: 198814 - DNA, 1115 bp, Zea Mays
cagcagctcaccgttacgttttcgaatactctgcacctattggagcaaagccacctcctccagcgccccacccgccagaggcccgatcgtcccacactcccaccacgcgacaggaacacaaaaaccctagcacaagcccacacgacgccacccggccccggacggccggcccccccgtcccacgttcccaccgggctccgagcacaaaaccctaaccttctcgctattaaagtcggcgtccagtccgtcggctgctgctacgccaccgaatccgcatctcctcgccggtcgcgcacgggcaaagcagcgatggcagcagcgacggcagttggcggacacgacagggtggaggctgcggcgtcgtccgcgggggctgtgctggccgtcgccgttgcctcgcagaggctgggtcagatgatgatgatgacgatgaagacgatgaagatgaagatgaagatgatgatgatgatgatgatgatgatgatgagggtggggggagtgatgatgacgacgatgataacgatggtgatgatgatggtaacgatgatgacgacgatgaagatgatgacgaagatgaagatgaagaggatgacgacgatgaggaagaacagccaccttccaagaagaagaagtgatttgctctttcatggattcacctcagcttctccatgctgttagttgtgttgtttagatcatggaacagctttgggacaaatgttgcttgtcatggtattatagtgtaggaaaccttgacatctgatgttaaatcgttatcctactttctcctctgcatgtagtcttaattgtgtgttttagatttttactttattggagctgtgattgtgtcatgccattcagttttattctgctgaggccagtgtcatgccattcaatttatttcttttactgaggcctgagcactcaggcctggattgtatgtgatgctatgtctgttactgagaaggttgagccaggccagaattgtatttgatgagttgcagattcttgagcatcttgtaatgtgcttcaaacatcgtgcaatgtgctttggacatgtatactatgaaccgttgcccatattcatggtttgacttacatacacctcttggtccgaa

SEQ ID NO: 198815 - DNA, 1218 bp, Zea Mays
caacaaatttgggctctatattgaagaggttgcacgggtcgatgcgagctgctccacatttattctagtgcactcctcgttggctatgtccactattgccctttgtggatctgaggctcaaaagcagaaatacttaccatctcttacccagttcaaaactattggttgctgggcattgacagagccagattatggaagtgatgcaagctccctaaggactgcagcaaccaaggtacctggtggttggcatttagatggacaaaaacgctggataggtaacagcacttttgcagatgtcctcatcattttggctaggaatgcagatacaaaccaactaaatggatttattgtaaagaaaggagctcctggtctaaaagccacaaaaattgaaaataaaattggactcagaatggttcaaaatggagacataattctaaataaagtatttgtccctgaggaagacagattaacaggcatcaattcatttcaggatataaacaaggtcctcgctatgtctcgaattatggtggcatggcaaccaataggcatatcaatgggagtttatgacatctgccatcggtatttgaaagaaagaaagcaatttggagctccactggcagcttttcagctcaatcaagaaaagcttgtccgcatgcttggcaacattcaggctatgcttctcgttggatggcgactgtgcaagctgtatgagtcaggcaaaatgacaccaggccggtctagtttaggcaaggcatggacgtccaagaaggccagggaggtggtttctcttgggcgagagctactgggtggcaatggcattttggttgattttcttgtcgccaaggcattttgtgacgtggaacccattttctcgtacgagggcacctatgacattaatagcctggtggctggcagagagatcaccgggatcgcgagcttcaagcctgctgtgtcagcaaaatcacgcctgtgaaagttgtttttttctttgttcccgaagacagtagaaatcaaccttgtacattcagatgattgggaataagaacggtaggaaagctgtaaaactcgacgtgcttcctcgtatgtactgttctgtttcaaattattcgacgttttgtcggaacggaacggaggacctgtatggctgtatatgatactcatcctatatatcacgcagcttttgaagattttgtaaaaaaacaaccataataaaaacaa

SEQ ID NO: 198816 - DNA, 1651 bp, Zea Mays
tcacgcccgaatcgtcttcgttttgtttcgtttcgtatcggatcgtgccgctcttcccttctcgtctagtcttgtctttctttcctcctctgttactccacctacagacctactactgccatcgggagggtaagctcttcggagccggagccgggtccacgttaacgccatcgagtgctgcgatgggcagcttaggagggagcgccggtgctggggacggcggcaaggtcgggctgccggcgcttgacgtgacgctcgcgttcccgcaggccacgcccgcatcgctcttcccgccagccgtttcggactactaccaatttgatgatttgctgactgatgaagagaaggcactcaggaagaaggtccgaggtatcatggaaaaggaaatcgcgcccattatgactgaggggtatgggtgccctggactctcgcttacagctagtgctatttcgatagcagaggttgcacgggtcgatgcgagctgctccacatttattctagtgcactcctcgttggctatgtccactattgccctttgtggatctgaggctcaaaagcagaaatacttaccatctcttacccagttcaaaactattggttgctgggcattgacagagccagattatggaagtgatgcaagctccctaaggactgcagcaaccaaggtacctggtggttggcatttagatggacaaaaacgctggataggtaacagcacttttgcagatgtcctcatcattttggctaggaatgcagatacaaaccaactaaatggatttattgtaaagaaaggagctcctggtctaaaagccacaaaaattgaaaataaaattggactcagaatggttcaaaatggagacataattctaaataaagtatttgtccctgaggaagacagattaacaggcatcaattcatttcaggatataaacaaggtcctcgctatgtctcgaattatggtggcatggcaaccaataggcatatcaatgggagtttatgacatctgccatcggtatttgaaagaaagaaagcaatttggagctccactggcagcttttcagctcaatcaagaaaagcttgtccgcatgcttggcaacattcaggctatgcttctcgttggatggcgactgtgcaagctgtatgagtcaggcaaaatgacaccaggccggtctagtttaggcaaggcatggacgtccaagaaggccagggaggtggtttctcttgggcgagagctactgggtggcaatggcattttggttgattttcttgtcgccaaggcattttgtgacgtggaacccattttctcgtacgagggcacctatgacattaatagcctggtggctggcagagagatcaccgggatcgcgagcttcaagcctgctgtgtcagcaaaatcacgcctgtgaaagttgtttttttctttgttcccgaagacagtagaaatcaaccttgtacattcagatgattgggaataagaacggtaggaaagctgtaaaactcgacgtgcttcctcgtatgtactgttctgtttcaaattattcgacgttttgtcggaacggaacggaggacctgtatggctgtatatgatactcatcctatatatcacgcagcttttgaagattttgtaaaaaaacaaccataataaaaacaa

SEQ ID NO: 198817 - DNA, 3055 bp, Zea Mays
gagcgcttgactggccatggcaaccgcccgtgctgagtgcgcgcatctctcgcgccgctacccctccaaaccctccgttgtcgtagccatgcccaatgccttgctcctcctcctcccgtgtcgccacctgccgtgtcataccatccatccacccacccaatcatcatgcactcgcattctttacgaatcatatcgatggactactcttccggttgatcggaatcaagagcggtggtgggagcattgatcagagaaggagagagacgtaggtgatcccttgtttgtcacacgcgcgggtgcccaagatgctcggttcgtcggcgtccaggcgggagagcaaaaccagcaacctcttctgggccgccgccatggccttccgggacgccgccaacaagaccactgccatcgagccggccaaggcggtacccaacaatatgctcgacgccaccaagcccgccgagccgaccacgacagtgtccaacgccgctgccgtgcgccacgagggttggatggtgcgctatggccgcaggaagattggcacttccttcttccacacgcgctacttcctgcttcatagcaagctgctcgcgtactacaagaagaagccaaaggacaacatggttccactcaagtcgctgctaatagacgggaattgcagggtggaggatagagggctcacaacataccatggccaaatgatttatgtcctgtgcatttataacaagaaagaaaaggagcaccagataacgatgggcgcttatgatattgaggatgcaatgacatggaaaaagaagatagagctcatcattgatctgcaacaagactctatcacagctaagaaccgtagagcctttgcttcagtggactttgacagggaacttggaggacagtttctgttttcagatcatgacaacacagcggaagatgacgacgaacgatccactttgactcacaggcctactatagggaacggccctcctgattcaatacatgactggaccaaagagtctgacattggtgtgaccaatcagaacgaccccattcaattttgctccaagaagaattggcgactacttagatgccaaaatgggttgcgcatatttgaagaacttctggaagtagattaccttgcacgaagttgcagccgagctatgaaggctgttggtgtagctgaagccacatgtgaagccatttttggtcttgtaatgagcatggatgtaacaagatacgagtgggactgtagctttcgtcacggtagtttagttgaagaggttgatggtcacactgcaatactatatcataggttgcagctgcactggtgcccaatgttagtttggcctcgggatctttgttatgctcgatattggcgtcgtaatgatgatggaagttacgttgtgctgttccggtctatagaacatcctaattgtggtcggcaacgaggatttgtgagggcattcattgaaagtggaggtttcaagatttctcctctcaagtgtcacaatggaagacctcgtactcaggtacaacaccttatgcagattgacctgaagggatggttcctgaactacactctttcctttcagtaccattctttgctgcagatactgaactgtgttgcaggattgcgtgaatatttttcccaaacagatgaaatccatataatcccaagaattcatgtaatggaaaccatgtttgatgtggattcaaagccaaaatttcataagcttcaagaagttgaaaccaaggaaaataaaaacatgggaatcattgatgaagaatcagatgatgatgatgattatcaagttcctgaagctaatatagagaccttgaccaaaaccaatatacaggaagacccaaacacatctgacaatgataacaagcacacagatgagcctccagaaaaaattgatttatcttgtttttcgagtattcttcatcgtgatcccgaggagaaaagccgtaattgttggacagtacctgatagcaaaaactttaaagttcgtagcaagaatttcccacaagacaaatcaaagatacctgcagcaagttatctaatggagcttgcagccattgactggtttaaggacaccaaacgtatggataacgttgctaggcagaagggttgtgttgctcaggttgctgctgagaaagggatgcatacatttattgtcaacatacagattcctggatcaactcagtatagcttggtcatgtattttgtcacaaataccttgaagaagggatcattactacaacgtttttttgatggcgatgatgaattctgcaatagcagactaaagcttataccatccgttcccaagggctcctggttagtgcgacagagtgttggaagcaccccttgtctgttgggaaaggctgttgattgtagttacgttcgaggtcctgcatacttggaggtggacgttgacattggatcttcggcggtagcaaatggagttttgggtcttgtttttggtgtggtgacaacattagtagttgatatggccttcctaatacaggccaacacatatgaggagctaccagagcaagtgataggcgcagctcgactggctcatgttgaaccggccacagcagtagttcctgatcttagcaacacatcaaatgacagtagcaacagcaacgacgataatagcaacaacaacattggttcctcagaggatgatgtgtccaagaaaacaaactgattttattttaatttagtatcagggtgttttgttggttatcactttaattatatctgctagctagtcattcaggtaaagttgtgtactaacctcagacaatggaatccagagagctcgagaggagagccgataatatatatttttgtgtctgtcctttaataattattgggaggaactggtgagcaaggttaacctccttgaaggccctcatacagtgacagagcccgattctaaacaacggtgatttctcaggagactgtgtaacagctacaaagccttccattggctctcttgactaaaatctattagctctcttgtttagatgcactagagttagtttttagctacct

SEQ ID NO: 198818 - DNA, 1800 bp, Zea Mays
cctcctcctcccgtgtcgccacctgccgtgtcataccatccatccacccacccaatcatcatgcactcgcattctttacgaatcatatcgatggactactcttccggttgatcggaatcaagagcggtggtgggagcattgatcagagaaggagagagacgtaggtgatcccttgtttgtcacacgcgcgggtgcccaagatgctcggttcgtcggcgtccaggcgggagagcaaaaccagcaacctcttctgggccgccgccatggccttccgggacgccgccaacaagaccactgccatcgagccggccaaggcggtacccaacaatatgctcgacgccaccaagcccgccgagccgaccacgacagtgtccaacgccgctgccgtgcgccacgagggttggatggtgcgctatggccgcaggaagattggcacttccttcttccacacgcgctacttcctgcttcatagcaagctgctcgcgtactacaagaagaagccaaaggacaacatgggtggaggatagagggctcacaacataccatggccaaatgatttatgtcctgtgcatttataacaagaaagaaaaggagcaccagataacgatgggcgcttatgatattgaggatgcaatgacatggaaaaagaagatagagctcatcattgatctgcaacaagactctatcacagctaagaaccgtagagcctttgcttcagtggactttgacagggaacttggaggacagtttctgttttcagatcatgacaacacagcggaagatgacgacgaacgatccactttgactcacaggcctactatagggaacggccctcctgattcaatacatgactggaccaaagagtctgacattggtgtgaccaatcagaacgaccccattcaattttgctccaagaagaattggcgactacttagatgccaaaatgggttgcgcatatttgaagaacttctggaagtagattaccttgcacgaagttgcagccgagctatgaaggctgttggtgtagctgaagccacatgtgaagccatttttggtcttgtaatgagcatggatgtaacaagatacgagtgggactgtagctttcgtcacggtagtttagttgaagaggttgatggtcacactgcaatactatatcataggttgcagctgcactggtgcccaatgttagtttggcctcgggatctttgttatgctcgatattggcgtcgtaatgatgatggaagttacgttgtgctgttccggtctatagaacatcctaattgtggtcggcaacgaggatttgtgagggcattcattgaaagtggaggtttcaagatttctcctctcaagtgtcacaatggaagacctcgtactcaggtacaacaccttatgcagattgacctgaagggatggttcctgaactacactctttcctttcagtaccattctttgctgcagatactgaactgtgttgcaggattgcgtgaatatttttcccaaacagatgaaatccatataatcccaagaattcatgtaatggaaaccatgtttgatgtggattcaaagccaaaatttcataagcttcaagaagttgaaaccaaggaaaataaaaacatgggaatcattgatgaagaatcagatgatgatgatgattatcaagttcctgaagctaatatagagaccttgaccaaaaccaatatacaggaagacccaaacacatctgacaatgataacaagcacacaggttgctgctgagaaagggatgcatacatttattgtcaacatacagttagtgtcctc

SEQ ID NO: 198819 - DNA, 2816 bp, Zea Mays
cctcctcctcccgtgtcgccacctgccgtgtcataccatccatccacccacccaatcatcatgcactcgcattctttacgaatcatatcgatggactactcttccggttgatcggaatcaagagcggtggtgggagcattgatcagagaaggagagagacgtaggtgatcccttgtttgtcacacgcgcgggtgcccaagatgctcggttcgtcggcgtccaggcgggagagcaaaaccagcaacctcttctgggccgccgccatggccttccgggacgccgccaacaagaccactgccatcgagccggccaaggcggtacccaacaatatgctcgacgccaccaagcccgccgagccgaccacgacagtgtccaacgccgctgccgtgcgccacgagggttggatggtgcgctatggccgcaggaagattggcacttccttcttccacacgcgctacttcctgcttcatagcaagctgctcgcgtactacaagaagaagccaaaggacaacatggttccactcaagtcgctgctaatagacgggaattgcagggtggaggatagagggctcacaacataccatggccaaatgatttatgtcctgtgcatttataacaagaaagaaaaggagcaccagataacgatgggcgcttatgatattgaggatgcaatgacatggaaaaagaagatagagctcatcattgatctgcaacaagactctatcacagctaagaaccgtagagcctttgcttcagtggactttgacagggaacttggaggacagtttctgttttcagatcatgacaacacagcggaagatgacgacgaacgatccactttgactcacaggcctactatagggaacggccctcctgattcaatacatgactggaccaaagagtctgacattggtgtgaccaatcagaacgaccccattcaattttgctccaagaagaattggcgactacttagatgccaaaatgggttgcgcatatttgaagaacttctggaagtagattaccttgcacgaagttgcagccgagctatgaaggctgttggtgtagctgaagccacatgtgaagccatttttggtcttgtaatgagcatggatgtaacaagatacgagtgggactgtagctttcgtcacggtagtttagttgaagaggttgatggtcacactgcaatactatatcataggttgcagctgcactggtgcccaatgttagtttggcctcgggatctttgttatgctcgatattggcgtcgtaatgatgatggaagttacgttgtgctgttccggtctatagaacatcctaattgtggtcggcaacgaggatttgtgagggcattcattgaaaattgacctgaagggatggttcctgaactacactctttcctttcagtaccattctttgctgcagatactgaactgtgttgcaggattgcgtgaatatttttcccaaacagatgaaatccatataatcccaagaattcatgtaatggaaaccatgtttgatgtggattcaaagccaaaatttcataagcttcaagaagttgaaaccaaggaaaataaaaacatgggaatcattgatgaagaatcagatgatgatgatgattatcaagttcctgaagctaatatagagaccttgaccaaaaccaatatacaggaagacccaaacacatctgacaatgataacaagcacacagatgagcctccagaaaaaattgatttatcttgtttttcgagtattcttcatcgtgatcccgaggagaaaagccgtaattgttggacagtacctgatagcaaaaactttaaagttcgtagcaagaatttcccacaagacaaatcaaagatacctgcagcaagttatctaatggagcttgcagccattgactggtttaaggacaccaaacgtatggataacgttgctaggcagaagggttgtgttgctcaggttgctgctgagaaagggatgcatacatttattgtcaacatacagggatcattactacaacgtttttttgatggcgatgatgaattctgcaatagcagactaaagcttataccatccgttcccaagggctcctggttagtgcgacagagtgttggaagcaccccttgtctgttgggaaaggctgttgattgtagttacgttcgaggtcctgcatacttggaggtggacgttgacattggatcttcggcggtagcaaatggagttttgggtcttgtttttggtgtggtgacaacattagtagttgatatggccttcctaatacaggccaacacatatgaggagctaccagagcaagtgataggcgcagctcgactggctcatgttgaaccggccacagcagtagttcctgatcttagcaacacatcaaatgacagtagcaacagcaacgacgataatagcaacaacaacattggttcctcagaggatgatgtgtccaagaaaacaaactgattttattttaatttagtatcagggtgttttgttggttatcactttaattatatctgctagctagtcattcaggtaaagttgtgtactaacctcagacaatggaatccagagagctcgagaggagagccgataatatatatttttgtgtctgtcctttaataattattgggaggaactggtgagcaaggttaacctccttgaaggccctcatacagtgacagagcccgattctaaacaacggtgatttctcaggagactgtgtaacagctacaaagccttccattggctctcttgactaaaatctattagctctcttgtttagatgcactagagttagtttttagctacct

SEQ ID NO: 198820 - DNA, 747 bp, Zea Mays
gttgtcctcaatgcaaaactagatacaagaggcacaaaggaagctctcaggctagatattttgtctcacgcctgatcccagctcacaaggaccctacatatgagcaggagtcaaggtttcctcaattgcggacactcactcctgagcaaagggctaggctaaagagcagcttcatccagttcgatgactatagtttttgcgagtggatgcgcagcctcaaattggtcccaccagaaccaagctaacacaactagtctggggggtacacttccgaacggtggatagcaacaaaatctatggcgtggcatctgatagagctttccctctaagatagatgtgatcttcatgaaccaaattatggcatcgccagatattcgtgagccgatcatacgtttggtttggtgggcagccatttaggtgcggtggaactgtatgattttgcataattcattttcttctccttttgaccatgatgtagtagagtaagttcataaacagttccttgtcaattgtcatacaggtggagaaatctacacaataagtttgtcaattgtcccaaatgttacatgtatacaacctttgtttgaagaggtctcactatattatttgaaattccttcatttctcaggggtagccgcagctctcagcctctcaccttcctgggaggatcaaggcctttgcagtataactctgccatttgcatgctagatcaattccattctgtttatgagcagatgtgaaaatgag

SEQ ID NO: 198821 - DNA, 3402 bp, Zea Mays
cctggtgcctccaccctcccgcctcgagagtccagagttgaaccagcttccctgcctggctgcatttgcaaacggtaggaacccagccggcctacccgcgccgtcgggccgcaagcatttctactaatctgctcttctcgtagacagaaaacccgcgagccccgagccccgaccaataggaagccgaggtccagccgtagtgacgtcgatttcgattaacccgagcggcgcaaatccggtgtcaccgaagcacatcttccatctccagcaattcttccttcctcctcgtcgcattccacgtccggatctcaaattgtcccatcccgtgctcctcctccccgatcccatccctccgctccagatccgcacgccgccaccggatccgcagccagcgcggccggcatggaggagacgccgccggggcagcgcccgcagccgccgccggcgcacgcgtctcctccgttcgcctcggcgcccttcacaccgccgccgcgcgtcttctctccaggcctcgccgccgcgcggggcacgcccagccccggctcggggcccggccacgcgctgccgcacctcagcacgccacccggcccgcccgtcttctcctcgccgctgcgccctgcggccgtgcccttccgcgccaccccggcctctccccaccccgtgtccttcgccgcttcggggggctactcctcgtcctcctccgccactgccgctaccaccgcctccctccccacctcatcagcgccgcactttctcaacggcgctgccacgcttcacggggaccatgcccctgcgccatcatcaatccagggagacggcctcgacagtccctatgtacagttctccgcaaacaaggttctgaagcagaagaagctgctcaatgcccctagcttggggttcggagctctggtttctccagggaaggaggtgtcacctggcccagaggttgtggagcgtgatccacgccgttgcctgaactgtggcgcctatgtgaacttgtactgtgatgtccagatcggctccgggcagtggcaatgcgtcatttgcaagaagctcaatggcagcgagggggaattcgttgtctccagcaagcaggacctgctccagtggccagagcttgcatccacgactgtggattatgtgcaggtggggaacaggcgtccaggctttgtcccagtgtctgacacgagggtgtccggccccatttttatcctcatagatgaatgcctcgatgaggcgcacctgcagcatcttcagggctccttgcatgcctttgtggattcgctccctcctaccgcaaagataggaataatcacctatgggagaactgtctcagtgtatgatttctcagagggggcagcagtgtcagcggatgtgctacctggaaacaagtcgcctacccatgagtctttgaaggccctaatctatgggacaggtgtttacctgtctcctatacatgcttcgctacctgttgcacacacaatattctcatctctgagaccctatcagctgagcgtgccagaagtgttaagggatcggtgtgttggagcagcagtagaggttgcccttggtattattcaagggccatcagtggagttgtctcgtggaatcatcaagagatctggtggaaactgtaggatcttggtgtgtgctggtggccctagcacctttggaccaggatcggtgcctcattcagctaaacatcccaactatgcttatctggagaagacagctatgaagtggatggagagtcttggtcatgaagcacagagacacagtactgttgttgatatcttttgtgctggacagtgtcctgtgagggtccctgttctgcaaccattggcaaagtgttctggaggtgtgctcttagctcatgatgactttggagaggcctttggggtcaatttgcaaagggcatcaactagagcagctggttcccatggcttatttgagatcaggtgttcagataacatgtatgttactcaagttattggccctggtgaagaggcttctcctgattctcatgaaacgttcaaacatggtagttccttctgtatccagatgcatagtgttgaggaaacacagagtttttctgtgtctatggagacaaaggctgatatcaaaagtgattttgttttctttcagtttgctgtccattattccaatatatatcaaacagaaatcactcgggtgatcactatgaggctgcagactgatgatggtttgtctgcatatctggcaagtgtgcaggaggatgttgcggcagttatcattggtaaaagaactgtattgcgtgccaggactgcctctgatgctattgatatgaggctctcaattgatgaaagagtaaaggacatagctctaaaatttggtagtcaggctcccaaatcaaagctttaccgcttcccaaaagaactagcatcactcccagagtgcttgtttcatctgaaaaggggaccacttttaggtagcataatcggacatgaagatgaaagatccgtacttaggaatttgttcctgaatgcttcgtttgacctttcgctccgtatgttggcacctcggtgcataatgcatcgtgaaggtggtacatttgaggagctgccagcatatgatcttgtcatgcaatctaatgctgcagtggtactggaccatggaacagatattttcatttggttgggtgctgagctagcagcccaagaaggacaaagtgcagcagctttagcagcatgccgtactctggcagaagagctcagcgagaaacgttttccagctcccaggatactttcattcaaacaaggaagctctcaggctagatattttgtctcacgcctgatcccagctcacaaggaccctacatatgagcaggagtcaaggtttcctcaattgcggacactcactcctgagcaaagggctaggctaaagagcagcttcatccagttcgatgactatagtttttgcgagtggatgcgcagcctcaaattggtcccaccagaaccaagctaacacaactagtctggggggtacacttccgaacggtggatagcaacaaaatctatggcgtggcatctgatagagctttccctctaagatagatgtgatcttcatgaaccaaattatggcatcgccagatattcgtgagccgatcatacgtttggtttggtgggcagccatttaggtggagaaatctacacaataagtttgtcaattgtcccaaatgttacatgtatacaacctttgtttgaagaggtctcactatattatttgaaattccttcatttctcaggggtagccgcagctctcagcctctcaccttcctgggaggatcaaggcctttgcagtataactctgccatttgcatgctagatcaattccattctgtttatgagcagatgtgaaaatgag

SEQ ID NO: 198822 - DNA, 3908 bp, Zea Mays
gaacccagccggcctacccgcgccgtcgggccgcaagcatttctactaatctgctcttctcgtagacagaaaacccgcgagccccgagccccgaccaataggaagccgaggtccagccgtagtgacgtcgatttcgattaacccgagcggcgcaaatccggtgtcaccgaagcacatcttccatctccagcaattcttccttcctcctcgtcgcattccacgtccggatctcaaattgtcccatcccgtgctcctcctccccgatcccatccctccgctccagatccgcacgccgccaccggatccgcagccagcgcggccggcatggaggagacgccgccggggcagcgcccgcagccgccgccggcgcacgcgtctcctccgttcgcctcggcgcccttcacaccgccgccgcgcgtcttctctccaggcctcgccgccgcgcggggcacgcccagccccggctcggggcccggccacgcgctgccgcacctcagcacgccacccggcccgcccgtcttctcctcgccgctgcgccctgcggccgtgcccttccgcgccaccccggcctctccccaccccgtgtccttcgccgcttcggggggctactcctcgtcctcctccgccactgccgctaccaccgcctccctccccacctcatcagcgccgcactttctcaacggcgctgccacgcttcacggggaccatgcccctgcgccatcatcaatccagggagacggcctcgacagtccctatgtacagttctccgcaaacaaggttctgaagcagaagaagctgctcaatgcccctagcttggggttcggagctctggtttctccagggaaggaggtgtcacctggcccagaggttgtggagcgtgatccacgccgttgcctgaactgtggcgcctatgtgaacttgtactgtgatgtccagatcggctccgggcagtggcaatgcgtcatttgcaagaagctcaatggcagcgagggggaattcgttgtctccagcaagcaggacctgctccagtggccagagcttgcatccacgactgtggattatgtgcaggtggggaacaggcgtccaggctttgtcccagtgtctgacacgagggtgtccggccccatttttatcctcatagatgaatgcctcgatgaggcgcacctgcagcatcttcagggctccttgcatgcctttgtggattcgctccctcctaccgcaaagataggaataatcacctatgggagaactgtctcagtgtatgatttctcagagggggcagcagtgtcagcggatgtgctacctggaaacaagtcgcctacccatgagtctttgaaggccctaatctatgggacaggtgtttacctgtctcctatacatgcttcgctacctgttgcacacacaatattctcatctctgagaccctatcagctgagcgtgccagaagtgttaagggatcggtgtgttggagcagcagtagaggttgcccttggtattattcaagggccatcagtggagttgtctcgtggaatcatcaagagatctggtggaaactgtaggatcttggtgtgtgctggtggccctagcacctttggaccaggatcggtgcctcattcagctaaacatcccaactatgcttatctggagaagacagctatgaagtggatggagagtcttggtcatgaagcacagagacacagtactgttgttgatatcttttgtgctggacagtgtcctgtgagggtccctgttctgcaaccattggcaaagtgttctggaggtgtgctcttagctcatgatgactttggagaggcctttggggtcaatttgcaaagggcatcaactagagcagctggttcccatggcttatttgagatcaggtgttcagataacatgtatgttactcaagttattggccctggtgaagaggcttctcctgattctcatgaaacgttcaaacatggtagttccttctgtatccagatgcatagtgttgaggaaacacagagtttttctgtgtctatggagacaaaggctgatatcaaaagtgattttgttttctttcagtttgctgtccattattccaatatatatcaaacagaaatcactcgggtgatcactatgaggctgcagactgatgatggtttgtctgcatatctggcaagtgtgcaggaggatgttgcggcagttatcattggtaaaagaactgtattgcgtgccaggactgcctctgatgctattgatatgaggctctcaattgatgaaagagtaaaggacatagctctaaaatttggtagtcaggctcccaaatcaaagctttaccgcttcccaaaagaactagcatcactcccagagtgcttgtttcatctgaaaaggggaccacttttaggtagcataatcggacatgaagatgaaagatccgtacttaggaatttgttcctgaatgcttcgtttgacctttcgctccgtatgttggcacctcggtgcataatgcatcgtgaaggtggtacatttgaggagctgccagcatatgatcttgtcatgcaatctaatgctgcagtggtactggaccatggaacagatattttcatttggttgggtgctgagctagcagcccaagaaggacaaagtgcagcagctttagcagcatgccgtactctggcagaagagctcagcgagaaacgttttccagctcccaggatactttcattcaaagttagtttgcttgttctcattctttactgttatttctagatgttcttctgatgacatctgcacaaatttggatgtgagcacacctttatagtgtggtataccagaattcatctaatatctactatttcagcaataaatttattgtcttaactagtgtaggccatgtctggtggattgcaacttgtgattataaattttggtgctagactattgttacatatgttcacttccatttaaatatttggtttgctttgtggtgcttaatagtttttgctttgaagtgtttaatagtttacatgacatcggactgaagataactgtggcacgggagttttcttagtataaatgtggaaaattctttcaaattattgggcttttaatacttttttcaatcaagtaaactagagtgaaagatcacttacacagagtgcagcatgctttccttttacaattgactgttcttccttatattttggcacagcaaggaagctctcaggctagatattttgtctcacgcctgatcccagctcacaaggaccctacatatgagcaggagtcaaggtttcctcaattgcggacactcactcctgagcaaagggctaggctaaagagcagcttcatccagttcgatgactatagtttttgcgagtggatgcgcagcctcaaattggtcccaccagaaccaagctaacacaactagtctggggggtacacttccgaacggtggatagcaacaaaatctatggcgtggcatctgatagagctttccctctaagatagatgtgatcttcatgaaccaaattatggcatcgccagatattcgtgagccgatcatacgtttggtttggtgggcagccatttaggtgcggtggaactgtatgattttgcataattcattttcttctccttttgaccatgatgtagtagagtaagttcataaacagttccttgtcaattgtcatacaggtggagaaatctacacaataagtttgtcaattgtcccaaatgttacatgtatacaacctttgtttgaagaggtctcactatattatttgaaattccttcatttctcaggggtagccgcagctctcagcctctcaccttcctgggaggatcaaggcctttgcagtataactctgccatttgcatgctagatcaattccattctgtttatgagcagatgtgaaaatgag

SEQ ID NO: 198823 - DNA, 2056 bp, Zea Mays
cttaaaaatttcagctggtttcaagttttgtgttgagggctagatcagttacacacttcaattttattccttgtcgatgttccatttgactcaatctttggtccatctgatctgtaacagatcctgggtccaaacattctttgctggctttgccctactgcgacggggcatctgaacgatggcaccgagttccaaatcacgaacaactgatgaatgcgccagcagcatttccagttaccacgtgctaccgtgtagatttccctgttcattcttgtaaccaaattgctccggtagtgctgggcccacacgcagtgacacactgacactcaagtcggcgaataggagaaaacaagtacgcggctttcttcacagatcacagcagcatccagcatcgggtcaaaacgaaacgaagcatccacgtttgtcgctcccacgctggcaatggccgccgccgcatctcccgccaccgccgccgccgtccgcgaagcggcgccggcccacagacaaattggaatccgtccgggtcatggtccggccccattccgtatcggcttcctcgccaaaccgtcctcccggtgggccgcgatctctgtgccgcctgggcctcgccgcgcggctccggcggcgtccgcggccagggagagggtcacggaggaggaggagaggcccgtgtcggtggagctggaacccatcgccagcgagcagcagctggactgggtccttggggaggcgcggcagctccagctccccatcgtcctgctgtggatggcgagttggtgcaggaaatgtatatatctgaagcctaagcttgagaagttggcagcagaatatcatccaagaatccggttctactgcatcgatgtgaattgtgttccacaaaagcttgtgaaccgcgctggagtaacagtaagcctacccttgaactgtattagtaaataaatctgaaaacatttacacccagctatgcttaactttatgccatttgtagatgcatgtctttttttcttttctttctccgggcagcttctagaattcctttgttgtggttggttccctgttggggttgaaactggaagcctccgctttattggccctggaaactttgttatcagttgccggctttgttatcaacttgcattccctagccttatccttcagctttggtattagagtacaatatcaaatatcctcacatgatgcatttggcctcatcgttagcttgtctgcagcaactgcgtgcatacacaagtgacaaagcagatccctagtacgtttgttaaactaacacgcacgctaatggctccttttgttgggacttgtgaaatctgcaccgcggggctcgagcagaagatgccttgtatacagctgtggagcgactcccggaaacaggcggaggtgatcggcggcgggcacaagtcttggctggtgatcgatgacgtccggaggatgatcgagcaggaggaatgatccggcgtgtccttttagcgcagcgacctcagtattgccgcttgctcatagtcctagactgggcgtctgggccaggtgtttggtcgtcttgcatatattaggaaccatccatgatcagaggttttgaaaaatcgccggttcgtcttccatatatgaactctctccctggtgtcgcgatcaggaaaatgaaggaattgggctaccagtcatctgcgatgtccttgatgtatccatgtgtgtgtattaaaactggaacttgctgctgtatgagcaataatccagcacagcacggcaggacttattgccggtgtactgactggccttgccattagccactggatctggatggtagcactgttcatggatatgaagattagcatagcgagtacaatctctgctttagggttgtcaaaataacactggtcttgtttacaaacactagcttgtcttgtagcttgcttcttgaattctcaagagacaaattgtagccagctgggaaagtggcagcaggtttccctgtttttcttggtttgctcctgcatatactatgttctcactcctatctaaataacattctggcctttttaga

SEQ ID NO: 198824 - DNA, 1619 bp, Zea Mays
cgtacttaaaaatttcagctggtttcaagttttgtgttgagggctagatcagttacacacttcaattttattccttgtcgatgttccatttgactcaatctttggtccatctgatctgtaacagatcctgggtccaaacattctttgctggctttgccctactgcgacggggcatctgaacgatggcaccgagttccaaatcacgaacaactgatgaatgcgccagcagcatttccagttaccacgtgctaccgtgtagatttccctgttcattcttgtaaccaaattgctccggtagtgctgggcccacacgcagtgacacactgacactcaagtcggcgaataggagaaaacaagtacgcggctttcttcacagatcacagcagcatccagcatcgggtcaaaacgaaacgaagcatccacgtttgtcgctcccacgctggcaatggccgccgccgcatctcccgccaccgccgccgccgtccgcgaagcggcgccggcccacagacaaattggaatccgtccgggtcatggtccggccccattccgtatcggcttcctcgccaaaccgtcctcccggtgggccgcgatctctgtgccgcctgggcctcgccgcgcggctccggcggcgtccgcggccagggagagggtcacggaggaggaggagaggcccgtgtcggtggagctggaacccatcgccagcgagcagcagctggactgggtccttggggaggcgcggcagctccagctccccatcgtcctgctgtggatggcgagttggtgcaggaaatgtatatatctgaagcctaagcttgagaagttggcagcagaatatcatccaagaatccggttctactgcatcgatgtgaattgtgttccacaaaagcttgtgaaccgcgctggagtaacaaagatgccttgtatacagctgtggagcgactcccggaaacaggcggaggtgatcggcggcgggcacaagtcttggctggtgatcgatgacgtccggaggatgatcgagcaggaggaatgatccggcgtgtccttttagcgcagcgacctcagtattgccgcttgctcatagtcctagactgggcgtctgggccaggtgtttggtcgtcttgcatatattaggaaccatccatgatcagaggttttgaaaaatcgccggttcgtcttccatatatgaactctctccctggtgtcgcgatcaggaaaatgaaggaattgggctaccagtcatctgcgatgtccttgatgtatccatgtgtgtgtattaaaactggaacttgctgctgtatgagcaataatccagcacagcacggcaggacttattgccggtgtactgactggccttgccattagccactggatctggatggtagcactgttcatggatatgaagattagcatagcgagtacaatctctgctttagggttgtcaaaataacactggtcttgtttacaaacactagcttgtcttgtagcttgcttcttgaattctcaagagacaaattgtagccagctgggaaagtggcagcaggtttccctgtttttcttggtttgctcctgcatatactatgttctcactcctatctaaataacattctggcctttttaga

SEQ ID NO: 198825 - DNA, 2797 bp, Zea Mays
ttgtcgcctcgccgcttctccacctcccgtctcgtctgcaactgcaactccacctcggccgtcggccttctcatcctcgtcaccaccggccacggccggcctccaccaccgcctgcccaccgctcgctactcttgtctcccctccccccaagtggaagaagaatcgggctgttgctcactcagagctctctcagtgaggcgggcctcactagtcactagccttgctgttatgccttccccgccgctcgccagagtccaccgccaccggacaggaagcaccacctagttcctgaccctgatgcccatggcaccggaccaccccttcgatgccttcgtcgccgcagcccgtggcgccgtagcccaccttcacctccccgtcatccacatccctggatccaattccagtccccatcccaactccaagcagcacaagggactcgaggtcgactgcctgctccacctccacgtcctcgtcaccaacttcctccacaagcccctcaagtcattcgccaggtgcttcaggcccaagcgacgggcagacacacactccccgccgctccaccaggagcccagcaatggcaccaccccgcaaaagcaactggagttcctgctctgcattgcgttcgacgccttcgcccacaacctccacgcgctggatgacgcctgcaagcacaaaggcgaggaatttgctgccgctacccgacagttggagcaatttgtggttctcaggaaggtaatcgatgggaagagggccgatttcgatgggttcctttccaatctgggctttgcaaaggttggggcaccgccaccgccagcaagcatcgtgggtggtgcgtcccctgtcccagcatcagcaccagtcagcaatcaggaggatggtgccgtgattggaaacggcgagggggtggacagtgctagtggtacacaacagcaggcacagaaattgcctgcccggttgcttaacattcctttgtcgaatgtggagcgtctgcggtctacgctttctgcagtttcactgacggagctcattgaattagtcccgctgctggtgagcagatcatcgacatcggcagatgcacatcctgacaagaagaagcttttctcagtgcaagatttcttcagatatgcagaaattgaaggaaagcgattctttgaagagttggacagagatggtgatggccaagtcactctagaagatctcgaaattgcaacgaggaagaggcggttaccaaggagaaggaagcaaccattctccgagcgtataccacgttgtgtttgagcaagtctggaacacttcacaaaagtcaaattttgacttctttgaaaggtgctggacttccagccaatgaagataatgccgctgccatgctacgttatctaaatgctgattcagaaggatcaatctcatatggccatttccgcaacttcatgcttctacttccttcggaacgtcttgaggatgatcctcggaacatttggtttgaagcagccaccgttgttgctgtccccccacctatagaaatatctgcaggaagtgttttgaagtctgctttagctggaggtcttgcaagtgcgctttctacctctctgctgcatcctattgattcaatgaagacacgtgtccaagcatctacactctcatttcctgagctcatttcaaagcttccacaaattgggcttcgaggattgtatcgaggttctatcccagcaattctcggccagttttcaagccatggtttgaggacaggaatctttgaagcaagcaagcttgtattaattaatgtagctccaacacttccagagattcaggtgcaatcaattgcatccttctgcagcacagtcctagggactgcagtccggatcccttgtgaggttcttaagcaacgtttgcaggctggaatattcaacaatgtaggggaggcgattgttggcaccatgcgacaagatggcccaaagggtttttttcgcggcactggggccacactgtgtcgcgaggttcctttctatgttgctggaatgtgcctctatgcagaagctaagaaggcagcacagcatgttttgaggagagacttggaagcatgggaaatagtggcagttggagcattgtctggaggacttgcggcaatagtaaccactccctttgacgtgatgaagactaggatgatgactgcccctccaggcacaccagtgtctatgcagatgataatcttctccatccttcgaaatgagggtccacttggactctttaagggcgcgatcccccgcttcttctggatcgctcctcttggagcaatgaattttgcaggctatgagcttgccaagaaggcgatgatcaaagatgagaacagttccagtgagtcaacaaaagagaacttgccaagaaatcagtgatcaaggatgagtgtgaatctagggcgtcaatacaggacaagaaaaccatgatggataccacaggataatctaacgtttacctggttaacatctatggtgcaaagaaattgaaaccatggaacagtttttttttgtgtgtgtgttcatgtagcagagaagcaacagaacatctgccttttttgatacttgaatctaattttgggttgccgcgtctttttgcccctctaggaattccattcccataggccttgagatggttgtatagtatacagtacatgagagagacagatgcacatgctggagctgttgctcttttgtttgttatttgacgatgatccatagccttcctggttaaacatgatgtaaatttgctcttgtacttaccctgatgaggacagttggcttt

SEQ ID NO: 198826 - DNA, 3769 bp, Zea Mays
atcacacggccgtgaggagcaactctgttcctcatctcccgttcaccccgcgggcgcagggcgcgctctctcctcgtggcgatcgccgaccgtagcggccgctgcccgggttttcgtcggccgcttcgccatgtcttcgctggacccttcgccagcgacgagcacccaacagcagaagcaattggagagtttggtaaatctactgacgcagggaagcaggttctaccgcaaagcatataatgaactgttctcaggtgtaactactgagcaggatccggattcatcgactaatattcctgagtatatgctttttgggtggcatctcttcttaatgctccatttgagatcaccagaattgttcaaggacctggtgtcctgcatccatggattagttgctgtgttggccatacttttgattcacgtgccagctaaatttaggagcttcacgattgaaggctcttctcacttaatgtgcctttgaaacattggcatctcccacaaagacaataaagaacatgctgactgttcctagttctcctttgtcaccagccaccggtggttcagtcaagattgtgcaaatgacaccagtaacttctgccatgacgacagctaagtggcttcgtgaggtgatatcttcattgccagataagccttcatctaagcttcagcagtttctgtcatcatgcgatagggatttgacaaatgctgtcacagaaagggtcagcatagttttggaagcaatttttccaaccaaatcttctgccaatcggggtgtatcgttaggtctcaattgtgcaaatgcctttgacattccgtgggcagaagccagaaaagtggaggcttccaagttgtactatagggtattagaggcaatctgcagagcggagttacaaaacagcaatgtaaataatctaactccattgctgtcaaatgagcgtttccaccgatgtttgattgcatgttcagcggacttagtattggcgacacataagacagtcatcatgatgtttcctgctgttcttgagagtaccggtctaactgcatttgatttgagcaaaataattgagaactttgtgagacatgaagagaccctcccaagagaattgaaaaggcacctaaattccttagaagaacagcttttggaaagcatggcatgggagaaaggttcatcattgtataactcactgattgttgccaggccatctgttgcttcagaaataaaccgccttggtcttttggctgaaccaatgccatctcttgatgacttagtgtcaaggcagaatgttcgtatcgagggcttgcctgctacaccatctaaaaaacgtgctgctggtccagatgacaacgctgatcctcgatcaccaaagagatcgtgcaatgaatctaggaacacagtagtagagcgcaatttgcagacacctccacccaagcaaagccacatggtgtcaactagtttgaaagcaaaatgccatccactccagtccacatttgcaagtccaactgtctgtaatcctgttggtgggaatgaaaaatgtgctgacgtgacaattcatatattcttttccaagattctgaagttggctgctattagaataagaaacttgtgcgaaagggttcaatgtgtggaacagacagagcgtgtctataatgtcttcaagcagattcttgagcaacagacaacattattttttaatagacacatcgatcaacttatcctttgctgtctttatggtgttgcaaaggtttgtcaattagaactcacattcagggagatactcaacaattacaaaagagaagcacaatgcaagccagaagttttttcaagtatctatattgggagtacgaaccgtaatgggcagcgaagcctttcctggtgtcactaatatcatctggtactcatccagaagacaagaagaatgctagtggccaaattcctggatcacccaagccatctcctttcccaaatttaccagatatgtccccgaagaaagtttcagcatctcataatgtatatgtgtctcctttgcggcaaaccaagttggatctactgctgtcaccaagttccaggagtttttatgcatgcattggtgaaggcacccatgcttatcagagcccatctaaggatttggctgctataaatagccgcctaaattataatggcaggaaagtaaacagtcgattaaatttcgacatggtgagtgactcagtggtagccggcagtctgggccagataaatggtggttctacctcggatcctgcagctgcatttagccccctttcaaagaagagagagacagatacttgatcaattataaatggtggcctctctcgtatatagctcacagatccgtgctccgtagcagtctattcttctgaataagtggattaactggagcgatttaactgtacatgtatgtgttagtgagaagcagcagtttttaggcagcaaactgtttcaagttagcttttgagctatcaccatttctctgctgattgaacatatccgctgtgtagagtgctaatgaatctttagttttcattgggctgacataacaaatctttatcctagttggctggttgttgggaggcattcatcagggttatatttggttgtcaaaaagtactgtacttaattcacatctttcacatttttcactagcaatagcagccccaaattgctttcctgactaggaacatattctttacaggtataagcatgccaactctaaactatatgaatcctttttatattctcatttttaagtacttctctgtttctgctacttttgtactgtatatttccagcttctccatcagactgatgatcccatattcagtgtgctgcaagtgatttgacatatgtggcttatccttcagtgagatgaagaaaacctgaaatgctatcaccatttaaaacattggcttctggaagttcaggtgattagcaggagacgttctgacattgccattgacatgtacggtagtgatggcaggagacgttcttaaacagcagctgctccttcagcttgtaatgtctgattgtattgaccaagagcatccaccttgccttatggtactaactgaatgagctggtgacgctgactcatctgcataatggcagatgcttaaccatctttaggagctcatgtcatgattccagctgcaccgtgtgcaaatgtgaaggccctgcaagggctttccaggccgcaccaatcctgcttgcttcttgaagatacatatggtgccacctaaataaaagctgtttctggttatgtctgtccttgacatgtcaacagattagtgttgggttgcagtcatgtggtgtttaagtcttggagaaggcgagaagtcattgctgccagcattgtgatcgtcaggcacagaagtactcaaaagtgagagctacttgttgcgagcaaacggagggcgatataggttgatagccaatttcagttctctatatacaagcagcggattttgtttagagttagcttttgagatgcatcatttctttcacatctgattctgtgtgttgtaactcggagtcgcgtagaagttagaatgctaactgaccttaattttcaccgaataatttgctagcgtttttcagtatgaaatccttgtcttaaattttggaatgtacctgtcatgggtatattttgtctttagatacttgtcatgtttttaatcatttattacatatttatagttttgactatcttttttcatctctatcaaatcatattcccttgctttcggaatttgttcc

SEQ ID NO: 198827 - DNA, 4375 bp, Zea Mays
gtcatcgttcgcatcacacggccgtgaggagcaactctgttcctcatctcccgttcaccccgcgggcgcagggcgcgctctctcctcgtggcgatcgccgaccgtagcggccgctgcccgggttttcgtcggccgcttcgccatgtcttcgctggacccttcgccagcgacgagcacccaacagaagcaattggagagtttggtaaatctactgacgcagggaagcaggttctaccgcaaagcatataatgaactgttctcaggtgtaactactgagcaggatccggattcatcgactaatattcctgagtatatgctttttgggtggcatctcttcttaatgctccatttgagatcaccagaattgttcaaggacctggtgtcctgcatccatggattagttgctgtgttggccatacttttgattcacgtgccagctaaatttaggagcttcacgattgaaggctcttctcacttaatcaaacaaactgagaaaggcgtggatcttattgcttcattatgtcataactatcatacctctgaagaacgtttgaaagaaatgttgcacaagtctcacaatgcaatagaagacattttccatatgaaagcactaagtgcttcagagtgcaaaccagaaaatttggataagatagacacagatgacctgatgtatttcaaaggtctgattgatatggaatgtttccagtcaaatttggaaaaaatggagaaactatgtaattctaatagctgtaaaggggagcttgattttaaatcaattttgatcaataatgattatattccctatgatgagaactcgacgggggattccaccaatttaggacattcaaagtgtgcctttgaaacattggcatctcccacaaagacaataaagaacatgctgactgttcctagttctcctttgtcaccagccaccggtggttcagtcaagattgtgcaaatgacaccagtaacttctgccatgacgacagctaagtggcttcgtgaggtgatatcttcattgccagataagccttcatctaagcttcagcagtttctgtcatcatgcgatagggatttgacaaatgctgtcacagaaagggtcagcatagttttggaagcaatttttccaaccaaatcttctgccaatcggggtgtatcgttaggtctcaattgtgcaaatgcctttgacattccgtgggcagaagccagaaaagtggaggcttccaagttgtactatagggtattagaggcaatctgcagagcggagttacaaaacagcaatgtaaataatctaactccattgctgtcaaatgagcgtttccaccgatgtttgattgcatgttcagcggacttagtattggcgacacataagacagtcatcatgatgtttcctgctgttcttgagagtaccggtctaactgcatttgatttgagcaaaataattgagaactttgtgagacatgaagagaccctcccaagagaattgaaaaggcacctaaattccttagaagaacagcttttggaaagcatggcatgggagaaaggttcatcattgtataactcactgattgttgccaggccatctgttgcttcagaaataaaccgccttggtcttttggctgaaccaatgccatctcttgatgacttagtgtcaaggcagaatgttcgtatcgagggcttgcctgctacaccatctaaaaaacgtgctgctggtccagatgacaacgctgatcctcgatcaccaaagagatcgtgcaatgaatctaggaacacagtagtagagcgcaatttgcagacacctccacccaagcaaagccacatggtgtcaactagtttgaaagcaaaatgccatccactccagtccacatttgcaagtccaactgtctgtaatcctgttggtgggaatgaaaaatgtgctgacgtgacaattcatatattcttttccaagattctgaagttggctgctattagaataagaaacttgtgcgaaagggttcaatgtgtggaacagacagagcgtgtctataatgtcttcaagcagattcttgagcaacagacaacattattttttaatagacacatcgatcaacttatcctttgctgtctttatggtgttgcaaaggtttgtcaattagaactcacattcagggagatactcaacaattacaaaagagaagcacaatgcaagccagaagttttttcaagtatctatattgggagtacgaaccgtaatggggtattagtatcgcgccatgttggtatcattactttttacaatgaggtatttgttccagcagcgaagcctttcctggtgtcactaatatcatctggtactcatccagaagacaagaagaatgctagtggccaaattcctggatcacccaagccatctcctttcccaaatttaccagatatgtccccgaagaaagtttcagcatctcataatgtatatgtgtctcctttgcggcaaaccaagttggatctactgctgtcaccaagttccaggagtttttatgcatgcattggtgaaggcacccatgcttatcagagcccatctaaggatttggctgctataaatagccgcctaaattataatggcaggaaagtaaacagtcgattaaatttcgacatggtgagtgactcagtggtagccggcagtctgggccagataaatggtggttctacctcggatcctgcagctgcatttagccccctttcaaagaagagagagacagatacttgatcaattataaatggtggcctctctcgtatatagctcacagatccgtgctccgtagcagtctattcttctgaataagtggattaactggagcgatttaactgtacatgtatgtgttagtgagaagcagcagtttttaggcagcaaactgtttcaagttagcttttgagctatcaccatttctctgctgattgaacatatccgctgtgtagagtgctaatgaatctttagttttcattgggctgacataacaaatctttatcctagttggctggttgttgggaggcattcatcagggttatatttggttgtcaaaaagtactgtacttaattcacatctttcacatttttcactagcaatagcagccccaaattgctttcctgactaggaacatattctttacaggtataagcatgccaactctaaactatatgaatcctttttatattctcatttttaagtacttctctgtttctgctacttttgtactgtatatttccagcttctccatcagactgatgatcccatattcagtgtgctgcaagtgatttgacatatgtggcttatccttcaggacaagatatttttgtatgctacacttcccaaattgcaattaatccagaagtctaccttgttttattctattagttctcagcaacagtgaatgaatatgaatcagtcatgctgatagatgttcatctggttattccaaacaatctgacatcgcatctctttctgcaagtgagatgaagaaaacctgaaatgctatcaccatttaaaacattggcttctggaagttcaggtgattagcaggagacgttctgacattgccattgacatgtacggtagtgatggcaggagacgttcttaaacagcagctgctccttcagcttgtaatgtctgattgtattgaccaagagcatccaccttgccttatggtactaactgaatgagctggtgacgctgactcatctgcataatggcagatgcttaaccatctttaggagctcatgtcatgattccagctgcaccgtgtgcaaatgtgaaggccctgcaagggctttccaggccgcaccaatcctgcttgcttcttgaagatacatatggtgccacctaaataaaagctgtttctggttatgtctgtccttgacatgtcaacagattagtgttgggttgcagtcatgtggtgtttaagtcttggagaaggcgagaagtcattgctgccagcattgtgatcgtcaggcacagaagtactcaaaagtgagagctacttgttgcgagcaaacggagggcgatataggttgatagccaatttcagttctctatatacaagcagcggattttgtttagagttagcttttgagatgcatcatttctttcacatctgattctgtgtgttgtaactcggagtcgcgtagaagttagaatgctaactgaccttaattttcaccgaataatttgctagcgtttttcagtatgaaatccttgtcttaaattttggaatgtacctgtcatgggtatattttgtctttagatacttgtcatgtttttaatcatttattacatatttatagttttgactatcttttttcatctctatcaaatcatattcccttgctttcggaatttgttcc

SEQ ID NO: 198828 - DNA, 4415 bp, Zea Mays
gtcatcgttcgcatcacacggccgtgaggagcaactctgttcctcatctcccgttcaccccgcgggcgcagggcgcgctctctcctcgtggcgatcgccgaccgtagcggccgctgcccgggttttcgtcggccgcttcgccatgtcttcgctggacccttcgccagcgacgagcacccaacagaagcaattggagagtttggtaaatctactgacgcagggaagcaggttctaccgcaaagcatataatgaactgttctcaggtgtaactactgagcaggatccggattcatcgactaatattcctgagtatatgctttttgggtggcatctcttcttaatgctccatttgagatcaccagaattgttcaaggacctggtgtcctgcatccatggattagttgctgtgttggccatacttttgattcacgtgccagctaaatttaggagcttcacgattgaaggctcttctcacttaatcaaacaaactgagaaaggcgtggatcttattgcttcattatgtcataactatcatacctctgaagaacgtttgaaagaaatgttgcacaagtctcacaatgcaatagaagacattttccatatgaaagcactaagtgcttcagagtgcaaaccagaaaatttggataagatagacacagatgacctgatgtatttcaaaggtctgattgatatggaatgtttccagtcaaatttggaaaaaatggagaaactatgtaattctaatagctgtaaaggggagcttgattttaaatcaattttgatcaataatgattatattccctatgatgagaactcgacgggggattccaccaatttaggacattcaaagtgtgcctttgaaacattggcatctcccacaaagacaataaagaacatgctgactgttcctagttctcctttgtcaccagccaccggtggttcagtcaagattgtgcaaatgacaccagtaacttctgccatgacgacagctaagtggcttcgtgaggtgatatcttcattgccagataagccttcatctaagcttcagcagtttctgtcatcatgcgatagggatttgacaaatgctgtcacagaaagggtcagcatagttttggaagcaatttttccaaccaaatcttctgccaatcggggtgtatcgttaggtctcaattgtgcaaatgcctttgacattccgtgggcagaagccagaaaagtggaggcttccaagttgtactatagggtattagaggcaatctgcagagcggagttacaaaacagcaatgtaaataatctaactccattgctgtcaaatgagcgtttccaccgatgtttgattgcatgttcagcggacttagtattggcgacacataagacagtcatcatgatgtttcctgctgttcttgagagtaccggtctaactgcatttgatttgagcaaaataattgagaactttgtgagacatgaagagaccctcccaagagaattgaaaaggcacctaaattccttagaagaacagcttttggaaagcatggcatgggagaaaggttcatcattgtataactcactgattgttgccaggccatctgttgcttcagaaataaaccgccttggtcttttggctgaaccaatgccatctcttgatgacttagtgtcaaggcagaatgttcgtatcgagggcttgcctgctacaccatctaaaaaacgtgctgctggtccagatgacaacgctgatcctcgatcaccaaagagatcgtgcaatgaatctaggaacacagtagtagagcgcaatttgcagacacctccacccaagcaaagccacatggtgtcaactagtttgaaagcaaaatgccatccactccagtccacatttgcaagtccaactgtctgtaatcctgttggtgggaatgaaaaatgtgctgacgtgacaattcatatattcttttccaagattctgaagttggctgctattagaataagaaacttgtgcgaaagggttcaatgtgtggaacagacagagcgtgtctataatgtcttcaagcagattcttgagcaacagacaacattattttttaatagacacatcgatcaacttatcctttgctgtctttatggtgttgcaaaggtttgtcaattagaactcacattcagggagatactcaacaattacaaaagagaagcacaatgcaagccagaagttttttcaagtatctatattgggagtacgaaccgtaatggggtattagtatcgcgccatgttggtatcattactttttacaatgaggtatttgttccagcagcgaagcctttcctggtgtcactaatatcatctggtactcatccagaagacaagaagaatgctagtggccaaattcctggatcacccaagccatctcctttcccaaatttaccagatatgtccccgaagaaagtttcagcatctcataatgtatatgtgtctcctttgcggcaaaccaagttggatctactgctgtcaccaagttccaggagtttttatgcatgcattggtgaaggcacccatgcttatcagagcccatctaaggatttggctgctataaatagccgcctaaattataatggcaggaaagtaaacagtcgattaaatttcgacatggtgagtgactcagtggtagccggcagtctgggccagataaatggtggttctacctcggatcctgcagctgcatttagccccctttcaaagaagagagagacagatacttgatcaattataaatggtggcctctctcgtatatagctcacagatccgtgctccgtagcagtctattcttctgaataagtggattaactggagcgatttaactgtacatgtatgtgttagtgagaagcagcagtttttaggcagcaaactgtttcaagttagcttttgagctatcaccatttctctgctgattgaacatatccgctgtgtagagtgctaatgaatctttagttttcattgggctgacataacaaatctttatcctagttggctggttgttgggaggcattcatcagggttatatttggttgtcaaaaagtactgtacttaattcacatctttcacatttttcactagcaatagcagccccaaattgctttcctgactaggaacatattctttacaggtataagcatgccaactctaaactatatgaatcctttttatattctcatttttaagtacttctctgtttctgctacttttgtactgtatatttccagcttctccatcagactgatgatcccatattcagtgtgctgcaagtgatttgacatatgtggcttatccttcagccaggacgattggttttctgcatcaatcaatcttttttaggacaagatatttttgtatgctacacttcccaaattgcaattaatccagaagtctaccttgttttattctattagttctcagcaacagtgaatgaatatgaatcagtcatgctgatagatgttcatctggttattccaaacaatctgacatcgcatctctttctgcaagtgagatgaagaaaacctgaaatgctatcaccatttaaaacattggcttctggaagttcaggtgattagcaggagacgttctgacattgccattgacatgtacggtagtgatggcaggagacgttcttaaacagcagctgctccttcagcttgtaatgtctgattgtattgaccaagagcatccaccttgccttatggtactaactgaatgagctggtgacgctgactcatctgcataatggcagatgcttaaccatctttaggagctcatgtcatgattccagctgcaccgtgtgcaaatgtgaaggccctgcaagggctttccaggccgcaccaatcctgcttgcttcttgaagatacatatggtgccacctaaataaaagctgtttctggttatgtctgtccttgacatgtcaacagattagtgttgggttgcagtcatgtggtgtttaagtcttggagaaggcgagaagtcattgctgccagcattgtgatcgtcaggcacagaagtactcaaaagtgagagctacttgttgcgagcaaacggagggcgatataggttgatagccaatttcagttctctatatacaagcagcggattttgtttagagttagcttttgagatgcatcatttctttcacatctgattctgtgtgttgtaactcggagtcgcgtagaagttagaatgctaactgaccttaattttcaccgaataatttgctagcgtttttcagtatgaaatccttgtcttaaattttggaatgtacctgtcatgggtatattttgtctttagatacttgtcatgtttttaatcatttattacatatttatagttttgactatcttttttcatctctatcaaatcatattcccttgctttcggaatttgttcc

SEQ ID NO: 198829 - DNA, 4114 bp, Zea Mays
caacgtcatcgttcgcatcacacggccgtgaggagcaactctgttcctcatctcccgttcaccccgcgggcgcagggcgcgctctctcctcgtggcgatcgccgaccgtagcggccgctgcccgggttttcgtcggccgcttcgccatgtcttcgctggacccttcgccagcgacgagcacccaacagaagcaattggagagtttggtaaatctactgacgcagggaagcaggttctaccgcaaagcatataatgaactgttctcaggtgtaactactgagcaggatccggattcatcgactaatattcctgagtatatgctttttgggtggcatctcttcttaatgctccatttgagatcaccagaattgttcaaggacctggtgtcctgcatccatggattagttgctgtgttggccatacttttgattcacgtgccagctaaatttaggagcttcacgattgaaggctcttctcacttaatcaaacaaactgagaaaggcgtggatcttattgcttcattatgtcataactatcatacctctgaagaacgtttgaaagaaatgttgcacaagtctcacaatgcaatagaagacattttccatatgaaagcactaagtgcttcagagtgcaaaccagaaaatttggataagatagacacagatgacctgatgtatttcaaaggtctgattgatatggaatgtttccagtcaaatttggaaaaaatggagaaactatgtaattctaatagctgtaaaggggagcttgattttaaatcaattttgatcaataatgattatattccctatgatgagaactcgacgggggattccaccaatttaggacattcaaagtgtgcctttgaaacattggcatctcccacaaagacaataaagaacatgctgactgttcctagttctcctttgtcaccagccaccggtggttcagtcaagattgtgcaaatgacaccagtaacttctgccatgacgacagctaagtggcttcgtgaggtgatatcttcattgccagataagccttcatctaagcttcagcagtttctgtcatcatgcgatagggatttgacaaatgctgtcacagaaagggtcagcatagttttggaagcaatttttccaaccaaatcttctgccaatcggggtgtatcgttaggtctcaattgtgcaaatgcctttgacattccgtgggcagaagccagaaaagtggaggcttccaagttgtactatagggtattagaggcaatctgcagagcggagttacaaaacagcaatgtaaataatctaactccattgctgtcaaatgagcgtttccaccgatgtttgattgcatgttcagcggacttagtattggcgacacataagacagtcatcatgatgtttcctgctgttcttgagagtaccggtctaactgcatttgatttgagcaaaataattgagaactttgtgagacatgaagagaccctcccaagagaattgaaaaggcacctaaattccttagaagaacagcttttggaaagcatggcatgggagaaaggttcatcattgtataactcactgattgttgccaggccatctgttgcttcagaaataaaccgccttggtcttttggctgaaccaatgccatctcttgatgacttagtgtcaaggcagaatgttcgtatcgagggcttgcctgctacaccatctaaaaaacgtgctgctggtccagatgacaacgctgatcctcgatcaccaaagagatcgtgcaatgaatctaggaacacagtagtagagcgcaatttgcagacacctccacccaagcaaagccacatggtgtcaactagtttgaaagcaaaatgccatccactccagtccacatttgcaagtccaactgtctgtaatcctgttggtgggaatgaaaaatgtgctgacgtgacaattcatatattcttttccaagattctgaagttggctgctattagaataagaaacttgtgcgaaagggttcaatgtgtggaacagacagagcgtgtctataatgtcttcaagcagattcttgagcaacagacaacattattttttaatagacacatcgatcaacttatcctttgctgtctttatggtgttgcaaaggtttgtcaattagaactcacattcagggagatactcaacaattacaaaagagaagcacaatgcaagccagaagttttttcaagtatctatattgggagtacgaaccgtaatggggtattagtatcgcgccatgttggtatcattactttttacaatgaggtatttgttccagcagcgaagcctttcctggtgtcactaatatcatctggtactcatccagaagacaagaagaatgctagtggccaaattcctggatcacccaagccatctcctttcccaaatttaccagatatgtccccgaagaaagtttcagcatctcataatgtatatgtgtctcctttgcggcaaaccaagttggatctactgctgtcaccaagttccaggagtttttatgcatgcattggtgaaggcacccatgcttatcagagcccatctaaggatttggctgctataaatagccgcctaaattataatggcaggaaagtaaacagtcgattaaatttcgacatggtgagtgactcagtggtagccggcagtctgggccagataaatggtggttctacctcggatcctgcagctgcatttagccccctttcaaagaagagagagacagatacttgatcaattataaatggtggcctctctcgtatatagctcacagatccgtgctccgtagcagtctattcttctgaataagtggattaactggagcgatttaactgtacatgtatgtgttagtgagaagcagcagtttttaggcagcaaactgtttcaagttagcttttgagctatcaccatttctctgctgattgaacatatccgctgtgtagagtgctaatgaatctttagttttcattgggctgacataacaaatctttatcctagttggctggttgttgggaggcattcatcagggttatatttggttgtcaaaaagtactgtacttaattcacatctttcacatttttcactagcaatagcagccccaaattgctttcctgactaggaacatattctttacagcttctccatcagactgatgatcccatattcagtgtgctgcaagtgatttgacatatgtggcttatccttcagtgagatgaagaaaacctgaaatgctatcaccatttaaaacattggcttctggaagttcaggtgattagcaggagacgttctgacattgccattgacatgtacggtagtgatggcaggagacgttcttaaacagcagctgctccttcagcttgtaatgtctgattgtattgaccaagagcatccaccttgccttatggtactaactgaatgagctggtgacgctgactcatctgcataatggcagatgcttaaccatctttaggagctcatgtcatgattccagctgcaccgtgtgcaaatgtgaaggccctgcaagggctttccaggccgcaccaatcctgcttgcttcttgaagatacatatggtgccacctaaataaaagctgtttctggttatgtctgtccttgacatgtcaacagattagtgttgggttgcagtcatgtggtgtttaagtcttggagaaggcgagaagtcattgctgccagcattgtgatcgtcaggcacagaagtactcaaaagtgagagctacttgttgcgagcaaacggagggcgatataggttgatagccaatttcagttctctatatacaagcagcggattttgtttagagttagcttttgagatgcatcatttctttcacatctgattctgtgtgttgtaactcggagtcgcgtagaagttagaatgctaactgaccttaattttcaccgaataatttgctagcgtttttcagtatgaaatccttgtcttaaattttggaatgtacctgtcatgggtatattttgtctttagatacttgtcatgtttttaatcatttattacatatttatagttttgactatcttttttcatctctatcaaatcatattcccttgctttcggaatttgttcc

SEQ ID NO: 198830 - DNA, 4117 bp, Zea Mays
caacgtcatcgttcgcatcacacggccgtgaggagcaactctgttcctcatctcccgttcaccccgcgggcgcagggcgcgctctctcctcgtggcgatcgccgaccgtagcggccgctgcccgggttttcgtcggccgcttcgccatgtcttcgctggacccttcgccagcgacgagcacccaacagcagaagcaattggagagtttggtaaatctactgacgcagggaagcaggttctaccgcaaagcatataatgaactgttctcaggtgtaactactgagcaggatccggattcatcgactaatattcctgagtatatgctttttgggtggcatctcttcttaatgctccatttgagatcaccagaattgttcaaggacctggtgtcctgcatccatggattagttgctgtgttggccatacttttgattcacgtgccagctaaatttaggagcttcacgattgaaggctcttctcacttaatcaaacaaactgagaaaggcgtggatcttattgcttcattatgtcataactatcatacctctgaagaacgtttgaaagaaatgttgcacaagtctcacaatgcaatagaagacattttccatatgaaagcactaagtgcttcagagtgcaaaccagaaaatttggataagatagacacagatgacctgatgtatttcaaaggtctgattgatatggaatgtttccagtcaaatttggaaaaaatggagaaactatgtaattctaatagctgtaaaggggagcttgattttaaatcaattttgatcaataatgattatattccctatgatgagaactcgacgggggattccaccaatttaggacattcaaagtgtgcctttgaaacattggcatctcccacaaagacaataaagaacatgctgactgttcctagttctcctttgtcaccagccaccggtggttcagtcaagattgtgcaaatgacaccagtaacttctgccatgacgacagctaagtggcttcgtgaggtgatatcttcattgccagataagccttcatctaagcttcagcagtttctgtcatcatgcgatagggatttgacaaatgctgtcacagaaagggtcagcatagttttggaagcaatttttccaaccaaatcttctgccaatcggggtgtatcgttaggtctcaattgtgcaaatgcctttgacattccgtgggcagaagccagaaaagtggaggcttccaagttgtactatagggtattagaggcaatctgcagagcggagttacaaaacagcaatgtaaataatctaactccattgctgtcaaatgagcgtttccaccgatgtttgattgcatgttcagcggacttagtattggcgacacataagacagtcatcatgatgtttcctgctgttcttgagagtaccggtctaactgcatttgatttgagcaaaataattgagaactttgtgagacatgaagagaccctcccaagagaattgaaaaggcacctaaattccttagaagaacagcttttggaaagcatggcatgggagaaaggttcatcattgtataactcactgattgttgccaggccatctgttgcttcagaaataaaccgccttggtcttttggctgaaccaatgccatctcttgatgacttagtgtcaaggcagaatgttcgtatcgagggcttgcctgctacaccatctaaaaaacgtgctgctggtccagatgacaacgctgatcctcgatcaccaaagagatcgtgcaatgaatctaggaacacagtagtagagcgcaatttgcagacacctccacccaagcaaagccacatggtgtcaactagtttgaaagcaaaatgccatccactccagtccacatttgcaagtccaactgtctgtaatcctgttggtgggaatgaaaaatgtgctgacgtgacaattcatatattcttttccaagattctgaagttggctgctattagaataagaaacttgtgcgaaagggttcaatgtgtggaacagacagagcgtgtctataatgtcttcaagcagattcttgagcaacagacaacattattttttaatagacacatcgatcaacttatcctttgctgtctttatggtgttgcaaaggtttgtcaattagaactcacattcagggagatactcaacaattacaaaagagaagcacaatgcaagccagaagttttttcaagtatctatattgggagtacgaaccgtaatggggtattagtatcgcgccatgttggtatcattactttttacaatgaggtatttgttccagcagcgaagcctttcctggtgtcactaatatcatctggtactcatccagaagacaagaagaatgctagtggccaaattcctggatcacccaagccatctcctttcccaaatttaccagatatgtccccgaagaaagtttcagcatctcataatgtatatgtgtctcctttgcggcaaaccaagttggatctactgctgtcaccaagttccaggagtttttatgcatgcattggtgaaggcacccatgcttatcagagcccatctaaggatttggctgctataaatagccgcctaaattataatggcaggaaagtaaacagtcgattaaatttcgacatggtgagtgactcagtggtagccggcagtctgggccagataaatggtggttctacctcggatcctgcagctgcatttagccccctttcaaagaagagagagacagatacttgatcaattataaatggtggcctctctcgtatatagctcacagatccgtgctccgtagcagtctattcttctgaataagtggattaactggagcgatttaactgtacatgtatgtgttagtgagaagcagcagtttttaggcagcaaactgtttcaagttagcttttgagctatcaccatttctctgctgattgaacatatccgctgtgtagagtgctaatgaatctttagttttcattgggctgacataacaaatctttatcctagttggctggttgttgggaggcattcatcagggttatatttggttgtcaaaaagtactgtacttaattcacatctttcacatttttcactagcaatagcagccccaaattgctttcctgactaggaacatattctttacagcttctccatcagactgatgatcccatattcagtgtgctgcaagtgatttgacatatgtggcttatccttcagtgagatgaagaaaacctgaaatgctatcaccatttaaaacattggcttctggaagttcaggtgattagcaggagacgttctgacattgccattgacatgtacggtagtgatggcaggagacgttcttaaacagcagctgctccttcagcttgtaatgtctgattgtattgaccaagagcatccaccttgccttatggtactaactgaatgagctggtgacgctgactcatctgcataatggcagatgcttaaccatctttaggagctcatgtcatgattccagctgcaccgtgtgcaaatgtgaaggccctgcaagggctttccaggccgcaccaatcctgcttgcttcttgaagatacatatggtgccacctaaataaaagctgtttctggttatgtctgtccttgacatgtcaacagattagtgttgggttgcagtcatgtggtgtttaagtcttggagaaggcgagaagtcattgctgccagcattgtgatcgtcaggcacagaagtactcaaaagtgagagctacttgttgcgagcaaacggagggcgatataggttgatagccaatttcagttctctatatacaagcagcggattttgtttagagttagcttttgagatgcatcatttctttcacatctgattctgtgtgttgtaactcggagtcgcgtagaagttagaatgctaactgaccttaattttcaccgaataatttgctagcgtttttcagtatgaaatccttgtcttaaattttggaatgtacctgtcatgggtatattttgtctttagatacttgtcatgtttttaatcatttattacatatttatagttttgactatcttttttcatctctatcaaatcatattcccttgctttcggaatttgttcc

SEQ ID NO: 198831 - DNA, 4350 bp, Zea Mays
ccgtctccgtgcgccgtagatgtagcctgttccaacgtcatcgttcgcatcacacggccgtgaggagcaactctgttcctcatctcccgttcaccccgcgggcgcagggcgcgctctctcctcgtggcgatcgccgaccgtagcggccgctgcccgggttttcgtcggccgcttcgccatgtcttcgctggacccttcgccagcgacgagcacccaacagaagcaattggagagtttggtaaatctactgacgcagggaagcaggttctaccgcaaagcatataatgaactgttctcaggtgtaactactgagcaggatccggattcatcgactaatattcctgagtatatgctttttgggtggcatctcttcttaatgctccatttgagatcaccagaattgttcaaggacctggtgtcctgcatccatggattagttgctgtgttggccatacttttgattcacgtgccagctaaatttaggagcttcacgattgaaggctcttctcacttaatcaaacaaactgagaaaggcgtggatcttattgcttcattatgtcataactatcatacctctgaagaacgtttgaaagaaatgttgcacaagtctcacaatgcaatagaagacattttccatatgaaagcactaagtgcttcagagtgcaaaccagaaaatttggataagatagacacagatgacctgatgtatttcaaaggtctgattgatatggaatgtttccagtcaaatttggaaaaaatggagaaactatgtaattctaatagctgtaaaggggagcttgattttaaatcaattttgatcaataatgattatattccctatgatgagaactcgacgggggattccaccaatttaggacattcaaagtgtgcctttgaaacattggcatctcccacaaagacaataaagaacatgctgactgttcctagttctcctttgtcaccagccaccggtggttcagtcaagattgtgcaaatgacaccagtaacttctgccatgacgacagctaagtggcttcgtgaggtgatatcttcattgccagataagccttcatctaagcttcagcagtttctgtcatcatgcgatagggatttgacaaatgctgtcacagaaagggtcagcatagttttggaagcaatttttccaaccaaatcttctgccaatcggggtgtatcgttaggtctcaattgtgcaaatgcctttgacattccgtgggcagaagccagaaaagtggaggcttccaagttgtactatagggtattagaggcaatctgcagagcggagttacaaaacagcaatgtaaataatctaactccattgctgtcaaatgagcgtttccaccgatgtttgattgcatgttcagcggacttagtattggcgacacataagacagtcatcatgatgtttcctgctgttcttgagagtaccggtctaactgcatttgatttgagcaaaataattgagaactttgtgagacatgaagagaccctcccaagagaattgaaaaggcacctaaattccttagaagaacagcttttggaaagcatggcatgggagaaaggttcatcattgtataactcactgattgttgccaggccatctgttgcttcagaaataaaccgccttggtcttttggctgaaccaatgccatctcttgatgacttagtgtcaaggcagaatgttcgtatcgagggcttgcctgctacaccatctaaaaaacgtgctgctggtccagatgacaacgctgatcctcgatcaccaaagagatcgtgcaatgaatctaggaacacagtagtagagcgcaatttgcagacacctccacccaagcaaagccacatggtgtcaactagtttgaaagcaaaatgccatccactccagtccacatttgcaagtccaactgtctgtaatcctgttggtgggaatgaaaaatgtgctgacgtgacaattcatatattcttttccaagattctgaagttggctgctattagaataagaaacttgtgcgaaagggttcaatgtgtggaacagacagagcgtgtctataatgtcttcaagcagattcttgagcaacagacaacattattttttaatagacacatcgatcaacttatcctttgctgtctttatggtgttgcaaaggtttgtcaattagaactcacattcagggagatactcaacaattacaaaagagaagcacaatgcaagccagaagttttttcaagtatctatattgggagtacgaaccgtaatggggtattagtatcgcgccatgttggtatcattactttttacaatgaggtatttgttccagcagcgaagcctttcctggtgtcactaatatcatctggtactcatccagaagacaagaagaatgctagtggccaaattcctggatcacccaagccatctcctttcccaaatttaccagatatgtccccgaagaaagtttcagcatctcataatgtatatgtgtctcctttgcggcaaaccaagttggatctactgctgtcaccaagttccaggagtttttatgcatgcattggtgaaggcacccatgcttatcagagcccatctaaggatttggctgctataaatagccgcctaaattataatggcaggaaagtaaacagtcgattaaatttcgacatggtgagtgactcagtggtagccggcagtctgggccagataaatggtggttctacctcggatcctgcagctgcatttagccccctttcaaagaagagagagacagatacttgatcaattataaatggtggcctctctcgtatatagctcacagatccgtgctccgtagcagtctattcttctgaataagtggattaactggagcgatttaactgtacatgtatgtgttagtgagaagcagcagtttttaggcagcaaactgtttcaagttagcttttgagctatcaccatttctctgctgattgaacatatccgctgtgtagagtgctaatgaatctttagttttcattgggctgacataacaaatctttatcctagttggctggttgttgggaggcattcatcagggttatatttggttgtcaaaaagtactgtacttaattcacatctttcacatttttcactagcaatagcagccccaaattgctttcctgactaggaacatattctttacagcttctccatcagactgatgatcccatattcagtgtgctgcaagtgatttgacatatgtggcttatccttcaggacgattggttttctgcatcaatcaatcttttttaggacaagatatttttgtatgctacacttcccaaattgcaattaatccagaagtctaccttgttttattctattagttctcagcaacagtgaatgaatatgaatcagtcatgctgatagatgttcatctggttattccaaacaatctgacatcgcatctctttctgcaagtgagatgaagaaaacctgaaatgctatcaccatttaaaacattggcttctggaagttcaggtgattagcaggagacgttctgacattgccattgacatgtacggtagtgatggcaggagacgttcttaaacagcagctgctccttcagcttgtaatgtctgattgtattgaccaagagcatccaccttgccttatggtactaactgaatgagctggtgacgctgactcatctgcataatggcagatgcttaaccatctttaggagctcatgtcatgattccagctgcaccgtgtgcaaatgtgaaggccctgcaagggctttccaggccgcaccaatcctgcttgcttcttgaagatacatatggtgccacctaaataaaagctgtttctggttatgtctgtccttgacatgtcaacagattagtgttgggttgcagtcatgtggtgtttaagtcttggagaaggcgagaagtcattgctgccagcattgtgatcgtcaggcacagaagtactcaaaagtgagagctacttgttgcgagcaaacggagggcgatataggttgatagccaatttcagttctctatatacaagcagcggattttgtttagagttagcttttgagatgcatcatttctttcacatctgattctgtgtgttgtaactcggagtcgcgtagaagttagaatgctaactgaccttaattttcaccgaataatttgctagcgtttttcagtatgaaatccttgtcttaaattttggaatgtacctgtcatgggtatattttgtctttagatacttgtcatgtttttaatcatttattacatatttatagttttgactatcttttttcatctctatcaaatcatattcccttgctttcggaatttgttcc

SEQ ID NO: 198832 - DNA, 4364 bp, Zea Mays
gttggctccgtctccgtgcgccgtagatgtagcctgttccaacgtcatcgttcgcatcacacggccgtgaggagcaactctgttcctcatctcccgttcaccccgcgggcgcagggcgcgctctctcctcgtggcgatcgccgaccgtagcggccgctgcccgggttttcgtcggccgcttcgccatgtcttcgctggacccttcgccagcgacgagcacccaacagcagaagcaattggagagtttggtaaatctactgacgcagggaagcaggttctaccgcaaagcatataatgaactgttctcaggtgtaactactgagcaggatccggattcatcgactaatattcctgagtatatgctttttgggtggcatctcttcttaatgctccatttgagatcaccagaattgttcaaggacctggtgtcctgcatccatggattagttgctgtgttggccatacttttgattcacgtgccagctaaatttaggagcttcacgattgaaggctcttctcacttaatcaaacaaactgagaaaggcgtggatcttattgcttcattatgtcataactatcatacctctgaagaacgtttgaaagaaatgttgcacaagtctcacaatgcaatagaagacattttccatatgaaagcactaagtgcttcagagtgcaaaccagaaaatttggataagatagacacagatgacctgatgtatttcaaaggtctgattgatatggaatgtttccagtcaaatttggaaaaaatggagaaactatgtaattctaatagctgtaaaggggagcttgattttaaatcaattttgatcaataatgattatattccctatgatgagaactcgacgggggattccaccaatttaggacattcaaagtgtgcctttgaaacattggcatctcccacaaagacaataaagaacatgctgactgttcctagttctcctttgtcaccagccaccggtggttcagtcaagattgtgcaaatgacaccagtaacttctgccatgacgacagctaagtggcttcgtgaggtgatatcttcattgccagataagccttcatctaagcttcagcagtttctgtcatcatgcgatagggatttgacaaatgctgtcacagaaagggtcagcatagttttggaagcaatttttccaaccaaatcttctgccaatcggggtgtatcgttaggtctcaattgtgcaaatgcctttgacattccgtgggcagaagccagaaaagtggaggcttccaagttgtactatagggtattagaggcaatctgcagagcggagttacaaaacagcaatgtaaataatctaactccattgctgtcaaatgagcgtttccaccgatgtttgattgcatgttcagcggacttagtattggcgacacataagacagtcatcatgatgtttcctgctgttcttgagagtaccggtctaactgcatttgatttgagcaaaataattgagaactttgtgagacatgaagagaccctcccaagagaattgaaaaggcacctaaattccttagaagaacagcttttggaaagcatggcatgggagaaaggttcatcattgtataactcactgattgttgccaggccatctgttgcttcagaaataaaccgccttggtcttttggctgaaccaatgccatctcttgatgacttagtgtcaaggcagaatgttcgtatcgagggcttgcctgctacaccatctaaaaaacgtgctgctggtccagatgacaacgctgatcctcgatcaccaaagagatcgtgcaatgaatctaggaacacagtagtagagcgcaatttgcagacacctccacccaagcaaagccacatggtgtcaactagtttgaaagcaaaatgccatccactccagtccacatttgcaagtccaactgtctgtaatcctgttggtgggaatgaaaaatgtgctgacgtgacaattcatatattcttttccaagattctgaagttggctgctattagaataagaaacttgtgcgaaagggttcaatgtgtggaacagacagagcgtgtctataatgtcttcaagcagattcttgagcaacagacaacattattttttaatagacacatcgatcaacttatcctttgctgtctttatggtgttgcaaaggtttgtcaattagaactcacattcagggagatactcaacaattacaaaagagaagcacaatgcaagccagaagttttttcaagtatctatattgggagtacgaaccgtaatggggtattagtatcgcgccatgttggtatcattactttttacaatgaggtatttgttccagcagcgaagcctttcctggtgtcactaatatcatctggtactcatccagaagacaagaagaatgctagtggccaaattcctggatcacccaagccatctcctttcccaaatttaccagatatgtccccgaagaaagtttcagcatctcataatgtatatgtgtctcctttgcggcaaaccaagttggatctactgctgtcaccaagttccaggagtttttatgcatgcattggtgaaggcacccatgcttatcagagcccatctaaggatttggctgctataaatagccgcctaaattataatggcaggaaagtaaacagtcgattaaatttcgacatggtgagtgactcagtggtagccggcagtctgggccagataaatggtggttctacctcggatcctgcagctgcatttagccccctttcaaagaagagagagacagatacttgatcaattataaatggtggcctctctcgtatatagctcacagatccgtgctccgtagcagtctattcttctgaataagtggattaactggagcgatttaactgtacatgtatgtgttagtgagaagcagcagtttttaggcagcaaactgtttcaagttagcttttgagctatcaccatttctctgctgattgaacatatccgctgtgtagagtgctaatgaatctttagttttcattgggctgacataacaaatctttatcctagttggctggttgttgggaggcattcatcagggttatatttggttgtcaaaaagtactgtacttaattcacatctttcacatttttcactagcaatagcagccccaaattgctttcctgactaggaacatattctttacagcttctccatcagactgatgatcccatattcagtgtgctgcaagtgatttgacatatgtggcttatccttcagccaggacgattggttttctgcatcaatcaatcttttttaggacaagatatttttgtatgctacacttcccaaattgcaattaatccagaagtctaccttgttttattctattagttctcagcaacagtgaatgaatatgaatcagtcatgctgatagatgttcatctggttattccaaacaatctgacatcgcatctctttctgcaagtgagatgaagaaaacctgaaatgctatcaccatttaaaacattggcttctggaagttcaggtgattagcaggagacgttctgacattgccattgacatgtacggtagtgatggcaggagacgttcttaaacagcagctgctccttcagcttgtaatgtctgattgtattgaccaagagcatccaccttgccttatggtactaactgaatgagctggtgacgctgactcatctgcataatggcagatgcttaaccatctttaggagctcatgtcatgattccagctgcaccgtgtgcaaatgtgaaggccctgcaagggctttccaggccgcaccaatcctgcttgcttcttgaagatacatatggtgccacctaaataaaagctgtttctggttatgtctgtccttgacatgtcaacagattagtgttgggttgcagtcatgtggtgtttaagtcttggagaaggcgagaagtcattgctgccagcattgtgatcgtcaggcacagaagtactcaaaagtgagagctacttgttgcgagcaaacggagggcgatataggttgatagccaatttcagttctctatatacaagcagcggattttgtttagagttagcttttgagatgcatcatttctttcacatctgattctgtgtgttgtaactcggagtcgcgtagaagttagaatgctaactgaccttaattttcaccgaataatttgctagcgtttttcagtatgaaatccttgtcttaaattttggaatgtacctgtcatgggtatattttgtctttagatacttgtcatgtttttaatcatttattacatatttatagttttgactatcttttttcatctctatcaaatcatattcccttgctttcggaatttgttcc

SEQ ID NO: 198833 - DNA, 2507 bp, Zea Mays
aaataattgaaaaattctaaaaatggtaaaatgtgaacgaaggacccggcgagaaaagagcctgctacctgtctctcaaaaccatcgaccacgacagcgccattttcctccgtctctctcctccgatcctctcttgccctagggagagggagagggagaggaagagagagatatccgcgccgtccgcccagggagagaagcaaagatcggcaaccactgaaccgcgctacgcgtggtcgtcgtccggagccacgcgtggcgccgcggcgatgggcaactgctgcgtgacccggccgttttctggcaagcggcgaggcggctcccgcggtggcgctggcgggaaccgttgcgggcgcctcggcggcgccaacgtgcggtcctgctccacgctgtcctccatctccgacgcggcgcgcaccgccgcgacgcaggcgtggtcgccgctgaccgtgctggggaagggcctggccgcggaggccagcgccgaggagctgctccggcgttaccagctcggcgaggagctggggcgcggcgagttcggcgtgacgcggcggtgcacggacacgtccacgggcgaggtgctcgcgtgcaagtccatcagcaagcggaagctgcgcagcagcgtcgacatcgaggacgtccggcgtgaggtggccatcatgaggtcgctgcccgagcaccccaacgtcgtacgcttgcgagaggcgttcgaggacgccgacaccgtgcacctcgtcatggaggtctgcgagggcggcgagctttttgaccgcattgtctcccgcgggcactacaccgagcgtgcagcagcctgcgtcatgcgcaccatcatggaagtcgtcctgcattgccacaagcatggcgtcattcaccgggacctcaagcctgagaactttctgtatgccaacacatctgagaactcggctctcaaggtcatcgactttggtctctctgtgtgcttcaaaccaggtgacaggttcagtgagatcgttggatccccctactatatggctcctgaagtgctgaagaggaactatggacaagaaatagatatatggagtgcaggagtcatactctacatcttgctatgtggcgtcccaccgttctgggcagagactgatgagggcatagcacaggctatcatccggtccaacatcgacttccgcagagagccttggtcaaaggtgtcggaaaatgcaaaagatcttgtgaggaagatgcttgatccaagcccctactgtcggttgactgcccagcaggttctaggttagttatcctgccttacaatttttccgctcccaaagttgtttggtggaatgaacctgaccatcatttatcgccttcaacaatgaagaacatccctggatacagaatgccagtgcagctcccaacatcccacttggagaagcagtgaggtccaggctgaagcaattcactgttatgaacaagttcaagaagaaggccctgcttgtggtggcagagtacctaccagccgaagagctggaagcaatcagggagttgtttcagttgctggacacgaacaaggatgggcatcttacaatcgaagaactcaggaagggaatgcgattgataggccacaatgtccatgacactgacgtcgatatgctcatggaagctgccgacatcgacgggaacgggaccctggactgcaaggagttcgtgacagtctccattcacctgaagaaaatccgtagcgaggatcacctgcccaaggtgttcagctacttcgacaagaacgggagcgggtacatcgagatcgaagagctgaaggaggccctctctccaagaggtgaccagaaggcgatcgaggacataatcctagacgtcgatatagacagggacgggaagataagctacgaggagtttgagctgatgatgaaagctggagtggactggaggaatacgtcgcggcagtactcgagagcggtgtacaacaccctcagccgcaagatgttcaaggacgcgtcactgaagcttggtagtaacaatggtccacttgctgctgcagccgtcaaagaacaacaagatgttgattgagtgatgtgtctactgcctgcaaactcgactaaaacagagaacacgagaactgtacccagttttccatgttttgtgtataggtcgccacattttggcaaggaaatgtatcaggggcggtcaattgactcaggttcaggtgcattgtgcatatgtcaagacactcccaattacaccctttatttttctcataaaaaaaacaatgttgttatctaccaacatcagcaagctgtgttgtaaaacatatctttaatcgttattatctttctctttcgatctatcaagattcatgtggtagatttaagtgtaaaaatatatagacataagataaggaaaaaaatattttttactctcagtattgatggttacgataagagctctctctctctatgactgtataaagatgtgctaaaatatgagaattttgtaagattgctagtacaaacggactc

SEQ ID NO: 198834 - DNA, 2350 bp, Zea Mays
cggcgagaaaagagcctgctacctgtctctcaaaaccatcgaccacgacagcgccattttcctccgtctctctcctccgatcctctcttgccctagggagagggagagggagaggaagagagagatatccgcgccgtccgcccagggagagaagcaaagatcggcaaccactgaaccgcgctacgcgtggtcgtcgtccggagccacgcgtggcgccgcggcgatgggcaactgctgcgtgacccggccgttttctggcaagcggcgaggcggctcccgcggtggcgctggcgggaaccgttgcgggcgcctcggcggcgccaacgtgcggtcctgctccacgctgtcctccatctccgacgcggcgcgcaccgccgcgacgcaggcgtggtcgccgctgaccgtgctggggaagggcctggccgcggaggccagcgccgaggagctgctccggcgttaccagctcggcgaggagctggggcgcggcgagttcggcgtgacgcggcggtgcacggacacgtccacgggcgaggtgctcgcgtgcaagtccatcagcaagcggaagctgcgcagcagcgtcgacatcgaggacgtccggcgtgaggtggccatcatgaggtcgctgcccgagcaccccaacgtcgtacgcttgcgagaggcgttcgaggacgccgacaccgtgcacctcgtcatggaggtctgcgagggcggcgagctttttgaccgcattgtctcccgcgggcactacaccgagcgtgcagcagcctgcgtcatgcgcaccatcatggaagtcgtcctgcattgccacaagcatggcgtcattcaccgggacctcaagcctgagaactttctgtatgccaacacatctgagaactcggctctcaaggtcatcgactttggtctctctgtgtgcttcaaaccaggtgacaggttcagtgagatcgttggatccccctactatatggctcctgaagtgctgaagaggaactatggacaagaaatagatatatggagtgcaggagtcatactctacatcttgctatgtggcgtcccaccgttctgggcaggctatcatccggtccaacatcgacttccgcagagagccttggtcaaaggtgtcggaaaatgcaaaagatcttgtgaggaagatgcttgatccaagcccctactgtcggttgactgcccagcaggttctagaacatccctggatacagaatgccagtgcagctcccaacatcccacttggagaagcagtgaggtccaggctgaagcaattcactgttatgaacaagttcaagaagaaggccctgcttgtggtggcagagtacctaccagccgaagagctggaagcaatcagggagttgtttcagttgctggacacgaacaaggatgggcatcttacaatcgaagaactcaggaagggaatgcgattgataggccacaatgtccatgacactgacgtcgatatgctcatggaagctgccgacatcgacgggaacgggaccctggactgcaaggagttcgtgacagtctccattcacctgaagaaaatccgtagcgaggatcacctgcccaaggtgttcagctacttcgacaagaacgggagcgggtacatcgagatcgaagagctgaaggaggccctctctccaagaggtgaccagaaggcgatcgaggacataatcctagacgtcgatatagacagggacgggaagataagctacgaggagtttgagctgatgatgaaagctggagtggactggaggaatacgtcgcggcagtactcgagagcggtgtacaacaccctcagccgcaagatgttcaaggacgcgtcactgaagcttggtagtaacaatggtccacttgctgctgcagccgtcaaagaacaacaagatgttgattgagtgatgtgtctactgcctgcaaactcgactaaaacagagaacacgagaactgtacccagttttccatgttttgtgtataggtcgccacattttggcaaggaaatgtatcaggggcggtcaattgactcaggttcaggtgcattgtgcatatgtcaagacactcccaattacaccctttatttttctcataaaaaaaacaatgttgttatctaccaacatcagcaagctgtgttgtaaaacatatctttaatcgttattatctttctctttcgatctatcaagattcatgtggtagatttaagtgtaaaaatatatagacataagataaggaaaaaaatattttttactctcagtattgatggttacgataagagctctctctctctatgactgtataaagatgtgctaaaatatgagaattttgtaagattgctagtacaaacggactc

SEQ ID NO: 198835 - DNA, 1254 bp, Zea Mays
actgatgagggcatagcacaggctatcatccggtccaacatcgacttccgcagagagccttggtcaaaggtgtcggaaaatgcaaaagatcttgtgaggaagatgcttgatccaagcccctactgtcggttgactgcccagcaggttctagaacatccctggatacagaatgccagtgcagctcccaacatcccacttggagaagcagtgaggtccaggctgaagcaattcactgttatgaacaagttcaagaagaaggccctgcttgtggtggcagagtacctaccagccgaagagctggaagcaatcagggagttgtttcagttgctggacacgaacaaggatgggcatcttacaatcgaagaactcaggaagggaatgcgattgataggccacaatgtccatgacactgacgtcgatatgctcatggaagctgccgacatcgacgggaacgggaccctggactgcaaggagttcgtgacagtctccattcacctgaagaaaatccgtagcgaggatcacctgcccaaggtgttcagctacttcgacaagaacgggagcgggtacatcgagatcgaagagctgaaggaggccctctctccaagaggacgggaagataagctacgaggagtttgagctgatgatgaaagctggagtggactggaggaatacgtcgcggcagtactcgagagcggtgtacaacaccctcagccgcaagatgttcaaggacgcgtcactgaagcttggtagtaacaatggtccacttgctgctgcagccgtcaaagaacaacaagatgttgattgagtgatgtgtctactgcctgcaaactcgactaaaacagagaacacgagaactgtacccagttttccatgttttgtgtataggtcgccacattttggcaaggaaatgtatcaggggcggtcaattgactcaggttcaggtgcattgtgcatatgtcaagacactcccaattacaccctttatttttctcataaaaaaaacaatgttgttatctaccaacatcagcaagctgtgttgtaaaacatatctttaatcgttattatctttctctttcgatctatcaagattcatgtggtagatttaagtgtaaaaatatatagacataagataaggaaaaaaatattttttactctcagtattgatggttacgataagagctctctctctctatgactgtataaagatgtgctaaaatatgagaattttgtaagattgctagtacaaacggactc

SEQ ID NO: 198836 - DNA, 1291 bp, Zea Mays
caccctttgtcctcccttcctgctgtgtgaaaccgatcacccaaagccccaaaccctaacttactatttgtattcgaatattcgaatctgatataattgcaagttatatatactctgagcctggctgccgaaacttccttttggtgtccctgttacattcggtttcgtttttgatgacttcatcaagaagcaagagcaggagccacagtcgcagcaggagcaggagccgcagtcctcagcgaagagataggttgcgcagcgaacgtgcaccccgccacagtcgcagtcgcagcaggagccgcagcccataccgtcgcagagaacggcgtggatacaaggatctcgtatgcaagaactgccggagacctgggcactttgctaaggagtgcccatctgcgcctacgtgcaataactgtaaccttccaggccacttcgcagcagaatgcacctcaaaaactgtttgctggaactgcaaagagcctgggcacattgcgagtgagtgcaagaacgaggccctgtgccacacctgcaacaaaacaggtcacttggcgcgtgattgccctacttcaggggctaacgtcaagctatgcaacaaatgttttaaatcaggccacatcgccgttgactgcaccaacgaacgggcatgcaacaactgccgtcagccagggcacatagctcgagagtgcaagaacgatcctgtttgcaacctgtgcaatgtctctggccatgtcgcgcgcgtctgtccaaagacgactctggcttcagagatacacatacagggtggcccgttccgtgatatcctgtgccgcatctgtggtcagccagggcacatcagccgcaactgcatggccaccgtcatctgtgacacatgtggcgggagggggcacatgtcttacgagtgcccgtcggcaaggatttttgatcgcgggttccgcaggttctgagagcctttcaccgctttgtttctgatggtttgagtttcgccaggatgtttaatttgtttgtgacaatattggaacaattttccctatggttgttgaggaatgattctgtgaggatgtgttgcgggtgaaactcttttttttttacttttaggttttgtttgattactctagtatttatctcattacacatggattgaggtgtattggggtagcttacatgtgtattgaagtaaatactagagcatccaaacaaggtcttaatcaggatatatggccctttgtggactctaacagtgctgtcacggctcatgtgaaaattgccaggtcatgtttaactcttgtgctca

SEQ ID NO: 198837 - DNA, 959 bp, Zea Mays
aggggagatcgtgttagcttgaaaacaccttcatgaaaataggtgtaatatttgtgggcttaccaaattaccttatcatctaactgggttctaattattctactgccactgtgtacaagggatctcgtatgcaagaactgccggagacctgggcactttgctaaggagtgcccatctgcgcctacgtgcaataactgtaaccttccaggccacttcgcagcagaatgcacctcaaaaactgtttgctggaactgcaaagagcctgggcacattgcgagccacatcgccgttgactgcaccaacgaacgggcatgcaacaactgccgtcagccagggcacatagctcgagagtgcaagaacgatcctgtttgcaacctgtgcaatgtctctggccatgtcgcgcgcgtctgtccaaagacgactctggcttcagagatacacatacagggtggcccgttccgtgatatcctgtgccgcatctgtggtcagccagggcacatcagccgcaactgcatggccaccgtcatctgtgacacatgtggcgggagggggcacatgtcttacgagtgcccgtcggcaaggatttttgatcgcgggttccgcaggttctgagagcctttcaccgctttgtttctgatggtttgagtttcgccaggatgtttaatttgtttgtgacaatattggaacaattttccctatggttgttgaggaatgattctgtgaggatgtgttgcgggtgaaactcttttttttttacttttaggttttgtttgattactctagtatttatctcattacacatggattgaggtgtattggggtagcttacatgtgtattgaagtaaatactagagcatccaaacaaggtcttaatcaggatatatggccctttgtggactctaacagtgctgtcacggctcatgtgaaaattgccaggtcatgtttaactcttgtgctca

SEQ ID NO: 198838 - DNA, 1119 bp, Zea Mays
caggcatgtagccccggtgctgatgtggcatgtctgcctccacccctccgccaccaccacagccgttgcctttgccgcgagcgaccgtagcgaggttggaagctgtgctgtctattggtgctcatctaatcccacacccaagaaaggctgcaagtggcggagaagatgctttctttgccaatagcgatgctggcggagtatttgccattgcagatggtgtctcgggtcattctcttatctactgacagatgggcagaaaagaatgtcaatccagctctattctctcgagagctcatgagaaacagctctaatttcctcaatgatgaggcggtcagtcatgatcctcagattcttctcatgaaagctcatgctgcaacttcttctattggatctgcaacagtaatcatcgccatgcttgagaagaccgggactctaaaaattgcaagtgtgggagattgtgggttgaaagttattcgtaaagggcaagtaatgttctctatatcccctcaagaacattattttgactgcccataccagataagctcagaggcagagggtcaaacatataaggatgcattggtttgcagtgtaaatcttatggagggtgatataattgtgagtggttcagatggactttttgacaatatctttgaccaagagattgtttccataatttctgagtcgccaagtgtagatgaagctgcaaaagcattggcggagcttgcaagaaaacactcggtggatgtcagattcgattcaccctactcaatggaggcccggagtagggggttcgatgtcccctggtggaagaagctacttggaggcaaactaataggcggtaagatggatgacatcacagttgttgtcgcacaagtgaagacagtagtggtcccagaggacgaggttcagggtggcgacacagaagaacaaaaggggaatgagcagggcgctgcagctgtggttgcatacaaaatgaatgatgaagaagtagcttgagttctgggaccatcctcattttcattctcttcattttacttttctgtgatgactgtattatactgcacataaaggaattgaagcaaaataaatttgtgtgattgtgtctagctgtgcgtatat

SEQ ID NO: 198839 - DNA, 1027 bp, Zea Mays
agttgattgcttcagctaactaaggttggaagctgtgctgtctattggtgctcatctaatcccacacccaagaaaggctgcaagtggcggagaagatgctttctttgccaatagcgatgctggcggagtatttgccattgcagatggtgtctcgggatgggcagaaaagaatgtcaatccagctctattctctcgagagctcatgagaaacagctctaatttcctcaatgatgaggcggtcagtcatgatcctcagattcttctcatgaaagctcatgctgcaacttcttctattggatctgcaacagtaatcatcgccatgcttgagaagaccgggactctaaaaattgcaagtgtgggagattgtgggttgaaagttattcgtaaagggcaagtaatgttctctatatcccctcaagaacattattttgactgcccataccagataagctcagaggcagagggtcaaacatataaggatgcattggtttgcagtgtaaatcttatggagggtgatataattgtgagtggttcagatggactttttgacaatatctttgaccaagagattgtttccataatttctgagtcgccaagtgtagatgaagctgcaaaagcattggcggagcttgcaagaaaacactcggtggatgtcagattcgattcaccctactcaatggaggcccggagtagggggttcgatgtcccctggtggaagaagctacttggaggcaaactaataggcggtaagatggatgacatcacagttgttgtcgcacaagtgaagacagtagtggtcccagaggacgaggttcagggtggcgacacagaagaacaaaaggggaatgagcagggcgctgcagctgtggttgcatacaaaatgaatgatgaagaagtagcttgagttctgggaccatcctcattttcattctcttcattttacttttctgtgatgactgtattatactgcacataaaggaattgaagcaaaataaatttgtgtgattgtgtctagctgtgcgtatat

SEQ ID NO: 198840 - DNA, 1962 bp, Zea Mays
ctaggaacaccacacgttgcattgcattgttaacttgtcgctctaacaatgcaagtctacgcgggctcacttgccagtggctagaggcacctggtttgtttcttgccgaagcccgtggtacatgtgaacagcagggcctgtcttctgcttttgcttcttagcaatggcgaatgcaagcaaacacttgcaaccttcaagcaaatcaggcaatgacagaaagtaccagggcacactggttgcttctccagcaaaggacatttcaccgaagtgtgcgaatcgcattgttccatcgaaacaactgatcttgggtggggattcaataggccatctggcatcgattctgattaaggtcgttgctctcgaggcagtcagaagagtttctaaagcaagataccctttcatatggaattctgttcaagcattgcaaatccttgtgtatcctccatttagttggatccaaagatgggcaccactcaaatttcttgtgcagggaattcagaaactatccatgccactgttgtttttgtcagtcacaacaacagtaagtgagctgtcctccaagcgtgatgatgaaccagataacaatacagaacattctgaaacaaatgaattggcatcaacttctggcacaagtgatgctgctgatggcacaaaggaaatcgtacaagagaactggcttgtgttacttttcagggagcttgagaagcaaggcatcactttacccgagaggtttactgaagatgaattacgcagattttatgttgctgcaaatggtgacttttcaagtttactctcttcggttaagaagacaattcgttggagggaaacgtttcacatacttacactgcaagaacttgataaatggtctcacttagtcttttggcatggatttgacacgatgcttcggccttgtttagtaattcgtcttggacttgcatgctccagcataccaccttgtgatagaccccgttttgggcaagcagtagtttctcaaattgaccatggtgttgtaaatttgaccaacaaagaagattcaagaattaccgttttgctggattgccatgggatttctccattcagatttccaatgcaaatgatgaggtcatttgtcactgtagctcaagaaaactacccaaatcgtcttggagtattgtttgttgtccgccttcctccagttgtcagagttattgcacagacatttcttcaagttttgaaaccatctacaaagcagaagttacgttttgagggagattcatacaagaagacgttggcggagttcttgcaggccgtgccagcgtttctgggcggtaaatgcagctgcccacgatgtgagaagcctcgtaatagttcagtggtgcaggcaggggaagggagcaagaaccaggctcgcttggtcagcgttgatggcggatcacctgtcgtggacttcgacttcgatgaagaagagatcccatcaccttatagctgcgagaacgccatcagggctgcgataatctgcctgctgatggtgtgcatcttcatcgcgtttctggctgggatgaacgaccctgcatccgttccgcccagtgcctgagagctatggaatcgcctagtctcccatagtagagcttagattgtcagttgagtatatacacatctgtgttgctatttaggatgctactagggtgttgtattccctggcagcttctttctcggttgtcgtcagatcgccttctctcctaatgtgagcggagcagatgaataaatatcctgtgtgtggcaaatgttggttagcagttcaattagcccttcgatagtgtctttctttgcgtgcttgctgcagtagggcagtgtgatttctcgttagtgtacgtaaactcaaagttttcaaccacaaggcaacaacacactgactctagtggtttcagctctttaatctttatacatctcactggtcactaatgataatcctttgggtacggc

SEQ ID NO: 198841 - DNA, 1963 bp, Zea Mays
ccaaaagttgttgccgtgacctcttctggcgagtgaacattcttgagcgacctgtttttacgacctgaactagtagcgtggctagaggcacctggtttgtttcttgccgaagcccgtggtacatgtgaacagcagggcctgtcttctgcttttgcttcttagcaatggcgaatgcaagcaaacacttgcaaccttcaagcaaatcaggcaatgacagaaagtaccagggcacactggttgcttctccagcaaaggacatttcaccgaagtgtgcgaatcgcattgttccatcgaaacaactgatcttgggtggggattcaataggccatctggcatcgattctgattaaggtcgttgctctcgaggcagtcagaagagtttctaaagcaagataccctttcatatggaattctgttcaagcattgcaaatccttgtgtatcctccatttagttggatccaaagatgggcaccactcaaatttcttgtgcagggaattcagaaactatccatgccactgttgtttttgtcagtcacaacaacagtaagtgagctgtcctccaagcgtgatgatgaaccagataacaatacagaacattctgaaacaaatgaattggcatcaacttctggcacaagtgatgctgctgatggcacaaaggaaatcgtacaagagaactggcttgtgttacttttcagggagcttgagaagcaaggcatcactttacccgagaggtttactgaagatgaattacgcagattttatgttgctgcaaatggtgacttttcaagtttactctcttcggttaagaagacaattcgttggagggaaacgtttcacatacttacactgcaagaacttgataaatggtctcacttagtcttttggcatggatttgacacgatgcttcggccttgtttagtaattcgtcttggacttgcatgctccagcataccaccttgtgatagaccccgttttgggcaagcagtagtttctcaaattgaccatggtgttgtaaatttgaccaacaaagaagattcaagaattaccgttttgctggattgccatgggatttctccattcagatttccaatgcaaatgatgaggtcatttgtcactgtagctcaagaaaactacccaaatcgtcttggagtattgtttgttgtccgccttcctccagttgtcagagttattgcacagacatttcttcaagttttgaaaccatctacaaagcagaagttacgttttgagggagattcatacaagaagacgttggcggagttcttgcaggccgtgccagcgtttctgggcggtaaatgcagctgcccacgatgtgagaagcctcgtaatagttcagtggtgcaggcaggggaagggagcaagaaccaggctcgcttggtcagcgttgatggcggatcacctgtcgtggacttcgacttcgatgaagaagagatcccatcaccttatagctgcgagaacgccatcagggctgcgataatctgcctgctgatggtgtgcatcttcatcgcgtttctggctgggatgaacgaccctgcatccgttccgcccagtgcctgagagctatggaatcgcctagtctcccatagtagagcttagattgtcagttgagtatatacacatctgtgttgctatttaggatgctactagggtgttgtattccctggcagcttctttctcggttgtcgtcagatcgccttctctcctaatgtgagcggagcagatgaataaatatcctgtgtgtggcaaatgttggttagcagttcaattagcccttcgatagtgtctttctttgcgtgcttgctgcagtagggcagtgtgatttctcgttagtgtacgtaaactcaaagttttcaaccacaaggcaacaacacactgactctagtggtttcagctctttaatctttatacatctcactggtcactaatgataatcctttgggtacggc

SEQ ID NO: 198842 - DNA, 2366 bp, Zea Mays
cctgaactagtagcggtatgtttggcagagcggcaagttagagcgacgtattttgccaaattcctccttctaccccgagcgcaacaatttcctcccagccgcgacctgtctctgtctgttcttctgccccgatcggccgatcccacccacgcatctctctccgcgcccgcggtagtgttcgtgttcctcactcctcccgcttccttccccgacactgcctcagctcagatccgcggcggtttcccggtccctggatctaaagcggccggtgagcaggcctccttccgccgacgcggaccacctggagggaatttatcctggagccgtcttcctcctcgcctcctctcgcggcgcggcgcggaggccggaatcacttggaggtctagctgtgtgtggattgatttcttcgtttgtggtggctagaggcacctggtttgtttcttgccgaagcccgtggtacatgtgaacagcagggcctgtcttctgcttttgcttcttagcaatggcgaatgcaagcaaacacttgcaaccttcaagcaaatcaggcaatgacagaaagtaccagggcacactggttgcttctccagcaaaggacatttcaccgaagtgtgcgaatcgcattgttccatcgaaacaactgatcttgggtggggattcaataggccatctggcatcgattctgattaaggtcgttgctctcgaggcagtcagaagagtttctaaagcaagataccctttcatatggaattctgttcaagcattgcaaatccttgtgtatcctccatttagttggatccaaagatgggcaccactcaaatttcttgtgcagggaattcaggttattcaatttctcatctctccacaacgcatgctatttcgttccttgacataggggaaagacagaaactatccatgccactgttgtttttgtcagtcacaacaacagtaagtgagctgtcctccaagcgtgatgatgaaccagataacaatacagaacattctgaaacaaatgaattggcatcaacttctggcacaagtgatgctgctgatggcacaaaggaaatcgtacaagagaactggcttgtgttacttttcagggagcttgagaagcaaggcatcactttacccgagaggtttactgaagatgaattacgcagattttatgttgctgcaaatggtgacttttcaagtttactctcttcggttaagaagacaattcgttggagggaaacgtttcacatacttacactgcaagaacttgataaatggtctcacttagtcttttggcatggatttgacacgatgcttcggccttgtttagtaattcgtcttggacttgcatgctccagcataccaccttgtgatagaccccgttttgggcaagcagtagtttctcaaattgaccatggtgttgtaaatttgaccaacaaagaagattcaagaattaccgttttgctggattgccatgggatttctccattcagatttccaatgcaaatgatgaggtcatttgtcactgtagctcaagaaaactacccaaatcgtcttggagtattgtttgttgtccgccttcctccagttgtcagagttattgcacagacatttcttcaagttttgaaaccatctacaaagcagaagttacgttttgagggagattcatacaagaagacgttggcggagttcttgcaggccgtgccagcgtttctgggcggtaaatgcagctgcccacgatgtgagaagcctcgtaatagttcagtggtgcaggcaggggaagggagcaagaaccaggctcgcttggtcagcgttgatggcggatcacctgtcgtggacttcgacttcgatgaagaagagatcccatcaccttatagctgcgagaacgccatcagggctgcgataatctgcctgctgatggtgtgcatcttcatcgcgtttctggctgggatgaacgaccctgcatccgttccgcccagtgcctgagagctatggaatcgcctagtctcccatagtagagcttagattgtcagttgagtatatacacatctgtgttgctatttaggatgctactagggtgttgtattccctggcagcttctttctcggttgtcgtcagatcgccttctctcctaatgtgagcggagcagatgaataaatatcctgtgtgtggcaaatgttggttagcagttcaattagcccttcgatagtgtctttctttgcgtgcttgctgcagtagggcagtgtgatttctcgttagtgtacgtaaactcaaagttttcaaccacaaggcaacaacacactgactctagtggtttcagctctttaatctttatacatctcactggtcactaatgataatcctttgggtacggc

SEQ ID NO: 198843 - DNA, 1581 bp, Zea Mays
ctggcataaaacgaagagtttgttttggggcattggatatttagcacaatgggctccttgaagcactatctgggattctagacagattaagaaatcaaaaccattttcctaaaatgtgaaactatccatgccactgttgtttttgtcagtcacaacaacagtaagtgagctgtcctccaagcgtgatgatgaaccagataacaatacagaacattctgaaacaaatgaattggcatcaacttctggcacaagtgatgctgctgatggcacaaaggaaatcgtacaagagaactggcttgtgttacttttcagggagcttgagaagcaaggcatcactttacccgagaggtttactgaagatgaattacgcagattttatgttgctgcaaatggtgacttttcaagtttactctcttcggttaagaagacaattcgttggagggaaacgtttcacatacttacactgcaagaacttgataaatggtctcacttagtcttttggcatggatttgacacgatgcttcggccttgtttagtaattcgtcttggacttgcatgctccagcataccaccttgtgatagaccccgttttgggcaagcagtagtttctcaaattgaccatggtgttgtaaatttgaccaacaaagaagattcaagaattaccgttttgctggattgccatgggatttctccattcagatttccaatgcaaatgatgaggtcatttgtcactgtagctcaagaaaactacccaaatcgtcttggagtattgtttgttgtccgccttcctccagttgtcagagttattgcacagacatttcttcaagttttgaaaccatctacaaagcagaagttacgttttgagggagattcatacaagaagacgttggcggagttcttgcaggccgtgccagcgtttctgggcggtaaatgcagctgcccacgatgtgagaagcctcgtaatagttcagtggtgcaggcaggggaagggagcaagaaccaggctcgcttggtcagcgttgatggcggatcacctgtcgtggacttcgacttcgatgaagaagagatcccatcaccttatagctgcgagaacgccatcagggctgcgataatctgcctgctgatggtgtgcatcttcatcgcgtttctggctgggatgaacgaccctgcatccgttccgcccagtgcctgagagctatggaatcgcctagtctcccatagtagagcttagattgtcagttgagtatatacacatctgtgttgctatttaggatgctactagggtgttgtattccctggcagcttctttctcggttgtcgtcagatcgccttctctcctaatgtgagcggagcagatgaataaatatcctgtgtgtggcaaatgttggttagcagttcaattagcccttcgatagtgtctttctttgcgtgcttgctgcagtagggcagtgtgatttctcgttagtgtacgtaaactcaaagttttcaaccacaaggcaacaacacactgactctagtggtttcagctctttaatctttatacatctcactggtcactaatgataatcctttgggtacggc

SEQ ID NO: 198844 - DNA, 1670 bp, Zea Mays
gttttggggcattggatatttagcacaatgggctccttgaagcactatctgggattctagacagattaagaaatcaaaaccattttcctaaaatgtgaaactatccatgccactgttgtttttgtcagtcacaacaacagtaagtgagctgtcctccaagcgtgatgatgaaccagataacaatacagaacattctgaaacaaatgaattggcatcaacttctggcacaagtgatgctgctgatggcacaaaggaaatcgtacaagagaactggcttgtgttacttttcagggagcttgagaagcaaggcatcactttacccgagaggtttactgaagatgaattacgcagattttatgttgctgcaaatggtgacttttcaagtttactctcttcggttaagaagacaattcgttggagggaaacgtttcacatacttacactgcaagaacttgataaatggtctcacttagtcttttggcatggatttgacacgatgcttcggccttgtttagtaattcgtcttggacttgcatgctccagcataccaccttgtgatagaccccgttttgggcaagcagtaggtaactgtcaacactcaaatcaattccctgtaactcagttcacataaaatcggcgatagcaatatgactttgttgtgccccccttccctagtttgcttactgctgagaagtttctcaaattgaccatggtgttgtaaatttgaccaacaaagaagattcaagaattaccgttttgctggattgccatgggatttctccattcagatttccaatgcaaatgatgaggtcatttgtcactgtagctcaagaaaactacccaaatcgtcttggagtattgtttgttgtccgccttcctccagttgtcagagttattgcacagacatttcttcaagttttgaaaccatctacaaagcagaagttacgttttgagggagattcatacaagaagacgttggcggagttcttgcaggccgtgccagcgtttctgggcggtaaatgcagctgcccacgatgtgagaagcctcgtaatagttcagtggtgcaggcaggggaagggagcaagaaccaggctcgcttggtcagcgttgatggcggatcacctgtcgtggacttcgacttcgatgaagaagagatcccatcaccttatagctgcgagaacgccatcagggctgcgataatctgcctgctgatggtgtgcatcttcatcgcgtttctggctgggatgaacgaccctgcatccgttccgcccagtgcctgagagctatggaatcgcctagtctcccatagtagagcttagattgtcagttgagtatatacacatctgtgttgctatttaggatgctactagggtgttgtattccctggcagcttctttctcggttgtcgtcagatcgccttctctcctaatgtgagcggagcagatgaataaatatcctgtgtgtggcaaatgttggttagcagttcaattagcccttcgatagtgtctttctttgcgtgcttgctgcagtagggcagtgtgatttctcgttagtgtacgtaaactcaaagttttcaaccacaaggcaacaacacactgactctagtggtttcagctctttaatctttatacatctcactggtcactaatgataatcctttgggtacggc

SEQ ID NO: 198845 - DNA, 1541 bp, Zea Mays
ataacatgtacttactgtggaacattcctggcaaattcatgtgatgagtgcggggcagacgtcaataaaacctcatttaaactatccatgccactgttgtttttgtcagtcacaacaacagtaagtgagctgtcctccaagcgtgatgatgaaccagataacaatacagaacattctgaaacaaatgaattggcatcaacttctggcacaagtgatgctgctgatggcacaaaggaaatcgtacaagagaactggcttgtgttacttttcagggagcttgagaagcaaggcatcactttacccgagaggtttactgaagatgaattacgcagattttatgttgctgcaaatggtgacttttcaagtttactctcttcggttaagaagacaattcgttggagggaaacgtttcacatacttacactgcaagaacttgataaatggtctcacttagtcttttggcatggatttgacacgatgcttcggccttgtttagtaattcgtcttggacttgcatgctccagcataccaccttgtgatagaccccgttttgggcaagcagtagtttctcaaattgaccatggtgttgtaaatttgaccaacaaagaagattcaagaattaccgttttgctggattgccatgggatttctccattcagatttccaatgcaaatgatgaggtcatttgtcactgtagctcaagaaaactacccaaatcgtcttggagtattgtttgttgtccgccttcctccagttgtcagagttattgcacagacatttcttcaagttttgaaaccatctacaaagcagaagttacgttttgagggagattcatacaagaagacgttggcggagttcttgcaggccgtgccagcgtttctgggcggtaaatgcagctgcccacgatgtgagaagcctcgtaatagttcagtggtgcaggcaggggaagggagcaagaaccaggctcgcttggtcagcgttgatggcggatcacctgtcgtggacttcgacttcgatgaagaagagatcccatcaccttatagctgcgagaacgccatcagggctgcgataatctgcctgctgatggtgtgcatcttcatcgcgtttctggctgggatgaacgaccctgcatccgttccgcccagtgcctgagagctatggaatcgcctagtctcccatagtagagcttagattgtcagttgagtatatacacatctgtgttgctatttaggatgctactagggtgttgtattccctggcagcttctttctcggttgtcgtcagatcgccttctctcctaatgtgagcggagcagatgaataaatatcctgtgtgtggcaaatgttggttagcagttcaattagcccttcgatagtgtctttctttgcgtgcttgctgcagtagggcagtgtgatttctcgttagtgtacgtaaactcaaagttttcaaccacaaggcaacaacacactgactctagtggtttcagctctttaatctttatacatctcactggtcactaatgataatcctttgggtacggc

SEQ ID NO: 198846 - DNA, 2536 bp, Zea Mays
agaaaatatagaaagagaaaacagttgaaacctccatacctgagtattgacgggtcggtggatgtggctcacgcctcggcgacttcagccggcggccaggggcgttagacggcggcactgtacgtggtccgcagctgagcaattggcagatgtagtgataagctgatccgtcgtctcccgtcttcccgacccgggtcccgcctcgcccgtcgccgccagatccgacgcgctggatcgccagcggcctgctgctgtcgatccgacgtgcggcagtctgctcttcctgccgtttccctgcgcttggggtccataatagcacgcatctggccggctcaagagcatagtggatctgaccggaggaggccgctgctgctgcttctccctcaccgatggcgagggttcgggacaggacggaggacttcaaagaggctgtccgagtcgccgcactctcccatggatacacggaggcccaattggccgcgctcatgtcttctttcatcatccggaagccgtcgcccaagtcaccgttcactaatgccgcaatcaagacgcttcagagcatcagggaactcgagaggttcatagtgaagcataggagggattatgtggatctgcatcgctctaccgagcaagagagggataacattgagcatgaagttggtgtttttgtaaaagcatgcaaggaacagattgatatcttaaagaacaggatccacaaagaagagaagaatggaagtggaaagacatggcttggcactagggatgagagttcacgggtggacttgatagctcatcagcatggtgtggtatggttattctccctgccattgctgtaagtttaagattttctgcttgattaatttattgttccagggagcacatgataattaaatagttcgcagtagaactgacccgattttgttccatttagaggatgaggcaaagtaattccttagagcaactccaaaagtttctttatattcttccataatgataggagtatatattttggtgaaaaacttcccctccaacagctacttcaactggaactcaaaaaattgcaatccttattttttatttcttgctctccaaagatagagagtaaaggtacctttccagactccagagtgctgaacaagacatagagaagttgtttagagggtggagatatatagagtgatttttattggaatgactctctaaataaaaaataagagagtaagtttaagaaagactgttgaagatgctcttacgttacctgttacgatgctacatgtattatgagcaaagatctccttttattagagccaattgaacaggtggtcctgttgaggattgatgttttcaacattttctttccaagtttttaagtaagttgggtgtatatttcactagctggtagtaggatatcagaacccaattgcttgatttcatttggtaagatgaaaaatatgctgtgtgatttttagaggacagaatagattacccagtcgaaacaagtgaacttgaataatatctactttcatttttttcggggcttcatcaggtaacagcatttacaggcaaacgcttacctccatttgtctttattgttttgtttttctctatatccaaatcttagtggcagtcagtcatcagttctaaagtctgaactacgttgttttgcagtagttttaggggtttccttgtgcccagctccagtaagctgtttgttttgtgccaactttattaggttctaattttgagtgagcgtctacactcggtaactgcacaatttgatcatcttcggtccattcgttttcaagatgctattaacagagcaatgccaaggaagaagattcagaagagaccagaaatcaaacctgctgaaccatccaagtccaatcttgttctaaaatctgatgtatcaaaggttgtagaccatgaagtatctacaacacctatgagagttcaagaacagctattggacgatgaaacaaaagccctccaggtggagttgacaagtcttcttgatgctgtccaagaaacagagacaaagatgatagaaatgtcagcacttaatcatcttatgtcaacacatgttctacaacaagcgcaacaaattcagtatttatatgatcaggctgttgaagctacgaataatgtggagcgtgggaacaaggagctatcccaggcaatccagcgcaacagcagcagtagaacctttctcctactcttcttctttgttcttactttctcgattctttttcttgactggtacaacaactgaattagtctataaagacgtcgtattgttttgctcatgcgaaatgatcaaattatgaaagctgtctatttaaagtgctgatcttttacgtactatgttacttcccaagcatactgtcctatgtgttgttcatctcaatgcgccgggatttgtcattttatctgaaacttgttgagcaattggcgatctgaagaaacaatgctgggtgtatagtgtactactgatattctggtattgttcctctcaagaaacaatatgttcagtacgtgt

SEQ ID NO: 198847 - DNA, 1636 bp, Zea Mays
agaaaatatagaaagagaaaacagttgaaacctccatacctgagtattgacgggtcggtggatgtggctcacgcctcggcgacttcagccggcggccaggggcgttagacggcggcactgtacgtggtccgcagctgagcaattggcagatgtagtgataagctgatccgtcgtctcccgtcttcccgacccgggtcccgcctcgcccgtcgccgccagatccgacgcgctggatcgccagcggcctgctgctgtcgatccgacgtgcggcagtctgctcttcctgccgtttccctgcgcttggggtccataatagcacgcatctggccggctcaagagcatagtggatctgaccggaggaggccgctgctgctgcttctccctcaccgatggcgagggttcgggacaggacggaggacttcaaagaggctgtccgagtcgccgcactctcccatggatacacggaggcccaattggccgcgctcatgtcttctttcatcatccggaagccgtcgcccaagtcaccgttcactaatgccgcaatcaagacgcttcagagcatcagggaactcgagaggttcatagtgaagcataggagggattatgtggatctgcatcgctctaccgagcaagagagggataacattgagcatgaagttggtgtttttgtaaaagcatgcaaggaacagattgatatcttaaagaacaggatccacaaagaagagaagaatggaagtggaaagacatggcttggcactagggatgagagttcacgggtggacttgatagctcatcagcatggtgtggtatggttattctccctgccattgctgttctaattttgagtgagcgtctacactcggtaactgcacaatttgatcatcttcggtccattcgttttcaagatgctattaacagagcaatgccaaggaagaagattcagaagagaccagaaatcaaacctgctgaaccatccaagtccaatcttgttctaaaatctgatgtatcaaaggttgtagaccatgaagtatctacaacacctatgagagttcaagaacagctattggacgatgaaacaaaagccctccaggtggagttgacaagtcttcttgatgctgtccaagaaacagagacaaagatgatagaaatgtcagcacttaatcatcttatgtcaacacatgttctacaacaagcgcaacaaattcagtatttatatgatcaggctgttgaagctacgaataatgtggagcgtgggaacaaggagctatcccaggcaatccagcgcaacagcagcagtagaacctttctcctactcttcttctttgttcttactttctcgattctttttcttgactggtacaacaactgaattagtctataaagacgtcgtattgttttgctcatgcgaaatgatcaaattatgaaagctgtctatttaaagtgctgatcttttacgtactatgttacttcccaagcatactgtcctatgtgttgttcatctcaatgcgccgggatttgtcattttatctgaaacttgttgagcaattggcgatctgaagaaacaatgctgggtgtatagtgtactactgatattctggtattgttcctctcaagaaacaatatgttcagtacgtgt

SEQ ID NO: 198848 - DNA, 743 bp, Zea Mays
tatggttattctccctgccattgctagcaatgccaaggaagaagattcagaagagaccagaaatcaaacctgctgaaccatccaagtccaatcttgttctaaaatctgatgtatcaaaggttgtagaccatgaagtatctacaacacctatgagagttcaagaacagctattggacgatgaaacaaaagccctccaggtggagttgacaagtcttcttgatgctgtccaagaaacagagacaaagatgatagaaatgtcagcacttaatcatcttatgtcaacacatgttctacaacaagcgcaacaaattcagtatttatatgatcaggctgttgaagctacgaataatgtggagcgtgggaacaaggagctatcccaggcaatccagcgcaacagcagcagtagaacctttctcctactcttcttctttgttcttactttctcgattctttttcttgactggtacaacaactgaattagtctataaagacgtcgtattgttttgctcatgcgaaatgatcaaattatgaaagctgtctatttaaagtgctgatcttttacgtactatgttacttcccaagcatactgtcctatgtgttgttcatctcaatgcgccgggatttgtcattttatctgaaacttgttgagcaattggcgatctgaagaaacaatgctgggtgtatagtgtactactgatattctggtattgttcctctcaagaaacaatatgttcagtacgtgt

SEQ ID NO: 198849 - DNA, 2266 bp, Zea Mays
atggccaccgccaccgcttcccgcctcgccgtcctcgcgccgcggccgtcgcgccccgcaccggggcgccggcgacatgctcctgctaccggtcgtggtcctcccctccctcgcagtctctacgcagcgccccgcggccgcgttctctgcctcgcggcccccgcgcccgctgctgcctccaccaccgacgccggccaggaccgcctccagaaggtgcccatttcgaatatcaggaacttctgcatcatcgcgcacattgaccatggcaagtccacactggcggataagctgctggagcttactggcacggtgcagaagagggagatgaaggagcagtttctggataacatggacctggagagggagagagggatcaccataaaattgcaggcagctcggatgcgctacgtcatgaataatgagccttactgcctgaatttaattgatacaccagggcatgttgatttctcgtacgaggtttcccgctctctagctgcctgtgagggcgcacttcttgttgttgatgcttctcagggtgttgaagctcagacgttagcgaatgtgtaccttgcattggaaaacaaccttgaaatcataccggttctaaataaaatagatcttcctggtgctgaacctgatcgtgtcgcacaggaaattgaagagataattggattggactgtcgtgatgcaattcggtgttcagcaaaggaaggtataggcatcactgaaatattagatgcccttgtgaccaaaatccccccaccaaaagatacatcaaaagatcctctcagggctcttatatttgacagctattatgatccatacagaggtgtaattgtgtacttccgtgttattgatggcagtatgaagaaaggggacaagatatgttttatggccaatggaaaggaatatgttgctgaagaaattggtgtactatccccaaatcagatgcaagtttctgaactatatgctggcgaggtttgaggagttgcgggaagcgctggaaaaacttcagctaaatgatgctgccctaaagtttgaaccagaatcttctagtgccatggggtttggcttcagatgtgggttccttggtcttctccatatggaaatagttcaggaaaggcttgagagggaatacaacttgaacttaataattactgcaccaagcgtggtataccgtgtgaactgtgctgatggtgaaactgttgaatgttcaaatccatccttgcttccggagcctgggaagcggaggtctatagaagaaccatatgtgaagattgaaatgcttacaccaaaagattatattggttcaataatggagctgactcaagacagaagaggtgaattcaaggaaatgaacttcatcacagaaagcagggccaaacttatttatgagctaccactagcagagatggttggcgatttctttgatcaactgaaatcacgaagtaaaggatatgctagcatggaatattcagttgttgggtacagagaaagccaactagtaaagctggatatacaaatcaacggggatcctgttgaggcgttgtcaacaattgtgcacagggataaggcatatgctgttggaagggcacttactcaaaagctcaaggaacttatacctcggcaaatgtttagagttcctattcaagcatgtattggcacaaaggtgattgcaagcgaagccctgtctgccatcaggaaggatgtcttatcaaaatgctatgggggtgatatatcaaggaaaaagaagttgctgaagaagcaggctgaaggaaagaaaaggatgaaggcaataggaagggttgatgtccctcaagaagcattcatggccgtgttgagactggaaaaggaggtgctatgaaagtgctcatgaacctttgtgtctccgtaaattaaagacctcttcctgtgcgccactcacaagtatagtcagacgagagctttgagacaacaggcattcactatggttcaacctgtccgctctggaccataggaaccagtcaagcacagatcactcccagaacaaaagcaggtaaatctggcattcgttcgctattttttgcttttttatgtgtcaggctatgatggtaaaacaatcatgtcgccacagagttttgccaggcacatataggaaattcatatgtcaaagtgcatcatgtagtccaattccttgtaacgcatgctacagagacttgtttctacagttgaatataccttgtaaggctgggaccaacagatcgtgcatatgcaaaacaagaggttt

SEQ ID NO: 198850 - DNA, 1907 bp, Zea Mays
gcaatatatatttccttactggtgttgaagctcagacgttagcgaatgtgtaccttgcattggaaaacaaccttgaaatcataccggttctaaataaaatagatcttcctggtgctgaacctgatcgtgtcgcacaggaaattgaagagataattggattggactgtcgtgatgcaattcggtgttcagcaaaggaaggtataggcatcactgaaatattagatgcccttgtgaccaaaatccccccaccaaaagatacatcaaaagatcctctcagggctcttatatttgacagctattatgatccatacagaggtgtaattgtgtacttccgtgttattgatggcagtatgaagaaaggggacaagatatgttttatggccaatggaaaggaatatgttgctgaagaaattggtgtactatccccaaatcagatgcaagtttctgaactatatgctggcgaggttggttatctctctgcttctataagatcagtagcagatgccagggttggtgatactattacacattattcaaaaaaagcacatcatgctttaccaggatattctgaagccactccaatggttttttgtggcttgttccctatagatgctgatcagtttgaggagttgcgggaagcgctggaaaaacttcagctaaatgatgctgccctaaagtttgaaccagaatcttctagtgccatggggtttggcttcagatgtgggttccttggtcttctccatatggaaatagttcaggaaaggcttgagagggaatacaacttgaacttaataattactgcaccaagcgtggtataccgtgtgaactgtgctgatggtgaaactgttgaatgttcaaatccatccttgcttccggagcctgggaagcggaggtctatagaagaaccatatgtgaagattgaaatgcttacaccaaaagattatattggttcaataatggagctgactcaagacagaagaggtgaattcaaggaaatgaacttcatcacagaaagcagggccaaacttatttatgagctaccactagcagagatggttggcgatttctttgatcaactgaaatcacgaagtaaaggatatgctagcatggaatattcagttgttgggtacagagaaagccaactagtaaagctggatatacaaatcaacggggatcctgttgaggcgttgtcaacaattgtgcacagggataaggcatatgctgttggaagggcacttactcaaaagctcaaggaacttatacctcggcaaatgtttagagttcctattcaagcatgtattggcacaaaggtgattgcaagcgaagccctgtctgccatcaggaaggatgtcttatcaaaatgctatgggggtgatatatcaaggaaaaagaagttgctgaagaagcaggctgaaggaaagaaaaggatgaaggcaataggaagggttgatgtccctcaagaagcattcatggccgtgttgagactggaaaaggaggtgctatgaaagtgctcatgaacctttgtgtctccgtaaattaaagacctcttcctgtgcgccactcacaagtatagtcagacgagagctttgagacaacaggcattcactatggttcaacctgtccgctctggaccataggaaccagtcaagcacagatcactcccagaacaaaagcaggtaaatctggcattcgttcgctattttttgcttttttatgtgtcaggctatgatggtaaaacaatcatgtcgccacagagttttgccaggcacatataggaaattcatatgtcaaagtgcatcatgtagtccaattccttgtaacgcatgctacagagacttgtttctacagttgaatataccttgtaaggctgggaccaacagatcgtgcatatgcaaaacaagaggttt

SEQ ID NO: 198851 - DNA, 820 bp, Zea Mays
gctgctattctgttgcatccctgcagtttcagccttttggtacagagaaagccaactagtaaagctggatatacaaatcaacggggatcctgttgaggcgttgtcaacaattgtgcacagggataaggcatatgctgttggaagggcacttactcaaaagctcaaggaacttatacctcggcaaatgtttagagttcctattcaagcatgtattggcacaaaggtgattgcaagcgaagccctgtctgccatcaggaaggatgtcttatcaaaatgctatgggggtgatatatcaaggaaaaagaagttgctgaagaagcaggctgaaggaaagaaaaggatgaaggcaataggaagggttgatgtccctcaagaagcattcatggccgtgttgagactggaaaaggaggtgctatgaaagtgctcatgaacctttgtgtctccgtaaattaaagacctcttcctgtgcgccactcacaagtatagtcagacgagagctttgagacaacaggcattcactatggttcaacctgtccgctctggaccataggaaccagtcaagcacagatcactcccagaacaaaagcaggtaaatctggcattcgttcgctattttttgcttttttatgtgtcaggctatgatggtaaaacaatcatgtcgccacagagttttgccaggcacatataggaaattcatatgtcaaagtgcatcatgtagtccaattccttgtaacgcatgctacagagacttgtttctacagttgaatataccttgtaaggctgggaccaacagatcgtgcatatgcaaaacaagaggttt

SEQ ID NO: 198852 - DNA, 1055 bp, Zea Mays
cccacattccaattcaacaagttattaaccacactccacatcctcttagcaatacaacagtcgaaaaaggaatcagatggaattcgacctttcacaatgcctcttatgaagcttgcttgcactgcattggagagagttcctttgacacgcagaaaagtgattgacaatttgatgaagaaatttcatcaagatttggtattttgccgctcacctgctgatagtgaactgaccattggagttcatcaaaagcagaaggagaaaatcgatccgattctggagtgggtagacactgaatttgggttcaaacccgttgtctacacaagcttctttggggggaagcaagacgagggccttgctaaagctgtagaaactgttctgaagaaagcaactgactgtgagttggcatccattgatgctatggctgcagcagcccattccttggtgatccctcttgcaatatttagagaaaggttgggtattgaggaggccattgagttgatcaggcttgaagaagaccaccaggttgatcgatggggcttggtggaaggaggtcatgacgttgatatcgcggatcttaaagtgcagatgtcctcggctgttgtatttcttggactttcacggggactgtgaatgtttcttacctatatggctagttgtttatttccaagcttgtatgaatctgagaccaagagttgtagagaataattgccgcggaaggtcgatagcaaaccaagtatctgtactgtattcagcaatcagcagttctgatgttcgattttggattgagtccagaaaatgctgttgaggtttgaactagggagcccagcattcctctggctttgtactgttgtgagagtaagaacatatctaggaactagtattgcagtggcagtcactgagtcgatatatctacttctgcacctttcagctccagcagcacaagttgcatgatcgtattgaccggtcatttttagccatgctcaatttgctgtaacaaatagtgctgctaggtaccagtccatattggtcctaaaattaaattaaaaaaacacaaa

SEQ ID NO: 198853 - DNA, 1033 bp, Zea Mays
attgcagatcttcaaggacaagggtctgtcgtggtgtttagaggcggaggcggtgcccggccagcatacactctggtttcacagaatgaggcacactttgctggtgactggttcgaaatttgatttctactagccaggatgtacccaatgaactcatggatctagctatgaagggttctttaaatgatgttggaagtgtagatgtcttctcttggataagatgtttggatcttcgcactctcgctgtgctgacaaattccaccctgtccagctcaagtgatccacataatatatctttccattacttaatacctgaaggaggcaacgataagttgtcctacttcaagctaaaagtcttgctacctgattcagatctcactgttactagtcaaaagcaaatcaaggacaagctaaatgttgccactccaaaaggaaattttctttggttattccacatagaactgtcaccctttcttatcgcaaaatctcagttgtcgaaaaagagatttgtttatatcgctgcagattccatcataaagggcaaagtcgaagatcttggtcgcatggaactaggcggttacgccattggcgctgtagaagattgcagcaagcgtctcagcgattatatcagtatggatgttcttagtgccatacaaagagcgggagctacattcagttgggtgcctaaagaaccttataacgaggatgcatgcctacttgattttgacgtgctattgatggagcctcgcaagctggagaaaaccctgattacttccatcatgtggtgggctactggatgtttgcagcaatagtaatgggaagctacaaggaaatttgctccagaaatttcacaaaatcaaggtataagttttccctccttttctatatactacttattaagacattgagttatgaatgcgcctttcagggcccacttgctttgatgaaaaatcacaaacctgtcagaggcatggacgcacggttcatggatggttatgctttggcgcttacttataatgagcaagaaccatga

SEQ ID NO: 198854 - DNA, 1679 bp, Zea Mays
ggtggtgcttacggtgtcgcacagttcaggaaaagagcattcatctgggctgctgcaccaggagagacccttcctctggactctggagttggcctgaaccagtgcatgtctccgcaagccctcagctgaaaataaacctccttgagaccctgacggcaaaccactacgcagctgttaagagcactggcgcagggggcacctttgcggtcaataagagtgaggatctcccaccagtggaaaaatggcgccagcaagccaacaatacagtccttcctatggtgcatgccaccgtgtcatggttccagaagatcagaggcgtcaccgtgttcttgagtgagcacatatccatggagatgaacgacctggctgaatatcatcagggtgcaagcacattccaaaacgactggcaaaagccactggaggagacggtaaccacagcctgttcctttgtccaccggtcgagtggtggacctgctgcccaacaccgccaaaaggaacaatcaatggaaggggctccatgggaggctggactgggagggcagcttcccccacgtccgtgtccgatccccagcctgtgggcaagctcggcatgtgcttccaccctgagcagattctgtacctctaacggcaacggcaagctttaaacaggtaacgccaacagattctgggatggtgcatacaatacaagcttagaaacataatcaattcatatttcttcaaacagattcaaatcgtaccagtcacatatgttttactctaaaaactacactcaataccagaaccaaactaaaatctcccctaaaaaccgagcacgaaaatcactataggtacaatgcggtctagaagagagggtgcagtaagaacatcacagcaccaacgatgatgaacgccttgcaaaatccgataatggatcagagccaccaagaatcccctgcctcaagaagagagcagaacacgatcaacaaccccatggccgcccaccgtttaccatcagctagggagcgcgtagccgtatgcggtgtccgtgaacgaggcgccggcgacatcgaacgcgtcgctctcgtcgaggtacaggttgaccctgaaggcggcgtgcgcgccgatgacggccgagccaggcgacgaagagcgccaggaacgcgagcatggacgcggggcggtagacgaggccgaggaagacgagcgcgagcgcggccagcgcgtagttggcgcggaagtaggcgaggttgcggcgcgcccgcgcgcgggcctccccgcagctgtccgggcacgagaacgccgtcgggtccagcacctcacgccacgcgcgcggccggcccgccgcggccccggcgaacgctcgcgcgcgggagaagaaggcgaccccggcctccgccgccgttgccgccgccgaggaggaggagggcgccgcatcgccgcccgcggccgcgacgtcctccggcttgagctgcggcgcagggggggaggtggggagggcgccgtagcgcgaccacgacgcggtggaggaggacatggcgggccgctggcgaaccccagccgccgggcgctggatcgggcctcgggctgtgggattggtgcggtggcttgcgcagctgtgccgggttggccgcttgttggcctggcctggcctcttcgatcgcggggatctgaacggaggaggagagagagagagaggaaag

SEQ ID NO: 198855 - DNA, 832 bp, Zea Mays
cacaactcaatgtggccaaggctttcgattgacaagattagttaccatcaattatctgttgggaaacttgggaaagacttatgcagacacagttggagtagtggatcttggtggtggatctgtccaaatggcatatgctattgcagagaaggatgcagaaaaggctcctaaaccatccgagggggaagatgcatatgtgaagaaattgttcctcaaaggaaccacatattatctttatgttcatagttatttgcattatgggttgctggcagctagagcggaggtcttaaaagctggcaatggcaatggttacagcaactgtatgttagagggatttcaagggaaatacaagtatggcgacgattcatttgaagcatccggtccaccttccggtgctagttactcaaaatgcaaggatgatgcagtgaaagcccttaaagttgatgaagcatgcacccacatgaagtgttcttttggtggcatttggaatggtgtgccatcgaggttgcatcttcgtagtaggaaggaaacacagtttagcaaggtaacatcggacggcattcttgtcatgaagttttgcgttgagagtccccactcctccacttcctcctcttgatcgcttgaattcgcacactcaatccattcatcttactatacggtacgggtagcgtctctcggctctacttggttccagcgggcattgttgtaagctctgttattaatatttgtatactactaatgcaagtaagattggagcctcaattcttctttttgacctccaatatatataatactggaatgcacctgatacaagtgccatcattttttgctc

SEQ ID NO: 198856 - DNA, 345 bp, Zea Mays
ccccgaggacctagtgtgctgcagccagcagatgcaacaaacaacccaagtctggttttttttttacccctggtgcagggctctctgggctcgagtgtagtcatctcctctgcacgctgtttcaacacaatgatcatggcatcagccttttacaagtttgggtaccagtcgtgtaaactgagtggtcctggtgcatgcaaacaacctacagccaccgccgctgctagcggcggcaacggtgtccatgccctagcgacaatcacgcgcaggaactgacgtacgtgtcttgcgttgagtgattgttgacgtatgcaacgcaactacatatatgccatgcatgctgag

SEQ ID NO: 198857 - DNA, 979 bp, Zea Mays
ggcggagatcggctggccggccggccgatgatgaagagaggacacgaagatccatcgttcatgagaccatgattttttcccggaaacagatcccgagtatccgacagtttcgccttcccgtctttccctctccccccacacccgggtcgtcgtcgtcgcggcgtgagcgtctgagcgagcgtgcgagagcgagaggggggaacacaaaaccctagcaccgtcgccgacggacgccagagtagagagatggcggtggacgaggtgaattcggtctacgtcggcagccttccctacgaggccaacgaggagatgcttcgcgacgccttcgggtactacggcaccatcgtctccgtcaaggttagccagattaaggataaaatctctgcgaaaggacaacacattgcagatttgcagaagaaagctcagaaattagaggacgaactggctgctgcacggaaagtctcttcagaacgacaattagctgttacagacctgtacaaacattttcttcaactccaagactacaacgatagggtcaaaacagctgaacataggctgcagtctcttgttgacgctgccatggccgagcttgacatggccgaagatgctactaccagagatggctcgatgtatgagaacggcgtggtttgaacacccaaagggggctgccagctgtcatgtcacggcttgtgaggtttactaatttgttagatttgtagtttggatttgccatgtataatagaactgtactgtaactagaaacgggaaaatgttgtgtaaggatcagggaatgaatggctgcacagtgcacatttgctatggcttgtttttttttttcaaagttgaatttattagccggcctgactattgctgatacggtatgatctgccctaatatcagagctgttcagttaggcaggtttgacttgagaaacgttcgtgttctgtttgtcaatcacatatatcatgctggcttgttg

SEQ ID NO: 198858 - DNA, 2308 bp, Zea Mays
acttcagcacacatcacacagaggtagtgcctacccgcacggccgcacggcagttcgtcaccgtggtggcgtatccgccacaagcccactgcccacaggcccactgctgccgtctcgcctcagggctcaggctgcaggctgacgacgccaacgccgcccctcccggccttggcccaagtcgtcacctcctcgcccctcgcccacggctgcggccacattgtcgccggcttgccaacacgcccgtgtagatcggccgccgcatcgcgccacgccgccgtttcgatcccccgccagggcagcaggcaggcaggtgccctgctcttccagcgcccaggcagaatcacttgcatttttatcttttctcattcaagttctgatcttgcgtttctttagtgactttactatgccacctgttgacggcctcaagcgtaatgttggttaaccactgaatgcttctgtttcctacagaaatccctgtcctagaaattcatttcgtacaaacaaaataactgaaacggaaagaagtggtaacttaggttccgtttttcataatatttctatgcttaataaattcgctccaatttacctcccccagctcagggtagcatgtgtcagttatgatacattgaggtttacgttctcatcacattatttggtaacattggatcgtctgttgctgttggctaccaatatacgtaagaaacattgggtgatctgttagatcacctcagtcactggggaatcattgttggcccttataagaaacccatcttgaatataggaatctggcgatgaagagtaagaaaagtgtgcacggatcatcatgcaagaaggctaagttgtttgacggcctaattggtagacatggttctgaaatagatccatgttataaactttttcttgaacatttaagcaaagatcggaatacatatgtccttgatgtaccaaagggtgaccacggcttgcctttttctgtacgttatgaggaggactatacgtcctatggaaatactaagagcagaagtagtccaaattttcccaaccattcacggcgcacaagttggggcattccagatggcaaacagcctgatgtaaaagctgtcaaggctgccagcagaaatatgtgttgctccttttcaccaaagagatcatatgtgaagaagaagaccacgacctcactagtagatgaatcttatgagttatttctgagccttgtgaagttcaaggatggtttcatggttattgaaccagaaccaggtgtcaccattgtatatgagcgagaagaagatatgccagctggctatgatgaatggagaactggcagttccacaaatgaactgtctttggtgtctccacttgaaaacacggagggagactacaccatgcaaagatatgattatggccttgcaccggctaacaaaatttcttctgaacatgaaatggctgcaccttcttcagagaacattgctggtcaggatattatttgcacagatgagcatggccttgtactttatgctgaaccatctgatttaaatgtaagattcttttgcataatttctggtcctcttcaaatgctgctgcctgttatatagctgcctttttgcccaggcatgtgaagatgaacaagcaacacctcttgctatcagctacggtggttcatctacatttgatgaaaaactcaatgctgttttaagtcaaccatatgatcaaaacgaatacgaagagttgtggagaaaagcgactgaccggaagcctgtgagcagacaaagacacttgcgaagtgcatcaaagcgctatgttacagaggcaatcgggctgtcatatctcgattattaccctgttaatcatgcagatctagccgtacaaataaagtcatctgatcgtgataagagactgagcctactacgaaggttcttcttctggttggagaacttgtgccatgagggagcctacatgccctggatctccaaacctctagcttgcaaccccatttcaccggatggatgaatatgaaccgacgcccactctcatcctcaagacacacgaagatgagccctaggggtgagcggttagcagagatttgcttgcagcatccctgcatctctgatgctacttgactgctccttgtttcgatgcgatgcaaagctgagtctgtaatcttcagtgtctatgcagtactgcagttatttttctgcaggctaaattatacaacatggcaacaaatacagcacggatattgcaaaaatggtactgctagcgttttatcgttacatggatacagcacggatattaccacacggatactgct

SEQ ID NO: 198859 - DNA, 2375 bp, Zea Mays
cactgctttgcctgcaagtcttcaaagccccccaggccccagctcgacgctcgctaccctaccccgcaaggccgcaaccccgagcagagtcccaagcccaagaaaccaacccccgacgcgcgcgagacggcgagagagggagagataggtgtgcggcagtaatatagtgggtttgctctttgattggccgcggctaagcaccaaaccttggggaaatggagctgctcagtggtgcagtggcgcagcgggagcttggggaagcggaagcttgcgagcagccagagcactagccattacccagcgctaccatacactgacatatctatcgatctgatcgggctgctgctgagtgcagtgtgtgtacaaaaggccctgaaggcggtaagaccgagctgcacctgcactagaggtgaaggggtgtgagggagaagaaaagcgagtagcccgtgagctgctgcggtgcgagggagcccagggtttcgtctcgcccggccgcgcctggaccgtgccgacttcgctagcatgatgaaccccggctcgcgccagatttatctgaccttcccggccgacagcacgttccgcgaggaggacgtctccaactatttcagcatctacggtccagttcacgacgtgcgcatcccctaccagcagaagcgcatgttcgggttcgtcaccttcgtctacccagagacggtgaagctcatcctggccaagggcaacccgcacttcatctgcgacgcacgcgtgctcgtcaagccgtataaggagaagggcaaggtccccgacaagtacaggaagcagcagcaaggggacttctccggctgcacgacgcccactggcgggctggacgcccgagatccctttgatctgcaccaactcggcgcgaggatgctgcaacattcgaacagcgccaacgagctgctgttgcgccggaagctggaggagcagcagcaggctgccgaactgcagcacgccattgagctccagagccgccgcctcatgggtctccagctgctcgacctcaaggctcgcgcagctgcgacagcatcggcactgccaacaccaattgccaatgccttcgcgtccagccatcctttgagcaccatggcagtcgagtcgccactagagtctggagagcagctcaagctgagcagtgggtttgctctggatgggaagctcaacggtggcgacaaggaagaatctgcttgcgaggcgagccctgacgccgctgatagcgaccaaagtggagagcacaacttgccggacagcccatttgcgtcccctaccaagtctgccgcgctcgtgcacgacagtttcgccgccacggagcctgagaacaccgcgtcctgtgttgggagcaagatcgacggcggcagtaaccatctccgcccccctgcgctggaaatcccttcgcccagctcctacttcttccccatgcgcaggctgtcctccgatcacggagccatggggatgtaaagttcagcattggaagcgagtgataccccagcctaatcatagaatactagaagccaaggaaaagtgatgttggatatataggagaaaaaaaagagagttgagtgtcagcatagtgttagctcccactttcttttgttcttttagtccctacctttttagtggatagttctactaaaccacaagaggagaagatgccattagccttgattaagaaaacggcggcatatgcaatattatcgccagatataagtatatatatattatatatacaaataatcccctagtttctagtatatatatagtatctgtacttagtatttaacagtagcaggtaacgtcagcccaaagatttttactgtgacaaggtcctacaactacagccacctccactaggtttaccaaatgtgaggttaatccacagttctggtaccagccacagcgacagccacaggtcacatgtaataccagtacagctacagcctgacgcggacatttgtatgctagggcggcccagtgacaggaaaaagagcacatggccatggcagttgtctgtaagctatttttactgctactgctgcaagatcccaagctgggtcctcctatggatagagagaaagagacgtgtgtgcgtgtgttttgcttgtggccttgtatggctttgacacctactgcaaaatactactgttatatgattatatgttattgttgtgcctttgttcccatctgtttgagtggatcctagtgtagttgacacccctacagaaagaatggaagcaaagtgagtgctttgcccctccatttatctcccaccttttcagaatcggaaccgggtattggtatagctgttgttgtgagatggctgtcaggacattgactaatgattgttgctaatctattga

SEQ ID NO: 198860 - DNA, 2972 bp, Zea Mays
agcccaagaaaccaacccccgacgcgcgcgagacggcgagagagggagagataggtgtgcggcagtaatatagtgggtttgctctttgattggccgcggctaagcaccaaaccttggggaaatggagctgctcagtggtgcagtggcgcagcgggagcttggggaagcggaagcttgcgagcagccagagcactagccattacccagcgctaccatacactgacatatctatcgatctgatcgggctgctgctgagtgcagtgtgtgtacaaaaggccctgaaggcggtaagaccgagctgcacctgcactagaggtgaaggggtgtgagggagaagaaaagcgagtagcccgtgagctgctgcggtgcgagggagcccagggtttcgtctcgtctggccctcttctcttggcgcggccatggacgcctacgaggccaccaaggtggtgttctcccggatccaagccctagacccggaccacgccgccaagatcatgggcctcctcctcatccaggaccatggcgagaaggagatgatccgcctcgccttcggccccgagtctctgctccacgctgtcatggccaaggcgcgcaaggacctcggcctgctcctcccggcctcgccgacctccgttgcggccgccggccacgcgccgttcctgcagctcccacgccagaactccgggcgcgcgggcgcgccgtcgccgctctcggtgtcctcgccgtcgtcatggagccacgcgcccgtgttctccaggagcaacagcacgagtaatggcaccgcggaggaggcggcgggggctggggaggagctgcccagtcccgtgaacggcggcgcggcgccgttctttcctcgtcaggccggcgacgcgctcctggacgacttgcagctgcaggagcagctcgcgttcctcaacgagggcggcgggaacccggcccaccagctcctggggttcgacggcggggagtgccggagccccggtcccggtgatgccgatgggatgttcgcgttcggcctcgggtggcacaacgggggcccagcgcaccgtaggagttcgtcagtcaacgagctctgccttggcggcggcggcggcggcggcgatggtttcggttggaagccctgcctctactacgcgcgcgggttctgcaagaacggcggcagctgcaggttcgtccacggcggcctctccgacgacgctgctgcgctcgctggcgccaagatggaggcagccgccgatcagcagcagcagtgccaggacttcctcatccgctccaagggccagcgcctcggccccgccgccttcccctactcccccaccggctccctcccaggctcgccctccgccgctagcaagtgcctcagcttcctgctgcagcaacagcagcagcagcacgacagagccgcggcggccgcgtctctgatgctgggcggcggcgacgaggcgcacaagttcatggcccggccgcgcctggaccgtgccgacttcgctagcatgatgaaccccggctcgcgccagatttatctgaccttcccggccgacagcacgttccgcgaggaggacgtctccaactatttcagcatctacggtccagttcacgacgtgcgcatcccctaccagcagaagcgcatgttcgggttcgtcaccttcgtctacccagagacggtgaagctcatcctggccaagggcaacccgcacttcatctgcgacgcacgcgtgctcgtcaagccgtataaggagaagggcaaggtccccgacaagtacaggaagcagcagcaaggggacttctccggctgcacgacgcccactggcgggctggacgcccgagatccctttgatctgcaccaactcggcgcgaggatgctgcaacattcgaacagcgccaacgagctgctgttgcgccggaagctggaggagcagcagcaggctgccgaactgcagcacgccattgagctccagagccgccgcctcatgggtctccagctgctcgacctcaaggctcgcgcagctgcgacagcatcggcactgccaacaccaattgccaatgccttcgcgtccagccatcctttgagcaccatggcagtcgagtcgccactagagtctggagagcagctcaagctgagcagtgggtttgctctggatgggaagctcaacggtggcgacaaggaagaatctgcttgcgaggcgagccctgacgccgctgatagcgaccaaagtggagagcacaacttgccggacagcccatttgcgtcccctaccaagtctgccgcgctcgtgcacgacagtttcgccgccacggagcctgagaacaccgcgtcctgtgttgggagcaagatcgacggcggcagtaaccatctccgcccccctgcgctggaaatcccttcgcccagctcctacttcttccccatgcgcaggctgtcctccgatcacggagccatggggatgtaaagttcagcattggaagcgagtgataccccagcctaatcatagaatactagaagccaaggaaaagtgatgttggatatataggagaaaaaaaagagagttgagtgtcagcatagtgttagctcccactttcttttgttcttttagtccctacctttttagtggatagttctactaaaccacaagaggagaagatgccattagccttgattaagaaaacggcggcatatgcaatattatcgccagatataagtatatatatattatatatacaaataatcccctagtttctagtatatatatagtatctgtacttagtatttaacagtagcaggtaacgtcagcccaaagatttttactgtgacaaggtcctacaactacagccacctccactaggtttaccaaatgtgagtgctttgcccctccatttatctcccaccttttcagaatcggaaccgggtattggtatagctgttgttgtgagatggctgtcaggacattgactaatgattgttgctaatctattga

SEQ ID NO: 198861 - DNA, 4398 bp, Zea Mays
cctgtccccgcctctgccaacgctcctgccccgcacacccacccgccgctcccgcgttgtccgcccccgtcatgaattgccctcttccatgtgcaccacagaaatctcggcgcaagatccccccgaaacctcgccataccctactgcgaggcgtaccattcgacagcgaggccctccttggcgggaacggcgtggtagtcgtggaggctaagacgctccacctcgacgtgccctgctgctcccaggtgtcagtgcgagataggagagcgcgaacctggccgagctccatgtgaggcagtcccaaggcacacgggcctcgcggtggcccaaggacgtcgggcggaagtcgtgccgagctacttccctgcctacgccaaagacgcccaacgcagagaagaggatgcccaccagcgacgtcccgtgctgcgaccgccacgcgaagaaggctgacggcatgccccgctccgatatgcccaacagctgggaccgggaaaaagacatgggacaaatagaagacatctaaagctttccaaggcagatgcctccagaggatatctactctctggtcatatgatcaatgcatagatcacttcagacaatcaaataacagtagtatacatagaaatgcaacatgtaagtatttcctttctatgtctaacagtagtttacaaatatattccacatataaccatattagcttaattgatctatgtataaattatgattattagaataaattttaattccaaatatccaaacatggcctaaataaatactgaattggacattgtatttaaatagacaacagggaacatgagcatatcaccagacacacactagaactcataaaacagggatactatgctattagtctctcttaaatgcagtacatggaagcaaggtttatgatcagatttttgtataccagagaacactcaagtctcccaactgcccgcctgccgaggtgagctccgaatgcctgccctccacctctgatccgtgttgcggcttcgctcctgtgtggagcaagttaattttttttaacatgcatcaacatagatgtcgtccaattacgactgaagcaaaaaaatattgcaaggctaaacactcgggtcaattgctatgtctaggtaattagttttttgtttaagtttcatttagtctatatgtttgatttttccccttgcctacagaccagcctaggtattcatcacttgtgaaaaaaagaatatcagtgttgatggtaaaaaaagtatggatgcttaaaagtcttgctcatttcttggtaggttggatgtggctccaccagcactgcctccctacttcctctactgctgcggctactgctacatgatctatcgtgcctgtttttctaggaatcttaatggcatcaggctggcattttgtttaactcattaggtgcgtcaacactgaaattcactcttacggtcatgttttgttattgcattagagtttgcagcatgaatcagggacatccaatgttgttagatctattaatgcgatgttctctgtcttatttttatcctacaagtcatttcgagatatgtggttgctatcagatgcgggcaatgtcaactttattattggaattgttaacttgacactcattcaccttctggactgaaaaccaagacagtactacatctatttagttaaacatatattacttggctgctaacacaactaagagaaatactgaaaatcaatccttcagtactcttgcctatgctagcatatttgttcatatagtactcttgctgacatttccactatcacagcagcatctctactactatttgtgtttttttatataaatgtattttatcatattgatttcgtccatgcaagaggatctctatcgtgtttcgcaagttaggagccgtcaagcacctgttcggttttgtgtagaacttcacgctccttcctatcccggatacttatatctttactcaaatgatggtgtctagtaacaacgatagcctatcattgacttggacgagtagccataaatctctttcaacaacttatgtcacgtcgcaacgcacgggcacttacctagtaaacacccataagtttgactagatttgctcaattctaaaatatatgctcatatattgcacacggcgctttatgaagcctagtcgaaacaggcctgaaaaatagaggtattatgtgacctgagtttttttttttttttttgatatcgtgtggtcaaaacagagttaaattccgtctgcttttggacatctttttggttagtaggtagccacaatattgccggacctactgacctgtggttctcaaaagaagttgcttttccttgaacaaaaatgcagcagccagcagcaccacggcccacgggtgatagctcggtacgagtacgaagacaaagctgttggttgctttctaacagtttagatattttgcccctgcttgctgtgtggcgtcaaaactcaaaaggtttatcattcatgctcaagctacgcggagtcgcggacaaaacgagcgtctccagaatccaaatgaggcaggcgatttttcaccgcatttcgcccaaaaacctttgctccttccacttgcagggtaactgcgactccacgtaacaatggcttattccaatacccatgtgcccacacctgtccatgcatttgttacaaatatttttctaataaggtgtgattttatccttttatttagaatggttaggagtaatatcccactagccaattattccatacaattctcgtgtatgggagttctacacctccctcgtatacctatacttgtcgtggaatcgtagggagtcatggggcgtaatttctatatataaatatgtatcgataatgaacaaaaagtcacaaaagttcatttacactcttctccctctttactagtacggtgtccgtgcgttacaacagaaaacaaattattcgttaaatactcattacctatgaatatctatgttttttaagcggtgtggtagactgaataccttatttaaacaatatctatatatgtgaggtaattgttagaaacagacttattaatctctgcaacaccaattacattttgaacaacgctaattcgtcgccaaaatgtcctggctacattttgaaccgttgtattttacttttcttttcatattgagcacttgattattctggttggttattaccatccttttcacggttgacattcttgctcaatgttggatgtagacctaaccaagctcattcaaaataataaagtagaggtcaggccactagttgtctcagttatcaaaactttgcatgcaactttcaatcttctcatttttttataattgatgacaaccatacaaagatagaaattaaagtgtttaattccaaacttacacttcacgaagtatgaattaataacttggtttggatttgtgttgcttgccaagcactttgcacactattaaagttttggacaaatttcataaaccctattttgatagtatttgctcccctacatatgtgctaggtgtttggatttgaatcttgcacatatgctaatttaaaattatggaagaagcaaagctaccaaatgttgctaaggtgcctaagataaaactttgaagtgtgtataccatttgtaataccacttgtaatattgattcattatttggtttcgacccttaacacttgagatagctagacctcaaagagactagaaacatttgtgagaccaaaattactagaaagatttctagataccaattaaaaaagcaaataatattaagtctagctatcgcttaacatatgcatgctagttcatcaaattatcaatcaaaaaatattaaaatacatatcataaacaagaatgttgggggccttcgtcttccgaaggtcctcaaaaacacgactaacatatttcccaagtataatatatgtacaggaaccttcggacatgaaatgaagttatacaataatatggagagcgcggttcgggagaaggatgaatcaatgctgaagctacccgtgaagaagcttcggcttaacgatggaaaatgaaaccgacttaaaggggaaaaggttgtctagtcctcgatagatttctctaagtcaatagtaagtgtcgagggcatgaatgtaattctacacaggttgcgccctgtgcctataaatagataaatagtgacactgcactgttcacgctgactgatattcactcacacgtcacacttggacttttaccttccgttaagccgaaggtataaatgtaattcaatactgtccatgtttattcatgataatataataaaaatgttctgataatgccatatgattattcatgtcaatacccgtgtttcatatgcctctacttgacttattatatactgaaattatgaag

SEQ ID NO: 198862 - DNA, 3390 bp, Zea Mays
atagttccaatctggcgtggatgtgtgcttcataataccaaactagtgaagcacagctgcggagtaataaactggcgaagccgcgtgacgagaatgttacaaactcaaataactcctcctctcccccggcttcagcggttcagctccttcacatactgacgtacacatctcctcgccgaggttgctccgtccggtggccagaccgtggttcttggcgctcttggttggtcggggtccttggcaaccggacgtctggtgttcctgtttcgaccttgaacttcttgggggtggggttttgggggcgtcacctccctgtttgtttcttgggttgatgtggcggcggcgcttcctgtgaccggaggggccaaggaggtgggactttttcggtgaagggaaaactgcgggaatggaaggcgaggcagcggcggccgaggcggtggcgcggatacggctggtgcggtgccccaagtgcgacaagttcttgccagagctgcccgcctactccgtctacgtctgcggcggatgcggcgccactctccaagcaaagaagaagaattcagcccaatcttcagatgatgctgacaatggaaatgtgaaataccttgaagtactggagtgtattccacaggcatctgcaagaaaacatggagctagtactactgataagtcagaaaccagtaagattgcagatgtacatagcaaaccagtttatggcaatcatgataggattcagacagggccaagtccctcaaatctgaacacttctattagagatgatggcaaggaggcaaagtaccgacacattcgttattgcgagaatggtgaaatggggcaatcattgagagtaagagacatgtccccgaagtctccaatcaatcacatttcagacaataatcggagtgagtaccacttgaagcagaggtacagctattctactaaggaatgccctggtgaaagaaacttggatggtccaagcaaagtcaggggacttgagaaagaccgcgctgagatcttgaggatgcttgatgagttgagagaccaggtacagcaatcttgcaatgcgactaatggggcaagtggaattgccccatctactgcagcagcagattccaacagttcacatggtacttctgaccggttgagtcaattgaggcaggttgcaccacaattgcatcagaatggttcacatcactccccatccttgaatgttggaagtcctagcgtttctcgtgtttatgctccgctgcctgcacaacaagattgtgtcagatatgcagagcctatttcacatgctcgagcctctagctatcctgccagcctctatccatggagaaattttgataattatttctttggacagcatgatcccgatcctcttctctcttgccgccatgatggcttctatcaccaagctgcctgttcttgcttgcactgttgccaccaagaattcttgcctatacagggaaatcacataggcttccatgatcaaagggcaccatatcttctgaacaattatggggcttatcctgtggacagtcccttacttggtcagcaaagatacagtgcaagagttaccaatactaccttgcagcagaatcacatgagggtcaacgttagcaagaaggctgcacagacttgtgagccagtcgcaggtggtgctccattcaccatatgctgcaattgctacgaagttctacagataccaaggaaacagtccctgtcagggaacgagtataaattgcgttgtggatcatgctcacatgcaattatagtcaagcttgatggaaacaggctcaatgtatcagaatttgcactatgtacacgtttatctgatggacaggaaaatgacatgggaaccgatgggcaaactcaagacaataggtccattccagcttaccatttatctgttggaagtcctgcatctcaagaacgagatctgcactcaaatttgagcgagtcagagaacaatcatacccctctaggaactgactcagagggcacttccctgtccagggatcttcctgctgaagacagtgcagtttcccatgtaccaaatttaccacatcacagtcattctggatcatctccaactgaacattttggagtgggaagtagaagtacccattctgaacctgaaaaagttatactattaactgaaagttccaagcagacctcagttagaggtatatgtgtaacaaacaagatgcaatctccaaacaatgagtttgatgttcctgaatacacagatgatacattaaatgaccaacaagatactgaccaccctagaacaacaaaggccagtgattcctttctcactaatctgataaaaaggagcttcaaaattaataatggattgcgcaacagaagagcaagggtttatgtaaatggctttcctatctctgatcatgtggtccgaaaggctgagaagctagcaggatcaatctgccctggcaattattggtatgactaccatgctggcttctggggcgttatgggacatccctgccttggcatgataccgccttatattcctgagttcaatttccccatgcccaagaactgtgctggtggaaacaccagcatatttgttaatggaagagagcttcaccagaaggatttggatttacttgtcactagaggactctctgattcccctggtagatcttatgtagttgaaaattctggaaaggtttcagatgaagtatctggtgaagagctttatggccttggaaagcttgcaccaacagttgagaaaatggggcggggatttggcatgcgcatcccaaggttcatcaagcgacaggccaacttggtacagctagacttctaaaccttgaaggcaaatcgatggggcgtggatttggcatgcgcatcccaaggtacatagctgatggcggacgaagctggccttcggctgaagtgctaccaagaaaaacccctggaagtgctgcctataaaagctgaagtagtgtgaagagaagcttcgtctaacacatacaaacggcaagggtgtaactcgaagccacaagcctcggcatgaagaggctttcaggtgtaaagtgacgaagtagacgaagtctgagacttgtgcagcaagaaagaaagagaaaagatagcaatgtccctgcatcgttcgtaaacatgtgtgtaaactttatggatatgtttgtaattttccacgaagctatttatcttcgctataaataggtgaacaatgctctacataaattcacctttttgaggaccttaccttcgttttgcttagccttcgaagtatctttgagccatcttgtgtggagaagccgaacgtatgtttgtaaactcgtttaatacgaagagaaagggaatgaaaatgctaaggcataagagatgagtcttgtacctcgttac

SEQ ID NO: 198863 - DNA, 3234 bp, Zea Mays
cggttcagctccttcacatactgacgtacacatctcctcgccgaggttgctccgtccggtggccagaccgtggttcttggcgctcttggttggtcggggtccttggcaaccggacgtctggtgttcctgtttcgaccttgaacttcttgggggtggggttttgggggcgtcacctccctgtttgtttcttgggttgatgtggcggcggcgcttcctgtgaccggaggggccaaggaggtgggactttttcggtgaagggaaaactgcgggaatggaaggcgaggcagcggcggccgaggcggtggcgcggatacggctggtgcggtgccccaagtgcgacaagttcttgccagagctgcccgcctactccgtctacgtctgcggcggatgcggcgccactctccaagcaaagaagaagaattcagcccaatcttcagatgatgctgacaatggaaatgtgaaataccttgaagtactggagtgtattccacaggcatctgcaagaaaacatggagctagtactactgataagtcagaaaccagtaagattgcagatgtacatagcaaaccagtttatggcaatcatgataggattcagacagggccaagtccctcaaatctgaacacttctattagagatgatggcaaggaggcaaagtaccgacacattcgttattgcgagaatggtgaaatggggcaatcattgagagtaagagacatgtccccgaagtctccaatcaatcacatttcagacaataatcggagtgagtaccacttgaagcagaggtacagctattctactaaggaatgccctggtgaaagaaacttggatggtccaagcaaagtcaggggacttgagaaagaccgcgctgagatcttgaggatgcttgatgagttgagagaccaggtacagcaatcttgcaatgcgactaatggggcaagtggaattgccccatctactgcagcagcagattccaacagttcacatggtacttctgaccggttgagtcaattgaggcaggttgcaccacaattgcatcagaatggttcacatcactccccatccttgaatgttggaagtcctagcgtttctcgtgtttatgctccgctgcctgcacaacaagattgtgtcagatatgcagagcctatttcacatgctcgagcctctagctatcctgccagcctctatccatggagaaattttgataattatttctttggacagcatgatcccgatcctcttctctcttgccgccatgatggcttctatcaccaagctgcctgttcttgcttgcactgttgccaccaagaattcttgcctatacagggaaatcacataggcttccatgatcaaagggcaccatatcttctgaacaattatggggcttatcctgtggacagtcccttacttggtcagcaaagatacagtgcaagagttaccaatactaccttgcagcagaatcacatgagggtcaacgttagcaagaaggctgcacagacttgtgagccagtcgcaggtggtgctccattcaccatatgctgcaattgctacgaagttctacagataccaaggaaacagtccctgtcagggaacgagtataaattgcgttgtggatcatgctcacatgcaattatagtcaagcttgatggaaacaggctcaatgtatcagaatttgcactatgtacacgtttatctgatggacaggaaaatgacatgggaaccgatgggcaaactcaagacaataggtccattccagcttaccatttatctgttggaagtcctgcatctcaagaacgagatctgcactcaaatttgagcgagtcagagaacaatcatacccctctaggaactgactcagagggcacttccctgtccagggatcttcctgctgaagacagtgcagtttcccatgtaccaaatttaccacatcacagtcattctggatcatctccaactgaacattttggagtgggaagtagaagtacccattctgaacctgaaaaagttatactattaactgaaagttccaagcagacctcagttagaggtatatgtgtaacaaacaagatgcaatctccaaacaatgagtttgatgttcctgaatacacagatgatacattaaatgaccaacaagatactgaccaccctagaacaacaaaggccagtgattcctttctcactaatctgataaaaaggagcttcaaaattaataatggattgcgcaacagaagagcaagggtttatgtaaatggctttcctatctctgatcatgtggtccgaaaggctgagaagctagcaggatcaatctgccctggcaattattggtatgactaccatgctggcttctggggcgttatgggacatccctgccttggcatgataccgccttatattcctgagttcaatttccccatgcccaagaactgtgctggtggaaacaccagcatatttgttaatggaagagagcttcaccagaaggatttggatttacttgtcactagaggactctctgattcccctggtagatcttatgtagttgaaaattctggaaaggtttcagatgaagtatctggtgaagagctttatggccttggaaagcttgcaccaacttgagaaaatggggcggggatttggcatgcgcatcccaaggttcatcaagcgacaggccaacttggtacagctagacttctaaaccttgaaggcaaatcgatggggcgtggatttggcatgcgcatcccaaggttcatcaagcgacaggccaattcgatctaccgtggttacttcaattgtgaagaaagttccattccatgtatctttctttttttattatattccgattaacatgaggcctagtttagtcaatcaagtttattgtaatttcccatgcatttgtttttactgaaaaattccctttttcatttacatgtgcaagaacaatgaagcaattacctagttgaatggcatgaattgtatcaaataagggtcggtttgctttatattaaagccagctattcggactgttgcaactgcaatctatagagacaaaacattgtagaagtagaagtccgtatagattaaaaccaaacgaacatgctgtaagctaaaagggaagtaatagctatgttatcccatgttgagttagttaggtcatcattattaatatccttggtagctattgtcaataaaatttagggatggtagaaacaagatcaaaagattctttgaactttcac

SEQ ID NO: 198864 - DNA, 3147 bp, Zea Mays
cagcggttcagctccttcacatactgacgtacacatctcctcgccgaggttgctccgtccggtggccagaccgtggttcttggcgctcttggttggtcggggtccttggcaaccggacgtctggtgttcctgtttcgaccttgaacttcttgggggtggggttttgggggcgtcacctccctgtttgtttcttgggttgatgtggcggcggcgcttcctgtgaccggaggggccaaggaggtgggactttttcggtgaagggaaaactgcgggaatggaaggcgaggcagcggcggccgaggcggtggcgcggatacggctggtgcggtgccccaagtgcgacaagttcttgccagagctgcccgcctactccgtctacgtctgcggcggatgcggcgccactctccaagcaaagaagaagaattcagcccaatcttcagatgatgctgacaatggaaatgtgaaataccttgaagtactggagtgtattccacaggcatctgcaagaaaacatggagctagtactactgataagtcagaaaccagtaagattgcagatgtacatagcaaaccagtttatggcaatcatgataggattcagacagggccaagtccctcaaatctgaacacttctattagagatgatggcaaggaggcaaagtaccgacacattcgttattgcgagaatggtgaaatggggcaatcattgagagtaagagacatgtccccgaagtctccaatcaatcacatttcagacaataatcggagtgagtaccacttgaagcagaggtacagctattctactaaggaatgccctggtgaaagaaacttggatggtccaagcaaagtcaggggacttgagaaagaccgcgctgagatcttgaggatgcttgatgagttgagagaccaggtacagcaatcttgcaatgcgactaatggggcaagtggaattgccccatctactgcagcagcagattccaacagttcacatggtacttctgaccggttgagtcaattgaggcaggttgcaccacaattgcatcagaatggttcacatcactccccatccttgaatgttggaagtcctagcgtttctcgtgtttatgctccgctgcctgcacaacaagattgtgtcagatatgcagagcctatttcacatgctcgagcctctagctatcctgccagcctctatccatggagaaattttgataattatttctttggacagcatgatcccgatcctcttctctcttgccgccatgatggcttctatcaccaagctgcctgttcttgcttgcactgttgccaccaagaattcttgcctatacagggaaatcacataggcttccatgatcaaagggcaccatatcttctgaacaattatggggcttatcctgtggacagtcccttacttggtcagcaaagatacagtgcaagagttaccaatactaccttgcagcagaatcacatgagggtcaacgttagcaagaaggctgcacagacttgtgagccagtcgcaggtggtgctccattcaccatatgctgcaattgctacgaagttctacagataccaaggaaacagtccctgtcagggaacgagtataaattgcgttgtggatcatgctcacatgcaattatagtcaagcttgatggaaacaggctcaatgtatcagaatttgcactatgtacacgtttatctgatggacaggaaaatgacatgggaaccgatgggcaaactcaagacaataggtccattccagcttaccatttatctgttggaagtcctgcatctcaagaacgagatctgcactcaaatttgagcgagtcagagaacaatcatacccctctaggaactgactcagagggcacttccctgtccagggatcttcctgctgaagacagtgcagtttcccatgtaccaaatttaccacatcacagtcattctggatcatctccaactgaacattttggagtgggaagtagaagtacccattctgaacctgaaaaagttatactattaactgaaagttccaagcagacctcagttagaggtatatgtgtaacaaacaagatgcaatctccaaacaatgagtttgatgttcctgaatacacagatgatacattaaatgaccaacaagatactgaccaccctagaacaacaaaggccagtgattcctttctcactaatctgataaaaaggagcttcaaaattaataatggattgcgcaacagaagagcaagggtttatgtaaatggctttcctatctctgatcatgtggtccgaaaggctgagaagctagcaggatcaatctgccctggcaattattggtatgactaccatgctggcttctggggcgttatgggacatccctgccttggcatgataccgccttatattcctgagttcaatttccccatgcccaagaactgtgctggtggaaacaccagcatatttgttaatggaagagagcttcaccagaaggatttggatttacttgtcactagaggactctctgattcccctggtagatcttatgtagttgaaaattctggaaaggtttcagatgaagtatctggtgaagagctttatggccttggaaagcttgcaccaacagttgagaaaatggggcggggatttggcatgcgcatcccaaggttcatcaagcgacaggccaattcgatctaccgtggttacttcaattgtgaagaaagttccattccatgtatctttctttttttattatattccgattaacatgaggcctagtttagtcaatcaagtttattgtaatttcccatgcatttgtttttactgaaaaattccctttttcatttacatgtgcaagaacaatgaagcaattacctagttgaatggcatgaattgtatcaaataagggtcggtttgctttatattaaagccagctattcggactgttgcaactgcaatctatagagacaaaacattgtagaagtagaagtccgtatagattaaaaccaaacgaacatgctgtaagctaaaagggaagtaatagctatgttatcccatgttgagttagttaggtcatcattattaatatccttggtagctattgtcaataaaatttagggatggtagaaacaagatcaaaagattctttgaactttcac

SEQ ID NO: 198865 - DNA, 1930 bp, Zea Mays
ctactggtaaaggtcccgacgacgcggtatcgccgtatacccgcctcaagtacaaagggaaagctgcgactcgctcggaagtggggtactgtacttcccgctcgctcgctctctgctctggtccttcacgctctaaccttcagttgaggttctctaatcgggcccgctaaagtcgagagacaggttttcgcgaacatttgcatctagccatctctactcaactgaattcttgtgctcttgtggcattcacaaagtccattttcagactgagctagttcagctgtcatttttttttcagccaaaggtcgcgttcttttggacctgctcttgattcgttcgttcgttcgtttggattgattgattgattgattcctttcgacttcccttcaccacccccctgctccgtcaagcgtgcctctgttcttctgccattgctggatcgcgtttgtctgtttgttgggttgctggcgctgcggccatggatcccttccacggcattgtgaaggaggagttcgacttggacttcgacttcacctgcgcgtctgcggcggcggcggcggcggcctcgtgggccgtcgccttgccggagatgccccggccgatggaaggactcggcgaggtgggacccactccgttcctgaccaagacatacgacgtcgtggacgaccccaacaccgacaccatcgtctcttgggggttcgccggaaccagcttcgtcgtctgggacgccaacgccttcgccttggtgatcctcccacgctacttcaagcacagcaacttctccagcttcgtccgccagctcaacacctacgtgagggttcaggaaggttgacccggacaggtgggagttcgcgaacgaggggttccagcgtggccagagggagctcctcaggacgatcaagcgccggcgcccgccgtcgagcccgtcggcgcagcaggggcaggcgccgtcggcctgcctggaggtggggcagttcgggctcgacggcgaggtgcaccggctgcagcgcgacagggggatcctgctcgcggaggtggtgaagctgcggcaggagcagcaggcgacgcgcgcgcagatgcaggccatggagaagcgcatcaccacggcggagcagaagcagcagcagatgacggtgttcctcgcgcgtgccatgaagaacccgagcttcatccggatgctggtcgaccgggagggccttggcggctgccgcagggagctcgaggacgcgctctccagaaagcgccgccgccccatcgagtacctcccgcgcgacggcgagagaagcggcactgccacggagtcggcggtgagcgactacatttccggacttccggtcggcgtcaacggcgtggcggaggcggacgacgacgagagacggtgggagagaaggggcggcggcggcggcggcgaggacacggagagcttctgggcgaagttgctcaacctcggcctggaggagaagcacagggagggcagatgcgatggcgaggaggggaacggagctgacgtggacaacgacgtggacgacgacgtggatgtgctggtgcagagcatctaccacttgaacccgaacccgggtagccccggtggcaagtgaaagttccagaacgttccacattccagaacccactatggtctatggaagtggaagctcccagtgggcatcgcaattagtcgtaggcgatagttttttatccggcgcctgacttcttgtcgcggggctatgcaagttgcaaaagtgcttgcgtttggccggttgccaaggaatgttcgggatgctcgtcgaactacgaagcttctagaagatggagcagcgaggctgcagcctactctccgactacggggtttacagctacggctacaatcaggatgaaacaaaggcacttctcaaatgtgtacctgacgtgtcattcttattcttctgggcgg

SEQ ID NO: 198866 - DNA, 1974 bp, Zea Mays
cttgcctactggtaaaggtcccgacgacgcggtatcgccgtatacccgcctcaagtacaaagggaaagctgcgactcgctcggaagtgggaaccttcagttgaggttctctaatcgggcccgctaaagtcgagagacaggttttcgcgaacatttgcatctagccatctctactcaactgaattcttgtgctcttgtggcattcacaaagtccattttcagactgagctagttcagctgtcatttttttttcagccaaaggtcgcgttcttttggacctgctcttgattcgttcgttcgttcgtttggattgattgattgattgattcctttcgacttcccttcaccacccccctgctccgtcaagcgtgcctctgttcttctgccattgctggatcgcgtttgtctgtttgttgggttgctggcgctgcggccatggatcccttccacggcattgtgaaggaggagttcgacttggacttcgacttcacctgcgcgtctgcggcggcggcggcggcggcctcgtgggccgtcgccttgccggagatgccccggccgatggaaggactcggcgaggtgggacccactccgttcctgaccaagacatacgacgtcgtggacgaccccaacaccgacaccatcgtctcttgggggttcgccggaaccagcttcgtcgtctgggacgccaacgccttcgccttggtgatcctcccacgctacttcaagcacagcaacttctccagcttcgtccgccagctcaacacctacgggttcaggaaggttgacccggacaggtgggagttcgcgaacgaggggttccagcgtggccagagggagctcctcaggacgatcaagcgccggcgcccgccgtcgagcccgtcggcgcagcaggggcaggcgccgtcggcctgcctggaggtggggcagttcgggctcgacggcgaggtgcaccggctgcagcgcgacagggggatcctgctcgcggaggtggtgaagctgcggcaggagcagcaggcgacgcgcgcgcagatgcaggccatggagaagcgcatcaccacggcggagcagaagcagcagcagatgacggtgttcctcgcgcgtgccatgaagaacccgagcttcatccggatgctggtcgaccgggagggccttggcggctgccgcagggagctcgaggacgcgctctccagaaagcgccgccgccccatcgagtacctcccgcgcgacggcgagagaagcggcactgccacggagtcggcggtgagcgactacatttccggacttccggtcggcgtcaacggcgtggcggaggcggacgacgacgagagacggtgggagagaaggggcggcggcggcggcggcgaggacacggagagcttctgggcgaagttgctcaacctcggcctggaggagaagcacagggagggcagatgcgatggcgaggaggggaacggagctgacgtggacaacgacgtggacgacgacgtggatgtgctggtgcagagcatctaccacttgaacccgaacccgggtagccccggtggcaagtgaaagttccagaacgttccacattccagaacccactatggtctatggaagtggaagctcccagtgggcatcgcaattagtcgtaggcgatagttttttatccggcgcctgacttcttgtcgcggggctatgcaagttgcaaaagtgcttgcgtttggccggttgccaaggaatgttcgggatgctcgtcgaactacgaagcttctagaagatggagcagcgaggctgcagcctactcgtatattactatcagggagcaggcgagcagcaaggctgcagcctactcgtatatttactatcaatggcgcgggcttcttcgctgcggtttagtccgactacggggtttacagctacggctacaatcaggatgaaacaaaggcacttctcaaatgtgtacctgacgtgtcattcttattcttctgggcgg

SEQ ID NO: 198867 - DNA, 751 bp, Zea Mays
cttgtactaggtggcctaggggacttggctctgcctgtcctttcggttctatttttcctacttataagtgttgtttcataccttaacggttaccccagcccagacaaatggcaacaaacagtccgagctccttgttgatttgataagcacaaagtggagttgttcttttcacaatgtcaaagcagttttagactttgcagacatcaagcgttttgtaacgggatatcgaagatgaacaataaagcacagatgtttgtgtaatcatttggagacatgttttgtttccttcttacttaaggacctcccccaattgaaaaaaacgagatcagtctgggctggcttgggcagaaagcgaacaacacatgcagttgccccctttgcagagctcatcgcttggagttaaagcctgctggtggcaacaatatgtctcagagttaatcataaattcatattcgttaaaaaaatgtatcctctaggcatgcgaggtagtaatatgtttgtttggcagagccaagctgcgcatccaactgctcaagaaagctcgacggcagtagacgagagagagtgctgtggcagttgggctttcaggagactgtagctcgtatgtatctggccactagttttctggccgagttgggtggtgattgtgatttaattaaagtggaagcttttgtgcctgccttccaaaattattccgccgtccacacgccaccttgcgtgtttcattattgatggcgtggtccagttttct

SEQ ID NO: 198868 - DNA, 974 bp, Zea Mays
aaacgccggccggtttgattgctgagctaataggggaatcgtcgtcgtcggggtggaagaggcgtaactaaaactttagaaaggtatcaacattgctgctacaatgctcaagattccaacaatggtgcactctctgaatctcagagctggtaccaggaaatatcaaaactgagggcaaaattcgaggccttgcagcgcactcagagacacttgcttggggaggaccttggcccactgagtgtgaaggaattgcagcagctagagaaacagctagaatgtgctttgtcacaggcaagacagagaaagacgcaacttatgatggagcaagtggaagagcttcgcagaacggagcgtcacctgggagaaatgaacaggcaactcaaacacaagctcgaagctgaaggctgtagcaactacacaaccttgcagcatgccgcctgctggccagctcccggcggcaccatcgtggagcatgacggcgccacctatcaagtgcatccgcctgcccactcagttgctatggactgtgaacccactctgcaaatcgggtaccctcatcaccagtttccgccccctgaggcagccaataatatcccaaggagcgctgccacaggcgagaacaacttcatgctgggatgggttctttgagttcttctgttaatccatccatcagatggatccatgttgaaaccaataaaaggcattcagtgctatatatatcatatgcatatccgtgctcaagtgcttgatttgccacgacgttggattgtatcgttctgtgtgtaatagctaatttagaacggcacatctattctatgtggttgtggtgtggcacttatactgtttattcatttggaccatgaatcggggtagtttgtaaaaacacatctatatatgctgccggtgcatagaattcaaagttatctgcaccgtaattattatatgctccatttgtcccttctggcctaggcgcc

SEQ ID NO: 198869 - DNA, 362 bp, Zea Mays
ccgatgtggtcctccgagaggggaaagggtgcgtaactaaaactttagaaaggtatcaacattgctgctacaatgctcaagattccaacaatggtgcactctctgaatctcagagctggtaccaggaaatatcaaaactgagggcaaaattcgaggccttgcagcgcactcagagacacttgcttggggaggaccttggcccactgagtgtgaaggaattgcagcagctagagaaacagctagaatgtgctttgtcacaggcaagacagagaaagacgcaacttatgatggagcaagtggaagagcttcgcagaacgattcagccgttcaccttaatgtctaaagtattcgccacattctca

SEQ ID NO: 198870 - DNA, 936 bp, Zea Mays
aaaatctttctgtttcacgcaccccgtaactaaaactttagaaaggtatcaacattgctgctacaatgctcaagattccaacaatggtgcactctctgaatctcagagctggtaccaggaaatatcaaaactgagggcaaaattcgaggccttgcagcgcactcagagacacttgcttggggaggaccttggcccactgagtgtgaaggaattgcagcagctagagaaacagctagaatgtgctttgtcacaggcaagacagagaaagacgcaacttatgatggagcaagtggaagagcttcgcagaacggagcgtcacctgggagaaatgaacaggcaactcaaacacaagctcgaagctgaaggctgtagcaactacacaaccttgcagcatgccgcctgctggccagctcccggcggcaccatcgtggagcatgacggcgccacctatcaagtgcatccgcctgcccactcagttgctatggactgtgaacccactctgcaaatcgggtaccctcatcaccagtttccgccccctgaggcagccaataatatcccaaggagcgctgccacaggcgagaacaacttcatgctgggatgggttctttgagttcttctgttaatccatccatcagatggatccatgttgaaaccaataaaaggcattcagtgctatatatatcatatgcatatccgtgctcaagtgcttgatttgccacgacgttggattgtatcgttctgtgtgtaatagctaatttagaacggcacatctattctatgtggttgtggtgtggcacttatactgtttattcatttggaccatgaatcggggtagtttgtaaaaacacatctatatatgctgccggtgcatagaattcaaagttatctgcaccgtaattattatatgctccatttgtcccttctggcctaggcgcc

SEQ ID NO: 198871 - DNA, 2435 bp, Zea Mays
aggaatctgttgttctcctgttccatttctcggtgcagtattagttgcagaacaggaatccacttgatttgtcagtttaattatgcttgtgtcacctcagatgtgtcatattgattatgactgcatttttgtcagctgtaatatgcgtgttggcttgcatttgtttctctctttattagtactaccagcattttcggtcagtattttttgtcttccttgctgaagaatgagaaggaaagctgtcatactcctcgtcgggatagcttcatttattaaggcagctgggcgacagaatatatgggaatgtacttgaacttcacaaaaaagggccttttcatcccttgccgtgtcttccatgttggtaaaaaggctagtagctgaattgaatagatgcatttgacttgaagcccccgaaaaaatcaccgatcgcgttgagaacggttgtcttcgctatgactatgttatgcgggatatctatttgctcaatgtgcatgaagcaactagggagtgatggctggtcaagagttgtcaagattgaagttgtggaacaaccatgtaataagtccattgctcctctttcggaggctcaatttgtgcgctatcctcaaccgataacttacagcagggaggaatgcaagtgcaatgctgtccggtcctttgcaattatatcatcgcagcgatctggaagtggctggtttgaaacacttcttaacagccacatgaatgttagctccaatggtgaaattttctctagaaaagaaaggaggagtaacatttcctctataatagataccctggataaagtgtacaatttggactggaacagtagcgcttccaagaatgagtgcactgcagctattggcttcaagtggatgctaaatcagggcctcgtggcaaaccatgcggacgtagtcgactacttcaaccgaagaggagtctctgcgatatttcttttcagaaggaacctgctccgccagttggtatcacaggtagcgaacaaccacgacaggttacttaagcaactaaacggaacgcacaaggcccatgtccacacgaagcgtgaggcccatatactggcaagatacaggcccaggctcaacacgacgtcactgatatggcagctgaaacgagctgacgagtacactcgcgacgctcttgagaacctaaacaacacccggcacatgagcgtctactacgaggacgtcgtccgcaacagaacaaagctcttggatgtcctggatttcctcggagtgccgaggaggaagctggtgagccggcacgtgaagatacacacgaagccgctgtcggagcagatcgagaactgggacgaggtctacagcgccctcaacggtacccagtacgagggcttcctgaatgccgctgactatctagtataacatcacgtttctggatgtagatagtgtgcgtgtgattctttcgtttcttgtttgtttctggcagaaattttgatgcggggtaggcgccttttgccgtgcatggttgcattctcggtaacctgatgctcctgtaactaaccctccagcttctctgatctttgtatttgccttgggtgtttgctgatgttctttcaaactatttgaaatcgggctgtcggagttccagatcccgggcggcaggatagttgatgtgacctagataaatgtacaagacacatcacaaatatataaaatatttctgtagtatcctcacaaatatatcaaaaatatttctgtagctcttattacatgatactctactatgcaaccaacagaagcaatatctcctcagggagcttttgctttattgccaaattaaattaagaaatgttctatgggactactacaacggaaaataagactacaagatcacctcagggagcttttgctaactacctgcaatatcaaggtgcagcagttagtcaaattgcacaacagttgtaaaaggaaaaaatacaacttaattaggcctagctgaatatgcgaccatattacagtttgataatagcaccttatactggttagctcctactgccagctagtaaaagaatcaatttgagttgagatatattcggtgttttgagtcttacaaggtctagatttcttatgcgagctccagaacaagagctgatgctccgcctccaccgttgcagacaccagcaactccgatcttgccactcttcgccctgagaacctgttaacaagaaacaatgattaggagggtcaagcacaatatattttgatgtcccaacatgatggcactatattgtgcccaacgttttgcttaaagaaaatgaagagaaaaagaaactattgatcaccagcaacaagtgaaacaagggatgagccgatatcaatgtgaaactctacatttgcagctttatacaagattctatttgcagataatttgcacattggaaatcactaagggcttgttcg

SEQ ID NO: 198872 - DNA, 2383 bp, Zea Mays
atacacactgacacacctcacgcgagccgagacgcccagctcaccgccccaccgagtcccacagtctcagaggccacctcgagccccccctgccccgcaagccgcacccgccgctccctccgccatctgcgctgcgctgctctgctctgcggtgccaggctgccagccagtgccggcgcgcgcccgctgccgccccgacgggcccaccgttctcttctctccgcgctgcgcgccggctgggctgcaggtcagttaatgcgcccgtgacaggcggcgtcggggaggccaagggcggtgccgggttaatcccgccgtctctcgaggcggcgcccgcggaggaccaggcgggagggggagacggtgaggcgcggccatggggggcgccaaggcggaggacaaacccgccgccgccgctgcagaagattggtgctaccaatttggaaacaaggatgcatttgacttgaagcccccgaaaaaatcaccgatcgcgttgagaacggttgtcttcgctatgactatgttatgcgggatatctatttgctcaatgtgcatgaagcaactagggagtgatggctggtcaagagttgtcaagattgaagttgtggaacaaccatgtaataagtccattgctcctctttcggaggctcaatttgtgcgctatcctcaaccgataacttacagcagggaggaatgcaagtgcaatgctgtccggtcctttgcaattatatcatcgcagcgatctggaagtggctggtttgaaacacttcttaacagccacatgaatgttagctccaatggtgaaattttctctagaaaagaaaggaggagtaacatttcctctataatagataccctggataaagtgtacaatttggactggaacagtagcgcttccaagaatgagtgcactgcagctattggcttcaagtggatgctaaatcagggcctcgtggcaaaccatgcggacgtagtcgactacttcaaccgaagaggagtctctgcgatatttcttttcagaaggaacctgctccgccagttggtatcacaggtagcgaacaaccacgacaggttacttaagcaactaaacggaacgcacaaggcccatgtccacacgaagcgtgaggcccatatactggcaagatacaggcccaggctcaacacgacgtcactgatatggcagctgaaacgagctgacgagtacactcgcgacgctcttgagaacctaaacaacacccggcacatgagcgtctactacgaggacgtcgtccgcaacagaacaaagctcttggatgtcctggatttcctcggagtgccgaggaggaagctggtgagccggcacgtgaagatacacacgaagccgctgtcggagcagatcgagaactgggacgaggtctacagcgccctcaacgaaattttgatgcggggtaggcgccttttgccgtgcatggttgcattctcggtaacctgatgctcctgtaactaaccctccagcttctctgatctttgtatttgccttgggtgtttgctgatgttctttcaaactatttgaaatcgggctgtcggagttccagatcccgggcggcaggatagttgatgtgacctagataaatgtacaagacacatcacaaatatataaaatatttctgtagtatcctcacaaatatatcaaaaatatttctgtagctcttattacatgatactctactatgcaaccaacagaagcaatatctcctcagggagcttttgctttattgccaaattaaattaagaaatgttctatgggactactacaacggaaaataagactacaagatcacctcagggagcttttgctaactacctgcaatatcaaggtgcagcagttagtcaaattgcacaacagttgtaaaaggaaaaaatacaacttaattaggcctagctgaatatgcgaccatattacagtttgataatagcaccttatactggttagctcctactgccagctagtaaaagaatcaatttgagttgagatatattcggtgttttgagtcttacaaggtctagatttcttatgcgagctccagaacaagagctgatgctccgcctccaccgttgcagacaccagcaactccgatcttgccactcttcgccctgagaacctgttaacaagaaacaatgattaggagggtcaagcacaatatattttgatgtcccaacatgatggcactatattgtgcccaacgttttgcttaaagaaaatgaagagaaaaagaaactattgatcaccagcaacaagtgaaacaagggatgagccgatatcaatgtgaaactctacatttgcagctttatacaagattctatttgcagataatttgcacattggaaatcactaagggcttgttcg

SEQ ID NO: 198873 - DNA, 2273 bp, Zea Mays
actccgccccaccactggtcaacgaatctttcctgcactgtcctgtccgccgccgctcaacctcatcggaactccactcctcctcacccccacagcaactcccacctcatggagaaagctgcgcacgttgccgccggcgcgacgcaagagcaggaatcgtctccgaacaggttgtagcccccctctgcttcctccgcctgcgctgttaaatactgcgtctgttcatgcggtagctgtacatgacaggagtggttgaagaatcgacgagcagaacaagcctgttccagccccgtgttcgacgcctcactctttttagtcttactattgtgcattgctagtagtatacgtagctacgtgcgaaagaaagaaagaaagaaaggtctttctatgatctgaaacaatggtcaaccaaaagcagctttatagcaatctgcggtgccgattcagctgtatatctcttaatgaaaacgatgcattttgagtcgcatctttttttctttctttcgaaaagcaaccggcaagaattagctggtcatttattaataaagaagaagcgaatacacagactgagactaagaaccaaccccaagagcaaaatttgagtcacatccttgtttcctgaaacaaaaccttttttagatgatggagaaaccagagagaaggatacatgtaacattgtggcaattttggggctagtagcagatctaggatttattttagggtatgctgttcaaaatttttcatacagaatttggtagatttattttagcaattctgtaacaactgtagaaattgcaccaagattcgttatagatgcactaagggactgtttggttcgtaactaactgtgacactttgactaggttaggcaaagtatggcaagctaggcagcgaactaaatagaccctaagtaaaacggtaaggcctaagttcaaggattaagttaaaatcatccactaaatacaaatatgaaaagttgaatttagagacttacattgttgtttttactgttttatttgatgcttttgaagggacatgattgtcttgcttattctccattctccagcctctagtttttttattttttgccgcttcattgatctgatgcagtaacaagaatcatgttcaaccacaggcttgacgacgcagcgaggcatcatggctctgctgaagcgattcctgaaagacttgcggtggtcacaggaggaaacaaaggagttggcctagaagtatgccgccagcttgctctcaagggtgtgacagttatccttacagcaagggatgagaaacgaggaaaagatgctgccgagacccttcgccgtgaatgccaactcccaaatatcatattccatcagctcgatgtcagagatgatgatagtgccaccacattggcccggtatgtagaaagaagatatgggaagctcgacatcttggtgaacaatgcagctatttcaggaattgtagcagatgaggaaggcctgaaagctcttaacattgatgcagagacatggacatctggcagggcagctaatcttctgaaagaagtattccagaataccaatgatgaggcattcaactgtctgaataccaattactatggatgcaaacgggtaacagaagctcttcttccacttctgaagctatctacatcaggaggagcaaggattgtcaatgcctcctcacttgcgtcggagctgaagagaatgccaaatgagaagctgcgaaacgatttgagcaacattgacatctgggacgaggaccggatagaagcagtgctcgacacattcttggaggacctgaggagcgggcggctggaagaggctgggtggcccgtgatgctaccagcctacagcgtatcgaaaatggtcatcaatctgtacaccaggatcatggcaaggaggtatccggagatgcgcatcaactgtgtgcgacctggctttgtcaagacggacatcaactggaatctgggggtcctgacgcctgaacaaggtgcgagagggccagtcatgctagctctcctccccgatgatggaccaactgggtgctattttgatcagacagaaatggtgaacgtctggtgattgaatatttgtcgtctgctagtttattttagaactaaaccgctagaaataaaaaagagcggatggagtgttataactttcctgaattcatgatgacataaacacatacacatggtaaaacgttcttatgatcagttggtgtagtttccatatgtcactttgaatgatttgttgttctttgttggtgttgag

SEQ ID NO: 198874 - DNA, 597 bp, Zea Mays
agttcgatcagttgacgcgcgtgttgtctgaactctgaagcgaatcgcttaaactgcagcactagtccgtaaagcaggcggaggcacggcacgaggcaacggcgccgacgcgaacgtgccggagaacgacgtgaagaggatgcgcgtgcagtcgtcgtagtaggtcttctactaccgtccactccaccacccccccgttaaccctactagtagtaagtactacgaagacgaaccggtgccccatctagcggcgcccgatttttgtgcgttacgttctgcctaaaagtgctttccgtcgacggacggacctcctggtgttgagatggtagcggtagcactgcctcgcggcgatggtgtgtgtcgtgacgtgattcacctcttagagtagagaggtggctagcccagtcgacctgtgttgtgtgtgttgttaagatgtgtcctggatcttttgtgacattgcatggagggtacaataagcgcttcgtttctcgtttcttcccacttgttgcatgatagccaactgaaaccaagtactccgtgagacgaaagcaacgagcacacaaagactattttgcctatcttcatcatcaatcttcg

SEQ ID NO: 198875 - DNA, 713 bp, Zea Mays
cgcgcgcgagctctcagtgtctatgtcttcccccgccccttgaacacgcctgtgctgatcgatgccctgagctcagacggttctgcctgcaagaagctggagtcatccacggcagccccattcgcagccaaagtttgggtgtcgccgtcagaacgatacgccatagtccctgacgagaacgtccgtaaagcaggcggaggcacggcacgaggcaacggcgccgacgcgaacgtgccggagaacgacgtgaagaggatgcgcgtgcagtcgtcgtagtaggtcttctactaccgtccactccaccacccccccgttaaccctactagtagtaagtactacgaagacgaaccggtgccccatctagcggcgcccgatttttgtgcgttacgttctgcctaaaagtgctttccgtcgacggacggacctcctggtgttgagatggtagcggtagcactgcctcgcggcgatggtgtgtgtcgtgacgtgattcacctcttagagtagagaggtggctagcccagtcgacctgtgttgtgtgtgttgttaagatgtgtcctggatcttttgtgacattgcatggagggtacaataagcgcttcgtttctcgtttcttcccacttgttgcatgatagccaactgaaaccaagtactccgtgagacgaaagcaacgagcacacaaagactattttgcctatcttcatcatcaatcttcg

SEQ ID NO: 198876 - DNA, 956 bp, Zea Mays
aataaatcagcgtgtcctcagatttcaggcggctggaggcatacgatggcacttacatcagagggaaagctttacggatggggatggaacaagttcggacaagtcggagtcggcaacaacgacgaccacagctcccccggacaagtcagttttccagaggatcagaaaatctcccaggttgcatgcggatggaggcatactctggccctctccgagaagaaaaatgtcttctcctgggggaggggcactagcggacagctcggcaacggtgaaatagtcgacaggaacacgcctgtgctgatcgatgccctgagctcagacggttctgcctgcaagaagctggagtcatccacggcagccccattcgcagccaaagtttgggtgtcgccgtcagaacgatacgccatagtccctgacgagaacgtccgtaaagcaggcggaggcacggcacgaggcaacggcgccgacgcgaacgtgccggagaacgacgtgaagaggatgcgcgtgcagtcgtcgtagtaggtcttctactaccgtccactccaccacccccccgttaaccctactagtagtaagtactacgaagacgaaccggtgccccatctagcggcgcccgatttttgtgcgttacgttctgcctaaaagtgctttccgtcgacggacggacctcctggtgttgagatggtagcggtagcactgcctcgcggcgatggtgtgtgtcgtgacgtgattcacctcttagagtagagaggtggctagcccagtcgacctgtgttgtgtgtgttgttaagatgtgtcctggatcttttgtgacattgcatggagggtacaataagcgcttcgtttctcgtttcttcccacttgttgcatgatagccaactgaaaccaagtactccgtgagacgaaagcaacgagcacacaaagactattttgcctatcttcatcatcaatcttcg

SEQ ID NO: 198877 - DNA, 2281 bp, Zea Mays
tgcgctcctcctgccgcccctccagacgcccggacccgtcccgccacctacacaatgacagcaggccccgcagagacgcggccccgcgagtaaggggagcactctggccgccgtcgacgtcgtcgtcgtccacctctccccgctcctccttaatgacgtgctaatcagcgagcttaacccactggctcgggcgagcgccagtgcctttgctagcgcacaggcacagcggcgcacggcgcgggcggggcggcattcgcgtgcgtctcgccgtctcgtcacatggtggtgagggtgggccggtggggcttgtacgctagccattaatacggcaggtcgcccatcccatcccatcgcggccgccgcgcccgccggtctccacccctccccccaccccctgcttaaaatcccgcgtcccggtcgcgcaccccactccgcctccgctccccgctcgccgccgcgattgctggattggctgccgccagcgccccggtgctagctcccgttcctcgcggtggtcactggactagcctggacgccgcggcccgccgcctggtcgaagagatggactcggtcatggccgcccccgactcgccgccgcagactgtcgtgctcgtctctgccggcgccagccactccgtcgcgctcctcacgggcaatgtcctgtgctcgtggggcaggggcgaggacgggcagctcggccacggcgacgcggaggaccggctcgtgcccacggtgcttagcggcttcgacgcgcccgcgatcacgtccgtcatctgcggcgccgaccacaccaccgcctactccgaggacgagctgcaggtctacagctggggctggggagactttgggaggctggggcacggcaactccagcgacgtcttcacgccccagcctgtcaaggcgctgcaggggctcaagatcaaacagattgcctgcggggacagccattgtcttgccgtcaccatggccggagaagtgcagagttggggccgtaaccaaaacggacagctaggccttggaaccactgaagactcgctgctcccacaaaagattcaggcttttgagtaactgaagacggtgacctctacggatggggttggggtcgatatggaaacttaggtcttggtgaccgtaatgaccgtttgcttcctgaaaaagtatcttctgtggagggtgagaagatggtgcttgtggcatgtggatggcgccatacaattacggtttctgactctggtaatctgtacacttatggttggagcaaatatggtcagctagggcatggtgattttgaagatcatttagttccacataaagtagaagctttgaaagatagcactatatcccagatttcaggcggctggaggcatacgatggcacttacatcagagggaaagctttacggatggggatggaacaagttcggacaagtcggagtcggcaacaacgacgaccacagctcccccggacaagtcagttttccagaggatcagaaaatctcccaggttgcatgcggatggaggcatactctggccctctccgagaagaaaaatgtcttctcctgggggaggggcactagcggacagctcggcaacggtgaaatagtcgacaggaacacgcctgtgctgatcgatgccctgagctcagacggttctgcctgcaagaagctggagtcatccacggcagccccattcgcagccaaagtttgggtgtcgccgtcagaacgatacgccatagtccctgacgagaacgtccgtaaagcaggcggaggcacggcacgaggcaacggcgccgacgcgaacgtgccggagaacgacgtgaagaggatgcgcgtgcagtcgtcgtagtaggtcttctactaccgtccactccaccacccccccgttaaccctactagtagtaagtactacgaagacgaaccggtgccccatctagcggcgcccgatttttgtgcgttacgttctgcctaaaagtgctttccgtcgacggacggacctcctggtgttgagatggtagcggtagcactgcctcgcggcgatggtgtgtgtcgtgacgtgattcacctcttagagtagagaggtggctagcccagtcgacctgtgttgtgtgtgttgttaagatgtgtcctggatcttttgtgacattgcatggagggtacaataagcgcttcgtttctcgtttcttcccacttgttgcatgatagccaactgaaaccaagtactccgtgagacgaaagcaacgagcacacaaagactattttgcctatcttcatcatcaatcttcg

SEQ ID NO: 198878 - DNA, 366 bp, Zea Mays
atgtctgggatggcatttgatgattcacctgcccaagtgaatgttgaaggagatgtttcagagaaaaaagtagaagttcaagaccagaatgaagtgggtgggatgccctcacgacaagaggaggaggcagcaattaagaaaaagtatgaaggaatattgcccagaaagactcctgcttatatctaagattcttagctaagggctggcatgatgcatctgtcaacaagatcaccagttttccacgctgttgaatcgcagaatatcctgaaatcaaactactcacgcaagaaaaaaaattctggaaagtaaattgttctgcctgctggtgaagtttggttagaggagttgccataaaatccatagcgc

SEQ ID NO: 198879 - DNA, 635 bp, Zea Mays
atgtctgggatggcatttgatgattcacctgcccaagtgaatgttgaaggagatgtttcagagaaaaaagtagaagttcaagaccagaatgaagtgggtgggatgccctcacgacaagaggaggaggcagcaattaagaaaaagtatgaaggaatattgcccagaaagactcctgcttatatctaaggtatagcagacaaatacagaaaagggctggcctggttaaaaacggttcaggttagcaagcatcatggcccgtatccagaaggtagcttcacgtttgagagaaggtggcttcgaacgagacctgatcgtttccttcgtcctgggcgacttggctggctcttgctcaatgggagttgacaggacagatcacggctagccagtcaggttcgttgtgatgagatccagaagcaagcagcatggctcgatgtgatgagctgtacaagaggcgatgatgcgttatcatctcaggcagatttatatcggaggagatgaatcgcgttcgcgtggctcttctctcggttctgttttactgatgtaaattttagcttatttttaactagaggaacgatgtaagtttaaccagaccaataaaacaaccgtgtatgctctgcttccaatccagctattag

SEQ ID NO: 198880 - DNA, 771 bp, Zea Mays
atgtctgggatggcatttgatgattcacctgcccaagtgaatgttgaaggagatgtttcagagaaaaaagtagaagttcaagaccagaatgaagtgggtgggatgccctcacgacaagaggaggaggcagcaattaagaaaaagtatgaaggaatattgcccagaaagactcctgcttatatctaagcacaagtttactatgtctgggatggcatctgatgattcacctgcccaagtgaatgttgaaggagatgtttcggagaaaaaaagtagaagttcaagaccagaatgaagtgggtgggatgccctcaagacaagaggaggtatagcagacaaatacagaaaagggctggcctggttaaaaacggttcaggttagcaagcatcatggcccgtatccagaaggtagcttcacgtttgagagaaggtggcttcgaacgagacctgatcgtttccttcgtcctgggcgacttggctggctcttgctcaatgggagttgacaggacagatcacggctagccagtcaggttcgttgtgatgagatccagaagcaagcagcatggctcgatgtgatgagctgtacaagaggcgatgatgcgttatcatctcaggcagatttatatcggaggagatgaatcgcgttcgcgtggctcttctctcggttctgttttactgatgtaaattttagcttatttttaactagaggaacgatgtaagtttaaccagaccaataaaacaaccgtgtatgctctgcttccaatccagctattag

SEQ ID NO: 198881 - DNA, 1290 bp, Zea Mays
ccaccactccgttccatccctcgcctgccttcgcacgggtgcgccgcccgctcgacggccacgccacgccgcggcgcgccgctcagctgccccggcacccgcccttcctcgccgagctcgggatcgacgtctcccgcacctcctcgcgcccgttccgggctccgcatccggcccctccccgtccccaaccccattccgcagcaggcgaccagcacaacatcccgaatcccccacctcgcattcggctcgccgtagctcctcctccgcgtcccgccgcccccggcacggccactagctgggtatcaaaacattgggttgccaaacaagctaccttctcagattcagatcaatagcttctcaggtccaacaaggggaagggaacggtgctgataatgcaagtgctggccaaaaaaaatggcgctgtggagcatctgaaacgctgcttcccttggctcatatgaatgtcagtttaggccttaggatagagcaaagtagcataatctcaagcacaagtttactatgtctgggatggcatttgatgattcacctgcccaagtgaatgttgaaggagatgtttcagagaaaaaagtagaagttcaagaccagaatgaagtgggtgggatgccctcacgacaagaggaggaggcagcaattaagaaaaagtatgaaggaatattgcccagaaagactcctgcttatatctaagcacaagtttactatgtctgggatggcatctgatgattcacctgcccaagtgaatgttgaaggagatgtttcggagaaaaaaagtagaagttcaagaccagaatgaagtgggtgggatgccctcaagacaagaggaggtatagcagacaaatacagaaaagggctggcctggttaaaaacggttcaggttagcaagcatcatggcccgtatccagaaggtagcttcacgtttgagagaaggtggcttcgaacgagacctgatcgtttccttcgtcctgggcgacttggctggctcttgctcaatgggagttgacaggacagatcacggctagccagtcaggttcgttgtgatgagatccagaagcaagcagcatggctcgatgtgatgagctgtacaagaggcgatgatgcgttatcatctcaggcagatttatatcggaggagatgaatcgcgttcgcgtggctcttctctcggttctgttttactgatgtaaattttagcttatttttaactagaggaacgatgtaagtttaaccagaccaataaaacaaccgtgtatgctctgcttccaatccagctattag

SEQ ID NO: 198882 - DNA, 1070 bp, Zea Mays
ccaccactccgttccatccctcgcctgccttcgcacgggtgcgccgcccgctcgacggccacgccacgccgcggcgcgccgctcagctgccccggcacccgcccttcctcgccgagctcgggatcgacgtctcccgcacctcctcgcgcccgttccgggctccgcatccggcccctccccgtccccaaccccattccgcagcaggcgaccagcacaacatcccgaatcccccacctcgcattcggctcgccgtagctcctcctccgcgtcccgccgcccccggcacgcacaagtttactatgtctgggatggcatttgatgattcacctgcccaagtgaatgttgaaggagatgtttcagagaaaaaagtagaagttcaagaccagaatgaagtgggtgggatgccctcacgacaagaggaggaggcagcaattaagaaaaagtatgaaggaatattgcccagaaagactcctgcttatatctaagcacaagtttactatgtctgggatggcatctgatgattcacctgcccaagtgaatgttgaaggagatgtttcggagaaaaaaagtagaagttcaagaccagaatgaagtgggtgggatgccctcaagacaagaggaggtatagcagacaaatacagaaaagggctggcctggttaaaaacggttcaggttagcaagcatcatggcccgtatccagaaggtagcttcacgtttgagagaaggtggcttcgaacgagacctgatcgtttccttcgtcctgggcgacttggctggctcttgctcaatgggagttgacaggacagatcacggctagccagtcaggttcgttgtgatgagatccagaagcaagcagcatggctcgatgtgatgagctgtacaagaggcgatgatgcgttatcatctcaggcagatttatatcggaggagatgaatcgcgttcgcgtggctcttctctcggttctgttttactgatgtaaattttagcttatttttaactagaggaacgatgtaagtttaaccagaccaataaaacaaccgtgtatgctctgcttccaatccagctattag

SEQ ID NO: 198883 - DNA, 1361 bp, Zea Mays
ccaccactccgttccatccctcgcctgccttcgcacgggtgcgccgcccgctcgacggccacgccacgccgcggcgcgccgctcagctgccccggcacccgcccttcctcgccgagctcgggatcgacgtctcccgcacctcctcgcgcccgttccgggctccgcatccggcccctccccgtccccaaccccattccgcagcaggcgaccagcacaacatcccgaatcccccacctcgcattcggctcgccgtagctcctcctccgcgtcccgccgcccccggcacggccactagctgggtatcaaaacattgggttgccaaacaagctaccttctcagattcagatcaatagcttctcaggtccaacaaggggaagggaacggtgctgataatgcaagtgctggccaaaaaaaatggcgctgtggagcatctgaaacgctgcttcccttggctcatatgaatgtcagtttaggccttaggatagagcaaagtagcataatctcaagcacaagtttactatgtctgggatggcatttgatgattcacctgcccaagtgaatgttgaaggagatgtttcagagaaaaaagtagaagttcaagaccagaatgaagtgggtgggatgccctcacgacaagaggaggaggcagcaattaagaaaaagtatgaaggaatattgcccagaaagactcctgcttatatctaagattcttagctaagggctggcatgatgcatctgtcaacaagatcaccagttttccacgctgttgaatcgcagcacaagtttactatgtctgggatggcatctgatgattcacctgcccaagtgaatgttgaaggagatgtttcggagaaaaaaagtagaagttcaagaccagaatgaagtgggtgggatgccctcaagacaagaggaggtatagcagacaaatacagaaaagggctggcctggttaaaaacggttcaggttagcaagcatcatggcccgtatccagaaggtagcttcacgtttgagagaaggtggcttcgaacgagacctgatcgtttccttcgtcctgggcgacttggctggctcttgctcaatgggagttgacaggacagatcacggctagccagtcaggttcgttgtgatgagatccagaagcaagcagcatggctcgatgtgatgagctgtacaagaggcgatgatgcgttatcatctcaggcagatttatatcggaggagatgaatcgcgttcgcgtggctcttctctcggttctgttttactgatgtaaattttagcttatttttaactagaggaacgatgtaagtttaaccagaccaataaaacaaccgtgtatgctctgcttccaatccagctattag

SEQ ID NO: 198884 - DNA, 1917 bp, Zea Mays
ccaccactccgttccatccctcgcctgccttcgcacgggtgcgccgcccgctcgacggccacgccacgccgcggcgcgccgctcagctgccccggcacccgcccttcctcgccgagctcgggatcgacgtctcccgcacctcctcgcgcccgttccgggctccgcatccggcccctccccgtccccaaccccattccgcagcaggcgaccagcacaacatcccgaatcccccacctcgcattcggctcgccgtagctcctcctccgcgtcccgccgcccccggcacgccaaaaacgttcaaggagagtggaaagggaacatatcaggtgcacatggtgatgctagctgcttgcttgttatgggtggaatttgtccgtggacggggcaaatgcactgtgctcctttgtcggccttaagggcaggctgtttcagggcccgaactcctcgataagaactaacttttctatatgtgattgatgaacacacatgttagcttcaagtaggcctttttgtgtattgatcgataaacacgtgtgatgtcgaggatgtcctttcgtgtcatttttggtaaacacagcaaaacgttcctaattatgtggagtaattgcaatgtgttaatcctacatttcgttatggaaactgaaactgttgaacaaaataatcaccattaaccaaactctattggtcatgtggtacattccgtgatcaatcagccattcattacccacaaagggtatttcatgtatacaggccactagctgggtatcaaaacattgggttgccaaacaagctaccttctcagattcagatcaatagcttctcaggtccaacaagtgagctttttgcaccagtagcttttgcaaccgattgacggaagtttgttttgtcacccaagacctatcacttgtcacctattcaaagtgcagggggaagggaacggtgctgataatgcaagtgctggccaaaaaaaatggcgctgtggagcatctgaaacgctgcttcccttggctcatatgaatgtcagtttaggccttaggatagagcaaagtagcataatctcaagcacaagtttactatgtctgggatggcatttgatgattcacctgcccaagtgaatgttgaaggagatgtttcagagaaaaaagtagaagttcaagaccagaatgaagtgggtgggatgccctcacgacaagaggaggaggcagcaattaagaaaaagtatgaaggaatattgcccagaaagactcctgcttatatctaagattcttagctaagggctggcatgatgcatctgtcaacaagatcaccagttttccacgctgttgaatcgcagcacaagtttactatgtctgggatggcatctgatgattcacctgcccaagtgaatgttgaaggagatgtttcggagaaaaaaagtagaagttcaagaccagaatgaagtgggtgggatgccctcaagacaagaggaggtatagcagacaaatacagaaaagggctggcctggttaaaaacggttcaggttagcaagcatcatggcccgtatccagaaggtagcttcacgtttgagagaaggtggcttcgaacgagacctgatcgtttccttcgtcctgggcgacttggctggctcttgctcaatgggagttgacaggacagatcacggctagccagtcaggttcgttgtgatgagatccagaagcaagcagcatggctcgatgtgatgagctgtacaagaggcgatgatgcgttatcatctcaggcagatttatatcggaggagatgaatcgcgttcgcgtggctcttctctcggttctgttttactgatgtaaattttagcttatttttaactagaggaacgatgtaagtttaaccagaccaataaaacaaccgtgtatgctctgcttccaatccagctattag

SEQ ID NO: 198885 - DNA, 1278 bp, Zea Mays
ccaccactccgttccatccctcgcctgccttcgcacgggtgcgccgcccgctcgacggccacgccacgccgcggcgcgccgctcagctgccccggcacccgcccttcctcgccgagctcgggatcgacgtctcccgcacctcctcgcgcccgttccgggctccgcatccggcccctccccgtccccaaccccattccgcagcaggcgaccagcacaacatcccgaatcccccacctcgcattcggctcgccgtagctcctcctccgcgtcccgccgcccccggcacgggggaagggaacggtgctgataatgcaagtgctggccaaaaaaaatggcgctgtggagcatctgaaacgctgcttcccttggctcatatgaatgtcagtttaggccttaggatagagcaaagtagcataatctcaagcacaagtttactatgtctgggatggcatttgatgattcacctgcccaagtgaatgttgaaggagatgtttcagagaaaaaagtagaagttcaagaccagaatgaagtgggtgggatgccctcacgacaagaggaggaggcagcaattaagaaaaagtatgaaggaatattgcccagaaagactcctgcttatatctaagattcttagctaagggctggcatgatgcatctgtcaacaagatcaccagttttccacgctgttgaatcgcagcacaagtttactatgtctgggatggcatctgatgattcacctgcccaagtgaatgttgaaggagatgtttcggagaaaaaaagtagaagttcaagaccagaatgaagtgggtgggatgccctcaagacaagaggaggtatagcagacaaatacagaaaagggctggcctggttaaaaacggttcaggttagcaagcatcatggcccgtatccagaaggtagcttcacgtttgagagaaggtggcttcgaacgagacctgatcgtttccttcgtcctgggcgacttggctggctcttgctcaatgggagttgacaggacagatcacggctagccagtcaggttcgttgtgatgagatccagaagcaagcagcatggctcgatgtgatgagctgtacaagaggcgatgatgcgttatcatctcaggcagatttatatcggaggagatgaatcgcgttcgcgtggctcttctctcggttctgttttactgatgtaaattttagcttatttttaactagaggaacgatgtaagtttaaccagaccaataaaacaaccgtgtatgctctgcttccaatccagctattag

SEQ ID NO: 198886 - DNA, 1141 bp, Zea Mays
ccaccactccgttccatccctcgcctgccttcgcacgggtgcgccgcccgctcgacggccacgccacgccgcggcgcgccgctcagctgccccggcacccgcccttcctcgccgagctcgggatcgacgtctcccgcacctcctcgcgcccgttccgggctccgcatccggcccctccccgtccccaaccccattccgcagcaggcgaccagcacaacatcccgaatcccccacctcgcattcggctcgccgtagctcctcctccgcgtcccgccgcccccggcacgcacaagtttactatgtctgggatggcatttgatgattcacctgcccaagtgaatgttgaaggagatgtttcagagaaaaaagtagaagttcaagaccagaatgaagtgggtgggatgccctcacgacaagaggaggaggcagcaattaagaaaaagtatgaaggaatattgcccagaaagactcctgcttatatctaagattcttagctaagggctggcatgatgcatctgtcaacaagatcaccagttttccacgctgttgaatcgcagcacaagtttactatgtctgggatggcatctgatgattcacctgcccaagtgaatgttgaaggagatgtttcggagaaaaaaagtagaagttcaagaccagaatgaagtgggtgggatgccctcaagacaagaggaggtatagcagacaaatacagaaaagggctggcctggttaaaaacggttcaggttagcaagcatcatggcccgtatccagaaggtagcttcacgtttgagagaaggtggcttcgaacgagacctgatcgtttccttcgtcctgggcgacttggctggctcttgctcaatgggagttgacaggacagatcacggctagccagtcaggttcgttgtgatgagatccagaagcaagcagcatggctcgatgtgatgagctgtacaagaggcgatgatgcgttatcatctcaggcagatttatatcggaggagatgaatcgcgttcgcgtggctcttctctcggttctgttttactgatgtaaattttagcttatttttaactagaggaacgatgtaagtttaaccagaccaataaaacaaccgtgtatgctctgcttccaatccagctattag

SEQ ID NO: 198887 - DNA, 2390 bp, Zea Mays
aaaataacgcctaccatatatttcaattaaaaaagacaaaagaataaacaacaaaaatcccccgttcctccttctcaggcttccccttcttcctccacatcgatcccctcccccctccactcgtctccaaaatcgccagcgagagccatgccgcctcctcccctgccctcgccgagcctgaccgactgaccccacctcgccactgttctttcccttccacctgggccccacagcgcccccttaccgtcgccaccaaatccccaaatcccggaggcacgaggagggaattcgtcgcctgaccgatcggccgatccactgccgtcggcaccccaatccgccgctgccgccatgttcaacaagatcatcaagaggggaaaccgcaagggcgcgcgcggggacaacgcggaggccgccgcgcgccccgcagcgccctcctcgtcctccgggagcggcggcggcggcgcgggggcagccgcgcccgtcaccgtcaaccacgcctcccgggccacagcgccttcgccgtcctcgcccacttcgccgcacgtggcgccgtctgcgcttgcgaccaacccggcgggggcggcgtcgccgccactcctcgagccgctcccgctcctccgcgacgtcgccgccgcggatcgcccgggcctcttcctccgcaagctccgcatcgtcgccgcgctctttgacctttcggactcgctcaagcacccgcgggagaaggaggccaaacgccaggctctcctcgagctcgtcgattacgtgcaggctccagctcaggctgcgggcgccaacgcacccacgcgcctcccggaccacgtccaggaggcgctcgtcgccgccatctctgccaacatcttccgcccgctgccacccgcgctgcacgaatccgccgccgcgatcgaccccggcgccgcgcccgacgaggaggaggagccatacctcgacccctcctggccacacctccagctcgtctatgagctccttctccgatacgttgtttcgcccgacaccgacaccaaggtcgccaagcggtatgtggaccacgccttcgtcctccgtctcctcgacctctttgactccgaggatccgcgtgagcgcgagtacctcaagaccgtgctccaccgcatctatggcaagttcatggtacaccgaccattcattcgcaaggccatcaacaatgtgttctaccggttcatctttgaaacgcagcgccacaatggcataggggagctccttgagatccttggaagcatcattaatggctttgccttgccaatgaaggaggagcacaagctattccttgcccgtgctctcatccccctgcataagcccaaatctgttgcgatctaccatcagcagctgtcctattgtattgttcagttcgttgagaaggactacaaattagcagatactgtgattaggggtctgctcaaatactggccagtcacaaactgccagaaagaggtgttgtttctgggggagcttgaagaagtgctcgaggcaacacagcctgcagagttccagcggtgcatggtgccactgttcaagcagattggacgatgccttaacagttctcacttccaggttgctgaacgtgctttgttcttgtggaacaatgatcatattgtaagcttgatagcacaaaatcgtgttgttatatttccaattatatttgaagctcttgagaggaatatacagagccactggaatcaagcagttcatggtctcactgcaaatgtgcgcaagatgtttttggacatggacagtgaactatttgaagagtgccagcagcagtacatggagaaacaagcgaaagccaaagagatacaggaacaacgagaatcagcatggagacaattggaagctgttgttgctgccaaggctgctggagatgacatggttttggtcaactagcacaaatgcagataaaagctcatctgtagtaggaactgtttcgacgttgctgtggttgttttagcaatataatggctcactgatcataccatcttggctggattttgaagtttggcggttggcacagcagtttacaatctttgagacttgcactcagaggtcgtctgttaaaaacgtccctcatttagttgtcaacagttccgtcgtcgttcgtgtctttcaagcagcctcccgaggcacccatagttcttcccttccgatgacggttgggcttgtgtggccattggatccaaaggtgatggctggaggtccttatcggtagctgagcacgacctttagggtccgtttggttgcaatgacaggacgagatagaatgtaacgattactcaaataaggttgtttggtttagggtcaagggttgggatagaattatctcagtgtttttccaatttatccttcaaaattgaaagaac

SEQ ID NO: 198888 - DNA, 2431 bp, Zea Mays
gttcctccttctcaggcttccccttcttcctccacatcgatcccctcccccctccactcgtctccaaaatcgccagcgagagccatgccgcctcctcccctgccctcgccgagcctgaccgactgaccccacctcgccactgttctttcccttccacctgggccccacagcgcccccttaccgtcgccaccaaatccccaaatcccggaggcacgaggagggaattcgtcgcctgaccgatcggccgatccactgccgtcggcaccccaatccgccgctgccgccatgttcaacaagatcatcaagaggggaaaccgcaagggcgcgcgcggggacaacgcggaggccgccgcgcgccccgcagcgccctcctcgtcctccgggagcggcggcggcggcgcgggggcagccgcgcccgtcaccgtcaaccacgcctcccgggccacagcgccttcgccgtcctcgcccacttcgccgcacgtggcgccgtctgcgcttgcgaccaacccggcgggggcggcgtcgccgccactcctcgagccgctcccgctcctccgcgacgtcgccgccgcggatcgcccgggcctcttcctccgcaagctccgcatcgtcgccgcgctctttgacctttcggactcgctcaagcacccgcgggagaaggaggccaaacgccaggctctcctcgagctcgtcgattacgtgcaggctccagctcaggctgcgggcgccaacgcacccacgcgcctcccggaccacgtccaggaggcgctcgtcgccgccatctctgccaacatcttccgcccgctgccacccgcgctgcacgaatccgccgccgcgatcgaccccggcgccgcgcccgacgaggaggaggagccatacctcgacccctcctggccacacctccagctcgtctatgagctccttctccgatacgttgtttcgcccgacaccgacaccaaggtcgccaagcggtatgtggaccacgccttcgtcctccgtctcctcgacctctttgactccgaggatccgcgtgagcgcgagtacctcaagaccgtgctccaccgcatctatggcaagttcatggtacaccgaccattcattcgcaaggccatcaacaatgtgttctaccggttcatctttgaaacgcagcgccacaatggcataggggagctccttgagatccttggaagcatcattaatggctttgccttgccaatgaaggaggagcacaagctattccttgcccgtgctctcatccccctgcataagcccaaatctgttgcgatctaccatcagcagctgtcctattgtattgttcagttcgttgagaaggactacaaattagcagatactgtgattaggggtctgctcaaatactggccagtcacaaactgccagaaagaggtgttgtttctgggggagcttgaagaagtgctcgaggcaacacagcctgcagagttccagcggtgcatggtgccactgttcaagcagattggacgatgccttaacagttctcacttccaggttgctgaacgtgctttgttcttgtggaacaatgatcatattgtaagcttgatagcacaaaatcgtgttgttatatttccaattatatttgaagctcttgagaggaatatacagagccactggaatcaagcagttcatggtctcactgcaaatgtgcgcaagatgtttttggacatggacagtgaactatttgaagagtgccagcagcagtacatggagaaacaagcgaaagccaaagagatacaggaacaacgagaatcagcatggagacaattggaagctgttgttgctgccaaggctgctggagatgacatggttttggtcaactagatgatagctgctcacttatttcatgagcgtcatgtgcgcttatcgaggcaacaaggtatcggtgctagttgcggtgctcttatatcaacattgttgacttgggactatcagatccatgttccttgcatcagtgcaaaaaaatgcggaccgagtttgaacacattggcggcagcgaaagccaattcatgcagaatttctttgcctagtgagatcctgctgtagttctgagcccttgctttattcagcccctccttttctgttgtgttaatttatgaataattggactcttgtgttaatccttcagtgtctgccctagttacggacccacaattgggaaaatccaagtagagaaaattactgagctagattgaaatcttttcaatttatttttccttttttacttcttttctccttgttgggagttaatttcagttcatgttgttgtatggaggtaacagcacaaatgcagataaaagctcatctgtagtaggaactgtttcgacgttgctgtggttgttttagcaatataatggctcactggagagagagcaccaactattacccctctttggttcat

SEQ ID NO: 198889 - DNA, 390 bp, Zea Mays
ccacggatccacacgctaccctcggcaccgtagccgtctgccccgcgctccccgttccccttcctcgctccccaccagtccgtcccatccctcgcctgccttcgcacgggtgcgccgcccgctcgacagccacgccgcgccgcgccgcgccgctcagctgcccggcacccgcccttcctcgccgagctcgggatcgacgtctcccgcacctcctccgcgcccgttccgggctccgcatccggcctctcccccgtccccaaccccattccgcagcaggcgaccagcacaacatctcgaatcccccgcctcgcattcggctcgccgtcgctcctcctccgcgtcccgccaccctccgcacgggctgagattgttgttgatagtactatagca

SEQ ID NO: 198890 - DNA, 3685 bp, Zea Mays
ctccactcttccgtgattaataactcaagttaaaaggccaagcacataaatgaactcagttgtctttctaccatgttttctcattatatattggcataccagtttttttgaagcagtattaatttccattctcatcatcattaattaaaacaaaatagcgattttttcccgaactgttggtgccactgttactcattcaattgaaccaaacactttcttttccctctctataaccacccatcccatatccatcagcactgagttgagcacccctgctggctgcttgccctgctcctctcttctgcccatgtcttctccctcccccattccactgacgacagtagcaaccaacggtgtctcctctgtcctctctcctaagttacttgcagccctatcctgtctatcctcatcttcctcctctccctgccatcttttgcaagatctctccttcgtcttctctttccccttttaaatccaccggaatccctcttttgtcacgagccaagccgccgagcgcagcataaagcgagcgaagcaccagcaaaagagagcgacgccgcctgcgccaaagcttcggattcccgtctattttaccccccaccctcgccgactcaccggcgcgagatccatccgcaggtgtcggcggcctgcagccccccttgaaagatggcgcctttctgaggctccccgggggtttctcgtcgtttcttgcttggcccctaaagcgggagagcggcttccagggagctcctcccgttcccggccaattcagctgaagtggcggcaagtgggtttagggctcgatccggttttgtgcccgggcgtgtctgactctgacccgggctagggagcggtggttcttggctagttcttgagctggttgcggcgcttatccctcttcttggagctcttggattggtttgggggaaagcaggttcttgcaagcagctgcttcggttctcgaggatgttaattttttgaattcagtcggggggaatggggctctcgcggtctctggattgagcatttctttattggaattcgacatttcgtgcggcctccagtccatggaggatttggggctgtggaagcaggcgtggatgtgggtgttgtcccagaagcacatcctagcgtgggcgcacacggctgcgtgcggcagcagggagcgcctcgccttcctggtcgatcggcactggcccgccgtgtcccgggcctgcgccacctcctcgcgactcgcgctcgccgcgctgcggcaatggcgcgggtgcacggcgcgcggggtgctggcggtggcgagcctcggccctgccgccgtcttcgtcatcctctggagcttcttcgtgtgcatgacctcgccggcgtgcgccctctacgcgcttcttagcctgggggctgcagcagcagttgttcactatatgggctatacacctggccttttcattgttgggctgtttggaatattaattatgtggatgtatggctacttttggattacaggaatgcttctagttgctggaggttgtatgtgctctttgaaacatgctcgatatgtgatacctgttttgacttcatatggtgtttattctgtggctgttcgtgttgggtggcttggagtcttcttgacactaaacctttctttcttgacaaatgatcttcttaataagttagtgcaaggatacgaaggaagcactgaagaaagccagtttgaagacatgaaggattctgatccagttatggatgagttctatcgtagttgtgaattcccatcagttcctgacagtgaacctgagaccgtgtcttgcgcgaagccatactgctcagcacccatccaagatgtattacatgtacaaaaagaggaacctcctagtaaagtagtgaaatctgattctacttcattggatgagattaagaggataatggatggttcaaaccattatgaagttttgggtgtacctcgtaatagaagcattgatcagaagacactgaaaaaagaatatcacagaatggtcctgcttgtacatcctgataaaaatatgggaaatcaattggcttgtgaatcattcaagaagcttcaaacagcttatgaggcaagtgtttggatgtttatgctttgactcatcattgtctagattagtgtttaatacagtattgtatcttttatttaacagctagttgttataggctccttgcgttctggtggcttggattgcctctcttcctggacccgtggtgtctaggagagatggctttagcgttgctttttgtgatgtttaccatgtgtatcacaaaactctgtaatttgttgtgttcggattcaaccatggtcctctctgatttcacaaagaaaaacagctatgatgagcaactgaggaaagaagaatcacagaaaatgaccccaagatcatgtgttgtctctcaacagagtggtggtgtggagtttctctcagaagagtccaggcgaatacagtgcactaagtgtggtaatttccatatatggatatgcaccaagagaagcaaaacaagggcacgattctgtcagggctgtgatcagtttcatcaagccaaggatggagatggatgggttgaaaccagattttcgacctccatcaagatggaaataccacgggcttttgtctgtgctgagagcaaaatatttgatgtgtctgagtgggctacttgccagggaatggagtgcaagcctaacactcacggtccaacgtttatggtaaacatggttggcgcagataggatgcctcagagatcctacagttcccggtatcccttcagcttggacgcagagatgatcccggaagacgagttcgagctgtggcttcagcaggcgctggcgtcaggcgtcttcgctgacagccccaagcgcaggaaaagttggagcccattcaaactgcctcaaaagggaattaaaagttggcgaagatcgtcatgagggtgcagcaggcattacacagcgaggggtgtaggcgactacatcattggaaagaaggcaatggtgcagggcttcatgaatgtaaataaactgaccaacaatttgcccggatggacaagtgatttttgttcgaagggaaatttggatccataccattaaaagatcaccactttggatccataccattactatctcacttacatgtgggtccacatgagtcaatgacatgtggggtccatggtatatatctaaagtttggatcttttaatggtatagatccaattgttccttgttcgaaaggagaaagagggtggagaagaaacactcatgaataggtataacacataccactgctgaacttggttccctctgcagcaatcccacgagtttagccgtgaaccagtggtgctatcccccctacgatcaaagtaccggtggatctgtggtgtgttagtttcagtagtttagggatctgacatggaagaacgccaagacatcgttcctaagacggctgagatatggagcggtgttcattttaatcgtcaataatatttctgagaagcattgtctttgtgtagaagggaaggaaagaaggatgaaagtgatattggggactggctgtaaagtgtaaatacactaaaagctccctcctgtggaattactgcttgtaacattgtatacactgactgattaacctagtaaaaaacttccatgtttcaaattctctactctactgtttat

SEQ ID NO: 198891 - DNA, 1031 bp, Zea Mays
ggggcatgtatgacatcggtttttttttctaccgacgtccggagaatttcattagcaatcggtggccacagagagttaactaaaaataattcagcgacagatatcttcgactcctcgttcgtggttccccatcgtcatcgccatggatttctcttaggctcacccgtccgctcggctcgcttccttccccactctctctgatcccgtcgcacttccctcctcgctgcagcccctctactattgcgattaccgtttcctcgctgccctttcctttttcggtcggcagcaatcaccggggcaagcgaaccctcgatttgcgtccccgctctctgctagcgcccctaaaagaggagcgaagcgatgtctatgtcgaagacgggtcaggccgcggagaaggatgagcagcagcagtcccgagggatagcactgatgcagggcatctgcgccgtggtgtaccgcaaggccgataacacgccctgccccatcaagcagggtctctacttgggatctgttggagcagcattcaataaggacgctctcaagagtttgaacatcacccatatcttgatcgttgcaaagtcactggatccagtatttccagctgaatttaattacaagaagatcgaagtggagcaggaatggagaatgcaacctgtgcagcactgataattatactagtgttataataggtgcagaaggcctcatatgtagtgaaggcgtatgcgttgtaagagcgtcttgaccgcgtattatgacatctggataacaagcgaggccttggcaaactttatgatgtaaacagcaagcaacgttgttcatccattgggatgcagtttacatgttgaataatattcactgcaatttctcttcaaatgaaccaaagaggggtaatagttggtgctctctctcctgcatagatgcggcacatcaatcaaccttagaagaagaatactccatcgtgcatagatgcagcacaccgttgacttttctaaaaaactttgactagtcgtgttattcaaaaaaataatgag

SEQ ID NO: 198892 - DNA, 1225 bp, Zea Mays
ggggcatgtatgacatcggtttttttttctaccgacgtccggagaatttcattagcaatcggtggccacagagagttaactaaaaataattcagcgacagatatcttcgactcctcgttcgtggttccccatcgtcatcgccatggatttctcttaggctcacccgtccgctcggctcgcttccttccccactctctctgatcccgtcgcacttccctcctcgctgcagcccctctactattgcgattaccgtttcctcgctgccctttcctttttcggtcggcagcaatcaccggggcaagcgaaccctcgatttgcgtccccgctctctgctagcgcccctaaaagaggagcgaagcgatgtctatgtcgaagacgggtcaggccgcggagaaggatgagcagcagcagtcccgagggatagcactgatgcagggcatctgcgccgtggtgtaccgcaaggccgataacacgccctgccccatcaagcagggtctctacttgggatctgttggagcagcattcaataaggacgctctcaagagtttgaacatcacccatatcttgatcgttgcaaagtcactggatccagtatttccagctgaatttaattacaagaagatcgaagatgaagctataagctctggaggcaatgttttggtccattgctttgctgggcggtcaaggagcctcacaagcctgcggttaggggggcataaccccaaccggagaggacggccgacggctacgagctacgtagccgtggtccggcaagtcggggattccaggtccttgacaagaagtttcagaaatccttgcaagtggagcaggaatggagaatgcaacctgtgcagcactgataattatactagtgttataataggtgcagaaggcctcatatgtagtgaaggcgtatgcgttgtaagagcgtcttgaccgcgtattatgacatctggataacaagcgaggccttggcaaactttatgatgtaaacagcaagcaacgttgttcatccattgggatgcagtttacatgttgaataatattcactgcaatttctcttcaaatgaaccaaagaggggtaatagttggtgctctctctcctgcatagatgcggcacatcaatcaaccttagaagaagaatactccatcgtgcatagatgcagcacaccgttgacttttctaaaaaactttgactagtcgtgttattcaaaaaaataatgag

SEQ ID NO: 198893 - DNA, 1257 bp, Zea Mays
ggggcatgtatgacatcggtttttttttctaccgacgtccggagaatttcattagcaatcggtggccacagagagttaactaaaaataattcagcgacagatatcttcgactcctcgttcgtggttccccatcgtcatcgccatggatttctcttaggctcacccgtccgctcggctcgcttccttccccactctctctgatcccgtcgcacttccctcctcgctgcagcccctctactattgcgattaccgtttcctcgctgccctttcctttttcggtcggcagcaatcaccggggcaagcgaaccctcgatttgcgtccccgctctctgctagcgcccctaaaagaggagcgaagcgatgtctatgtcgaagacgggtcaggccgcggagaaggatgagcagcagcagtcccgagggatagcactgatgcagggcatctgcgccgtggtgtaccgcaaggccgataacacgccctgccccatcaagcagcattcaataaggacgctctcaagagtttgaacatcacccatatcttgatcgttgcaaagtcactggatccagtatttccagctgaatttaattacaagaagatcgaagtacttgatatcccagacactgatctgttaaagcattctgatgaatgctttggtttcatagatgaagctataagctctggaggcaatgttttggtccattgctttgctgggcggtcaaggagcctcacaagcctgcggttaggggggcataaccccaaccggagaggacggccgacggctacgagctacgtagccgtggtccggcaagtcggggattccaggtccttgacaagaagtttcagaaatccttgcaagtggagcaggaatggagaatgcaacctgtgcagcactgataattatactagtgttataataggtgcagaaggcctcatatgtagtgaaggcgtatgcgttgtaagagcgtcttgaccgcgtattatgacatctggataacaagcgaggccttggcaaactttatgatgtaaacagcaagcaacgttgttcatccattgggatgcagtttacatgttgaataatattcactgcaatttctcttcaaatgaaccaaagaggggtaatagttggtgctctctctcctgcatagatgcggcacatcaatcaaccttagaagaagaatactccatcgtgcatagatgcagcacaccgttgacttttctaaaaaactttgactagtcgtgttattcaaaaaaataatgag

SEQ ID NO: 198894 - DNA, 1124 bp, Zea Mays
ggggcatgtatgacatcggtttttttttctaccgacgtccggagaatttcattagcaatcggtggccacagagagttaactaaaaataattcagcgacagatatcttcgactcctcgttcgtggttccccatcgtcatcgccatggatttctcttaggctcacccgtccgctcggctcgcttccttccccactctctctgatcccgtcgcacttccctcctcgctgcagcccctctactattgcgattaccgtttcctcgctgccctttcctttttcggtcggcagcaatcaccggggcaagcgaaccctcgatttgcgtccccgctctctgctagcgcccctaaaagaggagcgaagcgatgtctatgtcgaagacgggtcaggccgcggagaaggatgagcagcagcagtcccgagggatagcactgatgcagggcatctgcgccgtggtgtaccgcaaggccgataacacgccctgccccatcaagcagcattcaataaggacgctctcaagagtttgaacatcacccatatcttgatcgttgcaaagtcactggatccagtatttccagctgaatttaattacaagaagatcgaagtacttgatatcccagacactgatctgttaaagcattctgatgaatgctttggtttcatagatgaagctataagctctggaggcaatgttttggtccattgctttgctgggcggtcaaggagtggagcaggaatggagaatgcaacctgtgcagcactgataattatactagtgttataataggtgcagaaggcctcatatgtagtgaaggcgtatgcgttgtaagagcgtcttgaccgcgtattatgacatctggataacaagcgaggccttggcaaactttatgatgtaaacagcaagcaacgttgttcatccattgggatgcagtttacatgttgaataatattcactgcaatttctcttcaaatgaaccaaagaggggtaatagttggtgctctctctcctgcatagatgcggcacatcaatcaaccttagaagaagaatactccatcgtgcatagatgcagcacaccgttgacttttctaaaaaactttgactagtcgtgttattcaaaaaaataatgag

SEQ ID NO: 198895 - DNA, 1298 bp, Zea Mays
ggggcatgtatgacatcggtttttttttctaccgacgtccggagaatttcattagcaatcggtggccacagagagttaactaaaaataattcagcgacagatatcttcgactcctcgttcgtggttccccatcgtcatcgccatggatttctcttaggctcacccgtccgctcggctcgcttccttccccactctctctgatcccgtcgcacttccctcctcgctgcagcccctctactattgcgattaccgtttcctcgctgccctttcctttttcggtcggcagcaatcaccggggcaagcgaaccctcgatttgcgtccccgctctctgctagcgcccctaaaagaggagcgaagcgatgtctatgtcgaagacgggtcaggccgcggagaaggatgagcagcagcagtcccgagggatagcactgatgcagggcatctgcgccgtggtgtaccgcaaggccgataacacgccctgccccatcaagcagggtctctacttgggatctgttggagcagcattcaataaggacgctctcaagagtttgaacatcacccatatcttgatcgttgcaaagtcactggatccagtatttccagctgaatttaattacaagaagatcgaagtacttgatatcccagacactgatctgttaaagcattctgatgaatgctttggtttcatagatgaagctataagctctggaggcaatgttttggtccattgctttgctgggcggtcaaggagtgtgacaatcgttgttgcatatctcatgaagaagcatcaaatgagcctcgaaagtgccttgtcactagttagaagtaaacgacctcaagtggctcctaatggggggtttatttcccagctggagaagtttcagaaatccttgcaagtggagcaggaatggagaatgcaacctgtgcagcactgataattatactagtgttataataggtgcagaaggcctcatatgtagtgaaggcgtatgcgttgtaagagcgtcttgaccgcgtattatgacatctggataacaagcgaggccttggcaaactttatgatgtaaacagcaagcaacgttgttcatccattgggatgcagtttacatgttgaataatattcactgcaatttctcttcaaatgaaccaaagaggggtaatagttggtgctctctctcctgcatagatgcggcacatcaatcaaccttagaagaagaatactccatcgtgcatagatgcagcacaccgttgacttttctaaaaaactttgactagtcgtgttattcaaaaaaataatgag

SEQ ID NO: 198896 - DNA, 785 bp, Zea Mays
tcgtcgtcactggcgacaagtagtttgatcggcgttacgggggaccacagaagcattagctgggtgaacccactcaaagggggcagggaattgtgtgctagtttgaatggctgctacaaagcttcaggccctttggaaccacccggctggccccaaaaccattcatttctgggcgccaacattcaaatggggcatcagcattgccaacatagccgactttgctaaaccacctgaaaagatatcttaccctcagcaagttgctgttgcatgcactggactcatttggtcaaggtacagcttggttatcacaccgagaaactggaaccttttcagtgttaacgttgcaatggcgggtacaggcctgtatcagctttcacggaagatcaggcaagattacttatccgatgagaaagatgctgcttcacaactggaagcatagataatgacaacaggcaaagaataacggattggaaagcctgcatcctaggagtctactcttgattttttttttctgggcaagcaaagaataacggatgggtcatgtttgttttcctgttattctgaaatcgtgagcaggctaatgtgaaaatcttccgccaaaaaagaaaaccaatgaagtgatgttttgagcattttttttgtgggaacaagtcatgaaagtacatggtttatctgttgttcttttgttccttcaaccgctttatttgggaaaacgctaaattgttgccaagctgattgaccataatccagcctttgctcgattcattggtaaaaatctaaaaaaa

SEQ ID NO: 198897 - DNA, 2671 bp, Zea Mays
cagacgggggttcatcctacttcgctttcgctcgtcgcgcgcctcgcgctcgattgagctcaccttagccagcgtgtactctctccctccggccctccccgattctcaccaggagcgacggcgactccggtgcgccgctgcttgcgagggcgaaggccggcgtgtggcgcgcggctgcaggcgagggcgaaggctggcgcacggctgcaggcgacgccgcctcgcacttgattcaactcgccccttcaattgcggcgacgctggtcgagcgactgagcccttcgctaggtcttcattgggttcttcgtcggcgagaacccgcaccagcatcaccaggcatttagaaaggaaggctgtatgaaggctagtaattttcagttaagatcatcaaggcttccttggttagagtcatggctgcttcctcctggattcccagtcgccatgaatagtagctactttttgggtgagggggacagggactatccacattgaaatttagagtacggtgctctcagctacagctttctactaattcagttcataataagaaagagaaagagaaatattcttgttttgatcagtcaacatcatatctgcatgtacaatgtcttagggacttcccgactgaaaaactttctggagaggtagttgtggtgcgtcttgattcttcacttatcttggggcacttaggaccatgcacttcctcacttgaaagagctttgctaactatcaaatacttgtgcaaagcaagagcgaaagtggccatagccaccagctgggatacaattcttcagtatgataatccagtgactgaatcagttgcctcttttgcagagtacatgtcatcccttcttcaagtagaagtcatcccagtagatggtgcacctagttcaacatcatttaagcaagaagagtgggctcagaacagtattattttgtttgaaaatcttctgaacttcacaggagaagttgctaattgcaaagatttttctcagaagcttgcttcaggtgccatgatatttgtcaatgattctttctcactgtctcataagattcttgcatcaactgttgggatcacgtgcttctgctatgcgtctcttgctggtttccattttgaagaggagcttatgaaattgataaagatcacggactccacgaggcgcccatatattgccattattggaggcagtaatttcttgagaaaagcacctgctcttcagacgttaacctgtctatgcgatgggttgttctttgttggaaaattatcatttcaaataatgaatggttttggaatgacagtgccctctcaattcatagaaagaaatgcagttaaggaagtactacaaattattcaagttgctagggataggaatattcctatttattatccaacagatctctggtgcttgaaaaatggcgacagtgaaatatcaggggtcatcaactctaccggacaattggctggctggacaccagctgatataggaccatcgacattggagaagatttcttctataattacatcatacaagaagatactgtggattggccctacaaactacggtttgacagaaaaaaattcagttggtggaacacagttgggtgaaatactggaaagtgcaagctctgatggctgtgatgttattttagtgggggatgcagcatgcaaggcagtaaaaagaaaaacagattcctcaccgcaatatacagaatttcaaaagtccactgttgtttgggaattcctcaaaggaaggatattgcctggtatagcagcattggataaatgttacccctaccggattccatggagtactgtcttctgtgaacctacactacccttagtggttgatatcggaagtggaaatggtttgtttctttttcaaatggctaaaagttgtgaaagttcaaatttccttgggtttgagatgaatgaaaagcttgtcattaggtgcctccaaggtatggcttcagatgagaaaaggaacctatattttgtgtcaacaaatgcaacgtccacatttcgttccatagtttcaagttatcctggacggttgactcttgtcacaatacagtgcccaaatcctgacttcaacaaagagcaaaataggtggagaatggtgcgaagaatgctcattgaagctatcgtcgaccttcttcataccaatggacaggtttatctgcagtcagatgtggagtccgttctgctcgtgatgaaggagcagttcctctcctacagcaagggtcagcttgtcacggacggcgatggtggcaactgcatcgataacccgttcggcgtggtatccgactgggagcgccatgtcctcgctcgcggagctcccatgtacagggcgatgttaaagaaaatgtgattccatttcctccgtctctgaggtctgaacattgcattgttttgtcaccatggctgcttcggacatggacaacgttcatggattcactcggttagataaaactctcttcttttcggagaaaactacatgacaaaaaaattgtgtggttaaatcttaaaatcgaatcaatccaatgggagaaacgcatatcttcccaattgtggctatgtcatctgccgccggagaggccgatgtcagacatggtggcaacgcttatcgccgccctggactgccgaactgaccacgagtcgaagagccgccgg

SEQ ID NO: 198898 - DNA, 2669 bp, Zea Mays
cagacgggggttcatcctacttcgctttcgctcgtcgcgcgcctcgcgctcgattgagctcaccttagccagcgtgtactctctccctccggccctccccgattctcaccaggagcgacggcgactccggtgcgccgctgcttgcgagggcgaaggccggcgtgtggcgcgcggctgcaggcgagggcgaaggctggcgcacggctgcaggcgacgccgcctcgcacttgattcaactcgccccttcaattgcggcgacgctggtcgagcgactgagcccttcgctaggtcttcattgggttcttcgtcggcgagaacccgcaccagcatcaccaggcatttagaaaggaaggctgtatgaaggctagtaattttcagttaagatcatcaaggcttccttggttagagtcatggctgcttcctcctggattcccagtcgccatgaatagtagctactttttggggggacagggactatccacattgaaatttagagtacggtgctctcagctacagctttctactaattcagttcataataagaaagagaaagagaaatattcttgttttgatcagtcaacatcatatctgcatgtacaatgtcttagggacttcccgactgaaaaactttctggagaggtagttgtggtgcgtcttgattcttcacttatcttggggcacttaggaccatgcacttcctcacttgaaagagctttgctaactatcaaatacttgtgcaaagcaagagcgaaagtggccatagccaccagctgggatacaattcttcagtatgataatccagtgactgaatcagttgcctcttttgcaggttagtacatgtcatcccttcttcaagtagaagtcatcccagtagatggtgcacctagttcaacatcatttaagcaagaagagtgggctcagaacagtattattttgtttgaaaatcttctgaacttcacaggagaagttgctaattgcaaagatttttctcagaagcttgcttcaggtgccatgatatttgtcaatgattctttctcactgtctcataagattcttgcatcaactgttgggatcacgtgcttctgctatgcgtctcttgctggtttccattttgaagaggagcttatgaaattgataaagatcacggactccacgaggcgcccatatattgccattattggaggcagtaatttcttgagaaaagcacctgctcttcagacgttaacctgtctatgcgatgggttgttctttgttggaaaattatcatttcaaataatgaatggttttggaatgacagtgccctctcaattcatagaaagaaatgcagttaaggaagtactacaaattattcaagttgctagggataggaatattcctatttattatccaacagatctctggtgcttgaaaaatggcgacagtgaaatatcaggggtcatcaactctaccggacaattggctggctggacaccagctgatataggaccatcgacattggagaagatttcttctataattacatcatacaagaagatactgtggattggccctacaaactacggtttgacagaaaaaaattcagttggtggaacacagttgggtgaaatactggaaagtgcaagctctgatggctgtgatgttattttagtgggggatgcagcatgcaaggcagtaaaaagaaaaacagattcctcaccgcaatatacagaatttcaaaagtccactgttgtttgggaattcctcaaaggaaggatattgcctggtatagcagcattggataaatgttacccctaccggattccatggagtactgtcttctgtgaacctacactacccttagtggttgatatcggaagtggaaatggtttgtttctttttcaaatggctaaaagttgtgaaagttcaaatttccttgggtttgagatgaatgaaaagcttgtcattaggtgcctccaaggtatggcttcagatgagaaaaggaacctatattttgtgtcaacaaatgcaacgtccacatttcgttccatagtttcaagttatcctggacggttgactcttgtcacaatacagtgcccaaatcctgacttcaacaaagagcaaaataggtggagaatggtgcgaagaatgctcattgaagctatcgtcgaccttcttcataccaatggacaggtttatctgcagtcagatgtggagtccgttctgctcgtgatgaaggagcagttcctctcctacagcaagggtcagcttgtcacggacggcgatggtggcaactgcatcgataacccgttcggcgtggtatccgactgggagcgccatgtcctcgctcgcggagctcccatgtacagggcgatgttaaagaaaatgtgattccatttcctccgtctctgaggtctgaacattgcattgttttgtcaccatggctgcttcggacatggacaacgttcatggattcactcggttagataaaactctcttcttttcggagaaaactacatgacaaaaaaattgtgtggttaaatcttaaaatcgaatcaatccaatgggagaaacgcatatcttcccaattgtggctatgtcatctgccgccggagaggccgatgtcagacatggtggcaacgcttatcgccgccctggactgccgaactgaccacgagtcgaagagccgccgg

SEQ ID NO: 198899 - DNA, 704 bp, Zea Mays
actacttcgtccaccacctgatattttgtgtcaacaaatgcaacgtccacatttcgttccatagtttcaagttatcctggacggttgactcttgtcacaatacagtgcccaaatcctgacttcaacaaagagcaaaataggtggagaatggtgcgaagaatgctcattgaagctatcgtcgaccttcttcataccaatggacaggtttatctgcagtcagatgtggagtccgttctgctcgtgatgaaggagcagttcctctcctacagcaagggtcagcttgtcacggacggcgatggtggcaactgcatcgataacccgttcggcgtggtatccgactgggagcgccatgtcctcgctcgcggagctcccatgtacagggcgatgttaaagaaaatgtgattccatttcctccgtctctgaggtctgaacattgcattgttttgtcaccatggctgcttcggacatggacaacgttcatggattcactcggttagataaaactctcttcttttcggagaaaactacatgacaaaaaaattgtgtggttaaatcttaaaatcgaatcaatccaatgggagaaacgcatatcttcccaattgtggctatgtcatctgccgccggagaggccgatgtcagacatggtggcaacgcttatcgccgccctggactgccgaactgaccacgagtcgaagagccgccgg

SEQ ID NO: 198900 - DNA, 1670 bp, Zea Mays
ctaaattaaaaaagacggacagcccagcccatctcgtcttgtctcggcgataccggctaccgccggcgaccttccgtctatccaactcgcagcgtcccacgccggtgaccccgctgggcggcagaaggagacgtcgggtgccgcggagcgccgcggagcgccgccgccgtccaagctgcctccctcggctggtggactgtatcactgctcctcagacacccgctgttctgtccggcaacgtgcctccgccgcaaacccgctcgatcagcctgaggcatcgcacgatttctgactcatactttatcgccaattggctggggtggagcacatctctacccggacttgatagattccaatccttcccaactcaacgttgggcagatggcgcagatccccaatcttgacaacgcgccgctcaaccttgcggccctcagggagcagtcgcagaaggacttgttcggcatcctaaaaaatataaggggaaagaagtgcttggttatagatcccaagctcgctgggactctctcattggtcgtgcagacatcgctgctaaaggagtatggcgcggaagtgcggattctctctcccgaacccctgcagacggaatgccccaaaattgtatatcttgtgcgctctcagctgaggttcatgaagttcatcgcaagtcaaatcaagaacgatgaacctaaagggctccagagggaatacttcctttactttgtacctcgccgcactgttgcttgtgagaagatcctggaggaagagaaagttcatcagaaactgacattcggagaatatcccttatatctagttccattggatgatgatgtcttgtctcttgaacttgaccattctttgcaggaatgccttattgaaggagatacaagttctatctggcatgttgctaaagcgatccataaattagagtttgcctttggagttatcccgaatgttagggccaagggtgtggcgtcaaccaaagctgcagagttgttgaatagtatgcaactagaggatccagtcaacatggatgatatggggattccagagataaacactgttattctgttagacagagaggtggacatggtaacaccaatgtgctctcagttgacgtatgaaggcttgttggatgagatgctacaaattaataatggttcagtggaagttgatgcaagcatcattggagctcaacaagatgggaaaaaggttaaggttccactgaattcaagcgataagttgtacaaggagattcgagacctcaattttgaagttgtagttcaggttttacgtcaaaaagcaacatctattcagcaagattatgcagaagtgaaatccaccaacactcagtctgtttcggagctcaaggattttgtgaggaggttgcactcgctaccggagatagctaggcatgttcatttggcacaacacttgcaatcgttcacggggaaaccctcctttcatgcccgactagacatagaacaaacaatactggaggttcagaactttgaaatatgctttgagtacattgaggagatgatacataagcaggaagttattgaaaacgtccttcgccttttggtgttactttctcttacaaatgccgggcttccaaagaagaattttgattacatgagctgtacagcatgcggcactgttgctactacttg

SEQ ID NO: 198901 - DNA, 1464 bp, Zea Mays
ctctcccctcctctctcgtctcgcttccggttttccaccacacaaaacaaaaacagagtagatagttcttgaaactgaaatcttcgccgttccactctcccccagcgatctgctcgtttccttgcaacttgcaaccttggtgctgtggatgacgctcgcgatgagcgcactcgcctgccaccgcccactccccttcaaaaaccatacttgatcaggttggaaacggaaactgcgaacctcggttgctacatggaaacatatgcggcctgaccgacgtaacgtaagcaatgttttgtcacacgagtgactcttagctgctctcgacgtcacgtacgcatatgacagacatgcattgttgttgggtatcaaaggaggccgtagcatttgcggcgaagaacacaaagaggaaacggagaagttctccgaacgagtcgaaggatttgctgttggtggtaagtgaggaagctgcttcgggcagtggaggaagtgctggcacaagcctcgagaccaacggcgaggatgttgctactgacgatgaggtttcaggtgctccgaggagtgctgttcttcaggcttgcgctctcacgtcaggcttgctgcttgccggagggcttctgcttcgcgaggcatcacacctagcatcaataaatggatggccaattgctgaccctacagatgtgtcattcagttttgaaacttggcatcttgagttggttgcgggacttgtcatagtaatctcctctgcccggtacatcctgctacaaacatggccagatttcagagattccagtgaatctgcaaatagacaaatccttgcatcgctagagcctctggactacattgtcgttgcttgtctcccggggataagtgaggagttgctgtttcgaggggcgatgatgcctaccttgggattgaactggattagcgcccttattattggaaccgtttttggtgttcttcacttgggcaatggcaggaaatattcgtttgcaatctgggcaacatttgttggctttgcctatggtatgggaaccatagcttcctcgagcattgtagttccaatagcttctcactccataaacaatattatcggaggtttactttggcgccttaccaagaactcgcaaaagtagatatacataatgccctcaacagtcatccctgttcagtttagagtttagactttctagtccttaatccttacaaggttgccgtcagtattagtgtcgcatgattggttcacccatgtattttcaatagcaaaatgaggacgggactgccgtaaaatcaggacttgcttcatttttttttgtgtcaatgtgtccctttaaatgaattatggagattttatatttcatattaggtataaaataaaatttaaccgtggggccatttgcatttgcagtaaatttgtctggtgcggcaaaaggtggaaccatcgtacgagagtgttacttgcgttct

SEQ ID NO: 198902 - DNA, 1038 bp, Zea Mays
ctctcccctcctctctcgtctcgcttccggttttccaccacacaaaacaaaaacagagtagatagttcttgaaactgaaatcttcgccgttccactctcccccagcgatctgctcgtttccttgcaacttgcaaccttggtgctgtggatgacgctcgcgatgagcgcactcgcctgccaccgcccactccccttcaaaagcatcacacctagcatcaataaatggatggccaattgctgaccctacagatgtgtcattcagttttgaaacttggcatcttgagttggttgcgggacttgtcatagtaatctcctctgcccggtacatcctgctacaaacatggccagatttcagagattccagtgaatctgcaaatagacaaatccttgcatcgctagagcctctggactacattgtcgttgcttgtctcccggggataagtgaggagttgctgtttcgaggggcgatgatgcctaccttgggattgaactggattagcgcccttattattggaaccgtttttggtgttcttcacttgggcaatggcaggaaatattcgtttgcaatctgggcaacatttgttggctttgcctatggtatgggaaccatagcttcctcgagcattgtagttccaatagcttctcactccataaacaatattatcggaggtttactttggcgccttaccaagaactcgcaaaagtagatatacataatgccctcaacagtcatccctgttcagtttagagtttagactttctagtccttaatccttacaaggttgccgtcagtattagtgtcgcatgattggttcacccatgtattttcaatagcaaaatgaggacgggactgccgtaaaatcaggacttgcttcatttttttttgtgtcaatgtgtccctttaaatgaattatggagattttatatttcatattaggtataaaataaaatttaaccgtggggccatttgcatttgcagtaaatttgtctggtgcggcaaaaggtggaaccatcgtacgagagtgttacttgcgttct

SEQ ID NO: 198903 - DNA, 1882 bp, Zea Mays
catctctcccctcctctctcgtctcgcttccggttttccaccacacaaaacaaaaacagagtagatagttcttgaaactgaaatcttcgccgttccactctcccccagcgatctgctcgtttccttgcaacttgcaaccttggtgctgtggatgacgctcgcgatgagcgcactcgcctgccaccgcccactccccttcaaaattttccggcccttcgcctgttgtatgcgtggtctcgtgaatcgtgatgtccagccagcccattgctgtcctctaatgaaatgcagaggttggaaacggaaactgcgaacctcggttgctacatggaaacatatgcggcctgaccgacgtaacgaggccgtagcatttgcggcgaagaacacaaagaggaaacggagaagttctccgaacgagtcgaaggatttgctgttggtggtaagtgaggaagctgcttcgggcagtggaggaagtgctggcacaagcctcgagaccaacggcgaggatgttgctactgacgatgaggtttcaggtgctccgaggagtgctgttcttcaggcttgcgctctcacgtcaggcttgctgcttgccggagggcttctgcttcgcgaggcatcacacctagcatcaataaatggatggccaattgctgaccctacagatgtgtcattcagttttgaaacttggcatcttgagttggttgcgggacttgtcatagtaatctcctctgcccggtacatcctgctacaaacatggccagatttcagagattccagtgaatctgcaaatagacaagtatgtagattccagtgcatcctttgcagaattatcttcccagttgtctctttttgttggagctatcggtttcacagtttaacatgctgatgaagaacataggtctaacgtctcacggaggttcagcgtaatgaaaagcattctgttgttaaacactgaaagatgtagttgtttgtatgttctactcttttaccctaatgaaacataaattttggtttattataggttgattactcttataatagacagaggggtccggcggtggtcatagtatcatacttctataaaccaaccccgagtccttgcctacatatgtacccccctaccccttgccttctcctgacatcgtttctggactcgaacctcgccaagcttactcagcatttttagacattgcaaatctcttacttaatcagtttattctcatctagtagatccttgcatcgctagagcctctggactacattgtcgttgcttgtctcccggggataagtgaggagttgctgtttcgaggggcgatgatgcctaccttgggattgaactggattagcgcccttattattggaaccgtttttggtgttcttcacttgggcaatggcaggaaatattcgtttgcaatctgggcaacatttgttggctttgcctatggtatgggaaccatagcttcctcgagcattgtagttccaatagcttctcactccataaacaatattatcggaggtttactttggcgccttaccaagaactcgcaaaagtagatatacataatgccctcaacagtcatccctgttcagtttagagtttagactttctagtccttaatccttacaaggttgccgtcagtattagtgtcgcatgattggttcacccatgtattttcaatagcaaaatgaggacgggactgccgtaaaatcaggacttgcttcatttttttttgtgtcaatgtgtccctttaaatgaattatggagattttatatttcatattaggtataaaataaaatttaaccgtggggccatttgcatttgcagtaaatttgtctggtgcggcaaaaggtggaaccatcgtacgagagtgttacttgcgttct

SEQ ID NO: 198904 - DNA, 1404 bp, Zea Mays
tatctacccatgaggccatgaggccatgaccgccaccgctcgacatctctcccctcctctctcgtctcgcttccggttttccaccacacaaaacaaaaacagagtagatagttcttgaaactgaaatcttcgccgttccactctcccccagcgatctgctcgtttccttgcaacttgcaaccttggtgctgtggatgacgctcgcgatgagcgcactcgcctgccaccgcccactccccttcaaaagttggaaacggaaactgcgaacctcggttgctacatggaaacatatgcggcctgaccgacgtaacgaggccgtagcatttgcggcgaagaacacaaagaggaaacggagaagttctccgaacgagtcgaaggatttgctgttggtggtaagtgaggaagctgcttcgggcagtggaggaagtgctggcacaagcctcgagaccaacggcgaggatgttgctactgacgatgaggtttcaggtgctccgaggagtgctgttcttcaggcttgcgctctcacgtcaggcttgctgcttgccggagggcttctgcttcgcgaggcatcacacctagcatcaataaatggatggccaattgctgaccctacagatgtgtcattcagttttgaaacttggcatcttgagttggttgcgggacttgtcatagtaatctcctctgcccggtacatcctgctacaaacatggccagatttcagagattccagtgaatctgcaaatagacaaatccttgcatcgctagagcctctggactacattgtcgttgcttgtctcccggggataagtgaggagttgctgtttcgaggggcgatgatgcctaccttgggattgaactggattagcgcccttattattggaaccgtttttggtgttcttcacttgggcaatggcaggaaatattcgtttgcaatctgggcaacatttgttggctttgcctatggtatgggaaccatagcttcctcgagcattgtagttccaatagcttctcactccataaacaatattatcggaggtttactttggcgccttaccaagaactcgcaaaagtagatatacataatgccctcaacagtcatccctgttcagtttagagtttagactttctagtccttaatccttacaaggttgccgtcagtattagtgtcgcatgattggttcacccatgtattttcaatagcaaaatgaggacgggactgccgtaaaatcaggacttgcttcatttttttttgtgtcaatgtgtccctttaaatgaattatggagattttatatttcatattaggtataaaataaaatttaaccgtggggccatttgcatttgcagtaaatttgtctggtgcggcaaaaggtggaaccatcgtacgagagtgttacttgcgttct

SEQ ID NO: 198905 - DNA, 913 bp, Zea Mays
cttttaaagcgcgcacggacacgggacactccgtctctctgaccttatccccttgcggcaaaaccttgcgcgcaacaatggccgcctccctcccgaccaccgccgcgcgcctcgcggccccggccttcgcctacatcgacgtgaagaacaaggactacggaggtgacaagtacgtgaacggcgagataatcccctgcacgtacccgacgtaccagccgaaggagcggaggacgtccaagtacgagagcaggcggtacgagaggcggagagatgggccaccggcggccagcaggaaaccgaggcagcaggcaccagctcagactcagaccgagtccgcgtcttcgtgacgaggcattttgtccacgtacctacctacctagaagtagaacaagagaggaggacgcctaaaattctgtcgccttgggcaccgcgtactggactggacaggcgggtcgggatccatcatccatcgtcagccagaaaaattgtcgctgtccaagcagcctgggcagcttgtgtgtgtgtgtgctgataagcctgatatcttgagctagctgtggcagaaactgaaaaccctactcttccccccgactccttagtgagctgtgtgatgccgactggtgtagagctgtatcgctgattgcgtgaaaccgaaatgctgtggctttatttagactgaagttggcacttcgagccatcggatcactccaagcactttgttcgttcatcgcgtatttggctgtgctaggctcgtttcatgtctaatgttattttttttaatttaaccaactaaccttggttatgttgtaaaacgttatggtgtaacagagttagccggtaactaaacatactcagtccacttcagtggcggaagacaaaataataatttggtatagctaaaacaagaaaaaaa

SEQ ID NO: 198906 - DNA, 421 bp, Zea Mays
ggcggtggcacgttagcctgccgctaggaaactccgggttctctgttctctctttccttccgactttcccactgccgtgacgattttcacagcgaattctccggccggcgccgccccgtccgtccgtccgtccgtccgttcattccgataccgaactcgccagtcgccacagcgatctctctcgctcgctccgccgacgcagcgctcggcttcagctcgagaggaggaaatggccagcagcggctacgaagggatcctcctgggaatggggaaccccctcctcgacatctccgctgtcgtcgacgagggcttcctcgccaatggtgtgatgcggactccagcatcaccaattcaccctctctgttgtatccaacggcagttgggagagcatcaccaattcacctctctgttgtatccaacg

SEQ ID NO: 198907 - DNA, 2335 bp, Zea Mays
ggcggtggcacgttagcctgccgctaggaaactccgggttctctgttctctctttccttccgactttcccactgccgtgacgattttcacagcgaattctccggccggcgccgccccgtccgtccgtccgtccgtccgttcattccgataccgaactcgccagtcgccacagcgatctctctcgctcgctccgccgacgcagcgctcggcttcagctcgagaggaggaaatggccagcagcggctacgaagggatcctcctgggaatggggaaccccctcctcgacatctccgctgtcgtcgacgagggcttcctcgccaagtatgatgtgaagccgggcaatgccattcttgcagaggacaagcatttgccaatcacccatgagacggggagaaacgtagtggactcctaatttttatggccaggtatgtacatatcttgatgttagtgttgtttttctggtgtgtgttaatctcccacagcaccctcactcttttccattatactttaccactttacaaatagacccttcaacttgttcataatacaccaacgctccccctcaggatgggccaaatatatttaacattcccatcttgttacatgccaactcattatccttaggacctaaaccttttgtgagactatccgctacttgattacgagattttacatacttcaacttcaaagccccactatcaatcttctctttgatgaagaacttatcaatctccacatgcttcatgcgatcaaactgaactggattatttgctatgttgattgctgccacattgtcacaatggagcaacattgtctcattcttcaacacttgaagctccttcaagagactcttcaaccatatcatttcacaaactgctagagccattgctctatgttcagcctctgcagtggatcgagataccacaacttgcttcttgtttctccatgaaaccagattacctcccacaaatacacaatatccagaagtggatctccgatcatccctactgctcgcccagtccgcatcacaatacccatccaaattcatatgttgatttggtctaaaccacaatcccttgccaggggttcccttcaggtatctcaggatttgataaactatcttcatatgcccagttctaggatcatgcatatacctactcaccacacttactgcataagcaatgtccggtcttgtatggcaaagatatatcaaacaaccaactaccctctgatatctttcccgatctatagggtcacctgactcagcacaagtttggtgattcctatcaatgggtgaaccacatgggcgacacccaagcattcctgtctctgacaaaaggtcgaggacatactttctttgggagagaataattccctgagatgatctagctatctcaatcccaaggaagtatcgaagtggtccaaggtcctttacctcaaaggctctacttagcctttccttcagtttcttgatctccttcgcatcatctccagtgatcactatatcatcaacataaaccgctagaatagtgatacacgagccctgatgtttgtagaagactgtgtgatctccattgcattgatgataacccatatcacacacaactcgcctgaatctatcaaaccacgcacgtggtgactgctttaggccatagagcgacttcttaagtctacacacttttccaatagtctgtttatttgcaaatccaggtgggatttccatatagacctcttccttcagatcaccatgaagaaatgcattcttcacatccagttgatgaagaggccaaccaaagttggccgcacatgagattaaggtcctcactgtgcccatttttgccacaggtgcaaaggtctcatcatagtcgatcccatatgtctgactatatcccttcgccaccagtcttgctttgtacctgtcaatctttccttcaggagtctgctttactgtgaagacccacttgcaccccaccgccttctttccttcaggaaggtgaacaagttcccatgtcttgttcttctgcagggcaagcagctcttccttcatggcatccttccactttggatcctgtttggcacacctccaatccttcggaatggatattgtttgtagagatgcaatgaaagttctatatgcaggagagacactagagtatgagacatacttagcaatgtcatgttcataacaataacgagaaggaggtttcccagcatttactctaggaactcttctttgcgcaagaggtaattcttcatgttcaggaatgggagaaatatggattggagagacattaccagctgggtctggagaggagtctgaagagagatatgggac

SEQ ID NO: 198908 - DNA, 957 bp, Zea Mays
tttgcttctttcgaccatgctttatagtgatgccatagtccagaatggcgctaccagcattgttggccagtgtgttattcagcttgccaaagtacatggaatccacaccatcaacattataagggacaggcctgggtcagaggaagcaaaaaacaaactcaaacaacttggtgcagatgaggtgttcacagaaactcagctagacatgaagaatgtcaagagcttgctgggtgctttgccagagcctgcattaggatttaactgtgttggaggaaatgctgcttctctaatactcaagcttttgaagcaaggaggcaccatggtgacatatggtggaatgtccaagagacctgtcactgtccctacttcatatttcatttttaaggatctatccctacgagggttctggctccagaagtggctgaactcagacaaaacagaagactgcagaagaatgattgactacctcttgggccttgtgcatgaaggcaaactcaaatacgagatggagtccatttctttcggcgagttcagcttggctctggagaaggccctgggcaaacatggaagccagccgaagcaagttatcaagttctgagaccagggcgggttagaggatctgagagcatgcgattgccatcgatctgtatgaatgatgaatccaacagttagctatgtcaagtgccagagttttaaatacaaataaagtaaaggcagcaatgtttaatggaattgtgaaatcagcagcttagctatatttgagcgctgtgttgattttgcaatgaaatcagcagcttagctatatgtcaagtaaagggtgcgtcaatttctattgcatctacagtgttattcttttgcagccacagctggtcagctgcagagcgcatcgtaaattctggacatgtcaattcttttgcagccacatgcccacagctacagtataataaacaagcctgg

SEQ ID NO: 198909 - DNA, 996 bp, Zea Mays
cgtcatccgcggcgcacgcctccgtccccgccccccagcccgtcgtcgtctctctccaactccatcgtcacccgcgccgcctacgcctgctgcgtcccggatagccccgcggcgccgtccgaccacgaatccggaatcccctcctcgctcgccctcctgcttgatcccgccgcggccgcctcagccgccactcctccctgtccctctagggctgccctgccgctccctcgtatcgcgcaatcggaggcctctccttccgccctccaatggtgctttgccagagcctgcattaggatttaactgtgttggaggaaatgctgcttctctaatactcaagcttttgaagcaaggaggcaccatggtgacatatggtggaatgtccaagagacctgtcactgtccctacttcatatttcatttttaaggatctatccctacgagggttctggctccagaagtggctgaactcagacaaaacagaagactgcagaagaatgattgactacctcttgggccttgtgcatgaaggcaaactcaaatacgagatggagtccatttctttcggcgagttcagcttggctctggagaaggccctgggcaaacatggaagccagccgaagcaagttatcaagttctgagaccagggcgggttagaggatctgagagcatgcgattgccatcgatctgtatgaatgatgaatccaacagttagctatgtcaagtgccagagttttaaatacaaataaagtaaaggcagcaatgtttaatggaattgtgaaatcagcagcttagctatatttgagcgctgtgttgattttgcaatgaaatcagcagcttagctatatgtcaagtaaagggtgcgtcaatttctattgcatctacagtgttattcttttgcagccacagctggtcagctgcagagcgcatcgtaaattctggacatgtcaattcttttgcagccacatgcccacagctacagtataataaacaagcctgg

SEQ ID NO: 198910 - DNA, 1096 bp, Zea Mays
cgtcatccgcggcgcacgcctccgtccccgccccccagcccgtcgtcgtctctctccaactccatcgtcacccgcgccgcctacgcctgctgcgtcccggatagccccgcggcgccgtccgaccacgaatccggaatcccctcctcgctcgccctcctgcttgatcccgccgcggccgcctcagccgccactcctccctgtccctctagggctgccctgccgctccctcgtatcgcgcaatcggaggcctctccttccgccctccaatgcctgggtcagaggaagcaaaaaacaaactcaaacaacttggtgcagatgaggtgttcacagaaactcagctagacatgaagaatgtcaagagcttgctgggtgctttgccagagcctgcattaggatttaactgtgttggaggaaatgctgcttctctaatactcaagcttttgaagcaaggaggcaccatggtgacatatggtggaatgtccaagagacctgtcactgtccctacttcatatttcatttttaaggatctatccctacgagggttctggctccagaagtggctgaactcagacaaaacagaagactgcagaagaatgattgactacctcttgggccttgtgcatgaaggcaaactcaaatacgagatggagtccatttctttcggcgagttcagcttggctctggagaaggccctgggcaaacatggaagccagccgaagcaagttatcaagttctgagaccagggcgggttagaggatctgagagcatgcgattgccatcgatctgtatgaatgatgaatccaacagttagctatgtcaagtgccagagttttaaatacaaataaagtaaaggcagcaatgtttaatggaattgtgaaatcagcagcttagctatatttgagcgctgtgttgattttgcaatgaaatcagcagcttagctatatgtcaagtaaagggtgcgtcaatttctattgcatctacagtgttattcttttgcagccacagctggtcagctgcagagcgcatcgtaaattctggacatgtcaattcttttgcagccacatgcccacagctacagtataataaacaagcctgg

SEQ ID NO: 198911 - DNA, 1343 bp, Zea Mays
cgtcatccgcggcgcacgcctccgtccccgccccccagcccgtcgtcgtctctctccaactccatcgtcacccgcgccgcctacgcctgctgcgtcccggatagccccgcggcgccgtccgaccacgaatccggaatcccctcctcgctcgccctcctgcttgatcccgccgcggccgcctcagccgccactcctccctgtccctctagggctgccctgccgctccctcgtatcgcgcaatcggaggcctctccttccgccctccaatggacctggcagacgtacattaccaagcatgagaacgtctggcacaaggtccgcagcgatgtacccatggagtacgctgccactatcaccgtcaacccattgaccgcacttaggatgctccaagactttgtaaaactcaatcctggtgatgccatagtccagaatggcgctaccagcattgttggccagtgtgttattcagcttgccaaagtacatggaatccacaccatcaacattataagggacaggcctgggtcagaggaagcaaaaaacaaactcaaacaacttggtgcagatgaggtgttcacagaaactcagctagacatgaagaatgtcaagagcttgctgggtgctttgccagagcctgcattaggatttaactgtgttggaggaaatgctgcttctctaatactcaagcttttgaagcaaggaggcaccatggtgacatatggtggaatgtccaagagacctgtcactgtccctacttcatatttcatttttaaggatctatccctacgagggttctggctccagaagtggctgaactcagacaaaacagaagactgcagaagaatgattgactacctcttgggccttgtgcatgaaggcaaactcaaatacgagatggagtccatttctttcggcgagttcagcttggctctggagaaggccctgggcaaacatggaagccagccgaagcaagttatcaagttctgagaccagggcgggttagaggatctgagagcatgcgattgccatcgatctgtatgaatgatgaatccaacagttagctatgtcaagtgccagagttttaaatacaaataaagtaaaggcagcaatgtttaatggaattgtgaaatcagcagcttagctatatttgagcgctgtgttgattttgcaatgaaatcagcagcttagctatatgtcaagtaaagggtgcgtcaatttctattgcatctacagtgttattcttttgcagccacagctggtcagctgcagagcgcatcgtaaattctggacatgtcaattcttttgcagccacatgcccacagctacagtataataaacaagcctgg

SEQ ID NO: 198912 - DNA, 710 bp, Zea Mays
cccttagccctccgtgtaccaagcatcgaccattcctccctatcctacctgaattaagagagatcatcacattggtctgatgattacctttgttcaggtaccgggaacataactatgccccatgtaacatcagcgaaagcacagtcgaaaacgaagccgtcaaacatgggtctcggaaacaaggaggctatggccatccaaccgaacgtaactgctggtcagtccacactggaaggtggtcacgagaggttacaggcaaccgtaagaaagatcttggaaatggtggacgcccaggaacaggaagaagcaatgccgccgaggccgtcccctggtttgctcgagctctcggaacgcgccactgctttgtcatgacgacttgacgacgctgtgaggttctggaggcgttattaagcatggactcgggttgtttaaccatgctaggtgatacagcgcccgatagggcgctattttttctagtgagacgtgtagaggaggcagtcgagtcatttcgcaggatacaagtcgaagacatcgagcctgacggtatgccattattgtcagtacttgcggcatgtagggatctaggtgcggttagtgggtgtatgtatttgaaggtatgaataggagtgttgtgtacgacttggatggcactaattactgttgatatgttttggcacgtgcaggtgaaaaatatggcgcttactaatatc

SEQ ID NO: 198913 - DNA, 1304 bp, Zea Mays
cttgctcccagtaccccccgtgccaccccaacgaagcgagacaccaacacgtaggccaacccctccgctgagtcgctgaccgcctcgcacccgtcgttcccctccttccggcacaaccagcacgcgagcggcacgagaagactagggttccggcgaggcgacggcgagaaccatggcagggattcgatggccgccagaggacccggagatcttcccttccaggatggtcagcggcggggcttgggtccccgtcgcgcccccaggagagatggcgtcggacgacgaccggtcggtggccgcggactcgtggtcgatcaagagcgactacggcagcaccctcgacgacgatcagcgttactccgacaccgccgaggtcctcctagcctcctcctccgcctcctctgcggccgcgccctccgcaacggttgccgtccacccctcctccgacttcagcttcgacaaggatgtccatgactccagctacgttgaacctcccttgctgggcttgcagaattttcaggatggtgcttacgctgaggatcttgcaaatttccatgaacgcagccacgctgatgactggtttggcactgatatcatggatatccgcgtaggttggaccaaaaatttgtgctcaagtagagatttacccagctgcagcgtacttgacattgggactgggagtggcagactcttgcagcagcttgcgaagcaggggttttctgatctgactgggattgactatagtgaaagtgcaattgagcttgctcgtagccttgcaatcggtgatgggtttgagcacattaatttcttggttgatgatgttttggagtcgaagttggagagaagatttgaacttgtcatggatgaagggactcttgatgcgattgggctccatcctgatggacctgtgaagagaatgatgtattggcagtccgttgatagcttggtttcccgtggtggtatattgcagaaccaaggatgagttggtgcaggaggtagagaacttcaaccaaaggaagcttggtgctgtgggctcaggctcagaaggattgccggctagtgaagctgcggtgttcagctacctggaccacgtccaaagttaccctagtgtggatagttcttgcataacgaccgttgctttacttcataagtgaaaaacataattgtattgtatgcttggtttattggccctagaaagttaccgtatacctgctacgatattaactatgtacccagtcacttgtgtatctggacaatattctactagtattttaccttgtcgggttggtattgctggatcctgg

SEQ ID NO: 198914 - DNA, 2091 bp, Zea Mays
tcgcattcacccagcgtgcgctctcttttgctctctctatctctctcgtggcaacgactgcgcgagcgccggcgcctacgccaggtgcccaggcctccgtcggtcatttcgccaggcattcgtcgcgggctcttcgccggcgacgagcacacccaccaagagaagcatgaacacggtggcactttccaaccatcaaaaggccagaagcagcagctgtgcacaacatgtgcaaaagggcatacttgtcaatcggtcatcaaccggacaagacaaatgcgagctctaatcgactcaaagaagccttaccaagcacactctgtattcaagcacttaatggatgaggggcacaagccttcattggtcacatacacaattctactgaccgccctgacgaaccagaggatgtttgagtcgattccatcactgcttgctgaagttgaactagctggagttaggccagactccatcttcttcaatgccttgataaatgcgtttgttgaggcgaagcggatgggcgaagcgataaacacattctggaaaatgaaacattctggctgccacccaactacaagcaccttcaacacactgataaaaggttatggcattgtaggcaaacccgaagaatcacagcgcgtcttcgacatgatgggcgttgaaggatcagtcaggcctaacctcacaacatacaacattcttgtgaaggcatggtgtgatcacagaaatcttgaggaggcctggggtgttgtgggcaaaatgcaagcaggtggttttgagcctgatattgtaacttacaataccatagccagtgcatatgccaataatgacgagacatggagagcagaagagctcattgtggagattcagactagagtgcgcaccagtgagcgaacatggggcataatcattggtggttattgccgggagggcaggttggaggaagcattacgatgcgtccagcaaatgaaggatgcaggaagtgttcctaacgtcgtcatcttcaacacactgctgaagggctttcttgatgcaaatgacatggctgctgtcaataagatcctgggtctgatggagaaatttggcatcaaacctgacatcgttacctacagtcaccagttgaacacattcagctcgctgggccacatggctaaatgcatgcatgtatttgacaaaatgatcgaagcaggaattgagccagatcctcaggtatacagcattctcgccaaaggatttgttcgtgctcagcagcctgagaaagcagaagaccttctgttgcaaatgagccatcttggtctctgcccaaatgtcgtcactttcaccactgtcattagcgggtggtgcagcgtggccgacatggagagtgccatgagagtctatgacaagatgtgcaagtcaggcgtctatcccaatctcaggacatttgagactctgatctggggctacagcgaacagaagcagccatggaaagctgaggaagtccttcagatgatgcgggagactggtgtcaagccgaagcaaagcacctactgtctcattgctgatgcatggaaggctgttggtttgactgagaacatcaacaactcaaatggttcccccaatggtccttatgcaatcgagaaattggatcattcaaatgacaattgcaacgtgcgaatatcagaagacaataataacaagctgcagttttttgatgaaagtaatgggcgtgcaatgaatggccgttcacgttccagttttcttcagataacaaatgcactaggcagcagtggtatagtttctgccaaggtcatgaaggctggagaatttccatctgaaagactgaaggctatcaaaaacacatcctttccacaaggatttcaattgttgcatctcgagttttgtaggaagcagcttcggaagaatggtggattctgtagtcagagcatcaactcattcaaaatgggtttctctagcagaggatgcatttattaattcgatgtacacattgggctgaaacttaaacaaaaacaaatctcggtgttccaagtctccgcctatgatgcgggccatttttatgattcagacgcagttcctgcagtgtcaagcatttcaaac

SEQ ID NO: 198915 - DNA, 2258 bp, Zea Mays
tcgcattcacccagcgtgcgctctcttttgctctctctatctctctcgtggcaacgactgcgcgagcgccggcgcctacgccaggtgcccaggcctccgtcggtcatttcgccaggcattcgtcgcgggctcttcgccggcgacgagcacacccaccaagttgaggattggtcctttacgagcatgttataatgggagagaacggagttcagctgacactgacctccactttgaagagcacaggcaagccacggatcaatgcggacgggctgaataatggatcacatactaccaaagtaagcatcggaaagcgtagagatatagaggagaagcatgaacacggtggcactttccaaccatcaaaaggccagaagcagcagctgtgcacaacatgtgcaaaagggcatacttgtcaatcggtcatcaaccggacaagacaaatgcgagctctaatcgactcaaagaagccttaccaagcacactctgtattcaagcacttaatggatgaggggcacaagccttcattggtcacatacacaattctactgaccgccctgacgaaccagaggatgtttgagtcgattccatcactgcttgctgaagttgaactagctggagttaggccagactccatcttcttcaatgccttgataaatgcgtttgttgaggcgaagcggatgggcgaagcgataaacacattctggaaaatgaaacattctggctgccacccaactacaagcaccttcaacacactgataaaaggttatggcattgtaggcaaacccgaagaatcacagcgcgtcttcgacatgatgggcgttgaaggatcagtcaggcctaacctcacaacatacaacattcttgtgaaggcatggtgtgatcacagaaatcttgaggaggcctggggtgttgtgggcaaaatgcaagcaggtggttttgagcctgatattgtaacttacaataccatagccagtgcatatgccaataatgacgagacatggagagcagaagagctcattgtggagattcagactagagtgcgcaccagtgagcgaacatggggcataatcattggtggttattgccgggagggcaggttggaggaagcattacgatgcgtccagcaaatgaaggatgcaggaagtgttcctaacgtcgtcatcttcaacacactgctgaagggctttcttgatgcaaatgacatggctgctgtcaataagatcctgggtctgatggagaaatttggcatcaaacctgacatcgttacctacagtcaccagttgaacacattcagctcgctgggccacatggctaaatgcatgcatgtatttgacaaaatgatcgaagcaggaattgagccagatcctcaggtatacagcattctcgccaaaggatttgttcgtgctcagcagcctgagaaagcagaagaccttctgttgcaaatgagccatcttggtctctgcccaaatgtcgtcactttcaccactgtcattagcgggtggtgcagcgtggccgacatggagagtgccatgagagtctatgacaagatgtgcaagtcaggcgtctatcccaatctcaggacatttgagactctgatctggggctacagcgaacagaagcagccatggaaagctgaggaagtccttcagatgatgcgggagactggtgtcaagccgaagcaaagcacctactgtctcattgctgatgcatggaaggctgttggtttgactgagaacatcaacaactcaaatggttcccccaatggtccttatgcaatcgagaaattggatcattcaaatgacaattgcaacgtgcgaatatcagaagacaataataacaagctgcagttttttgatgaaagtaatgggcgtgcaatgaatggccgttcacgttccagttttcttcagataacaaatgcactaggcagcagtggtatagtttctgccaaggtcatgaaggctggagaatttccatctgaaagactgaaggctatcaaaaacacatcctttccacaaggatttcaattgttgcatctcgagttttgtaggaagcagcttcggaagaatggtggattctgtagtcagagcatcaactcattcaaaatgggtttctctagcagaggatgcatttattaattcgatgtacacattgggctgaaacttaaacaaaaacaaatctcggtgttccaagtctccgcctatgatgcgggccatttttatgattcagacgcagttcctgcagtgtcaagcatttcaaac

SEQ ID NO: 198916 - DNA, 3021 bp, Zea Mays
cttgttagagagagtctaacgggccacgtgggcccgcacgacccaactattgaatacaatgaacaaacgcgtcggcccattgcgaagcctcacgtctccagcaccgggccaccggcggcgaggtcgcgcgagcgcaggcaggggtggtactgggaggggaggaggggaagaaggaggtgactgcgatgtcgagccggttctggaggtggtacgcggaccggcagttccacaagtgggagaagacggtgctgtgggacatggtggagccctaccgcccgccgcgctccttcgcgccactcgtcggcacctacgtcgccgccttctacaccggcgtcgtcggggccgccgtcaccgagcagctctacaaggagaagtactgggaggatcaccccggcgaggcggtgccgatcatgccgcccaagttctactgggggccttggagggtgatgaacggagaagttccgcgcttcattcagccgcccgacgaggccaagacggcgtaggagcttcgagcttgcttcaaaacttttcagaagaagcatgtatctggtctcgatcgaaaaaaagaaattggagccctgcttttgtgcctctcccactctcctggttgtacgcctgtacctgtctgtctggaatacacgagtaagataagatcaggagaactgaagacctcaaataaagaaaaaaatcagaaaacgttggcatggatacctactaccctaccctagctagattctagctcccattctgttctattgcttgagtattgttgcacgtctccacaatattctgtcgttctaacttccaggcaaacatgctgccgattgatgatcatatctgaatagaatataaagatagctcaaatatgatcgtgtttttcatgtgtgttattttccaaataaacaatacaatctccattcacctttaagcacacaaccgcggactcgaactaggctcaccggagttgaagaaaccctgtaagcacacaaccgcgtggtggatctcgcggccgactgcactgggaggtggccggcgcggcgcagcgctggcggcatgctctgggcgagttgaagcttttgggctgggctaatttcggttctttttgacgttcgggtaccgggctggtactgggagtcagtacccaaatggagggcatcagacaaacaaacagaacctttaaagtgccagaccgccgcatccgccgccactagcggagactgccccgccgcgctttctccaagttcagctgacggccgccgtgcctactccaggccccgccgacgccctgtgaagaagaccctggttgcgctggcgcccatcgcgagcaagaagctctgaaactcgacggcggagcctcaagctcgtgcgccgaagttcattctttcgccctgtagaaacaaagggcagatgagaggataactgtactggtcattggtggtggaggcagggagcatgctctttgttatgccttgaaccattccccatcatgtgctgcagttctatgtgcccctggtaatgctggtattgctcagtcccgggatgcaacatgtatcccagatttggacatctcgagtagtgatgatgttatctcattctgccgcaagaggggagtgggaatggttgtagtgggccctgaagcccctcttgtcgcgggtcttgcaaatgaccttgtcaaagttgggataccaacctttggcccttcatcagaggctgcagctttagaaggatcaaaggacttcatgaagaagctgtgtgataagtataatatccctacagctaagtatcacacatttacggatgctgtggaagctaaaaaatatgtaaaaaatgaaggagcacctattgttgttaaagctgatggactggctgctggaaagggtgtggttgttgcaatgactttggatgaggcgttggaagccatagattctatgttggttgaaggctcattcggttctgctggttcacgggttatcatcgaagaatttctagagggtgaagaagcgtctttctttgcattggtagacggcgaaaatgctttgcctcttgaatcggcacaggatcacaaaagagttggtgatggtgatgttggcccaaataccggtggtatgggtgcatactcccctgctccaatagtgacagatgagctcaaacgcattgtaatggaaagtataattatccctactgttaaaggcatggcagccgaaggttgcaaatttgttggtgtattatacgcagggcttatgatagagaagaaatctgggctgcccaagcttattgagtacaatgtaagatttggtgacccagaatgccaggttctgatgatgcgattagaatctgatctggcacaagttctgttatctgcttgcaaaggagagttgagcaatgtttcactgacctggtctcctgaaatggctatggtggttgtgatggcaagccagggataccctggctcttataagaaggggaccgtaataaaaaacgtggacaaggctgagcgagtgtctccagctgtcaagatattccatgctgggacagcagtagatggtgatggcaatcttgttgccgttggagggagagtccttggcttcactgccaagggcaaggacatcgaggaagcaagggcaagagcgtacggtgcggtagacgctatcgagtgggtagaagggttctgcaggcgtgacattggttggagagcactgaggcagaagcaagtggctaaccagtagctattccatgaccatgagatttccccagagaaccgcaactacggtgagcctgtactgtttacaagtaataaaaagggaaacggtgcgacccccattgtttttggttgtggaaagacaagtattgctgatcaaacagtagttaacacctgttgatttcagcatgattcggtatatgtttgcaccgatattgtgttcagagtccagacaagcgctagagtgaaaacagcgcgcgccatctgaattctgaccaattgtcttcagttatcggataagtggacctttccaaataattgtg

SEQ ID NO: 198917 - DNA, 3254 bp, Zea Mays
cttgttagagagagtctaacgggccacgtgggcccgcacgacccaactattgaatacaatgaacaaacgcgtcggcccattgcgaagcctcacgtctccagcaccgggccaccggcggcgaggtcgcgcgagcgcaggcaggggtggtactgggaggggaggaggggaagaaggaggtgactgcgatgtcgagccggttctggaggtggtacgcggaccggcagttccacaagtgggagaagacggtgctgtgggacatggtggagccctaccgcccgccgcgctccttcgcgccactcgtcggcacctacgtcgccgccttctacaccggcgtcgtcggggccgccgtcaccgagcagctctacaaggagaagtactgggaggatcaccccggcgaggcggtgccgatcatgccgcccaagttctactgggggccttggagggtgatgaacggagaagttccgcgcttcattcagccgcccgacgaggccaagacggcgtaggagcttcgagcttgcttcaaaacttttcagaagaagcatgtatctggtctcgatcgaaaaaaagaaattggagccctgcttttgtgcctctcccactctcctggttgtacgcctgtacctgtctgtctggaatacacgagtaagataagatcaggagaactgaagacctcaaataaagaaaaaaatcagaaaacgttggcatggatacctactaccctaccctagctagattctagctcccattctgttctattgcttgagtattgttgcacgtctccacaatattctgtcgttctaacttccaggcaaacatgctgccgattgatgatcatatctgaatagaatataaagatagctcaaatatgatcgtgtttttcatgtgtgttattttccaaataaacaatacaatctccattcacctttaagcacacaaccgcggactcgaactaggctcaccggagttgaagaaaccctgtaagcacacaaccgcgtggtggatctcgcggccgactgcactgggaggtggccggcgcggcgcagcgctggcggcatgctctgggcgagttgaagcttttgggctgggctaatttcggttctttttgacgttcgggtaccgggctggtactgggagtcagtacccaaatggagggcatcagacaaacaaacagaacctttaaagtgccagaccgccgcatccgccgccactagcggagactgccccgccgcgctttctccaagttcagctgacggccgccgtgcctactccaggccccgccgacgccctgtgaagaagaccctggttgcgctggcgcccatcgcgagcaagaagctctgaaactcgacggcggagcctcaagctcgtgcgccgaagttcattctttcgccctgtagaaacaaagggcagaaattggctaggactatcctggccccccactggccatggcgtgtgctgcttacagcatcagaagccctctcaagctcgctgtaaggcacggctcggatgtgttgagtagcaacaacttgtgcaatggctttaagtcttcggtgtcttacctcaattctcaacgttggagcagcaactgctcagccgtcacaatgcggcatgtcgcatcccattgtcactcgattgttaagactccagcaatgtggccctcaaaagcttcagcaactgatgcagccacagcttccgatgagaggataactgtactggtcattggtggtggaggcagggagcatgctctttgttatgccttgaaccattccccatcatgtgctgcagttctatgtgcccctggtaatgctggtattgctcagtcccgggatgcaacatgtatcccagatttggacatctcgagtagtgatgatgttatctcattctgccgcaagaggggagtgggaatggttgtagtgggccctgaagcccctcttgtcgcgggtcttgcaaatgaccttgtcaaagttgggataccaacctttggcccttcatcagaggctgcagctttagaaggatcaaaggacttcatgaagaagctgtgtgataagtataatatccctacagctaaggagcacctattgttgttaaagctgatggactggctgctggaaagggtgtggttgttgcaatgactttggatgaggcgttggaagccatagattctatgttggttgaaggctcattcggttctgctggttcacgggttatcatcgaagaatttctagagggtgaagaagcgtctttctttgcattggtagacggcgaaaatgctttgcctcttgaatcggcacaggatcacaaaagagttggtgatggtgatgttggcccaaataccggtggtatgggtgcatactcccctgctccaatagtgacagatgagctcaaacgcattgtaatggaaagtataattatccctactgttaaaggcatggcagccgaaggttgcaaatttgttggtgtattatacgcagggcttatgatagagaagaaatctgggctgcccaagcttattgagtacaatgtaagatttggtgacccagaatgccaggttctgatgatgcgattagaatctgatctggcacaagttctgttatctgcttgcaaaggagagttgagcaatgtttcactgacctggtctcctgaaatggctatggtggttgtgatggcaagccagggataccctggctcttataagaaggggaccgtaataaaaaacgtggacaaggctgagcgagtgtctccagctgtcaagatattccatgctgggacagcagtagatggtgatggcaatcttgttgccgttggagggagagtccttggcttcactgccaagggcaaggacatcgaggaagcaagggcaagagcgtacggtgcggtagacgctatcgagtgggtagaagggttctgcaggcgtgacattggttggagagcactgaggcagaagcaagtggctaaccagtagctattccatgaccatgagatttccccagagaaccgcaactacggtgagcctgtactgtttacaagtaataaaaagggaaacggtgcgacccccattgtttttggttgtggaaagacaagtattgctgatcaaacagtagttaacacctgttgatttcagcatgattcggtatatgtttgcaccgatattgtgttcagagtccagacaagcgctagagtgaaaacagcgcgcgccatctgaattctgaccaattgtcttcagttatcggataagtggacctttccaaataattgtg

SEQ ID NO: 198918 - DNA, 3219 bp, Zea Mays
cttgttagagagagtctaacgggccacgtgggcccgcacgacccaactattgaatacaatgaacaaacgcgtcggcccattgcgaagcctcacgtctccagcaccgggccaccggcggcgaggtcgcgcgagcgcaggcaggggtggtactgggaggggaggaggggaagaaggaggtgactgcgatgtcgagccggttctggaggtggtacgcggaccggcagttccacaagtgggagaagacggtgctgtgggacatggtggagccctaccgcccgccgcgctccttcgcgccactcgtcggcacctacgtcgccgccttctacaccggcgtcgtcggggccgccgtcaccgagcagctctacaaggagaagtactgggaggatcaccccggcgaggcggtgccgatcatgccgcccaagttctactgggggccttggagggtgatgaacggagaagttccgcgcttcattcagccgcccgacgaggccaagacggcgtaggagcttcgagcttgcttcaaaacttttcagaagaagcatgtatctggtctcgatcgaaaaaaagaaattggagccctgcttttgtgcctctcccactctcctggttgtacgcctgtacctgtctgtctggaatacacgagtaagataagatcaggagaactgaagacctcaaataaagaaaaaaatcagaaaacgttggcatggatacctactaccctaccctagctagattctagctcccattctgttctattgcttgagtattgttgcacgtctccacaatattctgtcgttctaacttccaggcaaacatgctgccgattgatgatcatatctgaatagaatataaagatagctcaaatatgatcgtgtttttcatgtgtgttattttccaaataaacaatacaatctccattcacctttaagcacacaaccgcggactcgaactaggctcaccggagttgaagaaaccctgtaagcacacaaccgcgtggtggatctcgcggccgactgcactgggaggtggccggcgcggcgcagcgctggcggcatgctctgggcgagttgaagcttttgggctgggctaatttcggttctttttgacgttcgggtaccgggctggtactgggagtcagtacccaaatggagggcatcagacaaacaaacagaacctttaaagtgccagaccgccgcatccgccgccactagcggagactgccccgccgcgctttctccaagttcagctgacggccgccgtgcctactccaggccccgccgacgccctgtgaagaagaccctggttgcgctggcgcccatcgcgagcaagaagctctgaaactcgacggcggagcctcaagctcgtgcgccgaagttcattctttcgccctgtagaaacaaagggcagaaattggctaggactatcctggccccccactggccatggcgtgtgctgcttacagcatcagaagccctctcaagctcgctgtaagcaactgctcagccgtcacaatgcggcatgtcgcatcccattgtcactcgattgttaagactccagcaatgtggccctcaaaagcttcagcaactgatgcagccacagcttccgatgagaggataactgtactggtcattggtggtggaggcagggagcatgctctttgttatgccttgaaccattccccatcatgtgctgcagttctatgtgcccctggtaatgctggtattgctcagtcccgggatgcaacatgtatcccagatttggacatctcgagtagtgatgatgttatctcattctgccgcaagaggggagtgggaatggttgtagtgggccctgaagcccctcttgtcgcgggtcttgcaaatgaccttgtcaaagttgggataccaacctttggcccttcatcagaggctgcagctttagaaggatcaaaggacttcatgaagaagctgtgtgataagtataatatccctacagctaagtatcacacatttacggatgctgtggaagctaaaaaatatgtaaaaaatgaaggagcacctattgttgttaaagctgatggactggctgctggaaagggtgtggttgttgcaatgactttggatgaggcgttggaagccatagattctatgttggttgaaggctcattcggttctgctggttcacgggttatcatcgaagaatttctagagggtgaagaagcgtctttctttgcattggtagacggcgaaaatgctttgcctcttgaatcggcacaggatcacaaaagagttggtgatggtgatgttggcccaaataccggtggtatgggtgcatactcccctgctccaatagtgacagatgagctcaaacgcattgtaatggaaagtataattatccctactgttaaaggcatggcagccgaaggttgcaaatttgttggtgtattatacgcagggcttatgatagagaagaaatctgggctgcccaagcttattgagtacaatgtaagatttggtgacccagaatgccaggttctgatgatgcgattagaatctgatctggcacaagttctgttatctgcttgcaaaggagagttgagcaatgtttcactgacctggtctcctgaaatggctatggtggttgtgatggcaagccagggataccctggctcttataagaaggggaccgtaataaaaaacgtggacaaggctgagcgagtgtctccagctgtcaagatattccatgctgggacagcagtagatggtgatggcaatcttgttgccgttggagggagagtccttggcttcactgccaagggcaaggacatcgaggaagcaagggcaagagcgtacggtgcggtagacgctatcgagtgggtagaagggttctgcaggcgtgacattggttggagagcactgaggcagaagcaagtggctaaccagtagctattccatgaccatgagatttccccagagaaccgcaactacggtgagcctgtactgtttacaagtaataaaaagggaaacggtgcgacccccattgtttttggttgtggaaagacaagtattgctgatcaaacagtagttaacacctgttgatttcagcatgattcggtatatgtttgcaccgatattgtgttcagagtccagacaagcgctagagtgaaaacagcgcgcgccatctgaattctgaccaattgtcttcagttatcggataagtggacctttccaaataattgtg

SEQ ID NO: 198919 - DNA, 1922 bp, Zea Mays
ctgctctgcttgttcagtgcttgaaattggctaggactatcctggccccccactggccatggcgtgtgctgcttacagcatcagaagccctctcaagctcgctgtaaggcacggctcggatgtgttgagtagcaacaacttgtgcaatggctttaagtcttcggtgtcttacctcaattctcaacgttggagcagcaactgctcagccgtcacaatgcggcatgtcgcatcccattgtcactcgattgttaagactccagcaatgtggccctcaaaagcttcagcaactgatgcagccacagcttccgatgagaggataactgtactggtcattggtggtggaggcagggagcatgctctttgttatgccttgaaccattccccatcatgtgctgcagttctatgtgcccctggtaatgctggtattgctcagtcccgggatgcaacatgtatcccagatttggacatctcgagtagtgatgatgttatctcattctgccgcaagaggggagtgggaatggttgtagtgggccctgaagcccctcttgtcgcgggtcttgcaaatgaccttgtcaaagttgggataccaacctttggcccttcatcagaggctgcagctttagaaggatcaaaggacttcatgaagaagctgtgtgataagtataatatccctacagctaagtatcacacatttacggatgctgtggaagctaaaaaatatgtaaaaaatgaaggagcacctattgttgttaaagctgatggactggctgctggaaagggtgtggttgttgcaatgactttggatgaggcgttggaagccatagattctatgttggttgaaggctcattcggttctgctggttcacgggttatcatcgaagaatttctagagggtgaagaagcgtctttctttgcattggtagacggcgaaaatgctttgcctcttgaatcggcacaggatcacaaaagagttggtgatggtgatgttggcccaaataccggtggtatgggtgcatactcccctgctccaatagtgacagatgagctcaaacgcattgtaatggaaagtataattatccctactgttaaaggcatggcagccgaaggttgcaaatttgttggtgtattatacgcagggcttatgatagagaagaaatctgggctgcccaagcttattgagtacaatgtaagatttggtgacccagaatgccaggttctgatgatgcgattagaatctgatctggcacaagttctgttatctgcttgcaaaggagagttgagcaatgtttcactgacctggtctcctgaaatggctatggtggttgtgatggcaagccagggataccctggctcttataagaaggggaccgtaataaaaaacgtggacaaggctgagcgagtgtctccagctgtcaagatattccatgctgggacagcagtagatggtgatggcaatcttgttgccgttggagggagagtccttggcttcactgccaagggcaaggacatcgaggaagcaagggcaagagcgtacggtgcggtagacgctatcgagtgggtagaagggttctgcaggcgtgacattggttggagagcactgaggcagaagcaagtggctaaccagtagctattccatgaccatgagatttccccagagaaccgcaactacggtgagcctgtactgtttacaagtaataaaaagggaaacggtgcgacccccattgtttttggttgtggaaagacaagtattgctgatcaaacagtagttaacacctgttgatttcagcatgattcggtatatgtttgcaccgatattgtgttcagagtccagacaagcgctagagtgaaaacagcgcgcgccatctgaattctgaccaattgtcttcagttatcggataagtggacctttccaaataattgtg

SEQ ID NO: 198920 - DNA, 474 bp, Zea Mays
aaagattttcccttttttatcaacctgacacactcattccttgatggatgggttatttttgcggaatacgctaaacccagaccaccgccggaggaaacagggatgaattcgcagccccagcagtcatggggagctccatcaggttcctggggtgcacagtagatgaagtgatattgtgagagcccctccctgtcccagccctggggctcgtagcggatcgtgagggatgaatttgtgtgtggtgtgtcgcaggtgtgaatgcctttgttgtccaaatattcctacgtgttggggtggtcgcttgctcgcgtccacgtctttcacatgaattggttactgtggtagttgtagttctggatacggtaccaaaacaaaagtattgctgtcaacaatctgcaacagccgggaaaacagtcgaaaacctttgcaaataatgcctgctgccgtggaaaatgtcgtctcctctgcttgtgg

SEQ ID NO: 198921 - DNA, 1579 bp, Zea Mays
ctcttctaatttaaacctctgctgcaagggagcgagagagagagagagaggagaggcacacagcgcgcagagagactagagagagagggtttgtcctcctgcctgccttggcttggctagcttggcctcccctccacctccatcggtgtattacatccgagggcactccatctcttgcgtcccttaacccctccaccaatccaatccaatcccttaaccccgcaccgaatccagacttcgaagcttcctcttcctcccggtcccggccccggccccggccccggagccctgttcttggtacttaggacaaggactgatgggcgaccatctcgcgttgatcgtggaccggctgctgacagagtcgacgctggaggcggcgatcggcggtgggaagcacatggtcgatctgcgtcaggagacggtggatgtcgagtactgccatcgcgggctaggcggcggctcggcgaccaaggtggtggagtgcaggatttgccaggaggaggactgggacacctgcatggaggccccctgcgcctgttgtggcagcctcaagttcctttcttgcagtatgcgcatcggaaatgcattcagcgctggtgcaatgagaaaggcgacactatgtgtgaaatatgcctgcagcaattcaggccaggttatacttctccacaacagctgtttcactatggaagtataccaatgaatttcagagggaactgggagattgccaggcaagatctcaatgattcccagataataacaatgatgcccacggagcgtgattttatggacaattacgatgactactttcctatcaggacaagaagcagcaccttgtgttgccggacaattgccataattttcatgtcactcctggtccttcgccacactcttcctcttgtgattggtgacaatggggagtactcattggccttattctcgcttctggtgctgagaactgcgggaatcctctttccaatcctggtgatggtgagagcattggcaagcttccatcatcgacggcggcagcaggaaagccaggaagcatatatatcttcatcagagagcgaggaggaagaggaagagtatacagttgccaattctgcacaaacaaactactcgcaaccgcgcttcataccagtctactgacatggccaagaacaagccttccaacctcacatctgacagggaattccagcgcctgagtttagctgacagatgcaaggatgaatggatgatcacaaggggggaaattacaaaattgtgaatgtggtgacatagtaagatagcctgaagccactcgcttctatgcccatagagaagaatgtagtggccctgctacttgtacataggagagagtacagcagcagagtgctgacaaacccggatactgtgactcgagtctctactgcagtaacccttgtgcactgctctccccgtctcaaattatttgttatgaccttacgtagtttttgttatgcatctagatatcaactatatctagatacatcacaaaaatatttacctaagaaagttaaataatttataatttgaatttaaggtcctctttatttactctata

SEQ ID NO: 198922 - DNA, 1605 bp, Zea Mays
cacccattaaccttaccttgcctctcttctaatttaaacctctgctgcaagggagcgagagagagagagagaggagaggcacacagcgcgcagagagactagagagagagggtttgtcctcctgcctgccttggcttggctagcttggcctcccctccacctccatcggtgtattacatccgagggcactccatctcttgcgtcccttaacccctccaccaatccaatccaatcccttaaccccgcaccgaatccagacttcgaagcttcctcttcctcccggtcccggccccggccccggccccggagccctgttcttggtacttaggacaaggactgatgggcgaccatctcgcgttgatcgtggaccggctgctgacagagtcgacgctggaggcggcgatcggcggtgggaagcacatggtcgatctgcgtcaggagacggtggatgtcgagtactgccatcgcgggctaggcggcggctcggcgaccaaggtggtggagtgcaggatttgccaggaggaggactgggacacctgcatggaggccccctgcgcctgttgtggcagcctcaagtatgcgcatcggaaatgcattcagcgctggtgcaatgagaaaggcgacactatgtgtgaaatatgcctgcagcaattcaggccaggttatacttctccacaacagctgtttcactatggaagtataccaatgaatttcagagggaactgggagattgccaggcaagatctcaatgattcccagataataacaatgatgcccacggagcgtgattttatggacaattacgatgactactttcctatcaggacaagaagcagcaccttgtgttgccggacaattgccataattttcatgtcactcctggtccttcgccacactcttcctcttgtgattggtgacaatggggagtactcattggccttattctcgcttctggtgctgagaactgcgggaatcctctttccaatcctggtgatggtgagagcattggcaagcttccatcatcgacggcggcagcagatcatttaacactgcaggaaagccaggaagcatatatatcttcatcagagagcgaggaggaagaggaagagtatacagttgccaattctgcacaaacaaactactcgcaaccgcgcttcataccagtctactgacatggccaagaacaagccttccaacctcacatctgacagggaattccagcgcctgagtttagctgacagatgcaaggatgaatggatgatcacaaggggggaaattacaaaattgtgaatgtggtgacatagtaagatagcctgaagccactcgcttctatgcccatagagaagaatgtagtggccctgctacttgtacataggagagagtacagcagcagagtgctgacaaacccggatactgtgactcgagtctctactgcagtaacccttgtgcactgctctccccgtctcaaattatttgttatgaccttacgtagtttttgttatgcatctagatatcaactatatctagatacatcacaaaaatatttacctaagaaagttaaataatttataatttgaatttaaggtcctctttatttactctata

SEQ ID NO: 198923 - DNA, 1719 bp, Zea Mays
atatgatgtaataggataccagtgccatttcccacccattaaccttaccttgcctctcttctaatttaaacctctgctgcaagggagcgagagagagagagagaggagaggcacacagcgcgcagagagactagagagagagggtttgtcctcctgcctgccttggcttggctagcttggcctcccctccacctccatcggtgtattacatccgagggcactccatctcttgcgtcccttaacccctccaccaatccaatccaatcccttaaccccgcaccgaatccagacttcgaagcttcctcttcctcccggtcccggccccggccccggccccggagccctgttcttggtacttaggacaagacgctccgagaccctcgagattgagagctcgctcgctcgctcggtgtcttcgccagctgcccaccctccttcctgctcgtccccccgctcgcgcctcctcttcctcggactgatgggcgaccatctcgcgttgatcgtggaccggctgctgacagagtcgacgctggaggcggcgatcggcggtgggaagcacatggtcgatctgcgtcaggagacggtggatgtcgagtactgccatcgcgggctaggcggcggctcggcgaccaaggtggtggagtgcaggatttgccaggaggaggactgggacacctgcatggaggccccctgcgcctgttgtggcagcctcaagtatgcgcatcggaaatgcattcagcgctggtgcaatgagaaaggcgacactatgtgtgaaatatgcctgcaggccaggttatacttctccacaacagctgtttcactatggaagtataccaatgaatttcagagggaactgggagattgccaggcaagatctcaatgattcccagataataacaatgatgcccacggagcgtgattttatggacaattacgatgactactttcctatcaggacaagaagcagcaccttgtgttgccggacaattgccataattttcatgtcactcctggtccttcgccacactcttcctcttgtgattggtgacaatggggagtactcattggccttattctcgcttctggtgctgagaactgcgggaatcctctttccaatcctggtgatggtgagagcattggcaagcttccatcatcgacggcggcagcaggaaagccaggaagcatatatatcttcatcagagagcgaggaggaagaggaagagtatacagttgccaattctgcacaaacaaactactcgcaaccgcgcttcataccagtctactgacatggccaagaacaagccttccaacctcacatctgacagggaattccagcgcctgagtttagctgacagatgcaaggatgaatggatgatcacaaggggggaaattacaaaattgtgaatgtggtgacatagtaagatagcctgaagccactcgcttctatgcccatagagaagaatgtagtggccctgctacttgtacataggagagagtacagcagcagagtgctgacaaacccggatactgtgactcgagtctctactgcagtaacccttgtgcactgctctccccgtctcaaattatttgttatgaccttacgtagtttttgttatgcatctagatatcaactatatctagatacatcacaaaaatatttacctaagaaagttaaataatttataatttgaatttaaggtcctctttatttactctata

SEQ ID NO: 198924 - DNA, 1258 bp, Zea Mays
aggtgtgacggcggcgtggacgcgtcaccgtcacgtcgcgtggcgcagagcgagagcggtatatgcgtatgccggccgcacgacgcccgaatgctgaccacacgacacaacaagtacccaaccactccttgattcccctttcctccctctcgcattcgtctccaccagccggtcggacttcttgcgctccaagaactcggcgagcaaaaaggagtcaacccaccatcacatgaggcattcagcgatgagtggttggaaaatggccagtgcccacttgcgcggtcttaccgggcaatgagtggtgttttgcccctcgttgccaaggccttacagccaccagctggtatgaagctgaagtgcccacctgctgtggttgctgtccgagctgcccttgcgcgaactgcgcttgtgaaatccctccgaccacagcccctgccctcaaagatggtagccattgcactactggggatggcagcaaacatccctcttggggtgtggcgggagcacaccaagaagttctctcctcagtggtttgcagctgtccatgccgctgttccgttcattgcaatgctgaggaagtctgttgtgatgcccaggactgcgatggcattcaccatagcagcctccattgttggccagacaattgggtcaagggctgagcgcatccgtctaaggaatcaggcggcaaatggtactggtgattcttcaacgcacactgctatgtatccaaacaagaatgggcattgcagcgacactgaaggcaaggcatgggaccctcttgcgacgaagataacaggctcaactgctaggggttctcctgcaccaaccccaagcgtgtgcttctgattgtgttaagcatgtgattcacgcacacctgtgaagagattatacatgaaccagtttatcttatagtgccatgtaattgccttgtgtgtcccagaaaactgagctgcccgtgtgcgataagtagaataagaggtgctaccccactgtttgctgtgttgctatggtcgagattgatgtattgatgctgctgcatttctttctttttgttaatgtgtggtggcgtttctcgcttctgtaaagcagctgaagctgtcacatcatttgatcagttgaagctgtatgttaccatgtgtgtgccatttaatgtttggagttatgaaatgaggcacatgtctcgaccctgaaataacatatagttcttctgcactgtgagaatgctgccctctgttcatgtctatattttagttcaagg

SEQ ID NO: 198925 - DNA, 930 bp, Zea Mays
ttccattcgagtggcgcgtagagcggagccgcggaggagagataagatcgttgtcgtgactcgtgattcgtgaacggcggcgacaagaagccgggagagatgccgctggccacaactgctccgacgccggcgccgccctgtcctccgccgagtccagcagcggcaccagtccggacgcagctcctctcctccgtcgcgaagctcgcgctcacggccgcgctcgtgtgcggctctggcggtcccgctgccgtcgtcgtcgttccggccgccgctcaggccgtcccgttcgtccgtcctcctcctcctcccctgcaaggaaggcccttcgcctcctccactccttacgcgcagtcccagaagctgcagcttggcctcgacaagctcggaaagatcaggccatgcccgtccaccaacccggggtgcgtgtccaccaacccgctgggatcctccggctccttcgcctcgccactgctcatcccggaatcatccgcaggggagaagaccgtcgccaaaagaaattctagctcttcccctttccaaattaaacatagcgtcaatcgtgtgatgctttgcttttgcgtttctcaattgatctcttgctactttgtggtggccggcggcgtacgtacctgctgcaagtcgctgcggcaagccatcgagaagacgcagcgtaatgtggagtttaaggtcgacgaagacactccatatggacactacatcgaggcggagatggacggcggcgtcggccgggacgtgatggagttcctggtgaagaaagacgccggcgtggtggcgtaccggtgcatggccaccaaggtcaccttcgtctaccccttcaccaccgctgtcggcgactccaagggccagaagcagaggatcgcggccatctcgcaggagctcggatggaccttatggcgatgagcatcggta

SEQ ID NO: 198926 - DNA, 760 bp, Zea Mays
agatcgttgtcgtgactcgtgattcgtgaacggcggcgacaagaagccgggagagatgccgctggccacaactgctccgacgccggcgccgccctgtcctccgccgagtccagcagcggcaccagtccggacgcagctcctctcctccgtcgcgaagctcgcgctcacggccgcgctcgtgtgcggctctggcggtcccgctgccgtcgtcgtcgttccggccgccgctcaggccgtcccgttcgtccgtcctcctcctcctcccctgcaaggaaggcccttcgcctcctccactccttacgcgcagtcccagaagctgcagcttggcctcgacaagctcgggccatgcccgtccaccaacccggggtgcgtgtccaccaacccgctgggatcctccggctccttcgcctcgccactgctcatcccggaatcatccgcaggggagaagaccgtcgcctcgctgcggcaagccatcgagaagacgcagcgtaatgtggagtttaaggtcgacgaagacactccatatggacactacatcgaggcggagatggacggcggcgtcggccgggacgtgatggagttcctggtgaagaaagacgccggcgtggtggcgtaccggtgcatggccaccaaggtcaccttcgtctaccccttcaccaccgctgtcggcgactccaagggccagaagcagaggatcgcggccatctcgcaggagctcggatgaaaagtaagaggagatatcttccttaagttttcatct

SEQ ID NO: 198927 - DNA, 2191 bp, Zea Mays
gggcgatctggacggtgcattgctatcggggccaggccaaccggcacgtttccgaagcctcacggacgggacgggtcacgggtgcaccattcttgacgcccacccaaatccatggcgagctcgccgcgatctccgccggcgcctacgccggaattcgagatctctcggcagtcccgcctctttgcggcgttgtccaagaaggtgatataggtctcgatgaactgaggatgctggcggctcagggagtccagacgcggcgggcgtccaggcgaccgtgtggaagctgctactgggctatctgcccaatgaccgcgcgctgtggcctgtggctgtgggagcagaggagctggcaaagaagagaggacagtacgctgctttcaaagtttttgttgcacatatggtatctagtttatggccaccaatgcctgactagatagatcctctcccaaaaatagagaccccgaatcctgaatttgctaaagtgcaaacagaaggccccactacaacgtaaatgcagaacatgttcacaatgggttcctgcacaggtcagagtaacccgagaggagcaccctttaagccttgggaagaccagtgcttggaatcagttttttgagtactcggagattatggagcagattgaccgcgatgtaaagcgcgcccaccctgacatgcatttcttctgtagcgactcgtcttttgcaaagtccaatcaggaatctttgaaaaatgcactgttaatctttgccaagctgaatgctggaataggatatgtacaaggatgaatgaaattctggcaccgctctttgtatttcggagtgatccggatgataaaaatgctcgggttcattgttttgtttcgtcgagctggttagtgggtttagagacaacttctgccagaaactagacaacagtgctgttggagttcgagctacactagctgactagccaagttatcacagcttgtagcaaagcatgatggaggtctccaacaacatttggaaataactacagaagttaatccccagttctatgcgttcagatggataccgttaccgctgacccaggaattcaacttcgcagataccattcacattttgggacacagtattaagtgatcgtgatagcctccaggataccttgctcagaattacctgccaacgaacatcagccataacctctactccgccaacaaattgcagtgcaccgatctcttttgcgcccgaagcgctgctgtgtttgttcagccgggtgtggctgagtcccagcagcattgcaaaaggaatacagaactgaacccttgcggcgacggtttatttatcatgaccattaacctgacgccctgcatgttgtagcctgtacatgttcacctgacaacgatttattgcatcccagttaatcaaggtgaataataaattgtatcctgccatgtttacgctacacctgggacacatacaacagaacagaacagaacagttggcggcaatcacacaacacagtgtagatctcaccattgttggtttgctgctgccattcttctgcactgtacggtttcttttactactgctgaagtatcactacagggatagaactgagaacccatgtatggtgcgcgttagtgtccccccccagaattccataccccagaacagtgctgtgttttggtggagggaggaagggggcagcttcggtgacgccgaaaggctacaccgctacgactggccctttgcccctcgttcccagagctgctcagcttcagcttcacagctccagaagtgccggcgcgcgtgccgcttcctccgcattgggcgatgcccagctggctggcagttggagctgcggacggacgcggccgccggcgcagccgcgctggtgcagggtgttgagatcctcaagccggaaggccggaaccggaagttgtccggaaccggtctcggtgcaagtgacaggcgagctgctgcaccgcagcaccgtcgtcgtcgatacgcgcgcatgaatgctcggcgttgtgttgcccggcgtggcgtcagaaacggatcggcgatggagatggagttgcagttgctcggagggtgcaatgcaagcacaaacaaagcacagcacaagacgaagcaagcaacacatgacacatgcatagtggcatacgggtgcgaccgctagtttgtcttgtcctactcactgccctgccagagag

SEQ ID NO: 198928 - DNA, 2006 bp, Zea Mays
atcggggccaggccaaccggcacgtttccgaagcctcacggacgggacgggtcacgggtgcaccattcttgacgcccacccaaatccatggcgagctcgccgcgatctccgccggcgcctacgccggaattcgagatctctcggcagtcccgcctctttgcggcgctgctactgggctatctgcccaatgaccgcgcgctgtggcctgtggctgtgggagcagaggagctggcaaagaagagaggacagtacgctgctttcaaaggcgagttccttagaaacccttactcggagattatggagcagattgaccgcgatgtaaagcgcgcccaccctgacatgcatttcttctgtagcgactcgtcttttgcaaagtccaatcaggaatctttgaaaaatgcactgttaatctttgccaagctgaatgctggaataggatatgtacaaggatgaatgaaattctggcaccgctctttgtatttcggagtgatccggatgataaaaatgctgtatggagtaagagattgtttttaccaagttcttagtgccctacatatagtactgctgatagccgaagctttcctgttcagtttggtcattactatcttttgttgcataatgctgcctggaatccttgttgaaatttgcggaagcgggttcattgttttgtttcgtcgagctggttagtgggtttagagacaacttctgccagaaactagacaacagtgctgttggagttcgagctacactagctgactagccaagttatcacagcttgtagcaaagcatgatggaggtctccaacaacatttggaaataactacagaagttaatccccagttctatgcgttcagatggataccgttaccgctgacccaggaattcaacttcgcagataccattcacattttgggacacagtattaagtgatcgtgatagcctccaggataccttgctcagaattacctgccaacgaacatcagccataacctctactccgccaacaaattgcagtgcaccgatctcttttgcgcccgaagcgctgctgtgtttgttcagccgggtgtggctgagtcccagcagcattgcaaaaggaatacagaactgaacccttgcggcgacggtttatttatcatgaccattaacctgacgccctgcatgttgtagcctgtacatgttcacctgacaacgatttattgcatcccagttaatcaaggtgaataataaattgtatcctgccatgtttacgctacacctgggacacatacaacagaacagaacagaacagttggcggcaatcacacaacacagtgtagatctcaccattgttggtttgctgctgccattcttctgcactgtacggtttcttttactactgctgaagtatcactacagggatagaactgagaacccatgtatggtgcgcgttagtgtccccccccagaattccataccccagaacagtgctgtgttttggtggagggaggaagggggcagcttcggtgacgccgaaaggctacaccgctacgactggccctttgcccctcgttcccagagctgctcagcttcagcttcacagctccagaagtgccggcgcgcgtgccgcttcctccgcattgggcgatgcccagctggctggcagttggagctgcggacggacgcggccgccggcgcagccgcgctggtgcagggtgttgagatcctcaagccggaaggccggaaccggaagttgtccggaaccggtctcggtgcaagtgacaggcgagctgctgcaccgcagcaccgtcgtcgtcgatacgcgcgcatgaatgctcggcgttgtgttgcccggcgtggcgtcagaaacggatcggcgatggagatggagttgcagttgctcggagggtgcaatgcaagcacaaacaaagcacagcacaagacgaagcaagcaacacatgacacatgcatagtggcatacgggtgcgaccgctagtttgtcttgtcctactcactgccctgccagagag

SEQ ID NO: 198929 - DNA, 2354 bp, Zea Mays
gaggatgtcgagcgagttatctccggctcgaacccgtactcctcaagcaaaaccactggaggagcaccaagagttatctccggctcgaacccgagccaggtcctgactcctgatccgcaccgcacacggcaagggggcatcgccgacgggccgtcagcggcgagacccaagccaacacagcccagcgatgtcggcgcgtgaccgcgagacggccgaggcgctggtgcgcctcgccgcctcgctggacggggcggtgctcggcctcggcacggctgccgtcgccgtcgcgtcgtgggtcaagtacctcgccgtctcggggcagctacgcctcgtcgcctccgcggcgacggcctccatcgccgacgcccgctccctcctctcaggcgacggcgccgagccgcggatcgccgcggtgcggggctacgtgcgggcccatgacaagttcttccgggccccgttctcaggcgaggcgggcgtcgtcacgaagcacacccagatgtgtttgttcacagaatggagaggcatctttggatggacctttgatctgcatgctcttcttttcagatcatggaaagagcaaattgtgacgtcttttagatcggttccatttgttctggttagtactgaattaggaaatcctacgggagtggtacatataaatgtggataaggcggatcaaccgttgcctcttaccacagtgtttcataaacttatcccacttgagacgactccttacacattgtttcaaactattattggcaacggctatccgattgcgttgttggatgaagaaaaaatactaccgattggtaagaaaattacagcaataggactatgtcaagcaaaggatgcagaaagtgttgagataacatcgtgcccagagatcccctttttcttatctgaactaaccaaggatgagatgcaagctcagctggcttcacgtgctaggatactcttctggggtagtattgttttgggaaccttgtcggtttgcctagtgggccatgccatttacaggggctggacgagaatcaaactacgaagagaggctaggcatgcacgacagatgtttgaggaggctgaagatgctattcacagggatgactctagtgatgatgatgaaataggagacgggcaactatgtgttgtgtgcttaaggaagagaaggagggcagcttttattccatgtgggcatcttgtctgctgttccgaatgcgcattaacaatagagcgtacacctcatccattgtgccctatgtgtcgtcaagacatcagatacatgatgagggtttatgactcttgagtgtggttggtgcggtggttcttcaaattatgatcatgcatcttgaactattgctgctctatgcagtactactactatgaagaaccccctgagttgctgcgtgtttaatttgttcacagatgagacatctatctgtccattttgtctgaattttaccataatctaagtagcatatgaaatagagttcaggatgaattcgtttgattttatttgcaggtatgctgctgataagatctacacgcttccttgctgacccatgcaaacctgaggagcacaactgttcgtcctgctgggcgttttcctagtcaaggtggcctaccctggatttgtgaatataatgtcttgaccctccaaattatgctcttgattgcctgggacaaatagcttagctgaagtcatgaactaacgtagagttattttttgtttgctttgcgcatatgtctatccatcatgtaaagcacagggtttactgcaaataggttaaagatttggacattttctgccatctgatcgtcacctctagtgctgtggaagaggttgcaaaaaaaaaaatgctgctcgtcgtgatgaacgcaatgctgttcctgctctacggtaacctggcaccagataacagcggtgtcggagccttatgcttgccagcggataacatcgccgaagcgtgaagtcttgttctgatgctggctgcgtggtgtttggtttgctagaacagtggtgtccactctacgccgaatcattgagaaactctagtgttagcaaactgtaattttagaacaggcgtagagtggagtttttaaaactctaaactggctgcctggtgaatgctgttctagcaatactatggttttaaaaaatttattgcatgtataatgctccatgattttgttactgcggatgacgatgatggaaacgaagtcagtgacacttaggtctagttttgcaacacaatttttccaagagatttttaaaataatcttttttttcttatgaaaaaaaaattctttgaaaaataggtttgtcaaactagcctttaaagtgtgtttggtttgag

SEQ ID NO: 198930 - DNA, 1391 bp, Zea Mays
attttataagtgccatgaggaatttaaaggactgtgtaattcttttcactagcagctacgtctacctgtttatcctttgtccatttacgagtggtattttgaatatgaatacaatattacacatttttcattttaagaaaaagatgttaaacatgccttgagtataatgttttagattgtaccgtgatatttgtattctgacatctctgtctctttctgttagacctagccaaccttgtaaacattgcagcgataaaggctgcggttgaaggtgcggataaattgaatgctgttcagttggagtttgccaaagatcgtattatcatgggaaccgagaggagatcaatgttcatatctgatgaatcgagaaagcttactgcctaccatgaaagtggacatgctattgttgcactcaacacccagggtgctcaccccatacacaaggcaactatccttcctcgtgggtctgcccttggaatggtcacacaactcccctcacaggatgagacctctattagcaagaaacaactccttgcacgtcttgatgtttgcatgggtgggagggttgctgaagagctgatctttggggaagacaatgttacaactggggcaagaaatgaccttcacactgcaacggagcttgcccagtacatggtatcgaactgtgggatgagtgatgctatcggtcctgtgcatgtgaaagaacgaccaagcatagagatgcaatcaaggatagatgctgaggtggtgaagctcctaagagaggcttatgggcgggtcaagcgattgcttaggaagcatgagaagcaattacatgctctagcaaatgcgctgctggagcgtgaaacgcttactgcagatgagatcaacaaagtagttcacccttaccaagaagagccccatctttccttccaagacgaggagtttgccctcgcttaaagattcttttgttgcatcaagatatcggtcaccacccgtgaattgtaaatccgtgtacagtaagtggcgcctagatgagccatggaagttccttcagatgccctcttctgtaaaacagcgcgaaacacctatggtaaattagaagattggtgttgcgaaagctgatgcctgcttattgacaattctttggatggaaggcttcccgggaaggctctgggtttgcaaaaccctctcatacttttggtttagttaggatagatgtaggtttaacactgcatgttctgattgctaggtttctggctagggcaacatgttgatcatgttcttttcacttttttattgacattttctgtaaggaaatcgtacatgtaacgattgttttatttgtcaaacaagcactgtttgtttttgtcaaacagtatacggttaatgtattcgtgttgctaacgtcg

SEQ ID NO: 198931 - DNA, 1569 bp, Zea Mays
tctcttgtttgttggtgttggtgctcggagagtgaggtcattgtttcaagctgcaaagaagaaggcaccatgcattgttttcattgatgaaatagatgctgtgggatcaactaggaaacagtgggaagggcacacaaagaagacattgcatcaacttcttgttgagatggatgggtttgaacaaaatgagggaataattgtgatggctgcaacaaacttgccagacattcttgatcctgcactcacaagacctggtagatttgataggcatattgttgtcccaagtccagatgtgcggggtcgccaagagattctggagctctatttgcaagataagccagtggcaaatgatgtagatatcaatgcaattgcccgaagtacaccaggctttaatggggctgacctagccaaccttgtaaacattgcagcgataaaggctgcggttgaaggtgcggataaattgaatgctgttcagttggagtttgccaaagatcgtattatcatgggaaccgagaggagatcaatgttcatatctgatgaatcgagaaagcttactgcctaccatgaaagtggacatgctattgttgcactcaacacccagggtgctcaccccatacacaaggcaactatccttcctcgtgggtctgcccttggaatggtcacacaactcccctcacaggatgagacctctattagcaagaaacaactccttgcacgtcttgatgtttgcatgggtgggagggttgctgaagagctgatctttggggaagacaatgttacaactggggcaagaaatgaccttcacactgcaacggagcttgcccagtacatggtatcgaactgtgggatgagtgatgctatcggtcctgtgcatgtgaaagaacgaccaagcatagagatgcaatcaaggatagatgctgaggtggtgaagctcctaagagaggcttatgggcgggtcaagcgattgcttaggaagcatgagaagcaattacatgctctagcaaatgcgctgctggagcgtgaaacgcttactgcagatgagatcaacaaagtagttcacccttaccaagaagagccccatctttccttccaagacgaggagtttgccctcgcttaaagattcttttgttgcatcaagatatcggtcaccacccgtgaattgtaaatccgtgtacagtaagtggcgcctagatgagccatggaagttccttcagatgccctcttctgtaaaacagcgcgaaacacctatggtaaattagaagattggtgttgcgaaagctgatgcctgcttattgacaattctttggatggaaggcttcccgggaaggctctgggtttgcaaaaccctctcatacttttggtttagttaggatagatgtaggtttaacactgcatgttctgattgctaggtttctggctagggcaacatgttgatcatgttcttttcacttttttattgacattttctgtaaggaaatcgtacatgtaacgattgttttatttgtcaaacaagcactgtttgtttttgtcaaacagtatacggttaatgtattcgtgttgctaacgtcg

SEQ ID NO: 198932 - DNA, 3062 bp, Zea Mays
aacacagcccagctctccgacaccggccaggcgagtggagtcgtcatagcattcgagagccagccgtccgttgccaacgcccaacggtctgagtgaatcctgccgatcgcgaacgccgccgcgtcgtcgtcctccgtcgccccgcctcggcttccaccgtcagcggccgcgctcgcgataaggctactcgtgtcctgtccactaaaaccaagacccaccgcctccagagttaaagggaaaagaaaaaggggaagaagcccctcgctccaagtcacgcgcctcccgcctcgccggcgccgcccgcccgcccgcctcgcccgccatgagcgcgctccaggcctccctcctcctccgcccgctcttttcgccactgcccccacgccgccggcagctgctctcctccgcctccttctctttcccccgcggcgcccacgcgccccgcctccgcgcattggtccccggcgcgccgcagcccgacgccgccgagccgcccgcgattgcatcctcggcggcggcggcggcggcggcggaggctgagccggaggcggagcccacgacggcggcagctcagcccgtcgcgatgagcgcgaaggaggggctggaggacatggtggacaaggctagggcctgggccgtggcggtcgcggccgcggtgttagccgcggccaggaggttcgtcgactgggtgctgtcgagggactggatgggctggtggcctttctggagatccgagcaccggctgcagcgcttgatcgacgaggcggacgccaaccccaacgacgcggccaagcagagcgcgctcctgcacgagctcaacaagttaagccctgaagatgtcattaaaaggtttgaggagcgaagccatgctgtggatagcaggggggctgcagagtacctgcgggcacttattctcactaacactatagcagattaccttccagatgaacaatctgggaggtctgcaagcctgccagccctgttgcaagagttgaaacaacgtgtatctgggaatgaggacaaacctttcatgaaccctgggatatcagaaaagcaacctttacatgttgtaatggtagatcaacacgttttgctcaagaaatcttctcaacgatcttgtttacaattgctgttggcgtaatgtgggtgatgggtgctgctgcacttcaaaaatatattgggagcttaggtggaattggggcatctggtgctggttctagctcatcatattctccaaaagagatgaataaggatatgatgccagagaagaatgtcaagacatttaaagatgtcaaaggttgtgatgatgcaaaaaaggaacttgaggaagtagttgagtatctcaagaacccttcaaagttcactcgccttggtggaaagctacctaagggcatacttttgactggtgctccaggaactgggaagacactactagcaaaggccattgctggagaagctggcgtaccattcttttaccgagcaggttctgaatttgaggaaatgtttgttggtgttggtgctcggagagtgaggtcattgtttcaagctgcaaagaagaaggcaccatgcattgttttcattgatgaaatagatgctgtgggatcaactaggaaacagtgggaagggcacacaaagaagacattgcatcaacttcttgttgagatggatgggtttgaacaaaatgagggaataattgtgatggctgcaacaaacttgccagacattcttgatcctgcactcacaagacctggtagatttgataggcatattgttgtcccaagtccagatgtgcggggtcgccaagagattctggagctctatttgcaagataagccagtggcaaatgatgtagatatcaatgcaattgcccgaagtacaccaggctttaatggggctgacctagccaaccttgtaaacattgcagcgataaaggctgcggttgaaggtgcggataaattgaatgctgttcagttggagtttgccaaagatcgtattatcatgggaaccgagaggagatcaatgttcatatctgatgaatcgagaaagcttactgcctaccatgaaagtggacatgctattgttgcactcaacacccagggtgctcaccccatacacaaggcaactatccttcctcgtgggtctgcccttggaatggtcacacaactcccctcacaggatgagacctctattagcaagaaacaactccttgcacgtcttgatgtttgcatgggtgggagggttgctgaagagctgatctttggggaagacaatgttacaactggggcaagaaatgaccttcacactgcaacggagcttgcccagtacatggtatcgaactgtgggatgagtgatgctatcggtcctgtgcatgtgaaagaacgaccaagcatagagatgcaatcaaggatagatgctgaggtggtgaagctcctaagagaggcttatgggcgggtcaagcgattgcttaggaagcatgagaagcaattacatgctctagcaaatgcgctgctggagcgtgaaacgcttactgcagatgagatcaacaaagtagttcacccttaccaagaagagccccatctttccttccaagacgaggagtttgccctcgcttaaagattcttttgttgcatcaagatatcggtcaccacccgtgaattgtaaatccgtgtacagtaagtggcgcctagatgagccatggaagttccttcagatgccctcttctgtaaaacagcgcgaaacacctatggtaaattagaagattggtgttgcgaaagctgatgcctgcttattgacaattctttggatggaaggcttcccgggaaggctctgggtttgcaaaaccctctcatacttttggtttagttaggatagatgtaggtttaacactgcatgttctgattgctaggtttctggctagggcaacatgttgatcatgttcttttcacttttttattgacattttctgtaaggaaatcgtacatgtaacgattgttttatttgtcaaacaagcactgtttgtttttgtcaaacagtatacggttaatgtattcgtgttgctaacgtcg

SEQ ID NO: 198933 - DNA, 1813 bp, Zea Mays
atgctaacagcagcaacaaaggcttttaatcccaagcaagttgagttaggctagaattgaaacccaaccgaaaccgcaagtcaaggtttaggcacatgaatagctattttccatgcactcatattgaagactaaatctttagttatattctatccctttgagtctcatttactggctcttaccagttaccatgtcaaattcggtttttccctacctctcgttccgttgctatcgtgccttagagttctactacacactggtgtctttggagacccctgttggacatgtcaaaactatctcaaccggtgatggacaagtttttcttcaattggtgctacccctagcctattacgtatgtcatcattctagactcgatctcttctattttgaccataaatccaacgcaacatacacattttcacaacacttatgtgttgaacatatcatcttttgtaggcaacattctccaccatacagcatatcaggactaattgtcgtcctatacaacttgtcttttagcttctatagtaccatcttgtcgtatagaaaaagccagatgccacttcatccaccatgctttgattctatggctaacgtcttcatcaatatctccgtctgtttgtagcattgaaagtccagattgcccattactaataaatgatttgaactgaagaagtcatttgcaaatacacaatgtgatggatgaatattgaatatattttttcctgattattcttactggatgctcttgctatgcagatgatgatatcatcctcctctcttttgtcaatattagtaattgaaagagttgatgagagggttgggctatcttgtttggtctcactcctatctcttatattagtgagcagtgcatgtgaaaggtagccgtaactgacaccaacgcaatcaaagtcagttcgcccttagcgaaaacttttatctgactgacatctgggtgccaggcttgtaccttctggcaagatttgaaggcttggctgacaggaaagtctacagcgtgaaccggtacttcatcagcggccattccctggagcacctttgctttgccctggtgacggttatgctaactgtgatgctgaccttcagaaacattaagattgccagaaaattctgtgaaaaaattgcaagtttggaaggcagactccgagacgacacagagattcggctagatgatgcctagtagataatattctaccttaacattgtcccgtttgccggggctgattcacccttttccccgtgttgtttcagactgacggtggcataggtcatatagaggacgcaatttattggtctgcccgattcataccgtggaaggttgtctgtgtccgccgcggcgttacaccaaacggttcgatgcaggcatacagcagctgctctcaagggtttcatgcctagacactaccgatgttgaggtctgctatcgtcagtgagcccaagtagcaggggcattgtgtcctacttggacgagactgatctcatcttcccgttgcgctgccagaaggcggtgtcctccttctcccgagccaggagctcctcgaacgatatttcttgagcctccagctccattgcactcagctccatgatctgccatggcaaaacagtccacacacacacacacaaacaggacgctcaggtggctacaacttacaaggacaagagaagcggcgtaccattttgtatggcgctgacttctgaagacgctcttgcacaaagttgtagatggcggcgtctttctttaggctatcgctttcggtttccaatctacgtacctatgaaaacgcccgagggtaca

SEQ ID NO: 198934 - DNA, 1854 bp, Zea Mays
atgctaacagcagcaacaaaggcttttaatcccaagcaagttgagttaggctagaattgaaacccaaccgaaaccgcaagtcaaggtttaggcacatgaatagctattttccatgcactcatattgaagactaaatctttagttatattctatccctttgagtctcatttactggctcttaccagttaccatgtcaaattcggtttttccctacctctcgttccgttgctatcgtgccttagagttctactacacactggtgtctttggagacccctgttggacatgtcaaaactatctcaaccggtgatggacaagtttttcttcaattggtgctacccctagcctattacgtatgtcatcattctagactcgatctcttctattttgaccataaatccaacgcaacatacacattttcacaacacttatgtgttgaacatatcatcttttgtaggcaacattctccaccatacagcatatcaggactaattgtcgtcctatacaacttgtcttttagcttctatagtaccatcttgtcgtatagaaaaagccagatgccacttcatccaccatgctttgattctatggctaacgtcttcatcaatatctccgtctgtttgtagcattgaaagtccagattgcccattactaataaatgatttgaactgaagaagtcatttgcaaatacacaatgtgatggatgaatattgaatatattttttcctgattattcttactggatgctcttgctatgcagatgatgatatcatcctcctctcttttgtcaatattagtaattgaaagagttgatgagagggttgggctatcttgtttggtctcactcctatctcttatattagtgagcagtgcatgtgaaagggttcttgatgatatgcgcctatgggtgattctgaactttgttccttgcatcgccattcctgcaatgctattcttgtttcctcccaagtatacgcattcaaggttctggttccttgctacaggcttgtaccttctggcaagatttgaaggcttggctgacaggaaagtctacagcgtgaaccggtacttcatcagcggccattccctggagcacctttgctttgccctggtgacggttatgctaactgtgatgctgaccttcagaaacattaagattgccagaaaattctgtgaaaaaattgcaagtttggaaggcagactccgagacgacacagagattcggctagatgatgcctagtagataatattctaccttaacattgtcccgtttgccggggctgattcacccttttccccgtgttgtttcagactgacggtggcataggtcatatagaggacgcaatttattggtctgcccgattcataccgtggaaggttgtctgtgtccgccgcggcgttacaccaaacggttcgatgcaggcatacagcagctgctctcaagggtttcatgcctagacactaccgatgttgaggtctgctatcgtcagtgagcccaagtagcaggggcattgtgtcctacttggacgagactgatctcatcttcccgttgcgctgccagaaggcggtgtcctccttctcccgagccaggagctcctcgaacgatatttcttgagcctccagctccattgcactcagctccatgatctgccatggcaaaacagtccacacacacacacacaaacaggacgctcaggtggctacaacttacaaggacaagagaagcggcgtaccattttgtatggcgctgacttctgaagacgctcttgcacaaagttgtagatggcggcgtctttctttaggctatcgctttcggtttccaatctacgtacctatgaaaacgcccgagggtaca

SEQ ID NO: 198935 - DNA, 1770 bp, Zea Mays
atgctaacagcagcaacaaaggcttttaatcccaagcaagttgagttaggctagaattgaaacccaaccgaaaccgcaagtcaaggtttaggcacatgaatagctattttccatgcactcatattgaagactaaatctttagttatattctatccctttgagtctcatttactggctcttaccagttaccatgtcaaattcggtttttccctacctctcgttccgttgctatcgtgccttagagttctactacacactggtgtctttggagacccctgttggacatgtcaaaactatctcaaccggtgatggacaagtttttcttcaattggtgctacccctagcctattacgtatgtcatcattctagactcgatctcttctattttgaccataaatccaacgcaacatacacattttcacaacacttatgtgttgaacatatcatcttttgtaggcaacattctccaccatacagcatatcaggactaattgtcgtcctatacaacttgtcttttagcttctatagtaccatcttgtcgtatagaaaaagccagatgccacttcatccaccatgctttgattctatggctaacgtcttcatcaatatctccgtctgtttgtagcattgaaagtccagattgcccattactaataaatgatttgaactgaagaagtcatttgcaaatacacaatgtgatggatgaatattgaatatattttttcctgattattcttactggatgctcttgctatgcagatgatgatatcatcctcctctcttttgtcaatattagtaattgaaagagttgatgagagggttgggctatcttgtttggtctcactcctatctcttatattagtgagcagtgcatgtgaaaggcttgtaccttctggcaagatttgaaggcttggctgacaggaaagtctacagcgtgaaccggtacttcatcagcggccattccctggagcacctttgctttgccctggtgacggttatgctaactgtgatgctgaccttcagaaacattaagattgccagggactcctgacctgtcactgattgtaacttgggtgcagaaaattctgtgaaaaaattgcaagtttggaaggcagactccgagacgacacagagattcggctagatgatgcctagtagataatattctaccttaacattgtcccgtttgccggggctgattcacccttttccccgtgttgtttcagactgacggtggcataggtcatatagaggacgcaatttattggtctgcccgattcataccgtggaaggttgtctgtgtccgccgcggcgttacaccaaacggttcgatgcaggcatacagcagctgctctcaagggtttcatgcctagacactaccgatgttgaggtctgctatcgtcagtgagcccaagtagcaggggcattgtgtcctacttggacgagactgatctcatcttcccgttgcgctgccagaaggcggtgtcctccttctcccgagccaggagctcctcgaacgatatttcttgagcctccagctccattgcactcagctccatgatctgccatggcaaaacagtccacacacacacacacaaacaggacgctcaggtggctacaacttacaaggacaagagaagcggcgtaccattttgtatggcgctgacttctgaagacgctcttgcacaaagttgtagatggcggcgtctttctttaggctatcgctttcggtttccaatctacgtacctatgaaaacgcccgagggtaca

SEQ ID NO: 198936 - DNA, 1851 bp, Zea Mays
atgctaacagcagcaacaaaggcttttaatcccaagcaagttgagttaggctagaattgaaacccaaccgaaaccgcaagtcaaggtttaggcacatgaatagctattttccatgcactcatattgaagactaaatctttagttatattctatccctttgagtctcatttactggctcttaccagttaccatgtcaaattcggtttttccctacctctcgttccgttgctatcgtgccttagagttctactacacactggtgtctttggagacccctgttggacatgtcaaaactatctcaaccggtgatggacaagtttttcttcaattggtgctacccctagcctattacgtatgtcatcattctagactcgatctcttctattttgaccataaatccaacgcaacatacacattttcacaacacttatgtgttgaacatatcatcttttgtaggcaacattctccaccatacagcatatcaggactaattgtcgtcctatacaacttgtcttttagcttctatagtaccatcttgtcgtatagaaaaagccagatgccacttcatccaccatgctttgattctatggctaacgtcttcatcaatatctccgtctgtttgtagcattgaaagtccagattgcccattactaataaatgatttgaactgaagaagtcatttgcaaatacacaatgtgatggatgaatattgaatatattttttcctgattattcttactggatgctcttgctatgcagatgatgatatcatcctcctctcttttgtcaatattagtaattgaaagagttgatgagagggttgggctatcttgtttggtctcactcctatctcttatattagtgagcagtgcatgtgaaaggtagccgtaactgacaccaacgcaatcaaagtcagttcgcccttagcgaaaacttttatctgactgacatctgggtgccaggcttgtaccttctggcaagatttgaaggcttggctgacaggaaagtctacagcgtgaaccggtacttcatcagcggccattccctggagcacctttgctttgccctggtgacggttatgctaactgtgatgctgaccttcagaaacattaagattgccagggactcctgacctgtcactgattgtaacttgggtgcagaaaattctgtgaaaaaattgcaagtttggaaggcagactccgagacgacacagagattcggctagatgatgcctagtagataatattctaccttaacattgtcccgtttgccggggctgattcacccttttccccgtgttgtttcagactgacggtggcataggtcatatagaggacgcaatttattggtctgcccgattcataccgtggaaggttgtctgtgtccgccgcggcgttacaccaaacggttcgatgcaggcatacagcagctgctctcaagggtttcatgcctagacactaccgatgttgaggtctgctatcgtcagtgagcccaagtagcaggggcattgtgtcctacttggacgagactgatctcatcttcccgttgcgctgccagaaggcggtgtcctccttctcccgagccaggagctcctcgaacgatatttcttgagcctccagctccattgcactcagctccatgatctgccatggcaaaacagtccacacacacacacacaaacaggacgctcaggtggctacaacttacaaggacaagagaagcggcgtaccattttgtatggcgctgacttctgaagacgctcttgcacaaagttgtagatggcggcgtctttctttaggctatcgctttcggtttccaatctacgtacctatgaaaacgcccgagggtaca

SEQ ID NO: 198937 - DNA, 1554 bp, Zea Mays
gcagcacccaccgcaccgccactgggctgctgccttgcaaaaagtggggcgagtgaagaaagcaggcagccatgcttttcgggagaaggggaagggaaaagcagccagccagccagccaccacactaccacagcaaagcaaagctcgcacctcgctgcgcactcccactgcgcttctcttcctcgcaccagcagtccagaccaaggagggacgcggcgggggcagcacctttcctcttcctcctcccccagaaatcaattcctcttcccacacgatccatccggaggcgatccagctcttcgcgccctctcttccccaaacaggatacatgagtggggaggccgcggagagagctgattgatcgggaagaagaagaagaacatcgcaattcacttgctcctgcggcggctgtactagggtagccgagaacccgcccatacccatggcatcctcctcggggggcggcggaggccgtaggatgacccccggaggagactcctctgcctccgccggcggcaggaggatctaccgcacccagaccgccggcaacctcggcgactccatattcgacagcgaggtcgtcccgtcgtcgcttgtcgacatcgcccccatcctgcgtgtggccaacgaggtggaggccagcaacccgcgagtagcctacctctgccgcttctacgccttcgagaaggcgcatcgcctcgaccccacctccagcggccgtggtgtccgccagttcaaaactgcgctgttgcagaggctcgagagggagaacgatcccacgctcaagggcagggtcaagcagagtgacgccagagaaatgcagagcttctaccagctctactacaagaagtacattcaggcgcttcaaaaagttgctgataaagccgacagggctcagctcaccaaagcctatcaaactgcagccgtgctcttcgaggtcctcagagccgtcaatgtctcccagaaaatcgaagtcgataagtcgattctggagacgcacaaccaggtcgaggaaaagaagaagctataccttccttacaatatcctcccgcttgatcctgacagtgccaaccagcctatcatgctctatcctgagatccaagctgctttccatgctcttcgtaacactagaggtctgccatggcccaaggaacacgaaaagaagcgtgatgcacccaaggaacacgaaaagaagcgtgatgcagatcttcttgcctggcttcaggccatgtttggattccagaaagataacgtatccaaccaaagggagcatctcatactcttgcttgccaacgtgcacataagacagattcccaaatctgaccaacaaccaaagttggatgaccgagcactggatacagtaatgaagaagctatttaagaattacaagaggtggtgcaagtatcttggtcgcaaaagcagcttatggttgccgactatccaacaggaggtgcaacaacgcaaacttctctatatgggtctttatctgctcatatggggcgaggcagctaacctgagattcatgccagaatgtctttgctacatctatcatca

SEQ ID NO: 198938 - DNA, 1984 bp, Zea Mays
gcagcacccaccgcaccgccactgggctgctgccttgcaaaaagtggggcgagtgaagaaagcaggcagccatgcttttcgggagaaggggaagggaaaagcagccagccagccagccaccacactaccacagcaaagcaaagctcgcacctcgctgcgcactcccactgcgcttctcttcctcgcaccagcagtccagaccaaggagggacgcggcgggggcagcacctttcctcttcctcctcccccagaaatcaattcctcttcccacacgatccatccggaggcgatccagctcttcgcgccctctcttccccaaacaggatacatgagtggggaggccgcggagagagctgattgatcgggaagaagaagaagaacatcgcaattcacttgctcctgcggcggctgtactagggtagccgagaacccgcccatacccatggcatcctcctcggggggcggcggaggccgtaggatgacccccggaggagactcctctgcctccgccggcggcaggaggatctaccgcacccagaccgccggcaacctcggcgactccatattcgacagcgaggtcgtcccgtcgtcgcttgtcgacatcgcccccatcctgcgtgtggccaacgaggtggaggccagcaacccgcgagtagcctacctctgccgcttctacgccttcgagaaggcgcatcgcctcgaccccacctccagcggccgtggtgtccgccagttcaaaactgcgctgttgcagaggctcgagagggagaacgatcccacgctcaagggcagggtcaagcagagtgacgccagagaaatgcagagcttctaccagctctactacaagaagtacattcaggcgcttcaaaaagttgctgataaagccgacagggctcagctcaccaaagcctatcaaactgcagccgtgctcttcgaggtcctcagagccgtcaatgtctcccagaaaatcgaagtcgataagtcgattctggagacgcacaaccaggtcgaggaaaagaagaagctataccttccttacaatatcctcccgcttgatcctgacagtgccaaccagcctatcatgctctatcctgagatccaagctgctttccatgctcttcgtaacactagaggtctgccatggcccaaggaacacgaaaagaagcgtgatgcacccaaggaacacgaaaagaagcgtgatgcagatcttcttgcctggcttcaggccatgtttggattccagaaagataacgtatccaaccaaagggagcatctcatactcttgcttgccaacgtgcacataagacagattcccaaatctgaccaacaaccaaagttggatgaccgagcactggatacagtaatgaagaagctatttaagaattacaagaggtggtgcaagtatcttggtcgcaaaagcagcttatggttgccgactatccaacaggaggtgcaacaacgcaaacttctctatatgggtctttatctgctcatatggggcgaggcagctaacctgagattcatgccagaatgtctttgctacatctatcatcatatggcctttgaactctatggtatgttggctggaaatgtgagcccgacgactggtgaaaatgttaaaccagcttatggtggagaagaagaagccttcttgaaaagagttgtgactccaatctacaaagttatagagaaggaggaagtagagaggagcaagaccatgaaatcaaagcactcacactggagaaactacgatgatcttaatgagtacttttggtcaagagattgcttccgattgggatggcctatgcgatctgatgcagattttttcaagactccaaatgttcctcttcaccatgtggatggagtatgtaccttgtgacaatgaatatacttacggcatttgtcaaatcaattaggtttgagctaggtaatattttgttacatgagttatgagtatcataatgggagcgttgataaaaactag

SEQ ID NO: 198939 - DNA, 1981 bp, Zea Mays
gcagcacccaccgcaccgccactgggctgctgccttgcaaaaagtggggcgagtgaagaaagcaggcagccatgcttttcgggagaaggggaagggaaaagcagccagccagccagccaccacactaccacagcaaagcaaagctcgcacctcgctgcgcactcccactgcgcttctcttcctcgcaccagcagtccagaccaaggagggacgcggcgggggcagcacctttcctcttcctcctcccccagaaatcaattcctcttcccacacgatccatccggaggcgatccagctcttcgcgccctctcttccccaaacaggatacatgagtggggaggccgcggagagagctgattgatcgggaagaagaagaagaacatcgcaattcacttgctcctgcggcggctgtactagggtagccgagaacccgcccatacccatggcatcctcctcggggggcggcggaggccgtaggatgacccccggaggagactcctctgcctccgccggcggcaggaggatctaccgcacccagaccgccggcaacctcggcgactccatattcgacagcgaggtcgtcccgtcgtcgcttgtcgacatcgcccccatcctgcgtgtggccaacgaggtggaggccagcaacccgcgagtagcctacctctgccgcttctacgccttcgagaaggcgcatcgcctcgaccccacctccagcggccgtggtgtccgccagttcaaaactgcgctgttgcagaggctcgagagggagaacgatcccacgctcaagggcagggtcaagcagagtgacgccagagaaatgcagagcttctaccagctctactacaagaagtacattcaggcgcttcaaaaagttgctgataaagccgacagggctcagctcaccaaagcctatcaaactgcagccgtgctcttcgaggtcctcagagccgtcaatgtctcccagaaaatcgaagtcgataagtcgattctggagacgcacaaccaggtcgaggaaaagaagaagctataccttccttacaatatcctcccgcttgatcctgacagtgccaaccagcctatcatgctctatcctgagatccaagctgctttccatgctcttcgtaacactagaggtctgccatggcccaaggaacacgaaaagaagcgtgatgcacccaaggaacacgaaaagaagcgtgatgcagatcttcttgcctggcttcaggccatgtttggattccagaaagataacgtatccaaccaaagggagcatctcatactcttgcttgccaacgtgcacataagacagattcccaaatctgaccaacaaccaaagttggatgaccgagcactggatacagtaatgaagaagctatttaagaattacaagaggtggtgcaagtatcttggtcgcaaaagcagcttatggttgccgactatccaacaggaggtgcaacaacgcaaacttctctatatgggtctttatctgctcatatggggcgaggcagctaacctgagattcatgccagaatgtctttgctacatctatcatcatatggcctttgaactctatggtatgttggctggaaatgtgagcccgacgactggtgaaaatgttaaaccagcttatggtggagaagaagaagccttcttgaaaagagttgtgactccaatctacaaagttatagagaaggaagtagagaggagcaagaccatgaaatcaaagcactcacactggagaaactacgatgatcttaatgagtacttttggtcaagagattgcttccgattgggatggcctatgcgatctgatgcagattttttcaagactccaaatgttcctcttcaccatgtggatggagtatgtaccttgtgacaatgaatatacttacggcatttgtcaaatcaattaggtttgagctaggtaatattttgttacatgagttatgagtatcataatgggagcgttgataaaaactag

SEQ ID NO: 198940 - DNA, 3599 bp, Zea Mays
tgtgtgtgtgtgagagagagggggaaaagccagaaaggcgtcctctgtcctctccttttctctcccctccctccctccctccaagctccaatccagcaaccccggtctccccaccccacctcacgcaggcggcattaatggattccgcggccgcggccacctccctccaccacacccgcctccttcccgctgcggcgagaaccctaacgtgacgcgctgcccccgaacggctcctcctccctccctccacgccgtcgtttgctccgggtgtgctctcgttgggggagggaaaagaaaaggtcgctgcttttctgtgtgggcgtgggtggcgcggcggcccaatgcggctcgatccggattgctccgcgcctcgatttgcctcgggtttggcgccggctccgtgagtccccgcgcctgctgctgccgccgccgccgccgccgttccgcctcggaaaggtttatttagttggtgaggagaaatggatgtggagaaacctgcttccaaggggcatggtttctttgcgctcttcgattggggaaagaagtctaagaagcgcctgttcgtcgggagcacgggcagttctccaaatctgaagaatgctgcagatgggaaggatattgatgatagtacaccaagcacacggtcaaatttgatccttgaagacaccccaagcttgaaggaaagcactgaacatagctgctcatcttcagtaattgatgaagaggctcattcaagaaggagcccgactgttgtggctaggcttatgggcttggattctatgcctgcggcaagctcaaccgaatccaatcccatgccattaaccgtgcaaccacctttccaaaccaacagccatgaagattttattggcagaagttatgttggtagtccccttaagacgccgggtagtcctattgatcggtttaaagtggaagcactgcctcctagacttgccaagaggacagtatctgttgcacagtataagttgctgtctcccatgaaaaatcctaacaatatatcaagcaggaatgcagctgatataatggaagcagcatcgaggatcatcagacctggagtagaaaatatcagtccctacagagttcatgatgttgggagtgcaattgctgcacgtgcctacaacccaggagagctcataggagcccaacaaaggtcacagaaacttaatgaagcactgagaaaatgtgatggccctgcatcttttaggccgccaagtggaaaaccttcagatggaaggttgagaggttcggagggcacctcgacgtccaggatctcacaggcaaatgtatgtgttccagttggtccaaaggtaaaatccggcgatagattagatactgctcgagctatgcatgcccaggaaaaaagaggcatgagaaaaggtggtagaaagcttgaaactctcaagaaccctgaaaataacatggctaaaagaagtgggttgaaccgacaaaaggatagtaaccaaatcggcacaacaagttcatccagtgtgctcatgccaaacagcagaaaacagaatgctacagccaccaaacataaggtgaactcgaacccagcaacccccagtagacaacggagcaatatccaccagataaatgcccatccaagaaaggtgagggtggccagcacatttgctggaaacagtagtcaaggtagcagaaaagtggacttgcagccaaatgctcatgctaacgtaagaaataattctgtacccaaagcaatcccgaagccaagaagattacaagacaggagagcgtactctgatacaagccagtcaagtgatagtattaattctgagagaagccagaggcggattcggcacaatattgtgattgatgagcagtcatctttttcaacaaacaaaaagaaagtcagcactgagattgtttcattcacatttacctcaccagttgataagtcactacatggcatccacttccccaatcattcagtatttacctcaccagttgataagtcactacatggcatccacttccccaatcattcagtggaaaaacagtttttagggaatctgaacactgtgtcaacttcaagcaatacatcaaacactaaacttgatgtcattgatggtgattttttgggactcctgttggagcagaaattgagagagttgacatctggtgtgagatcgccctacactaagacaaccaaaggtgttcaagcgcatcacacttcaacagcttgggaagatatggcatcagcatgtgaaacatctagcattgcttctactgattatgatagggagtcgttacaatctttcaatgatggaaaagctactctcccccagaccgatcttgcttctagaagtctccagtcatctcagcctgtgaagaagtacgatcacgatgtcacggatcaagcagagccgcctgagcgtctcggccgaggtccactcttcacatgggaggcttctatttcaaccgaaacctgtagctcatcagagagctggaggagtgcaaagggtaaacagagtagcttggaatttgctgtaacaggaacaagattgtttggttcagccgaaggaggcagaacctgtgactcgacgcgctcgagcaagttcctagaagcggacgcctcgtcagagtattccgacacagcctcatcgatcacggtggctacgacagagatccctcgatcagaaagcaacagttcatgtcatatggatggtagacaggatctgcagtttataagagagatactgaaagccagctctcctgcccggcacatcttctcttatctggagcggttcggcgattcaggtgttctggatgcgcacgtattggaggaactaaacggggatattaggctgttgggtggtgaagagcgcaagggttacaggctgaggcggaggctgctcttcgactgtgtcaatgaatcgttgagcgcgagatgcgcttactacttcaacggtggctacggcctgtggttcacgggaacggcggtcctgcagagcttgtcggcagaagggatccaccgagagatgaccggcctgcaggtcggcgaggagtggatggtggacgagctcgtgtacagggagatgagtggtcctctggggagctgggtcgacttcaaggtggagtcgtaccaaggcggcggagacatggcggcagagctgctaggctccttgatcgacgaagtggtcgctgatcttctgaccaccggctcgttctcgtagcggatgctggattggatggatcctccgccctcactaacgatacctaccttgtttgtatatcggtagctcgtctcgagaggaattgtgtagctagcgttcctaagatgaatggaatgtcactaacgtaccattcattcactattcgatgactgatcgttttcctgtcaaaagtggaaagaaaggggaaacaaaaaagaaacattcttggcctgttctatgggtagtttgatctactcagatggtcatgttgcaggaaaaatagtagctggacaagtcaattttgtgaagccactgacaatggctgttagtgtaggtatgactgcatttttgtttaaagggttcaaaggatgactggctgaatcttattaaaaaggtggcgaattgtat

SEQ ID NO: 198941 - DNA, 1014 bp, Zea Mays
aattggcctggctacccagacaagagcacgcaacgcaagcaactgcgacgtctcccgcccccgccgcgccccggaccttttccgcagatattttttttatccccccacgcccccggctcgttcccttccattccaccacctctcgccagacaacgagatgtgcgaggcaccgcggctcggcaaccgcgccggaggatccccgcgcattcctctgtcctggtgcggcgaggatgaggatgacgacatggaggagcacgcggtgcaggtgctggtgctggcgcacgcgtaccaggtgccgtggctgaagcgggcgtgcgagggcgccatcggcgcgcgcctcaccgcggactcggtggtggacgtgctgcagctggccggcctctgcgacgcgccgcgcctgcacctgcgctgcgccaggctgctggccaaggagttcgcggccgtggagcgcaccgaggcctggcgcttcctgcaggagaacgacccctggcaggagctccacgtcctgcagcgcctgcacgaggccgacatggaggtttaagcagcaggagcaggataaggcggctgccaagggcggcgatgatggcgacaaatgggggcttctggtgaagaaggtgaagactgccagggtcttctcttctctggccaacaggaagcagatgagcaccaccaccacccagtgctgaggagcagcctgggatgcttaggggtcaaagttagattagtgagagagaatgaagcgagcagtttttttttgggtctgttttgagatgtcagatctcttttgagatatgtacatgtacatgcctactttgtcaccctacgttggtatagctcttttatcgaggtgggagttggtcagccggaagtctatgtaaaaagtgcgcatgtatcattatataataatagggaaatatgagaagtattttagtcttatgatacctttcagtattatggtaccctgacaaaaatgatcaatccaaaacgacacgacgcagaatggacgactgcctc

SEQ ID NO: 198942 - DNA, 2267 bp, Zea Mays
gccacatctcccgttgtccgggccgcccaggcctgagccggcttttccctccctcccccctggccccctctctctataaaagcgttcaaacgcctgcagggctgcggcaattggcctggctacccagacaagagcacgcaacgcaagcaactgcgacgtctcccgcccccgccgcgccccggaccttttccgcagatattttttttatccccccacgcccccggctcgttcccttccattccaccacctctcgccagacaacgagatgtgcgaggcaccgcggctcggcaaccgcgccggaggatccccgcgcattcctctgtcctggcctcggcgtcgccggtgctcggcagcatcctggagcgtcgcctgcggaaggacagggagagcggcaagcccgggcggtccgtcgtccggatccgcggcgtcaccgacgacgccgccgcggccttcgtccgcctcctctacgccggcaggtgcggcgaggatgaggatgacgacatggaggagcacgcggtgcaggtgctggtgctggcgcacgcgtaccaggtgccgtggctgaagcgggcgtgcgagggcgccatcggcgcgcgcctcaccgcggactcggtggtggacgtgctgcagctggccggcctctgcgacgcgccgcgcctgcacctgcgctgcgccaggctgctggccaaggagttcgcggccgtggagcgcaccgaggcctggcgcttcctgcaggagaacgacccctggcaggagctccacgtcctgcagcgcctgcacgaggccgacatggtacgcacgcttttttttcttcttccatggattgctaccggaccggaccggaccggaccacggtcggtcgatgtaaatctgactgacacatgcttgcacgcaccgcaccgaatggaagtgcgagtgcgaagaaattatcatgcatgcatgcatgatggcgcacgccggcggggtggggtgggcactggggagcatgctttctttaccgtcaagcttttgttccaggaaacggtggacatggtcggacctccgtgtcgcgttcgtgcgcgtacggcgtacgaacgacatgacgccagtgttcttttctatgtggttggtgcgtctgtttgggccggcccgtccacgccgaatggtcgggcgaatgttcgcatctctccgacctcttacctttccgactctgttttgattttacacgttttcatctggctgggggtagacaaatcgtgagaccaagtaatttgtgccttggtttgaccaaagttagcagaaatcttggcggctactccatcagttccatctacaaacattcttcgtagggcttcaaaagtccagcggagaacgtttcaccaataataacgtttgttggaaacaacagttccacgatgcacgtttttttttgtgtaccgacgaccgacccagcctcttagctaaagcactgacccgatgcgcgctcggttccttcctggacatgcagcggcggcgcaagtggcggcggaagcgcgcggagcagcgcgtgtacatggagctgagcgaggccatggactgcctggaccacatctgcacggagggatgcacggaggtcggcccggcggggcgggcgccggcgccggcgccgtgcgcgcgctacgccacgtgccggggcctgcagctgctcatccgccacttctcccagtgccaccgcaagagctgcgcgcggtgccagcgcatgtggcagctgctccgcctccactccgcgctctgcgaccgtaccgaccgctgcaacaccccgctctgcatgaggtttaagcagcaggagcaggataaggcggctgccaagggcggcgatgatggcgacaaatgggggcttctggtgaagaaggtgaagactgccagggtcttctcttctctggccaacaggaagcagatgagcaccaccaccacccagtgctgaggagcagcctgggatgcttaggggtcaaagttagattagtgagagagaatgaagcgagcagtttttttttgggtctgttttgagatgtcagatctcttttgagatatgtacatgtacatgcctactttgtcaccctacgttggtatagctcttttatcgaggtgggagttggtcagccggaagtctatgtaaaaagtgcgcatgtatcattatataataatagggaaatatgagaagtattttagtcttatgatacctttcagtattatggtaccctgacaaaaatgatcaatccaaaacgacacgacgcagaatggacgactgcctc

SEQ ID NO: 198943 - DNA, 984 bp, Zea Mays
ctctccgtctccttctggcgatttggggacgattcgactccgccgccttctcacctccgggctccagccttcggtcaggtcctccaccgctccacctcacgcccccctggcttcccctcacgacctcacctggtggctgcctggctggtggttcggtcacggatttggttaagggcgctcaaagaagagaaaattgctgctcgcagtgctatactgccgatgctccaagcagaagaggatgaaagatttgtcaaagagtggaagaagtgtcttgaggaggaggcgaggatcatgaaagacgttccagggtggaaggtcggcgagagcgtgtacaactctgggaaatggatgcccccggctactggtgagctccgccctgaggtttggtaagggcctgttgcaggcactgaatgccatcatgtcacgggggcacggataaagcttcatttttcattaaggatcagctgtttaaagacctgtatttgttgtacttgaaatctggctggttaataattggacatgtaaagccgacgtttacattgatgtaacgtgttcttgtctgctattgcttcccagcctctggtgtttcttcctgtaagtcattccgaacatgaatccttgttattgaagaaagtatgaaatataagcagcgcgtagcgtggtggcggcgcctcctgtcgcgtgtggattttcccgtgttgatggaacctgatgttgcaccggggattttccccggagggagccgagcggtcagtatagtttccagagcggagtttgtgtgggtagtgtttaatatgtggtcagtataggtgcccagagctgtgagtagtgtgtgcgtgttctcgggtagtttcgagtatgcgatcagtatgtgtctctatgagttacttgatacgccactgctcatatatgagtgttactctgtatgttaagaaaaaaaagtggaatctaaagtagaaaagttgtctgtgtgctacatctccg

SEQ ID NO: 198944 - DNA, 1307 bp, Zea Mays
cttcgtccttccacatgtacgtgcaggttaacgagtttcttaactgtctcgtagatgctagaaacgagctgctgcagaggtacgagaatgtacaaagaagcttcaaaataaagaaggcgatgctatcgaaccatcgaaactataggacttcatacgaccgcctctttgaacaggtacgtagattggaaaccgaaagcgatagcctaaagaaagacgccgccatctacaactttgtgcaagagcgtcttcagaagtcagcgccatacaaaatgatcatggagctgagtgcaatggagctggaggctcaagaaatatcgttcgaggagctcctggctcgggagaaggaggacaccgccttctggcagcgcaacgggaagatgagatcagtctcgtccaagtaggacacaatgcccctgctacttgggctcactgacgatagcagacctcaacatcggtagtgtctaggcatgaaacccttgagagcagctgctgtatgcctgcatcgaaccgtttggtgtaacgccgcggccttctgtcaagatcctggcctgattctgggcagattgagttgtgtcgtgatacatgccggccctgagggttctgtaccagcgagtgcgggcatagggctgttttgatcgtgtggccatggacctcctgacccagccgcagcgccagcaattctgtgcaagctgaaagaactgtcgctaatatcaccacgttcggcaaaacccaccgttgctgcatttgtctgaacagctgcagtgctcgctctatgtcccgtgatgacgcgaactcgacaatgatgacgtccagctcacgacactgggcgcatgcctccacactgttccatcactgtttattgagtgaaaatagaaggtgaaataaaagatgagctagaagaggtgctgaagacagactaacagattggttggtcgacggcggaggagacgcagatcagctaaattctacatcaatgacctaatcggctaatcccaacttcgtttttccacatgtttggaaacttctctgtgaaacaaaatttaacacccaaggagggttgatgggattggaaaaaaataggaaagatttcgacttatttggtattgaaactcatccaatccacatggatcgagagtaaaacgaaaatgcctttaagtggacaaataatcggattatcatagaactacagatagaccgtagaccagaacgaacacagcaagatcagcgatgtgagtctcagaccacagctaattgtcgctagtctagaggcacagtaacagaacaagtcatttcacagttggatgttt

SEQ ID NO: 198945 - DNA, 1307 bp, Zea Mays
gcattccttttcttgataggctagaggttaacgagtttcttaactgtctcgtagatgctagaaacgagctgctgcagaggtacgagaatgtacaaagaagcttcaaaataaagaaggcgatgctatcgaaccatcgaaactataggacttcatacgaccgcctctttgaacaggtacgtagattggaaaccgaaagcgatagcctaaagaaagacgccgccatctacaactttgtgcaagagcgtcttcagaagtcagcgccatacaaaatgatcatggagctgagtgcaatggagctggaggctcaagaaatatcgttcgaggagctcctggctcgggagaaggaggacaccgccttctggcagcgcaacgggaagatgagatcagtctcgtccaagtaggacacaatgcccctgctacttgggctcactgacgatagcagacctcaacatcggtagtgtctaggcatgaaacccttgagagcagctgctgtatgcctgcatcgaaccgtttggtgtaacgccgcggccttctgtcaagatcctggcctgattctgggcagattgagttgtgtcgtgatacatgccggccctgagggttctgtaccagcgagtgcgggcatagggctgttttgatcgtgtggccatggacctcctgacccagccgcagcgccagcaattctgtgcaagctgaaagaactgtcgctaatatcaccacgttcggcaaaacccaccgttgctgcatttgtctgaacagctgcagtgctcgctctatgtcccgtgatgacgcgaactcgacaatgatgacgtccagctcacgacactgggcgcatgcctccacactgttccatcactgtttattgagtgaaaatagaaggtgaaataaaagatgagctagaagaggtgctgaagacagactaacagattggttggtcgacggcggaggagacgcagatcagctaaattctacatcaatgacctaatcggctaatcccaacttcgtttttccacatgtttggaaacttctctgtgaaacaaaatttaacacccaaggagggttgatgggattggaaaaaaataggaaagatttcgacttatttggtattgaaactcatccaatccacatggatcgagagtaaaacgaaaatgcctttaagtggacaaataatcggattatcatagaactacagatagaccgtagaccagaacgaacacagcaagatcagcgatgtgagtctcagaccacagctaattgtcgctagtctagaggcacagtaacagaacaagtcatttcacagttggatgttt

SEQ ID NO: 198946 - DNA, 1333 bp, Zea Mays
cagaacttgtgttgtggatctcatgcattacccaggattgctatgagtaagggttaacgagtttcttaactgtctcgtagatgctagaaacgagctgctgcagaggtacgagaatgtacaaagaagcttcaaaataaagaaggcgatgctatcgaaccatcgaaactataggacttcatacgaccgcctctttgaacaggtacgtagattggaaaccgaaagcgatagcctaaagaaagacgccgccatctacaactttgtgcaagagcgtcttcagaagtcagcgccatacaaaatgatcatggagctgagtgcaatggagctggaggctcaagaaatatcgttcgaggagctcctggctcgggagaaggaggacaccgccttctggcagcgcaacgggaagatgagatcagtctcgtccaagtaggacacaatgcccctgctacttgggctcactgacgatagcagacctcaacatcggtagtgtctaggcatgaaacccttgagagcagctgctgtatgcctgcatcgaaccgtttggtgtaacgccgcggccttctgtcaagatcctggcctgattctgggcagattgagttgtgtcgtgatacatgccggccctgagggttctgtaccagcgagtgcgggcatagggctgttttgatcgtgtggccatggacctcctgacccagccgcagcgccagcaattctgtgcaagctgaaagaactgtcgctaatatcaccacgttcggcaaaacccaccgttgctgcatttgtctgaacagctgcagtgctcgctctatgtcccgtgatgacgcgaactcgacaatgatgacgtccagctcacgacactgggcgcatgcctccacactgttccatcactgtttattgagtgaaaatagaaggtgaaataaaagatgagctagaagaggtgctgaagacagactaacagattggttggtcgacggcggaggagacgcagatcagctaaattctacatcaatgacctaatcggctaatcccaacttcgtttttccacatgtttggaaacttctctgtgaaacaaaatttaacacccaaggagggttgatgggattggaaaaaaataggaaagatttcgacttatttggtattgaaactcatccaatccacatggatcgagagtaaaacgaaaatgcctttaagtggacaaataatcggattatcatagaactacagatagaccgtagaccagaacgaacacagcaagatcagcgatgtgagtctcagaccacagctaattgtcgctagtctagaggcacagtaacagaacaagtcatttcacagttggatgttt

SEQ ID NO: 198947 - DNA, 1802 bp, Zea Mays
gttgaagaaagggtgttcccttgcttacttggaataaacctgatgttgaagctttggtagacttattaagttacaagcagaattgggagccatcttatattcgccaaagcatgctccctatgttatcaaccatatacttaagagaggttgcatcatctccatctacaccattgctcctttgtgaccaatatgaatttgattcaattcaacggattaagataaagcacggtcacccgtattacttggtaaaatggaagagagctacccgtggtatgaattctattatgtctagcaacaagccagtaatggagggagagacaagtagcgaggtagtgttgttggatgaagacgacgatttggatgcagtggtttgcgagtctcctgagttattagacgaacctgatgttccacaagtgcttattgatgatggctgctgctttgtattgacggatgaagacattcaacttgttggtgctgcttttcctaaggaaacagcaaggtttcaggaagaacagaggctgaaagaagcacgatcaagatcacggaaatccaaatcaagcttagcagacagtgcgtgcaagacacctgaaggcccgagacctagcggggtgcagcttagcatcacagagttctaccgctcgaagaaagcgcagaacgtagaatctgggaagaagccggcgggagaagggcacgccgcgaggggaggctcgagaaaatcgtccgacagggacctcgacaagagcctgccgaagtctgttcggcgccgcctcctcttcgattgctgaggactaggtagcctggcttttttttggtgagcactgcactgtaatcttggtgccactgctgtagatgacctagggaatgccttaacctattttagccggtgtagattgcgcgcggcccattttgtacagggaacagagcatcgtctttgtctaagaggaaatgaagcaggtcttagttcggaatggtcatctgaacctcatctttgtctaagtgcttgggaactcagcttcgattctaggaatgggatgcgtgccgctgctagagcaatagcttttttgttttatgtctgcttttgtgccggacaatagctgacagaattgatgtgatactacagtatgcacaacttttactcccttagttccaaatttagtttcaaaaattatgagatggtctggttgttttgatttttttttaatctctagatacattttgcttatcactttttgtaatgatcttttttcatggacacgttggctcaacctttgccccgctgcgacatgatctggcggccatgagcccatgacaaccatgagcacaacgatggagcatgtatggtgtgggagacgcggtaacagttagcgccgattcgcgactgtttcggctagacagacagccataataacaagtgaactcttcacttccagcgtcagatgccacggccagacccagacgtagccctggccgccgggccaccaaataaactgcccatgccagggttcagttcagctcactcagcagcacacagcagttccatcgatgcagggagaaggaaggaaaaaggaaggctcaacaaaagcaagtcctcaggtttggacctgaacaagaatcagccaaagtccaagtccgtgtcggatttggcagggcggagaccgtgagtcatctaatccttggtacatcaagatgatttgatcttgtgtccaatatgatgaatcatgaatggtatgacagacgaattgtagtggttgttggataaatgtgggcttagcccaattaattaatattcaataatatttaat

SEQ ID NO: 198948 - DNA, 835 bp, Zea Mays
atggatattggcggaacactgatggttccctaacaaatattcgttccaattccgaattatgtttacttcaggaaaagtggtttggagcgttcagctagcatttcaaaagatttggagtggttcagaaaacaagggattgcaatcccagagccgagtacttcgggatcaacttatgcagcttatctgactgaactggctgagagcaacgctcctgcattcctctctcattattacaatatctattttgctcatataactggaggtgtcacaataggcaataagatctgcgaaaagattctggaaggaagggatctggagttctacaagtgggatactgatgctgaacttctactaaaagatgccagggagaagctgaatgagctcagcaagcactggactcggaaggacaggaacttgtgcttgaaagaagctgcaaaatgcttccagtacttgggaaagatggtccggttaattatcttgtgagccgttgtgtttgttggataaatcccagtttaagctcgcggcatgcattagagggacactagtatggctggaggcggcgcagtgcagttactcttgaggagttaatatccttatcaactaaataacatgtcagaagtctggagggtcctttttggtgtaatagatgaagagggtcagcgagcactatatgattgacgctgaaatggcagaacgcaattgcttctttttttattccgcgtgcgtaactgcatatttaggaggtatttggttagagggactaaagattagtctctagtttttagtcccttttagtctttttttttgccaaacactaggactaaaatatggacta

SEQ ID NO: 198949 - DNA, 829 bp, Zea Mays
atcggacatggatattggcggaacactgatggttccctaacaaatattcgttccaattccgaattgaaaagtggtttggagcgttcagctagcatttcaaaagatttggagtggttcagaaaacaagggattgcaatcccagagccgagtacttcgggatcaacttatgcagcttatctgactgaactggctgagagcaacgctcctgcattcctctctcattattacaatatctattttgctcatataactggaggtgtcacaataggcaataagatctgcgaaaagattctggaaggaagggatctggagttctacaagtgggatactgatgctgaacttctactaaaagatgccagggagaagctgaatgagctcagcaagcactggactcggaaggacaggaacttgtgcttgaaagaagctgcaaaatgcttccagtacttgggaaagatggtccggttaattatcttgtgagccgttgtgtttgttggataaatcccagtttaagctcgcggcatgcattagagggacactagtatggctggaggcggcgcagtgcagttactcttgaggagttaatatccttatcaactaaataacatgtcagaagtctggagggtcctttttggtgtaatagatgaagagggtcagcgagcactatatgattgacgctgaaatggcagaacgcaattgcttctttttttattccgcgtgcgtaactgcatatttaggaggtatttggttagagggactaaagattagtctctagtttttagtcccttttagtctttttttttgccaaacactaggactaaaatatggacta

SEQ ID NO: 198950 - DNA, 1162 bp, Zea Mays
cgagctgtcgaacagacccgcggtatcgccaagtattcccttgcaggagtaacggataaccaacccctcaaacggttaaacccatgccgctaatcgacgccgccgcctcggcggtcgcgccgcccccaccccggcgagtggctcaactccgcttcttcagcactcgcagacccggaatcctatccctaactgccaccagctgctccccctcccctccgcccccggtcgctgcggaggtgcctgcgccgccacaggaagcgaagtcgaagccgaggccacggcggtacccgaagcagtaccccggcgagtcggtgggcgttgctgaggagatgcgctttgtcgccatgcgcctgcgtaaccccaagcgcaccaccataaaagacaagtcggggacggaggacgcggacgccggggcgggggtgtcggagggcgaggctgaggaggacgacggcggcggcgtgaaggaggaacacgaggaggaggatgagggcgagctcgaggaaggggaatggatgcccagcatggaggggttcgtgcgatacctggtggacagcaggctcgtcttcggaaccatcgagcgggtcgtggccgagtccaccgatgtcgcctatctgcgaaaagattctggaaggaagggatctggagttctacaagtgggatactgatgctgaacttctactaaaagatgccagggagaagctgaatgagctcagcaagcactggactcggaaggacaggaacttgtgcttgaaagaagctgcaaaatgcttccagtacttgggaaagatggtccggttaattatcttgtgagccgttgtgtttgttggataaatcccagtttaagctcgcggcatgcattagagggacactagtatggctggaggcggcgcagtgcagttactcttgaggagttaatatccttatcaactaaataacatgtcagaagtctggagggtcctttttggtgtaatagatgaagagggtcagcgagcactatatgattgacgctgaaatggcagaacgcaattgcttctttttttattccgcgtgcgtaactgcatatttaggaggtatttggttagagggactaaagattagtctctagtttttagtcccttttagtctttttttttgccaaacactaggactaaaatatggacta

SEQ ID NO: 198951 - DNA, 1463 bp, Zea Mays
atggtttttagtttttttacaggtgctttattgggtccgtccatacggcaggatggcgctaaggggggtctggcagctgcagaagctcgtggtaaactactgcgactggggagggagcagcaggggcatcaggtatgatgatatagtttggttcctctcttcggtagtggtaccattagaccattgtttttcggtatgatttccttggttctgttgcgaaaagccgaaaattagttgagatcctgctggtacatgttcttcaatagtcggatggttggtcgactcttcccagccatggatttgtcgttgcagatgagtgcggtttggaagttggaactgaagacaactatcctattgcctctagcttctctagggcattcctgcatggaaatttcatttctactagacagaaatgtgttatgggactagcgggtactgatgtctgggaagcccatttagtcgttagttcaattacatgctatttattgcaacaatagaatcaggcactttatgcctatgcttgtattcctttatcagattttagctcgagctatggcgctttccttgtacagcagtacactatagtttagtggcagctgtatgggcttcagatcaaacatggtgctggttagtagtcttcattactggatatcgatgcctgaatcttctctttaacaactaccaccgtttttttttactgcagggccttcatggaggcacatcttccagcctttaaggaaaagaatccacacttagaggtggtgacagagcttgtccgcggtcaacatcctaacttgaagggaatttacaaaaaccataacgagcgagtggtatgcgtgagaaatttaccgccagaggaaatactcctgcaagccaccaggctaaggaactctctgggcaggaaagtggtgaagctgcggaccagacatgtaacgaaacgccccagtgttcaggggacgtggacgacggaactgaagatgtgaagcaacaagccaaggtgtttcattgttctttggtggtctgattgcagaaaatgtcagctgtgtcgataactttggtagagctgccgttaggcttgcctgtttgaatagctaaaccgtttactccatttgttccggagtacaatctggtaataacataggagtacacttgactttcttagaccaggccgtcacatttgatatttcagtctggtgatatctgtctcctatattagaccagtacaatgtttcaactcgcgagatactgcgaacacagaattttgctatgctatggccattaccaaggttttttttatcactggtataagtgaaaaaaaatggaagacggaaactgtcatcagatgcagccatacaatatgctgacagccagccagtcaatcttgtgtacgaaccattacggtgcggttggtttaaaactatttccaacatattatttatatggtcatataaaataccgttttg

SEQ ID NO: 198952 - DNA, 1853 bp, Zea Mays
gcggctttcttgttaaaaaaaaaatctcgagaatatattcactagctagagggactagtagtaggtagtagtagaggagaacagccactcagccagccccctttacttgcacacaatagacaacctcgaacagaaaagaagcagttttgccgtccgagatgagccgccactgtgtgactctccttgtgatcatctttggattactgcagatggctgtggctctctactctaatccaagttcaacgcacccgaactgcacggagagatgtggcaacgtcagcatccaatatcctttcggcttcggatccggctgcttccggcagcccgatttcagcctcacctgcgacggcggcggcggcggcaaccagccgcccaagacctttctgcatgacggcatcaccgaggtcttgcccgattccggtgtcacggtgggtctgtcaaggcttattgatgtagccatttcccacaccatctttatggcacctggtattcctagttacaacttctcgtggaatctcagttctttcactatgttggatggctcattcaacgtaactgggtgtgacttcgatatatatcgtcaagaaccgggcaagaatggttccataccgcggtgtacaaatagctgcccccaaaacatcaccgagacggtggccagacagaactgcaatggaaccgggtgctgccgtctttacgttggagaagttgttcctgatttccagctgaaatttgtgctccacaataatgacactagaggtgatcatgatgctctttctaatggaagcaccctgtggaatacaataaacattaccagcaactgggcccaaatcttatgggatatagatgatcaaccgacatgctccagagcgaaggacaaaaatataaactacgcatgtgtcagcaactacagccattgctttgacgctgaactgtttgatattggttatagatgtggttgtaacagcggttacgtaggcaatccctatgtagttgatggctgcaagcgtgacgaaggatatagtccaaatcaactgaaggaaaactgctcgaggtcctgtggtaatatcagtgttccatatccctttggtttagaggaaggttgctctgcaaggaagctatttaaactcaactgcagaaatgcgacagcgtctatgctccaattcgatgacgaccgtgttgtggcgtttataaatgttgcagagagtctcgtgggcatcaggtttacctcacatttcgaagatgatcagcttgggatatatgtaccaggtgaacccgatctctttatgggtcttggggaatcagtggtctcaatgcactgggcagctgccaatcttacatgcgacgaggccctgaaaaataaatcacaatatgcatgtgtcagttcaaacagcaaatgtttaggagtcaattcaaaggatggttatattggatacagatgcaaatgcttagatggtttccaaggaaatccatataccatcagtgatggttgtgaagaggttttgctgctgtgctaaagcttgatccttttgatggtaaaaacttcttgatttggaaagctaaaatggaattgtggctaactgcaatgttatgttattatgtcgctgagggcaagcctgccaacttacctcctgaggatgaagctaagtttaaggctgatgacaacctcttttgaggagcagtgattagcgcacttgacacaaaattccagaaaagctatatcatccttcccacagggaaagagctgtgggatgcacttgttggaaagtttggagttactgatgctggtagtgagttgtatctcatagagcagttgtatgactacaagatggttgagaaccgatctgtagtggaac

SEQ ID NO: 198953 - DNA, 1734 bp, Zea Mays
tcactagctagagggactagtagtaggtagtagtagaggagaacagccactcagccagccccctttacttgcacacaatagacaacctcgaacagaaaagaagcagttttgccgtccgagatgagccgccactgtgtgactctccttgtgatcatctttggattactgcagatggctgtggctctctactctaatccaagttcaacgcacccgaactgcacggagagatgtggcaacgtcagcatccaatatcctttcggcttcggatccggctgcttccggcagcccgatttcagcctcacctgcgacggcggcggcggcggcaaccagccgcccaagacctttctgcatgacggcatcaccgaggtcttgcccgattccggtgtcacggtgggtctgtcaaggcttattgatgtagccatttcccacaccatctttatggcacctggtattcctagttacaacttctcgtggaatctcagttctttcactatgttggatggctcattcaacgtaactgggtgtgacttcgatatatatcgtcaagaaccgggcaagaatggttccataccgcggtgtacaaatagctgcccccaaaacatcaccgagacggtggccagacagaactgcaatggaaccgggtgctgccgtctttacgttggagaagttgttcctgatttccagctgaaatttgtgctccacaataatgacactagaggtgatcatgatgctctttctaatggaagcaccctgtggaatacaataaacattaccagcaactgggcccaaatcttatgggatatagatgatcaaccgacatgctccagagcgaaggacaaaaatataaactacgcatgtgtcagcaactacagccattgctttgacgctgaactgtttgatattggttatagatgtggttgtaacagcggttacgtaggcaatccctatgtagttgatggctgcaagcgtgacgaaggatatagtccaaatcaactgaaggaaaactgctcgaggtcctgtggtaatatcagtgttccatatccctttggtttagaggaaggttgctctgcaaggaagctatttaaactcaactgcagaaatgcgacagcgtctatgctccaattcgatgacgaccgtgttgtggcgtttataaatgttgcagagagtctcgtgggcatcaggtttacctcacatttcgaagatgatcagcttgggatatatgtaccaggtgaacccgatctctttatgggtcttggggaatcagtggtctcaatgcactgggcagctgccaatcttacatgcgacgaggccctgaaaaataaatcacaatatgcatgtgtcagttcaaacagcaaatgtttaggagtcaattcaaaggatggttatattggatacagatgcaaatgcttagatggtttccaaggaaatccatataccatcagtgatggttgtgaaggatgacaaagccgagtccgaagccaaagagtaagaagacgaagccgaagtttagtggatgacgaagtcaaagccgaagccaaagctcaatggacactaatgaagcttgaatagataactataggaaaaactctaaaaacccttgtaataacctttgtaaagaacaatgtaattaattttcactttgtaaactttgtccataccttgtaatatattcttacctttccatcaatgtataaagtgctttggtgtgaacgaaattagcatttttgagccgaa

SEQ ID NO: 198954 - DNA, 2744 bp, Zea Mays
ctagtagtaggtagtagtagaggagaacagccactcagccagccccctttacttgcacacaatagacaacctcgaacagaaaagaagcagttttgccgtccgagatgagccgccactgtgtgactctccttgtgatcatctttggattactgcagatggctgtggctctctactctaatccaagttcaacgcacccgaactgcacggagagatgtggcaacgtcagcatccaatatcctttcggcttcggatccggctgcttccggcagcccgatttcagcctcacctgcgacggcggcggcggcggcaaccagccgcccaagacctttctgcatgacggcatcaccgaggtcttgcccgattccggtgtcacggtgggtctgtcaaggcttattgatgtagccatttcccacaccatctttatggcacctggtattcctagttacaacttctcgtggaatctcagttctttcactatgttggatggctcattcaacgtaactgggtgtgacttcgatatatatcgtcaagaaccgggcaagaatggttccataccgcggtgtacaaatagctgcccccaaaacatcaccgagacggtggccagacagaactgcaatggaaccgggtgctgccgtctttacgttggagaagttgttcctgatttccagctgaaatttgtgctccacaataatgacactagaggtgatcatgatgctctttctaatggaagcaccctgtggaatacaataaacattaccagcaactgggcccaaatcttatgggatatagatgatcaaccgacatgctccagagcgaaggacaaaaatataaactacgcatgtgtcagcaactacagccattgctttgacgctgaactgtttgatattggttatagatgtggttgtaacagcggttacgtaggcaatccctatgtagttgatggctgcaagcgtgacgaaggatatagtccaaatcaactgaaggaaaactgctcgaggtcctgtggtaatatcagtgttccatatccctttggtttagaggaaggttgctctgcaaggaagctatttaaactcaactgcagaaatgcgacagcgtctatgctccaattcgatgacgaccgtgttgtggcgtttataaatgttgcagagagtctcgtgggcatcaggtttacctcacatttcgaagatgatcagcttgggatatatgtaccaggtgaacccgatctctttatgggtcttggggaatcagtggtctcaatgcactgggcagctgccaatcttacatgcgacgaggccctgaaaaataaatcacaatatgcatgtgtcagttcaaacagcaaatgtttaggagtcaattcaaaggatggttatattggatacagatgcaaatgcttagatggtttccaaggaaatccatataccatcagtgatggttgtgaaggtacaacttaactgtgattctcacccctatccaatttccatttaattttagtgtatctgctggatctattccgtcacatgcatatccactttatttcatcaccatgtatttacgctaacatcttctcaagatgggtcaaaaaaatatttttaatatttatcttgttacaagttgacacattttctttaggacttagaccttttatgagataatcagctagttggctatgagacttaatggaatagccttacacttccactatctgttggatcttttatgggtctggccaatttattgaataaactctatggtgtgtaatggtggagaatactaatagtaccatattggaaatccaagggtcttttggcttaacttatatggtgggaattattccacttaatttgagaagtcaagaaatgaacagggcgtaccacacgcgcgcgcgcgccgccgctgcccgggcgtggcgtggcgaggcaggcggcgagcgggcgtggtgtggttttgttaatttttagcactcattaacagcgggagtttcaactccgggttaaacctttcagttgtccgtctcttcgtcagccgcgcgagaccctttgtcctttagctgcccgtctcctggcgtgccgcatgcgacccttctcctttagcttccctctgcgagaggttaaatagaggagaacccctggcacttggtacacgagaacagaaccattttcagtcacagtccagccgcaagtgagagtattcccatctcgtgactctgcgcgcacagagcagcgagaggacaggtgcctccgaagcccttgccgttcgagaccttgcacaggggatcggcaattaggtttttggggagcgtctacgcgactgcccaaaacatcttcttcctggcgacatgacaagggaagctgaacaaggatctagatcatcagagcgcatgggaggaggttttgctgctgtgctaaagcttgatccttttgatggtaaaaacttcttgatttggaaagctaaaatggaattgtggctaactgcaatgttatgttattatgtcgctgagggcaagcctgccaacttacctcctgaggatgaagctaagtttaaggctgatgacaacctcttttgaggagcagtgattagcgcacttgacacaaaattccagaaaagctatatcatccttcccacagggaaagagctgtgggatgcacttgttggaaagtttggagttactgatgctggtagtgagttgtatctcatagagcagttgtatgactacaagatggttgagaaccgatctgtagtggaac

SEQ ID NO: 198955 - DNA, 6490 bp, Zea Mays
gaaaggaatagataccagagaaattcctggcgtgaaccacgggtgttgttcacatttggtaccagagccaatactggatcctccacacgggtactggacgagatcgcaatcgaagttgggcggcatggcgccagcgaagacggacgatcctttgtcccagcttctggcgaagatcgaggagggaaacaaggagactcaccgacgcatggaggcgattcagggggcggtgggaaatatggaggcggcggtcaaggtggtgatgacggagcacggagatcttcagaagtggaaaccggaggtggaagcgaaagtgacggagatttctgatgctctaaaggcgatccagatccagatgggaaagatggagaagaagccgctcggtttcgggtcgagacaggaagaagaaggagaagacggatttctgaagccgccaccatctgattcttcgaatttggagtttcgtcgtgaagaagggcggacccaattctcgcatggaggtatgaactcgccctggaactccaactctttcagattcgaggctgctggaaaccattcctttggcgactggtcacatgggtccggatcgggtatacctagtatgagtttccctgtttttgatggatccaaccctaagctgtggagaacgcggtgtgaaacctactttgatttctattctgttgctcgtcccatgtggattcggttggccatcatgcattttgagggtgcggcgttattctggttacaatctgtagaacatcggcttagatacatgaagtgggatgaattctgttctggattgtataacagatttggaagggatcaacatggtaccttgattcgacacttctatcacatataccagcagaactcagtggtggaatatgtggaacagtttgacatgctgttacatcaactactagcccatgaaagccagttgacgccaatgatgatcacttccagatttgtggatggtttaaaggatgatatacaggctgtggtggccattcaacgcccagccgatctggacacagcctgttcgctagctctattacaggaggatatgttgacacaacccaatcggaaggaaggcaggagagtggaattgggtggttatactagaccctccaatccctccatgaagactgcgaccatggctggacatcaagtatcagttaccacaagtcggatccatcccttgtcggaagatcgtcgtaggccgtctgggagcggtggaaggacggaggatcagaaacttgctgccttgaagtcctacagaagagccaagggcttatgttttaaatgtggtgaaaagtggaattataatcaccattgctctaacagtgttcctcttcatgtggtggaggagatgtgggctgtgactgatcagggaaaggaggaaggggacactgatccaaaggatgagcattatgaaactgagaacgaggaggcagtgttggcgttgtctacggcggcagtaaatggtagtgaaaacaacaggactattcggttatgggcctcgattcactgtcaacaggtgctcgtattggtggattctggtagctcggctagttttatgggtacccatctgatggaagtagtgaaaggggtgcagaatttggtcagacctgttaaagtcaaagttgctgacgggtactatttgtggtgtgaaaaatgggtaccaagctgtcaatggctatgtgagggaataactttttatactgatttcaagttcttgccattggacggttatgatcttatactagggatggactggttggaggatcttagtcctatgtctatagactgggctgcaaaatggatggagttcgtgtacaagggtaagaaagtgcagttacaaggcgtaactcctaaattaaaagcttgtactcccatgtctagtgtgcaattgaagggtttgctcaggaaggaagcggtggaacaagtaatcgagttgaggatcaccatggagactgagacaaacactgttcccgatcagattgttgagttggtgaacaaataccaggaattgtttgcagccccaaaaggcctgcctccaaagaggttgtttgatcatgacattcctttgttgcctggtgtaaatcctttccgactcaggccttatcgatacactcctcaacaaaaaaatgagattgagaaacagattaaggaaatgttggaaggtggaattatccagcagagttccagtcccttcgcttcaccggtgctgttagtaaagaagaaggatggagagtggaggttatgcgtggactacaggaaactcaatgcttatacggtgaagaataggtttcccatgccagtttttgatgagattgcagatgagctgagtggagccaccgtattcacaaagttggaccatagggctggttaccatcaaatcaggattaaagagggagaggagtataaaacgaccttccatacgcataatggacactatgaatataaggtcatgccattcggtctgacaggagcaccggctacctttcaagattttatgaatcacatcttagctccccttttgagaaagtgtgttgtggtattcttggatgatattttggtttatagtactactttagaagatcacgttggacatttggaacaggtttttggtattctgacccaaaatcagttgaaactaaaacaatccaagtgtaagtttgcccaagacaaattggaatttttgggccatgtaatcagtgctgctggtatttcgactgaaccagccaaggtggaagtgataaaaaattggccaattccgaaatctgtcaaggaggtgagaagttttttgggtatggcggggtattaccgacgttttgtggcagggtttggcatcataagtaaacctctgaccaacctgctgaagaaagatcaaatgtttgtttggactgacaccacacaaaaatcttttgaggcattggagctgtattacagcaagatggacatcctatcgcctatattagtaaagctctgggtcccaggaatgctgctttgtcaacatatgagaaggagtgcttggcgatactttttgcagttgatcattggagaccttatttgcaacatgcccagtttctcattaaaaccgaccagcaaagtttgactcacctggatgatcaaagggtcacaacaccttggcaacaaaaggctttgactaaactaatgggccttaattttcaaattatctacaagaagggggtagagaacaaggtagctgatgccttatccagaagggcagatttacaatccgatgacactaccctgcaactgcatgtcctgagtagttcctctatgatccctagctggctgactgaggtcacgaaaggatatgaaaatgatgaagttgctcagaaaattcttagtgctttatctacaggacatccgttggagcattatacgttggtggccggggtgatcaagcataaaggcagggtgtggctgggtcacaatcaagatttgcagacgaaggttatgtcttcactgcatgacagtgccatagggggacactcaggttttccggtaacatacagaagaattaaagcaatatttagttggcctggaatgaaaaatcagattcgtgagtttgttggcacttgctcaatctgtcagcaggccaagccggataggagcaaatatcctggacttctgttacccctacccatcccagatcatgcctggcaagtcgtgacgatggactttatttctgggctgcctgtgtcccacaagtacaattgtatcatggttgtggtggataagttttcgaagtatgcacatttcctagcactagctcatccgttcacagctttaaccgtagctaagctttatctgtcagacatatataagttgcatggactgccatcgtcgattgtgtctgatcgggatcccatattcactagcaagttatggcaagaactgttcagattggctgggacaaagctgtgcatgagtagtgcctatcatccacagtctgatggtcagacagaaagggttaatcagtgtttggaagcttatctgagatgcttcgttcattcttgccccaaacagtggtattcttggctctcgctggctgaattttggtataacacttgctatcataccgctctgggtaaatctcctttcgaagtgttatacggtcatgctccttctcagcttggattagacaccgttgatcagtgttcggttcctgatttacaaacttggttgcttggtcaccaacagatgctacagcaagtaaagttccatcttcagcgtgctcaggacagaatgaagaaacaggctgataagggtcgagtggaacgtacttatactgtgggcgatcaagtttttctgaaacttcagcccttctgtcaacgatcagtggctgacagaccagtttctaaactggcatttcggttttttggtccctttgaggtgattaagcagatcaatcctgtggcctatgaactagcgttaccatctgggagtgctatccacccggtctttcatgtatcgcagttaaaatcggccaacggcgtgcgggttcctagcactgactctcttccagatatctttactgggttgcaggtgccggaggaagttctggagtccaggcttcttcgtaaagggggtaaggtgatttcgcagttgctcattaagtggtccaattggccggtgtcactgtcaacctgggaggatgaagaggccattaagcagaaatttccacaagcaccagcttggggtcaagctgtcgttaaagaagggggaaatgtcagcagagcagatcacatggaccatgcagaggagcggactcaagcagtgcaacagaaggcacagacagagggagtcaaggaagacaatcagagcccgcgcagccgtcgtgtaccaaagccaaataccaagtacatcggtgcagagtggcgcgtataggtatacggagttatacgtattgatgagggcaggtgtgccggtataaataatattgtaatcgtttctaaactcagtctggaacatgttattgccgagtcggcaagaaaggaatagataccagagaaattcctggcgtgaaccacgggtgttgttcacactcgctgtccctgcctgactcttaaaaagggcggcgtgtcaccgcctggttactcacagtcatagattcacgccgcggaacgcggattccaagaacccaagtgaatcgcggctcctcgagtccggcggtgccgtccggagaggtagagctagactgctagagcacagccccgccatggcggccgcggcgcgcgcgatcatctgcgagctggcgccgcagaaggtgtcgtcgacggcgtcggggcccgcggcgccgaagaagcgtgacgccgggacgaaggtggtgctgcagccccgcctctgcacgctccggtcgtacggcgccggcagcggcgtggtgacgcggaggattctggccggggaggaggacggcagcggggccgccgactcgggcggctccgcggcgttgccgttcttcgcctcgctcgctgactacatcgagagctcccgcaagagccaggacttcgagaccatctccggccgcctcgccatggtggcgttcgcggcggcggtggccgtggagacgacgacgggcagctccctgttcaagaagctggacaccatggagatcgaggaggcggcgggggtgtgcgtggcggtggtcgccagcgccgcggcgttcgcatgggcctccagcgcgcgcaataggatcgggcagatgttcacgctgggctgcaacgccttcgtcgactccctgatcgacaatatcgtcgaggcgctcttctccgagggcgagctgcaggactggtccgatgacatatgaacatgcacatgcatatatagagactaatagtagacagacagtaatacagtatacgtacatacatagagtcaactattaacagtaagacactaggtagatgaagttgttaagtgagttccatgcattttcgcaagcttcgtcatcgctgcacaacggcaaggctgaatatttcagagatggatcgttgattagagctccgcattctgcgtaggaacacacaagcagggatgtctttcagaagtgaggcggctcttaaagccttcaaggttgtgaaatatgtagatctcttctcttgggagaaatagtggtatcctactatcctaggctctggaaagattggcccccagaattaactgtacctgctactagtactactagctataccgagtgtatttagagaatgaatcatgtaatcaaatccatgtaatatatgccaagtgtagtcagagtcaaatctggagtattgattcttgacattgtaccacatggagtggaaatgagagcctatacaccgcgtttctctagcctatctccagctacccaaacgcctgtgcatactcattttttgcactcacgttcagttactcatcttccatcagagcgcagggcgtgaaactgcctccaacaatgtatggtcctgaactctaaatttag

SEQ ID NO: 198956 - DNA, 1159 bp, Zea Mays
gtcaactactctgcagcacagaaacacgcgcggtgcaccatagagttgcagatttcggcctcgctaaactgacaaacgactcgctgactcatatctccacgcgcgtaatgggcacgttcgggtacatggcacccgagtacgcacagagcgggaagctgacggacaggtccgacgtgttctcgttcggggtggtgctcctggagctcatcaccgggcggaagcccgtagacgcatctcagccactgggagaagagagcctggttgaatgggctcggcttctcctcgtggacgccttggagacggacgacttccgagaggtcgccgaccccgcgctggagtgcaggttctccaagaccgagatgcggaggatggtggaggcggccgccgcgtgcgtgcgccactccgccgccaagagaccgaggatggtgcaggtgtggcggtcgctggacgtggacgagtgctcgtcggacctgaccaacggcgtcaagctggggcagagcatggcgtacgactcgacccgctactcggcggacatcgagctgttccggcgaatggcgttcgccaacgacctctccaccgccgagctgggcgtcgtggacgaggacgaccaccggtaccacaacagcagcaaagccagctccagctccaggcggtacaagtaatcgaaacgacacgcgtgcgtgcgtgaaccacaaacacgtgatccagtccaggcggcaggtcgatcgaatcgcgcaaaggaccgcacgccagccgccactacatacgcggcgcgcggctgcacgggggacggtatacgtagtagcggagaatcgcagaggagaagctagctgacgacgtgaggcacagcacagcagcaggcggcaataatcttcgtttgagctagctagcacggtatctgtacgtacgctgctattcactgcgtgctgtttgcttttgtgtgtacagccgtgcaattcttgtcgcctataacaaaagaaaaccgcttggcatacggtacaaccacgtccatctggttattagacgctctccaacggtccactcaagcctccccctcccctcgcgagagtgcatcatctccgaaacgcctaccattatatatatgtgttactgaactgtatatggtattacataccattttttatgtcttagaataccc

SEQ ID NO: 198957 - DNA, 2751 bp, Zea Mays
aaaaaattacggaggaaaaccgaaaagggcacgagcacattacgccgcggccgtgttgtcgccaaggcgaggcgcattccgtgtctccacgctgcctagctcgatcggacctgccggcggacggacggacggacgtttacccatgcccatgtctatgtgagaggcccggccgccgctgcccccgtctcccctgccgatgcgcgtttgagatgccattattccggctcggctcctaaccactctccccggaacgacgacgataccgccgaccgcgcggcggccctgtgacgccgcgcgccctcatggcgtcaaccgagcaactggcgtcgtcccccgcgggagggccgccagggccgaaggcacgggcagcaccgcctccggaatcatcgtcgtcgccgccacccccgccgaaggcttcctcgtcgtctcctccgccgccgacaccgccgccgccaccgtcgaagcagtcgtccccgcctcccccggcccacaacagcacgacgtcgccgaacacaccagcgaccccgccagagaagtctccggcggcttcccctcctcctccggcctcgccgccgccaccaagccggtcctctcctcctccttcgccgtcttcgccgcccccgtcgccacctccgcagtcttcgccgccgccgcccgcggcgtcgacgtcgcagcagtcgcctccggcaccggaaccgaccaagccaccgacacccccgtcgtcggagaagcccggagcagccgccgggacgacggcctcgtcacctcccccaaatgcgggacaaccgccaccgcgcgagacaccgtcgacgccaccggacaccgccggtcaccagccacctccgccggcgcccacgcaaatgctgcctcctccgatggcgctgacggtgatcatgccgggcggcgtctctggcggcccacctgcaggcggcatgtggaggtccccgcctgggccccccgcgggtgggggtgggtcgggcagcaacagcaacatgaagaacgaggcggtggtcatcgggatctccgttgccgggctggtcctggcactggcgtcgctgctgataatcgcgtgcgcaaccggcaagcagggcaaccgggggaggaagcgggagcggcacgcgtcgcgcaggcacagcatcgtggtgccggaacgtcagtgtggcgcagccgcgggcgtggtgtcggcggacgtgtaccagccgtcgaacgggccggcgccgtcgccgtcgccgagcgggacgtcgagctcgtacgacctgtcgggggccaacaagtcgtggttcacgtacgacgagctggcgggcatcacgggcgggttctcggcggcgaacgtgatcggcgagggcgggttcgggaaggtgtacatgggcgcgctgggcgacgggcggcgcgtggcggtgaagcagctcaagctgggcagcgggcagggggagaaggagttccgcgccgaggtggacatcatcagccgcatccaccaccgccacctcgtcacgctcgtcggctactgcgtcaccgagaaccaccgactcctccggcgcgtgggctgacgtacctccacgaagactgccatcctaggatcatacacagggacatcaagtcggccaacatactcctggacgacgccttcgaggccaaggttgcagatttcggcctcgctaaactgacaaacgactcgctgactcatatctccacgcgcgtaatgggcacgttcgggtacatggcacccgagtacgcacagagcgggaagctgacggacaggtccgacgtgttctcgttcggggtggtgctcctggagctcatcaccgggcggaagcccgtagacgcatctcagccactgggagaagagagcctggttgaatgggctcggcttctcctcgtggacgccttggagacggacgacttccgagaggtcgccgaccccgcgctggagtgcaggttctccaagaccgagatgcggaggatggtggaggcggccgccgcgtgcgtgcgccactccgccgccaagagaccgaggatggtgcaggtgtggcggtcgctggacgtggacgagtgctcgtcggacctgaccaacggcgtcaagctggggcagagcatggcgtacgactcgacccgctactcggcggacatcgagctgttccggcgaatggcgttcgccaacgacctctccaccgccgagctgggcgtcgtggacgaggacgaccaccggtaccacaacagcagcaaagccagctccagctccaggcggtacaagtaatcgaaacgacacgcgtgcgtgcgtgaaccacaaacacgtgatccagtccaggcggcaggtcgatcgaatcgcgcaaaggaccgcacgccagccgccactacatacgcggcgcgcggctgcacgggggacggtatacgtagtagcggagaatcgcagaggagaagctagctgacgacgtgaggcacagcacagcagcaggcggcaataatcttcgtttgagctagctagcacggtatctgtacgtacgctgctattcactgcgtgctgtttgcttttgtgtgtacagccgtgcaattcttgtcgcctataacaaaagaaaaccgcttggcatacggtacaaccacgtccatctggttattagacgctctccaacggtccactcaagcctccccctcccctcgcgagagtgcatcatctccgaaacgcctaccattatatatatgtgttactgaactgtatatggtattacataccattttttatgtcttagaataccc

SEQ ID NO: 198958 - DNA, 2395 bp, Zea Mays
tggcccgcacaaccgtttccgcgtgggacacgaacgcagcgggaaagagaaaaaagtagaaaaagcgaaaagcctagtagcacaaggctacaagcctacaagcaaccgcgtccgcgtgtggagcaaggaaggcgaggggagccgagcgggcaaccggcggcgacagacatggcggagcagcacaaggaggagtcgggcgtgacagtgctggacaagatctccgacaagctccacgggcgcgggggcggctcgtcttcgtcgtcggactcggacgacgagcgctcgtcggcgacggccgccgtgaaggccaagatctaccgcatcttcgggcgcgagaagcccgtgcactccgtcctcggcggcggcaagccggccgatctgtttctatggaggaacaagaggatctctggtggggtgctcgcaggcgcaactgccttctggctgctgtttgaggtcatggattaccacctcctcaccctgctatgccactgcctcatcctcaccctggccatcctgttcctctggtccaatgccacgactttcatcaacaagtgattgcaggactgtggatcctttctgttcttgggagctgctgcaatttcctcaccttgtcttacatagtttttatggtactgtacactgtaccggtcctgtatgagaaacatgaggataaggttgatgcttttggtgagaaggccatggtcgagctgaagaggtactacgccatcttcgacgagaaatgcctatcaaagattccgaagggcccattaaaagacaagaagcaacattagaagcttagaatcagataagggtctgcggtgatttatcatctcttttgaccattattcgtcggttttggtggatggatgtgattccatgtctaaatacctggacgtgctctagtgttttagtgtggtcagtagcaatgttctaaattatctgagattacgctgaatcatgttctgaagtccacgtttaacgttgctctccctatcctttggaagtggcaatttcctcaatgtctgtaatatatctagtctagtgctatttcttaatctgacctagcgtcatgatgaacccttcttggatatttatttatttgtgccactggacatggtaattagagagcacgtaaattgtacatttgccatcatactcattagacgtgagacgtgttagtgtggtatcgatgcttgcactggagatacgatgctcaataacgccaagtttagaaaagtagcccttagagcatcttcaacaatatatagggttctattcagaaaaaaaaaactatttcaacggtgccctatttcataaaatttagttaaaaattataaagcaccctcttaaatgacttaaatatattactatctccgttttcgaatattttttatccgatgatttatttttataactaaaccacgataaataaaaaagatcactatagtgggcttccctttaacctaaatttaaggttttactgttggaacaaaatattttgttagtgcctaaattttataaaatatatttatttttaaattatagatcattttatagatcatgttattggagatgagcttatggattgtacgtgtagacgtccggtgaaaaagttggttatcgaagcatctccaacggttttttaaacaactcattaaattttaaatttaataagtgaataaaaaacacttcttcaatagttctataaatgttaaatatagttacttcctatccaattcaatttcgtctgtaagtttgaagactcgatagtcagctgtcgccgaatattttaatgcccacgttggccacgtagctaagtatatagatttgccgtgttttttaacacccacgagataatatgaaggaaaatctagcaaatattttttttaaatgatcaaggcacaatgattagtaccaagtggatttgtgcgcttccaacttgttgcagtaccgggcggtggacgatgacggcttctcgtgattagcaatacctgcggtcgacgatgacggcggtctgagacctcgcggcatatgtgactccttccctacattgctccgaacgatccgcgatggcactggagatcttaggatcctctgggttcacctggggcgtcgcgagacgacgttgagtcgcttagaaattaagaaatcaagtcggtgaagagatcttgattcttgagtggagtgggttttgccctgggggtaagatctgagggtcgtcttggggtcggcaggccacccaagacggatctagacgacataaagtcgaataggatagaggtggatatgcagaaggctataactaaaagctatgttacatctactcttagggcaggaatgataaagaaaggtaaataacgtagatttgttcgattggaatgtgttcggggttctg

SEQ ID NO: 198959 - DNA, 1428 bp, Zea Mays
acgtgtctggtgcccgactcttctgaactctgaactatgttatccaataccgttggtggtgggccgcagaaccgcgcgcacgggggagccaatggcgatcgtggccattctcgtcgcgcccaccgccagctacgtcgggccgcgccgccggtggcgcgccgcggcagcctcgtcttcggcggcgtccggggtggacctcaaagcgctgcaggccgccatcgataagaaaagcagcgatgatgttaggcaggcgctggaccagctgagagagagcggatgggccaagcggtggggctcgcagccctatgtgtcgcgccggacgacatctctacgggagctcactacccttggaatcaagaatgctgagaatttagcaattccaagtgttagaaatgatgcggcattcttgtttacagttgtgggtaccactggattcttagccgtccttgcaggccagctccctggggattggggcttctttgtcccctacttgattggaagcatttcattgatcgtattggctgtcggaagcgtcgctccaggtcttctgcaagcagcaatcggagcgttctctacagtctttcctgactaccaggagaggattgctaggcatgaagctgctcatttcctagtcgcctatttgattggcctccctatccttggatattctttggacatcggaaaggagcatgttaatttgatagatgagcaattacaaaagctaatatacagtgggcagcttgatggaaaagaactagacaggttagctgtagtttcaatggcaggactggctgctgaaggtctagaatatgacaaagttgtaggtcaatcagcagatcttttcacccttcagaggttcataaacagaactaagccgcaactaagcaaagatcagcaacaaaaccttaccagatgggcagtgagtcctgtttgctgcatcacttctgaagaacaacaaagcagcccatgaggcgcttatgtcagcgatgtcccaaaaggcaagcgtgttggggtgcattgaagcaattgagaatgcatcctgatcaaaatcctgaggaatcgggtggaggagaggatcgaggcgtaggaaggagaaaccctaatcatcaccgtcgattcctgtacttctgtagacatcaaaaactcaggccacagggaagtcaagtgctcgaaactccaaagggaaggaaattcacacgatgacaaaaacaatagcctaatctgctgccatttactatcatacacgtgtgccccaatattactcatttactcccatcttttgttttcgtatataatgcgcgattgtcctctccaataccacactttgaccattaatatcttgtatgctgtaatattcatactatgaaagtggacattatataaataacgtttttttcaaatatgaatccaatcttttgttagtgttat

SEQ ID NO: 198960 - DNA, 1424 bp, Zea Mays
acgtgtctggtgcccgactcttctgaactctgaactatgttatccaataccgttggtggtgggccgcagaaccgcgcgcacgggggagccaatggcgatcgtggccattctcgtcgcgcccaccgccagctacgtcgggccgcgccgccggtggcgcgccgcggcagcctcgtcttcggcggcgtccggggtggacctcaaagcgctgcaggccgccatcgataagaaaagcagcgatgatgttaggcaggcgctggaccagctgagagagagcggatgggccaagcggtggggctcgcagccctatgtgtcgcgccggacgacatctctacgggagctcactacccttggaatcaagaatgctgagaatttagcaattccaagtgttagaaatgatgcggcattcttgtttacagttgtgggtaccactggattcttagccgtccttgcaggccagctccctggggattggggcttctttgtcccctacttgattggaagcatttcattgatcgtattggctgtcggaagcgtcgctccaggtcttctgcaagcagcaatcggagcgttctctacagtctttcctgactaccaggagaggattgctaggcatgaagctgctcatttcctagtcgcctatttgattggcctccctatccttggatattctttggacatcggaaaggagcatgttaatttgatagatgagcaattacaaaagctaatatacagtgggcagcttgatggaaaagaactagacaggttagctgtagtttcaatggcaggactggctgctgaaggtctagaatatgacaaagttgtaggtcaatcagcagatcttttcacccttcagaggttcataaacagaactaagccgcaactaagcaaagatcagcaacaaaaccttaccagatgggcagtcctgtttgctgcatcacttctgaagaacaacaaagcagcccatgaggcgcttatgtcagcgatgtcccaaaaggcaagcgtgttggggtgcattgaagcaattgagaatgcatcctgatcaaaatcctgaggaatcgggtggaggagaggatcgaggcgtaggaaggagaaaccctaatcatcaccgtcgattcctgtacttctgtagacatcaaaaactcaggccacagggaagtcaagtgctcgaaactccaaagggaaggaaattcacacgatgacaaaaacaatagcctaatctgctgccatttactatcatacacgtgtgccccaatattactcatttactcccatcttttgttttcgtatataatgcgcgattgtcctctccaataccacactttgaccattaatatcttgtatgctgtaatattcatactatgaaagtggacattatataaataacgtttttttcaaatatgaatccaatcttttgttagtgttat

SEQ ID NO: 198961 - DNA, 1323 bp, Zea Mays
ctcgatccccctacttcactcgccgacgagcaaacggcctccgttccgagccgtcggcggcagctggagagcgaggccgagcgaccagttacagttgccggcgggcaaagtgggccacttggtgccaggacatggccgggcaaccgccaccgcagggccccgaagacgatttcttcgaccagttcttctccatgacggccggcggctcctaccccggcgcaaccgcgggcggcggccgcgcaccgggtgaccagccgttttcccttgcgctcagcctcgacgccgcggccgctgaggcttccggaagcgggaagcacgccgacggtggcaaggcggaccgggaggctatacagctccctgggctcttcccgccggcgttcggcggcggtgtgcagccaccccacctccgcgccaccccgcctacacaggtgttccacgcgcagcagccgaagcaaggcggtgcggcagtcgggccacaaccgccggcaccgaggccaaaggtgcgggcgcggcgtgggcaggcgaccgacccccacagcatcgcggagaggctaagaagagagagaatagcagaaaggatgagggccctacaggaattggtgcccaatacaaacaagacagatagagcagctatgctagatgagatcctagattatgtgaagtttctgaggcttcaagtcaaggttctaagcatgagcaggctgggtggtgctggtgctgtggcacagctggttgctgatatcccactttcagttaagggggaagcaagtgatagtgggagcaaacagcagatttgggagaagtggtcaacggacggcacagaaagacaggtcgcaaagctgatggaagaagacattggggcagcgatgcaattcctccagtccaaagcactctgcatgatgcccatctcgctcgccatggcaatctatgacacgcaacattcgcaggacggacaaccagcgttaacctaccaatcaaagcgtaagatagaaatgccggcttcgattcactaacaaggaggaggcagggaaaaaagacctaaaagatcctctccacttgaagttgtaccaaatggtatatgatatcgcctttccctttccgatcttttgttcaaaggtgctttaattgcaaggatatggctacggctatcagcagagtaatttcaaaatcaaatcaaaaggcaaagcagttgttccaatttctgatgatgacagtgattttccaacttcactagaggagaagaagggaaaaataacctgtttgcaccactcgcgccaaaagtatacttgcatatcaagggaacgacgaggttgggaagcaaag

SEQ ID NO: 198962 - DNA, 1143 bp, Zea Mays
ctcgatccccctacttcactcgccgacgagcaaacggcctccgttccgagccgtcggcggcagctggagagcgaggccgagcgaccagttacagttgccggcgggcaaagtgggccacttggtgccaggacatggccgggcaaccgccaccgcagggccccgaagacgatttcttcgaccagttcttctccatgacggccggcggctcctaccccggcgcaaccgcgggcggcggccgcgcaccgggtgaccagccgttttcccttgcgctcagcctcgacgccgcggccgctgaggcttccggaagcgggaagcacgccgacggtggcaaggcggaccgggaggctatacagctccctgggctcttcccgccggcgttcggcggcggtgtgcagccaccccacctccgcgccaccccgcctacacaggtgttccacgcgcagcagccgaagcaaggcggtgcggcagtcgggccacaaccgccggcaccgaggccaaaggtgcgggcgcggcgtgggcaggcgaccgacccccacagcatcgcggagaggctaagaagagagagaatagcagaaaggatgagggccctacaggaattggtgcccaatacaaacaagacagatagagcagctatgctagatgagatcctagattatgtgaagtttctgaggcttcaagtcaaggttctaagcatgagcaggctgggtggtgctggtgctgtggcacagctggttgctgatatcccactttcagttaagggggaagcaagtgatagtgggagcaaacagcagatttgggagaagtggtcaacggacggcacagaaagacaggtcgcaaagctgatggaagaagacattggggcagcgatgcaattcctccagtccaaagcactctgcatgatgcccatctcgctcgccatggcaatctatgacacgcaacattcgcaggacggacaaccagcgttaacctaccaatcaaagcgtaagatagaaatgccggcttcgattcactaacaaggaggaggcagggaaaaaagacctaaaagatcctctccacttgaagttgtaccaaatgacctgtttgcaccactcgcgccaaaagtatacttgcatatcaagggaacgacgaggttgggaagcaaag

SEQ ID NO: 198963 - DNA, 1167 bp, Zea Mays
ttggagttctggtagtagttcatcagaagagttcgttgtaacttcctaatccacgaaagctaggtgtagagttaatctaaagatccagcagtctgcaaggtggccaaagaaaacaacacggcaggagtgaagatctctgataggatgacttcagtgtccgaattaacacttgtgctggcttcaggtgcatcaatgttaccgcatccttcgaaggtacggacaggtggtgaagatgcatattttatagcttgtgatggctggtttggtgtagcagatggagttggtcagtggtcatttgaagggatcaatgccggactttatgccagagaactaatggatggctgcaaaaagatcgtggaagagacccaaggagctccagggatgagaaccgaggaagttcttgccaaggctgcagatgaagcacggtcccctggttcttccactgttttagttgctcactttgatggaaaggttcttcacgcatcaaacatcggagattctggattcctcgtgattaggaatggagaggtccataagaaatcaaacccaatgacttacggtttcaatttcccgttgcagattgagaagggtgacgaccctctaaaacttgtacagaaatacgccatctgtctacaagaaggcgacgtcgttgtaacagcgtcagacggtcttttcgacaacgtctacgaggaagaagtggcaggcatcgtctcgaaatcattagaagctgatctgaagcccacggaaatcgccgatttactggttgcccgagcgaaggaggtggggcggtgtgggtttggaaggagcccgttctcggactccgctctcgcggctgggtacctgggctactccggcggcaagctggatgatgtaacggttgttgtatcgattgttcggaaatctgaagtttaataaactagaaacgaactagcaaagttgagcgcacttcttttttttcttttcttttcttttttctcttcttgcaacagctgcactcgctggcaaaatgcccgtgaggcgtgagcatttcgcacatccctggcctacgcgctcaggcgcattgcgaaacgtgtattgtgtacacttgatacatactataaggttgtataagtaagcttcaaacgatcgctcgctccaccgcgcgccatcacaaaaggcaaaagcgac

SEQ ID NO: 198964 - DNA, 1102 bp, Zea Mays
tttcgtgccaactgctgtaggaacagtctgcaaggtggccaaagaaaacaacacggcaggagtgaagatctctgataggatgacttcagtgtccgaattaacacttgtgctggcttcaggtgcatcaatgttaccgcatccttcgaaggtacggacaggtggtgaagatgcatattttatagcttgtgatggctggtttggtgtagcagatggagttggtcagtggtcatttgaagggatcaatgccggactttatgccagagaactaatggatggctgcaaaaagatcgtggaagagacccaaggagctccagggatgagaaccgaggaagttcttgccaaggctgcagatgaagcacggtcccctggttcttccactgttttagttgctcactttgatggaaaggttcttcacgcatcaaacatcggagattctggattcctcgtgattaggaatggagaggtccataagaaatcaaacccaatgacttacggtttcaatttcccgttgcagattgagaagggtgacgaccctctaaaacttgtacagaaatacgccatctgtctacaagaaggcgacgtcgttgtaacagcgtcagacggtcttttcgacaacgtctacgaggaagaagtggcaggcatcgtctcgaaatcattagaagctgatctgaagcccacggaaatcgccgatttactggttgcccgagcgaaggaggtggggcggtgtgggtttggaaggagcccgttctcggactccgctctcgcggctgggtacctgggctactccggcggcaagctggatgatgtaacggttgttgtatcgattgttcggaaatctgaagtttaataaactagaaacgaactagcaaagttgagcgcacttcttttttttcttttcttttcttttttctcttcttgcaacagctgcactcgctggcaaaatgcccgtgaggcgtgagcatttcgcacatccctggcctacgcgctcaggcgcattgcgaaacgtgtattgtgtacacttgatacatactataaggttgtataagtaagcttcaaacgatcgctcgctccaccgcgcgccatcacaaaaggcaaaagcgac

SEQ ID NO: 198965 - DNA, 1113 bp, Zea Mays
tgtgtttcgtgccaactgctgtaggaagatccagcagtctgcaaggtggccaaagaaaacaacacggcaggagtgaagatctctgataggatgacttcagtgtccgaattaacacttgtgctggcttcaggtgcatcaatgttaccgcatccttcgaaggtacggacaggtggtgaagatgcatattttatagcttgtgatggctggtttggtgtagcagatggagttggtcagtggtcatttgaagggatcaatgccggactttatgccagagaactaatggatggctgcaaaaagatcgtggaagagacccaaggagctccagggatgagaaccgaggaagttcttgccaaggctgcagatgaagcacggtcccctggttcttccactgttttagttgctcactttgatggaaaggttcttcacgcatcaaacatcggagattctggattcctcgtgattaggaatggagaggtccataagaaatcaaacccaatgacttacggtttcaatttcccgttgcagattgagaagggtgacgaccctctaaaacttgtacagaaatacgccatctgtctacaagaaggcgacgtcgttgtaacagcgtcagacggtcttttcgacaacgtctacgaggaagaagtggcaggcatcgtctcgaaatcattagaagctgatctgaagcccacggaaatcgccgatttactggttgcccgagcgaaggaggtggggcggtgtgggtttggaaggagcccgttctcggactccgctctcgcggctgggtacctgggctactccggcggcaagctggatgatgtaacggttgttgtatcgattgttcggaaatctgaagtttaataaactagaaacgaactagcaaagttgagcgcacttcttttttttcttttcttttcttttttctcttcttgcaacagctgcactcgctggcaaaatgcccgtgaggcgtgagcatttcgcacatccctggcctacgcgctcaggcgcattgcgaaacgtgtattgtgtacacttgatacatactataaggttgtataagtaagcttcaaacgatcgctcgctccaccgcgcgccatcacaaaaggcaaaagcgac

SEQ ID NO: 198966 - DNA, 2772 bp, Zea Mays
atacaaacgcatgcccacaccacacactaatagtcgaatctatgctggtgttagtggtgcacccacctaaactgaaaaaaaactgtgattatgactaagtttccaccacattggcactctcatagtataaaaaatatatgcacttcagagggtttgtccttctcaaatttactttagctccgcctctactaccctaccgttgcccacaagtctaccaggctcaaattaaactaccatcgcctgcttcaacatttgatcaaggataataacggggaggggaaaaaaatagacagcaagcaaaaccatccgtaagcaacccatggggccacatttggctcggccggcagaaccgcgccaaaagcgacagaaggaaattaaaattccgaggaaatagccggaaaacaccagcccaccgagcctctcgctagtcgctccatagaattcgacgccttccgaacggccgcagcgcacaccccgccgcctcaaaacctcaggcacaagcttgcttcttttcctcccccattaatctctcccctcttgttcttcctcttccccatcagtctcgccgccatttccctgtcctgctgctgctactgctggtagtggttccccaaacccaagccttcgattcgcccgcccgcccgcccgcggtctcgagccagccttccgcgccgtcgtggttgctttacgcgcagctatccatggatgaggtccctgccaccgccgccgtcctcgacttccgacccggctcttctgtaccacgcgtctccgccgtcccgcgccgtgccgtgcagtgccccccggacaccggcggtgcagaggcggcgacgggaggtcgtccaggtatcgggaacactgccgccgtttccgcgaagttgacggggtcaagttcggccggtcccgatatccagtctgtggattgcgatacatcgggaggccttgccggcggtgacgctggagacgtgggggttttgtgcttagagaacgctgccgagaccgaatcggtggaaccaggtgtttcggacgtgaggttgggagctccagtggaggaacgccatggcaggacgctggatagtacgggattgggctctggtaaagctggtgagaccaatgagatttcactggttgaggtgtcccaatcaggtgccacttcaagcctagatgccactgcgtcgattggtggtggctactccctcgtggaggggtctctgccagaggcgagtggtgcccgcagatgtaaacccgaggtccatgaagtaccaacagggacccctgcaactgtgggattcccgattgaggacggtggctatggatttggaattgggcctaatgacgatgtggacggtagaaacgaccctgccggaggggaatgggaaccgcctactgatggcaatgatgccgaggacgtcacagatatgggtggaatcttgtgtgacgaaagagtggagaggatggagacgaattcggtagaacgtgaggcctcgaatggttccaccgtttcttctgaggaaggagtggacaggatggggacgagcttggatgactctgaggcttccgatggctcaaccacacaagattctgatacagacgtcgagaccgagtcaagtgtttctagtatagaggagcaagaagcaggatacggagcccacatccctcaaccggatccagcagtctgcaaggtggccaaagaaaacaacacggcaggagtgaagatctctgataggatgacttcagtgtccgaattaacacttgtgctggcttcaggtgcatcaatgttaccgcatccttcgaaggtacggacaggtggtgaagatgcatattttatagcttgtgatggctggtttggtgtagcagatggagttggtcagtggtcatttgaagtgtttgatggaaattgttatctcagggatcaatgccggactttatgccagagaactaatggatggctgcaaaaagatcgtggaagagacccaaggagctccagggatgagaaccgaggaagttcttgccaaggctgcagatgaagcacggtcccctggttcttccactgttttagttgctcactttgatggaaaggttcttcacgcatcaaacatcggagattctggattcctcgtgattaggaatggagaggtccataagaaatcaaacccaatgacttacggtttcaatttcccgttgcagattgagaagggtgacgaccctctaaaacttgtacagaaatacgccatctgtctacaagaaggcgacgtcgttgtaacagcgtcagacggtcttttcgacaacgtctacgaggaagaagtggcaggcatcgtctcgaaatcattagaagctgatctgaagcccacggaaatcgccgatttactggttgcccgagcgaaggaggtggggcggtgtgggtttggaaggagcccgttctcggactccgctctcgcggctgggtacctgggctactccggcggcaagctggatgatgtaacggttgttgtatcgattgttcggaaatctgaagtttaataaactagaaacgaactagcaaagttgagcgcacttcttttttttcttttcttttcttttttctcttcttgcaacagctgcactcgctggcaaaatgcccgtgaggcgtgagcatttcgcacatccctggcctacgcgctcaggcgcattgcgaaacgtgtattgtgtacacttgatacatactataaggttgtataagtaagcttcaaacgatcgctcgctccaccgcgcgccatcacaaaaggcaaaagcgac

SEQ ID NO: 198967 - DNA, 2913 bp, Zea Mays
atacaaacgcatgcccacaccacacactaatagtcgaatctatgctggtgttagtggtgcacccacctaaactgaaaaaaaactgtgattatgactaagtttccaccacattggcactctcatagtataaaaaatatatgcacttcagagggtttgtccttctcaaatttactttagctccgcctctactaccctaccgttgcccacaagtctaccaggctcaaattaaactaccatcgcctgcttcaacatttgatcaaggataataacggggaggggaaaaaaatagacagcaagcaaaaccatccgtaagcaacccatggggccacatttggctcggccggcagaaccgcgccaaaagcgacagaaggaaattaaaattccgaggaaatagccggaaaacaccagcccaccgagcctctcgctagtcgctccatagaattcgacgccttccgaacggccgcagcgcacaccccgccgcctcaaaacctcaggcacaagcttgcttcttttcctcccccattaatctctcccctcttgttcttcctcttccccatcagtctcgccgccatttccctgtcctgctgctgctactgctggtagtggttccccaaacccaagccttcgattcgcccgcccgcccgcccgcggtctcgagccagccttccgcgccgtcgtggttgctttacgcgcagctatccatggatgaggtccctgccaccgccgccgtcctcgacttccgacccggctcttctgtaccacgcgtctccgccgtcccgcgccgtgccgtgcagtgccccccggacaccggcggtgcagaggcggcgacgggaggtcgtccaggtatcgggaacactgccgccgtttccgcgaagttgacggggtcaagttcggccggtcccgatatccagtctgtggattgcgatacatcgggaggccttgccggcggtgacgctggagacgtgggggttttgtgcttagagaacgctgccgagaccgaatcggtggaaccaggtgtttcggacgtgaggttgggagctccagtggaggaacgccatggcaggacgctggatagtacgggattgggctctggtaaagctggtgagaccaatgagatttcactggttgaggtgtcccaatcaggtgccacttcaagcctagatgccactgcgtcgattggtggtggctactccctcgtggaggggtctctgccagaggcgagtggtgcccgcagatgtaaacccgaggtccatgaagtaccaacagggacccctgcaactgtgggattcccgattgaggacggtggctatggatttggaattgggcctaatgacgatgtggacggtagaaacgaccctgccggaggggaatgggaaccgcctactgatggcaatgatgccgaggacgtcacagatatgggtggaatcttgtgtgacgaaagagtggagaggatggagacgaattcggtagaacgtgaggcctcgaatggttccaccgtttcttctgaggaaggagtggacaggatggggacgagcttggatgactctgaggcttccgatggctcaaccacacaagattctgatacagacgtcgagaccgagtcaagtgtttctagtatagaggagcaagaagcaggatacggagcccacatccctcaaccggatccagcagtctgcaaggtggccaaagaaaacaacacggcaggagtgaagatctctgataggatgacttcagtgtccgaattaacacttgtgctggcttcaggtgcatcaatgttaccgcatccttcgaaggtacggacaggtggtgaagatgcatattttatagcttgtgatggctggtttggtgtagcagatggagttggtcagtggtcatttgaagggatcaatgccggactttatgccagagaactaatggatggctgcaaaaagatcgtggaagagacccaaggagctccagggatgagaaccgaggaagttcttgccaaggctgcagatgaagcacggtcccctggttcttccactgttttagttgctcactttgatggaaaggttcttcacgcatcaaacatcggagattctggattcctcgtgattaggaatggagaggtccataagaaatcaaacccaatgacttacggtttcaatttcccgttgcagattgagaagggtgacgaccctctaaaacttgtacaggcgacgtcgttgtaacagcgtcagacggtcttttcgacaacgtctacgaggaagaagtggcaggcatcgtctcgaaatcattagaagctgatctgaagcccacggaaatcgccgatttactggttgcccgagcgaaggaggtggggcggtgtgggtttggaaggagcccgttctcggactccgctctcgcggctgggtacctgggctactccggcggcaagctggatgatgtaacggttgttgtatcgattgttcggaaatctgaagtttaataaactagaaacgaactagcaaagttgagcgcacttcttttttttcttttcttttcttttttctcttcttgcaacagctgcactcgctggcaaaatgcccgtgaggcgtgagcatttcgcacatccctggcctacgcgctcaggcgcattgcgaaacgtgtattgtgtacacttgatacatactataaggttgtataagtaagctgcgagcccttcgaatgaacatcgtgatgtacttactcagcggcagcggggtaagctattcgtggccggccggtagcattatttatgcgaggcagtgaaatccatgaacagccgcagtgctactaaacgaaacggaaacgctcacaagatacatctctcggtacatgatttgtggtcagactggggtaaggtacgggcggagcgcatgaactcgggtgagtgagcccagctcacaagacccg

SEQ ID NO: 198968 - DNA, 2129 bp, Zea Mays
gctaccagtggcatcctacgcggcagaggaatagccacgccaccacgtcccccgcgcccgccgacccacccgcaaacgcaacgcaataataataggctaggcagccagcagccaccatccccaccagcccagcaccaggaaggaaatagcggcgagcaagagctggcggaaagaagaggaaagccaggcacgccgctcacccaccgcgccaccaaccgcagatcctaaatccgatctctctctccctccctccctccctcccgctcgaggttttcggtttcgatccggcaagcgggcgagatcttcatggcgacgtcgttcgaccgctgggagaaggaccccttcttcctcgccgccgaggaggtccaggaatccgccgatcggatggaatcggtttatcgggtatgggtgcaggagaggagcgggggcgattccgaggcggcaagcgtcactggaggccctacagctgcgcagcttcgccgcgagctgcacacggcgcttggtaccgccaagtggcagcttgatgaactggcgcgggcagtcagatcgaacgatctggttatgtcagcaggaaaagacacaagggctaggcatgatgattttgttacagcaatcggctatcgcatattagaggtcgagaactacttgaaagaatccaatcttgcggacgggagggggccattgagctgggttcacttggatgaggatgaaagggacgaccttgcagcttttctatctgccagtccttttcaacagaaagacaaagtggtcacaattccttcagcaggtgacattgaagtgggcagcaatgcagcaaggatgaaaaatgatatatcaactgacagctccaaggattcagctggttccacggatttgatttcaggcacagcaaagcaagatttgcatcgtgggcacagaagagcagctagtgccagtgctgatataggctcatggagcatgtcaatccctaatgaatgtgaaggaactacagaacagttatctgatggctcagacaaattgcctttgcataagatagtgaaaacatgtgctttgacaagtaccttgcaatctaagactagaacgaagtggaaaaatggagctgttaggtgggcaggcagtaaccaacaggatgttgaagaggctatccctctgaatacttctcagttgagtcagggcttagaggaatgctttgaaaggaacaagagttgcttaagtacatgtgatgagcatacatacaataagaaacttcatggttggctcggagcccttcgtagacaacttcaaaggtctcagtaccaaattcaatatgggcatcatattcaattgattgttttggcacttgctgcccttgtaatcattgtatgcatagtgaggacaatctggtgactatatttatttgctcatgattggatttctagcctcacaagatcagcagcttgtatgggcaggctgcctcgtccttggaagaacatctacaggacaatccttgcagcacggttgcttcgccacacttggatatgctcccgaatggtgccttgaacaattgatgcacctcgagaactcaatcctccgtggtgagttggtgactgggtggcacctatgcaatggcccagtataaattagtggtgcagtgggctggcgatcatgctgctagcaaccgaaattgcaagacttgtatcatacatcaacgctattgcttttaccgcctgacacggaagggtggtgatcatgcatcaatgctattgcttttactgcctgacacagaagggtgtcattttttttttgtaggagttgccatctgaactgtagagctccataggggataggttctgatcggaatgtgaatggcactagaaaattacttttactgtatctgcttgtgttgtcaagaaccgaatgaggtgcctggcagccttgtctgtaccctgtacactaaaattggagaatgttgaagccctcggcagtaatcggctggacttgtaaggtgccagtgtgtgttgagcctgcatattacggctaaattcggtgaagattatagcactttactgtgcatcctaatgtcaaagcccccaaccaatctttggtattccaaaccccgaagtccgaaggaaaccatttttggtcgagtc

SEQ ID NO: 198969 - DNA, 1534 bp, Zea Mays
cccgtcgccgtcaccgtacgctggtcatgggctcttggcatccgtcgtccgtcccacgccacgccacgccacagtgcctcctcgcagcttcatccactcgtctcccctccccacaccaaaaaaacaagcaagggtcagcagatagccgcattaaaaggagggaggtcacgtaaacttaatccaatccaccaaaccccaaatctctgtctcgcgctggcgcagcgcagggcaccgccacgcgcgcctcatccggtaccggcatgacgagcgcctccgagctcttcaccgcgcgccgtgccgcccgtggggcccgcctctccgacctcgacctggatccgcacgccgacgcgctccgggaccagcacggacttggcgcccggcaccggcgccgcgggtgccgcccgcgacgccagctcgacgccgccggggacgtgcggcagcacctgcacaccggggccccgccaccgcgtcgccgcgggtcgtacaccatcttatcgtacatagacaacaacaaccttggggttggggattctgcagctcggaggaacagacttgataggctgatgttcaggacaaatgagcggcttcctggtgctgtactgcaagcacaagcgcgtgtcctggagagactcagaggcatttctcttggttcatctgtgtccaggccatccatctcattagatgaattttcagctagcgatgtattcagaatcatcgacttcagaaacagggaagcacggcatgaagaaaatcggcaccactcatcgtcgttccacccaagcagtgaatcagatgaagaaagaccaaccgtcggttccactcactccaaccggtcaaccggacttaccaaggcagctttcctgcgtctgcaggtcgagatttttgaggctagcaaagatgatagcagagaggcatcgcctgaatgttctatttgccttgatggattttacgatggagatgagctgataaggttgcgctgtgggcacaggttccactcgacatgcttggagccatgggcgcggaaatgtgcagactgcccatactgtcgaacgaacatacggtcacgatcctgacgacaaacccttagttcagagtaagcttataaccaccatggagtttcactgttgtaaaattcgctgttgtgggcatgccagttaatccggtgctcctatggcgacatgtaatttctaatatcctgaatattttgtgttgtgtcactcagagaggtttatggtgttgtgtgcgagtggaggctagtagcagtatagcttagaaagcacccttttgtgtgtatgtagcgagggatcacgcaaatgatcctgtactactaatgataatgttctgatgtctgaatttcagttgttactgcatgcttcttgttatgtagggcgaggaacatgacttcgctatgatgcggttaaaaatgctctgcaaaatactaggctgaaggagtcaatgtcagtgtcaccagcttttacatttctctctctgagctgatttcttccaaaagcatcatcattattattattttttt

SEQ ID NO: 198970 - DNA, 1170 bp, Zea Mays
acccgtcgccgtcaccgtacgctggtcatgggctcttggcatccgtcgtccgtcccacgccacgccacgccacagtgcctcctcgcagcttcatccactcgtctcccctccccacaccaaaaaaacaagcaagggtcagcagatagccgcattaaaaggagggaggtcacgtaaacttaatccaatccaccaaaccccaaatctctgtctcgcgctggcgcagcgcagggcaccgccacgcgcgcctcatccggtaccggcatgacgagcgcctccgagctcttcaccgcgcgccgtgccgcccgtggggcccgcctctccgacctcgacctggatccgcacgccgacgcgctccgggaccagcacggacttggcgcccggcaccggcgccgcgggtgccgcccgcgacgccagctcgacgccgccggggacgtgcggcagcacctgcacaccggggccccgccaccgcgtcgccgcgggtcgtacaccgatcagatcttatcgtacatagacaacaacaaccttggggttggggattctgcagctcggaggaacagacttgataggctgatgttcaggacaaatgagcggcttcctggtgctgtactgcaagcacaagcgcgtgtcctggagagactcagaggcatttctcttggttcatctgtgtccaggccatccatctcattagatgaattttcagctagcgatgtattcagaatcatcgacttcagaaacagggaagcacggcatgaagaaaatcggcaccactcatcgtcgttccacccaagcagtgaatcagatgaagaaagaccaaccgtcggttccactcactccaaccggtcaaccggacttaccaaggcagctttcctgcgtctgcaggtcgagatttttgaggctagcaaagatgatagcagagaggttccactcgacatgcttggagccatgggcgcggaaatgtgcagactgcccatactgtcgaacgaacatacggtcacgatcctgacgacaaacccttagttcagaggcgaggaacatgacttcgctatgatgcggttaaaaatgctctgcaaaatactaggctgaaggagtcaatgtcagtgtcaccagcttttacatttctctctctgagctgatttcttccaaaagcatcatcattattattattttttt

SEQ ID NO: 198971 - DNA, 1095 bp, Zea Mays
cacatgtcacttaactctgactctgacacaccgtcagctcgataataatagtaagccaaaagcacgcaagcaatctgcctctcgttctttcgatctctccttccaatcgaccgcgcaagctgcacggccgtggtcgaaagtacatgcattgcgcgtcaccggctcgcaccaaggacgatccgccgccgcgaagcaggaggatggagtcggtcggcgacccgcgggagggcccgtcgacggagcgggcgttcgaggtgaagccgatcccgccgtggccggagcaagtgacggggcgcgccctggcggcgagcctcgcgctgggcgcggcgctcagcggcgtgatgatgaacctggtgttcacgtcgggggtcatcccgtcgctcaacatctcggcggccctgctggggttcttcctcctcaaggcgtggacgggcctgctgggccagatgggcgtgccgcaccgccccttcacccgccaggagaacgccgtggtgcagacctgcgtcgtcgcctgcgccagcatgacatacagcggcggcttcgggtcgtatcttctcgggatggaccgggagacggcggagaagacgagcaccgcgaacagccccggtgcgaacatcagcgagccgacgctcggtcggacgatggccttcttcttcctcgtcagcttcgccggcctcctcgtcatcgtgcccatgaggaagaccatgatcatccgccaccggctgacgttcccgagcgggtccgccacggcgcacctcatcaacagcttccacagcccccacggtttcatgcaggcaaagaggcaggtgtcgctcatcgtccggtcgtgcctagggagcttgctctggtccgtcttccagtggttctacaccggaggacccaactgcggcttcactgcgttcccgacgttcgggctcaccgcgtacaaacacggcttctacatcaatatgaatggaacttacgttggtgtgggcatgatcagcccttacctgataaacatctcgatgctggtcggctccatcatctcctgggggatcatgtggccctacctcctaaccaagaaaggcatctgtgtgactggtaaccaagaaaatt

SEQ ID NO: 198972 - DNA, 3273 bp, Zea Mays
gagttggtgtgtctccctataaaaataaaccggaaaaaactcaccaaactgaaactagtaggggactaggtctagagaaaggagagacacaatcggccggaagagcgattgatttctcccgccgccgccgccccgtctcttcctcgtccgccgctgcgcccgccgcgcacaagaggagggtttcagtgttagggttctacccccgcctgcgctggtatcagcagccaaatgagaatgcttgctgtgtttgattgatcgtcagatccttacttacaacccaccagattgtatcaggtcttgtggtacctgccacctcaaagtcacgacagatggccgcaaataacaacccttggagggtccctatgccaccgctgctcaatgttcgagctggttttggcgatacaagtctcttctcaacctcactgcctgttcttcctcatgaaaagtgatgacgcttcggccaaaatgaaagtgcttgctgatgatcctgatgagaaagactacaagttcgattttgatcttcgacagatagatgacttgttgcctgatgaagatgagtttttcgcggggatcactgatgaaactgagcccatcgggcaaacaaataccacagaggaattggaggagtttgatgtctttggcaatggagggggcatggagctggatattgaccctgtggagaccatcacagttagttttgcaaattcaagtattgtggacggggctagaggcaatggcatcaacccttttggtgtcccaaacactgtaggaactgtggctggggagcacccatttggagagcacccttccaggaccttgttcgtaaggaacatcaatagcaacgtcgaggactctgaactgcgatctttgtttgagcaatatggggatatccgtaccctttacactgcaacaaagcataggggctttgtaatgatatcttatttcgacatcagagctgcacggaatgcaatgcgcgcattgcagaacaaacctctgaggaggagaaagctggacattcatttttccatcccaaaggagaatccatctgacaaagatttaaaccagggaactcttgttatttttaacttggatccatcggtttctaatgaagaggttcgccagatttttggggcatatggggaagtaaaggagataagagagacaccaaacaagaaacatcataagtttatagagttctatgatgtaagagcagcagaggctgctcttcggtcactgaataaaagtgagatagctggaaaacgaatcaagttggaaccaagtcgtcctggtggaacacgcagaaacttgatgcagcagctcggtcacgatttggaccaagaggagcccagaagctacagacatcctcatgttggttcacctattgctaactctcctccaggggcatgggctcactatagtagtccaacagataacaatatgctgcaagctttcactaggtctccaactggaaatggaatgagtcctatcggaatgccttcactgatctcaaatgctccaaagattgctccaattggcaaggatagcaatcggtctaaatatgatcaagtcttctcaaatggtaaccagtcactgggagctgcatttcagcactcccactcatatcaagatcacaacagtgaacagatgagttctagtcctgggactttatcagggccccagtttctctggggaagtccaaagccatattcagaacattcaaaatcccctatttggcgtccaccagcaaacggacctgcattgtcatccagtagtcgcactcagggccaaggattcttgtacagtagccgtcaggcttcattatttggttctttagatcagcaccatcatcatgttggctctgccccttcaggtgctccattcgagaaccattttggctttttatcagaatcgccagagacatcttatatgaagcaactcaagtttgggaacatgggtaatgttggtattggtagaaacgggggaggcctcatgctgggcatggctagtcatgcttctgtgaatcctggttcttctctgattggaagtctgacagataacgtatcttctagcttcagaccgatattgtcaccgagattgggacaggcattttacactaatcctccataccatgggcctggtacattcggacttgacagctccattgaccatgcccgtaaccgcagagttgacagcagtgtgttgcaagctgatagcaagaggcagtatctgcttgacttggagaagattcgcagaggtgatgatactcggacaacattgatgattaagaacatcccgaacaaatatacatctaagatgctcctggctgcaattgatgagcttcacaaaggaatttatgacttcttctacctgccaattgatttcaagaacaaatgcaatgttggatatgcgttcattaacatggtatcaccggtgcacattatatccttctaccaggcttttaatggtaagaaatgggagaagttcaacagtgagaaggtagcatctttggcttatgctagaattcaaggacggtctgcactgatatcacattttcaaaattcaagtttgatgaatgaggataagaggtgccgccccattctttttaatcccaatggtcaggactctgtgaatcaggaagcattcccaattaatggtatatgcatccacatgcccctggaagatgattgccttgacaatgaagaaaacaagagtctgaacgagaagacaggagagaactctactgatatcgctgggagtttgtgactgtcggccatgatagcaaacatgatcagaatggccacatatataaatctaactgtctagagagtatccacctccaaattgtataaaaactgatgaaggttgatggttaggcgttgaattttgtggtctttcggttttagttgcaacagatgtggcccctggaagcggaagcgaaagcgagggagcttcgaaccggagctgggcgcttgcttgtcgaatccccctcactctttacagatgtggggatgagcaaccgctgctgctcatagttgtgcttgcttttggttgcttgctgtaaaaaggtgaactgaactgaagaaatttagccaaactgtacagtttagaacttttgtgcatattttgcattctagtatgttaatgtgtatgggtggagcagtagttcagagatcctttttttctgcgtgagatctttttcttaatgcaatatcggggctgtcatactcaggtcgaatttttctctctatcctaaaataagtgttgcgcgagaag

SEQ ID NO: 198973 - DNA, 3380 bp, Zea Mays
ttctttttaaccttccgctttcactgagagataatcaattatatagtaataattataatactctgatgtattatttattataatagttatagtggtctgtctgctccttctccttgtgagttggtgtgtctccctataaaaataaaccggaaaaaactcaccaaactgaaactagtaggggactaggtctagagaaaggagagacacaatcggccggaagagcgattgatttctcccgccgccgccgccccgtctcttcctcgtccgccgctgcgcccgccgcgcacaagaggagggtttcagtgttagggttctacccccgcctgcgctggtatcagcagccaaatgagaatgcttgctgtgtttgattgatcgtcagatccttacttacaacccaccaggtcttgtggtacctgccacctcaaagtcacgacagatggccgcaaataacaacccttggagggtccctatgccaccgctgctcaatgttcgagctggttttggcgatacaagtctcttctcaacctcactgcctgttcttcctcatgaaaagtgatgacgcttcggccaaaatgaaagtgcttgctgatgatcctgatgagaaagactacaagttcgattttgatcttcgacagatagatgacttgttgcctgatgaagatgagtttttcgcggggatcactgatgaaactgagcccatcgggcaaacaaataccacagaggaattggaggagtttgatgtctttggcaatggagggggcatggagctggatattgaccctgtggagaccatcacagttagttttgcaaattcaagtattgtggacggggctagaggcaatggcatcaacccttttggtgtcccaaacactgtaggaactgtggctggggagcacccatttggagagcacccttccaggaccttgttcgtaaggaacatcaatagcaacgtcgaggactctgaactgcgatctttgtttgagcaatatggggatatccgtaccctttacactgcaacaaagcataggggctttgtaatgatatcttatttcgacatcagagctgcacggaatgcaatgcgcgcattgcagaacaaacctctgaggaggagaaagctggacattcatttttccatcccaaaggagaatccatctgacaaagatttaaaccagggaactcttgttatttttaacttggatccatcggtttctaatgaagaggttcgccagatttttggggcatatggggaagtaaaggagataagagagacaccaaacaagaaacatcataagtttatagagttctatgatgtaagagcagcagaggctgctcttcggtcactgaataaaagtgagatagctggaaaacgaatcaagttggaaccaagtcgtcctggtggaacacgcagaaacttgatgcagcagctcggtcacgatttggaccaagaggagcccagaagctacagacatcctcatgttggttcacctattgctaactctcctccaggggcatgggctcactatagtagtccaacagataacaatatgctgcaagctttcactaggtctccaactggaaatggaatgagtcctatcggaatgccttcactgatctcaaatgctccaaagattgctccaattggcaaggatagcaatcggtctaaatatgatcaagtcttctcaaatggtaaccagtcactgggagctgcatttcagcactcccactcatatcaagatcacaacagtgaacagatgagttctagtcctgggactttatcagggccccagtttctctggggaagtccaaagccatattcagaacattcaaaatcccctatttggcgtccaccagcaaacggacctgcattgtcatccagtagtcgcactcagggccaaggattcttgtacagtagccgtcaggcttcattatttggttctttagatcagcaccatcatcatgttggctctgccccttcaggtgctccattcgagaaccattttggctttttatcagaatcgccagagacatcttatatgaagcaactcaagtttgggaacatgggtaatgttggtattggtagaaacgggggaggcctcatgctgggcatggctagtcatgcttctgtgaatcctggttcttctctgattggaagtctgacagataacgtatcttctagcttcagaccgatattgtcaccgagattgggacaggcattttacactaatcctccataccatgggcctggtacattcggacttgacagctccattgaccatgcccgtaaccgcagagttgacagcagtgtgttgcaagctgatagcaagaggcagtatctgcttgacttggagaagattcgcagaggtgatgatactcggacaacattgatgattaagaacatcccgaacaaatatacatctaagatgctcctggctgcaattgatgagcttcacaaaggaatttatgacttcttctacctgccaattgatttcaagaacaaatgcaatgttggatatgcgttcattaacatggtatcaccggtgcacattatatccttctaccaggcttttaatggtaagaaatgggagaagttcaacagtgagaaggtagcatctttggcttatgctagaattcaaggacggtctgcactgatatcacattttcaaaattcaagtttgatgaatgaggataagaggtgccgccccattctttttaatcccaatggtcaggactctgtgaatcaggaagcattcccaattaatggtatatgcatccacatgcccctggaagatgattgccttgacaatgaagaaaacaagagtctgaacgagaagacaggagagaactctactgatatcgctgggagtttgtgactgtcggccatgatagcaaacatgatcagaatggccacatatataaatctaactgtctagagagtatccacctccaaattgtataaaaactgatgaaggttgatggttaggcgttgaattttgtggtctttcggttttagttgcaacagatgtggcccctggaagcggaagcgaaagcgagggagcttcgaaccggagctgggcgcttgcttgtcgaatccccctcactctttacagatgtggggatgagcaaccgctgctgctcatagttgtgcttgcttttggttgcttgctgtaaaaaggtgaactgaactgaagaaatttagccaaactgtacagtttagaacttttgtgcatattttgcattctagtatgttaatgtgtatgggtggagcagtagttcagagatcctttttttctgcgtgagatctttttcttaatgcaatatcggggctgtcatactcaggtcgaatttttctctctatcctaaaataagtgttgcgcgagaag

SEQ ID NO: 198974 - DNA, 939 bp, Zea Mays
tggaagaacttttaggaggtcgacaactgcgatgaatattcatggcaaagagctagagacttgcttgtgcaagtggctacacatggagaaaatactggctacgaagttccttgcttgatagttgctgcaaaagatgatcttgaccaatcttcacaagctctacaagaatcgactagagtgagccaagacatgggaattgaaacaccaattccgatcagcgtgaagctgagagatttgaacaacattttctgcagaatcgtgcatgctgcgcagcagcctcatttgagcattccagagactgaaactggaaaagcacgtcggcaatatcggcaacttctaaaccgttcgctaatggttgtctctgttggagctgctgttgcagttgttggattagctgcttatcgggtttatgcagctcggaagaactcgtcctcttgaagcctcccctactggacaattggggaaataaggcccttccttcctgcgacctcagctggatccatgctggttgaagttcgtcgcttgggtttttacccggcaggaaaccaacgtttttgtacagacatgtcatcagctatgaattatccggccaattggggtttcagattcagacatcacctggctccgtaaaaatgccgtatctgatgatctgttggctaaattggcccagctaattattgttactactagcctaagttcttattattcgaattttttttcgttggcaaacatgctgagacatttagttgaacaagcatgagtttgtgttgtaccttgatttctttcggggatttatcaaatcggaattacctagtcacactgccactgaggcctcgtgcacacggttatactttgtatgaataatttgatatacatgtaaatgcatgcagtcacactttgctttgcggattgcgttggtagccggtagcaccataaaat

SEQ ID NO: 198975 - DNA, 1330 bp, Zea Mays
tggtgatatttcttgaaagagtgaatgggctcttatgacacttctagatccaacaaatagttatgccaaccttgcatatgttggttatcctggtgagttcagttctgcatttactgtcacaaggagaagacgagtggatcgtaaaaagcaacatacgcagagaaacattttccagtgttatgtttttggtgccagaggctctggaaagacgtcgttgctacaatcattcattggaaggcaaccttctgacactctgccatctaacagcgaacgctttgcaacaaattctgttgaaatggctgatggaactagaaagacgctaatactgcgagagatacctgaaggtgacgtgagatcgttactttctgacagggaatcgttggcgccatgtgatgtagcagtatttgtttacgatagctgcgatgaatattcatggcaaagagctagagacttgcttgtgcaagtggctacacatggagaaaatactggctacgaagttccttgcttgatagttgctgcaaaagatgatcttgaccaatcttcacaagctctacaagaatcgactagagtgagccaagacatgggaattgaaacaccaattccgatcagcgtgaagctgagagatttgaacaacattttctgcagaatcgtgcatgctgcgcagcagcctcatttgagcattccagagactgaaactggaaaagcacgtcggcaatatcggcaacttctaaaccgttcgctaatggttgtctctgttggagctgctgttgcagttgttggattagctgcttatcgggtttatgcagctcggaagaactcgtcctcttgaagcctcccctactggacaattggggaaataaggcccttccttcctgcgacctcagctggatccatgctggttgaagttcgtcgcttgggtttttacccggcaggaaaccaacgtttttgtacagacatgtcatcagctatgaattatccggccaattggggtttcagattcagacatcacctggctccgtaaaaatgccgtatctgatgatctgttggctaaattggcccagctaattattgttactactagcctaagttcttattattcgaattttttttcgttggcaaacatgctgagacatttagttgaacaagcatgagtttgtgttgtaccttgatttctttcggggatttatcaaatcggaattacctagtcacactgccactgaggcctcgtgcacacggttatactttgtatgaataatttgatatacatgtaaatgcatgcagtcacactttgctttgcggattgcgttggtagccggtagcaccataaaat

SEQ ID NO: 198976 - DNA, 1334 bp, Zea Mays
tcctgtgagcttggccaggccatatgcagtgggctcttatgacacttctagatccaacaaatagttatgccaaccttgcatatgttggttatcctggtgagttcagttctgcatttactgtcacaaggagaagacgagtggatcgtaaaaagcaacatacgcagagaaacattttccagtgttatgtttttggtgccagaggctctggaaagacgtcgttgctacaatcattcattggaaggcaaccttctgacactctgccatctaacagcgaacgctttgcaacaaattctgttgaaatggctgatggaactagaaagacgctaatactgcgagagatacctgaaggtgacgtgagatcgttactttctgacagggaatcgttggcgccatgtgatgtagcagtatttgtttacgatagctgcgatgaatattcatggcaaagagctagagacttgcttgtgcaagtggctacacatggagaaaatactggctacgaagttccttgcttgatagttgctgcaaaagatgatcttgaccaatcttcacaagctctacaagaatcgactagagtgagccaagacatgggaattgaaacaccaattccgatcagcgtgaagctgagagatttgaacaacattttctgcagaatcgtgcatgctgcgcagcagcctcatttgagcattccagagactgaaactggaaaagcacgtcggcaatatcggcaacttctaaaccgttcgctaatggttgtctctgttggagctgctgttgcagttgttggattagctgcttatcgggtttatgcagctcggaagaactcgtcctcttgaagcctcccctactggacaattggggaaataaggcccttccttcctgcgacctcagctggatccatgctggttgaagttcgtcgcttgggtttttacccggcaggaaaccaacgtttttgtacagacatgtcatcagctatgaattatccggccaattggggtttcagattcagacatcacctggctccgtaaaaatgccgtatctgatgatctgttggctaaattggcccagctaattattgttactactagcctaagttcttattattcgaattttttttcgttggcaaacatgctgagacatttagttgaacaagcatgagtttgtgttgtaccttgatttctttcggggatttatcaaatcggaattacctagtcacactgccactgaggcctcgtgcacacggttatactttgtatgaataatttgatatacatgtaaatgcatgcagtcacactttgctttgcggattgcgttggtagccggtagcaccataaaat

SEQ ID NO: 198977 - DNA, 1250 bp, Zea Mays
ggctgaccaggcaaccaaacatgagaaatgggctcttatgacacttctagatccaacaaatagttatgccaaccttgcatatgttggttatcctgtgttatgtttttggtgccagaggctctggaaagacgtcgttgctacaatcattcattggaaggcaaccttctgacactctgccatctaacagcgaacgctttgcaacaaattctgttgaaatggctgatggaactagaaagacgctaatactgcgagagatacctgaaggtgacgtgagatcgttactttctgacagggaatcgttggcgccatgtgatgtagcagtatttgtttacgatagctgcgatgaatattcatggcaaagagctagagacttgcttgtgcaagtggctacacatggagaaaatactggctacgaagttccttgcttgatagttgctgcaaaagatgatcttgaccaatcttcacaagctctacaagaatcgactagagtgagccaagacatgggaattgaaacaccaattccgatcagcgtgaagctgagagatttgaacaacattttctgcagaatcgtgcatgctgcgcagcagcctcatttgagcattccagagactgaaactggaaaagcacgtcggcaatatcggcaacttctaaaccgttcgctaatggttgtctctgttggagctgctgttgcagttgttggattagctgcttatcgggtttatgcagctcggaagaactcgtcctcttgaagcctcccctactggacaattggggaaataaggcccttccttcctgcgacctcagctggatccatgctggttgaagttcgtcgcttgggtttttacccggcaggaaaccaacgtttttgtacagacatgtcatcagctatgaattatccggccaattggggtttcagattcagacatcacctggctccgtaaaaatgccgtatctgatgatctgttggctaaattggcccagctaattattgttactactagcctaagttcttattattcgaattttttttcgttggcaaacatgctgagacatttagttgaacaagcatgagtttgtgttgtaccttgatttctttcggggatttatcaaatcggaattacctagtcacactgccactgaggcctcgtgcacacggttatactttgtatgaataatttgatatacatgtaaatgcatgcagtcacactttgctttgcggattgcgttggtagccggtagcaccataaaat

SEQ ID NO: 198978 - DNA, 2456 bp, Zea Mays
aaaaaatccttatgaaacgagttgtcccgatcaagccaatatcacacccaaatcccgcaaaaccctaagccaagcagggagggagaagacgcgaggagagagagagagagaggaggtgcgcggcatggcgggtgcgacgtccctggcggcggccgctaatctggcgggcaagtcgagcgtgcgggtcgtcgtgatcggcgaccccggcaccggcaagtccagcctcatcgtcgccctcgccaccgagcagttccccgagaacgtaccacgcgtcatgccccccacccgcctccccgccgactacttccccgatcgcgtccccatcactatcatcgacacgtcgtccagcccggagcagaagccgaagttgatcgccgagtgccaggcagccgatgcggtcgtgctcacctacgcctgcgaccggcccgccacactggagcggctcagttcgttctggcttcccgagctccggcgacttcagttgaaggctccagttatcgtggtggggtgcaagctggacctgagggacgaacagcaggttagccttgaacaggttatggcgcccatcatgcagtccttccgcgagattgagacatgcattgagtgctccgctcttcggcagatccaggtgcctgaggtcttctattatgcccagaaggcagtacttcacccaactgctccgctcttcgatcaagagttacaagctctgaagcctcgatgtgtgagagcgttgaagcggatatttattatatgtgataatgacaaggatggtgctctcagtgatgtggagctcaatgaattccaggtccgatgctttaatgctccactccagcctactgaaatttcaggagttaagagagttgttcaggagaagatgcctgaaggcgtaaatgaaagcggccttaccttgactgggttcctttttctgcatgccctctttattgaaaaaggtcgtttggaaactacttggactgtattgaggaaatttggttacgacaatgacatcaagcttagggatgatctcattgcaatgccaattaaaagagctcctgatcaaactctggaaatgacaagcgaagtggtcgatttcttgagagggatattcaacatgtttgacattgataatgatggagctttactacctactgagctggaggaccttttctcaacagcacctgaaaacccatggatttctgatccctataaagactgtgctgaaaagaatgtgttgggtggtctgtcacttgaaggttttctctcaaagtgggctcttatgacacttctagatccaacaaatagttatgccaaccttgcatatgttggttatcctggtgagttcagttctgcatttactgtcacaaggagaagacgagtggatcgtaaaaagcaacatacgcagagaaacattttccagtgttatgtttttggtgccagaggctctggaaagacgtcgttgctacaatcattcattggaaggcaaccttctgacactctgccatctaacagcgaacgctttgcaacaaattctgttgaaatggctgatctgcgatgaatattcatggcaaagagctagagacttgcttgtgcaagtggctacacatggagaaaatactggctacgaagttccttgcttgatagttgctgcaaaagatgatcttgaccaatcttcacaagctctacaagaatcgactagagtgagccaagacatgggaattgaaacaccaattccgatcagcgtgaagctgagagatttgaacaacattttctgcagaatcgtgcatgctgcgcagcagcctcatttgagcattccagagactgaaactggaaaagcacgtcggcaatatcggcaacttctaaaccgttcgctaatggttgtctctgttggagctgctgttgcagttgttggattagctgcttatcgggtttatgcagctcggaagaactcgtcctcttgaagcctcccctactggacaattggggaaataaggcccttccttcctgcgacctcagctggatccatgctggttgaagttcgtcgcttgggtttttacccggcaggaaaccaacgtttttgtacagacatgtcatcagctatgaattatccggccaattggggtttcagattcagacatcacctggctccgtaaaaatgccgtatctgatgatctgttggctaaattggcccagctaattattgttactactagcctaagttcttattattcgaattttttttcgttggcaaacatgctgagacatttagttgaacaagcatgagtttgtgttgtaccttgatttctttcggggatttatcaaatcggaattacctagtcacactgccactgaggcctcgtgcacacggttatactttgtatgaataatttgatatacatgtaaatgcatgcagtcacactttgctttgcggattgcgttggtagccggtagcaccataaaat

SEQ ID NO: 198979 - DNA, 1287 bp, Zea Mays
aaaaaatccttatgaaacgagttgtcccgatcaagccaatatcacacccaaatcccgcaaaaccctaagccaagcagggagggagaagacgcgaggagagagagagagagaggaggtgcgcggcatggcgggtgcgacgtccctggcggcggccgctaatctggcgggcaagtcgagcgtgcgggtcgtcgtgatcggcgaccccggcaccggcaagtccagcctcatcgtcgccctcgccaccgagcagttccccgagaacgtaccacgcgtcatgccccccacccgcctccccgccgactacttccccgatcgcgtccccatcactatcatcgacacgtcgtccagcccggagcagaagccgaagttgatcgccgagtgccaggcagccgatgcggtcgtgctcacctacgcctgcgaccggcccgccacactggagcggctcagttcgttctggcttcccgagctccggcgacttcagttgaaggctccagttatcgtggtggggtgcaagctggacctgagggacgaacagcaggttagccttgaacaggttatggcgcccatcatgcagtccttccgcgagattgagacatgcattgagtgctccgctcttcggcagatccaggtgcctgaggtcttctattatgcccagaaggcagtacttcacccaactgctccgctcttcgatcaagagttacaagctctgaagcctcgatgtgtgagagcgttgaagcggatatttattatatgtgataatgacaaggatggtgctctcagtgatgtggagctcaatgaattccaggtccgatgctttaatgctccactccagcctactgaaatttcaggagttaagagagttgttcaggagaagatgcctgaaggcgtaaatgaaagcggccttaccttgactgggttcctttttctgcatgccctctttattgaaaaaggtcgtttggaaactacttggactgtattgaggaaatttggttacgacaatgacatcaagcttagggatgatctcattgcaatgccaattaaaagagctcctgatcaaactctggaaatgacaagcgaagtggtcgatttcttgagagggatattcaacatgtttgacattgataatgatggagctttactacctactgagctggaggaccttttctcaacagcacctgaaaacccatggatttctgatccctataaagactgtgctgaaaagaatgtgttgggtggtctgtcacttgaaggttttctctcaaaggaaatactaatggttgcaccggc

SEQ ID NO: 198980 - DNA, 2397 bp, Zea Mays
tcacgcaaccaccactgcctcacgcaaccacctcagcccggtccacctctaccaccggccacccactgcctccacccccgccctagatcaccaccgcactctcaggcgcaagaacgagctcaccaggcaaagtcacggcggcgacctccgccttccaggtctcgcccttgctggcgcgcgcctctgctcaccacccagcgccgcgtcttccttctccagtccggtcgctggccgaccgccagcgcggctccgggccctgctttccgcacgcccaagcctgcgcgctccggacgcacctctcctgctcttctgggcttgggaaagagaagaaaccagcataaaaacactagatctgtgaaggatttgaggaagaaaccaaaccgaaaccctagtgacgatgctagagttcggacctcgctctgagtcgaaacgaccagagaccgctgccttccctccccattttcctttcccatgaaccaagcagcgtatgagctttccatccctcctcatttacctatcccacctctcatatcccgttatccaaacggcacctcagggtactgcaatccagaagcaggggccctggcctcagcgcacctggatggcagggctggaggagttgaagaagaagctacaacccttgctgttcgatgacctggacagagttggcgccagtaccagggtgcccttaccagaagatacttgcgattcctacgcagtttctgatggtgggactgttaatttacttagtagatccttgggtgagtataaaatcaatgagcatggctttcataaacgaagtgctgggccagacgagttagattctgatgagaaggcttaccgttgtgcctctcatgagatgcatatatttggtcccatcggtaatggtgcaagcagtgtagtggagagagctatatttattccagttcatcgaatcttggccttgaagaagataaacatattcgagaaggagaagaggcaacaaattctgaatgagatgagaacattatgtgaagcatgttgttatcctggtttagttgaattccagggtgcattttacatgcctgattctggacaaataagtatcgctcttgaatacatggatggtggttccttggcagatgttataagggtcaagaagtctataccagaaccagttctttcacatatgctacagaaagtattgcttggtctgcgatacttgcatgaagtaaggcatctagtgcatagagatataaagccagcaaatttactggtaaatcttaagggcgaggcgaagattacagattttggtgtgagtgctggtttggacaatacaatggctatgtgtgctacctttgtaggcacagtcacatatatgtcacctgagagaattcgtaatgagaactattcttatgctgctgatatttggagtcttggactaacaatattggaatgtgctactggaaaattcccatatgacgtaaatgagggccctgcaaatctaatgttgcagatacttgatgatccatcaccaacaccaccagtagatacttgttcattagaattctgctcattcatcaatgattgcttgcagaaagatgctgatgcaaggcccacatgtgagcaggtaaagataattaggcttctgtcacacccattcatcaagaggtatgcaggaactgaagtggacttggcagcatatgtcaaaagtgtagttgacccaacagaaaggctaaagcaaatagctgagatgcttgctatacattactacctcttgtttaatggacctgatgggatttggcatcatatgaagacattctacatggaacaatctactttcagtttctcagagaacgtgtatgttggccagaatgaaatttttgatattttgtcaaatataaggaaaaagctaaaaggtgataggcctcgagagaaaattgttcatgttgtcgagaagctacattgtcgtgcaaatggtgaaactggggttgcaattcgtgtgtctggatctttcattgtgggaaaccaatttcttgtatgtggcgaggggataaaagctgaagggatgcctagcttggatgagctctctattgacattccaagcaaacgcgtaggccagttcagagagcagtttatcatgcaaccgggaaacttaatgtcatgctattacatatcaaagcaagatctgtacattatccaatcctgattgaacatattatttgtaagattattctctgaagcacatgtatagaggatttagaagaattcctttcggacctggttttgaatcttatttactttgtggaactgaaattttgggccaaacctctgacaagaattgaaaagtttaagtcttcaactatattcatgtttagaactgtttttatatttggttggtattgataattttcgttt

SEQ ID NO: 198981 - DNA, 514 bp, Zea Mays
attttcttaagtaaatgtaaaatcacattcaaggggcatgctgattatttgcacagcattgcagttcgtgagtcaaaccgccaggttgtaacaggatcagaggatgggacagctcgtatctgggattgcagaagtgggaagtgcactcgggttatacagccaggaaagagcaaggcatttgaaagctcatgggtcagctgtgttgctattgatccaagtgaaagttggctggcttgtggcacgtctagcggtatatcagtttggagtcttctctcaaatgagtgcatctttaatttggactgtcatgctcctgttcaagatttattgtttgacaagaatcatattttagcagttggcgctgaacctctgctctcccgtctcacaataaacgggacagtcctttcacaagtaaaatgtgcccctcagtcggcgttttctgtctccatccactcaactggggtatgtgcctatcttgctgctctgctcatttcttggctgtgttctcccctgtttc

SEQ ID NO: 198982 - DNA, 1974 bp, Zea Mays
gcctatgtgggtcaagggctcaagctcaagagagagcgagtgagttcactcaacgtgcggcggcggcgacgtcctacgtcctacgcacaggatgtcggcgtcgagcgccgcgtgccgcgtatgtggcggcgtagcggagtgcgcgtgccacggccacggcgccggcgcgcggtgcggggccgccgtcgcggacctcaaccgcgggtttcccgggatgtggcaccagcaccaccagcagccggaggaggaggagcccagcgtcgccggcggtggcgcggcggcggggctgcaggagttccagttcttcggccacgacgacgaccacgacagcgtggcgtggctgttcaacgacccggcgccccacctgcaccgcggcccggcgccggccgcgggcgcggccgggaacggggttgtggccgaggccgcgcagcggagagcgccgctgttcgacgggtacgcgcacgctcagtacggccagctgccgggccacgggctcatgttcgacgtgccgctgggccggggcggcgacgacgacgcggcggtgctggaggcagggctggggctaggcggcgccggcgccggcgccggcgacagcaatccagcgacgacgtccagcgccacaatcatgtccttctgcgggagcacgttcaccgacgcggcggccaacggcagcgcaagcggcgccgacccggcagtggaccgggaggcgaaggtgatgcggtacaaggagaagcggaagaggaggcgctacgagaagcagattcgctacgcttcccgtaaggcgtacgcggagatgcggccgcgcgtcaagggccgcttcgccaaggtgcccgacggtgatgctcccgcgccaccagcgccggccgctgcggggggctacgaaccaggccggctcgacctcggatggttccgttcatagcaaacacctatgtcggtcacatcattagcggactccaacggaaccccggccccctcccctgccgggcatggagtgccccggcggctttccctcgcctccatcggcgcccacacggtggccccctcgtggggtgagacaaccaaatactcccgtagagggactctaatctctctctccactaattaattgtatttagtgtaaaattaactttttagtataattagcagataacaatgtgtattattacggtactataaatatgatagtattttttaaaacttcaaaaactaatatatatataagtcaaataactcatttaaagagtaaaggtgagggaatggttggagagaagaaaaaataggaagaagaatgattgagagggaagtatttaaatacgaatagggggatttaagagggggaatagttggagatagccttagagcatgtccaatagttatgtaaacaacttcctaaatatgaatttaagaagttttcggggaaaactcttctccaacatatatgtaaagcaggtcatttaatttacaaactccctacaaaacacaatttcagtcctacatttacgaacctcgttgggactccctacatcaatgttggttctagatccatcacgaaaaccatatttcggccaccgttttgtgtcgtcctaccatcccattgaccacaaatctatctccagtgtcatgtgttatcttcatgctatcgtcgcgaccttcatcaataacttcgaccttccaagacattatagaaggtgttgatgtgctagctcactttttaaagcatgttcacttttttgttgacgtggacaattttaaaagttagcaaccaataaatagagaactattggagcacacataattttctactcttaaagtgatttagcaacttattaaatctataatttagggtgctaaatttacataacgagatgttcgtggggtatatgtatagtcaattggttaattaagggtacgagataaatacgcacaaaatattaaatgtatatgcaatcgatgcacgagtacccaactctaaag

SEQ ID NO: 198983 - DNA, 3265 bp, Zea Mays
cacggcggctccacaacccctggcggcctggccttgtgcttcgtgcgtgcctacccccctataagtacgcggcaccgtctcgcagacaccttgcagaaccatcactagtgagtagtagtgagtgacctgcaaagacacgcgaggcacgcagagctggagcagctgatctgagaaccaggaattaggatggcgatggagaaaggctggaaggcgagagacgctgctggtgctttcatgatggacttggagctggtggccgaggaaaccgacgacgcggtgccgtcgataccgccaccgcagacgccgctggagcccatggagtacctctcccggtcgtggagcgtgtcggcgtcggagatttccaagattctcctcggtggaggcaagaagagcagcgttgcggcggcgagccggcttccggaggtgaccataccggagcagtctgcgctcgccaccacgtcctccgtcgttcctctaccgtgtcatcagcagaactactgcaaaacatacaaacagagagccgcaagaaggtcttccacgagcagcggccaccaccaccagtcgatcggcaagtggttccaggtccaccacagggaaacacgccgggcgaagcagagcagcaaggagaagcagcgcgccgagaaggcccacgtgcacgccatggtgtccgtggcccgggtcgctgccgccgtcgccgccgtcgcgtcggccacgagctccaacgcccaggctaccactaccaagatggcgacagccatggcgtcggccaccgagctgctggcctcccactgcgtcgaggcagctcagcacgcgggggcgcgccacgaccaggtggccgccgccgtgcaggccgcggttggcgtcagaagccccggcgatctgatgacgctcacggcggccgcagcgaccgctctgcgaggagcggcgacactgaggcagagggcgcagcgagagacgaggagcaacgcgagcatcctgctcccgtacgagaaagccgcgaattcgtggagcccggacatctggtgcaaggagggggcgctgctgaaacgcgcaaggaaagggggtttgcacaagataagagtatgtatctacatcaacaagaggtcagaggtgatactgaagctgaaaagcaaacacatcggaggcgcgctgacaaagaagaacaagagcgtggtttacggcgtatacagcgagcttccgacgtgggctgagccagggaaggactgcatagaggagacatgctgctgctttggcctcagcacggcgcagggcctagtggagttcgagtgcgagggcaacgcgagcaagcaggagtggatcgacgacgtgcagaacctgcttcgtcaggcggctctgcatgaccgagtaggggataaactgggattagtaaaactcagctagtgcagtctcagtatataaccctctttcatggtagcagcagattgctgtgtcctgctgctcctgcatcagcgatgcgaggggtacattaacatatattggtcgtactcttgtcactgacatgctatacaacatctatagtgatagacatacggaatatattagtatatgttttgtaaagggccggagcagacaatcaaaatcgttgggaggacgctgatcccagtttattttttagaaaaaaaaaaacagctagcccgagttttaattaagttcggttaggcctagaggggtggacgttcggtcttcaacccatcagctgttcggactaattattcacgatcggaatttcgtagcattgtatctaacactgtcatatcataaaaatgttgtgaaactatgaatgaaacaatgtgtctcaatacaatagttcacttcactatttcataagctaacataccaattaagtattgcaacttaatagccaatagaagcacggttttcaagaacttggaaacgagttgacatgatttcattctatgaaactcaatcctcttaaatgctataccatatcatcaaaaattatgatgtgtcacaccattaaatgtgcatgaaacaaccatagtgatgagtttaaatacactattttcattttccaatgctaccatatcagatttaaactagataacttgtatccacatgaaactctaccatatcccatgaactctctctatatctcttctcttaattgcactgccatatcacaagtatgatgatgtgttaccatatttaatcagtatggaacttccattgagaatgtcataaggtcattttagaaattcggccatctaaaaacagagaataattaattaaattttaaacttaggaccgaacatgttcagtctaaagaccattttggatctcatgagctaaagcaaagtgactaaagtttagccattttagaagctaaagaattacaatttaaaatagacgacttctcaaaacaaatattttggccgtgagggagaataacgaaaaagaaatcacaaacactttggaatcgacgattcattcccccccaagtctcgactcccgtctccagactctcgactctctacctaagcttctactcagccccatccctaagcgtctccttccgactctcatattgctctgcgctcgcctctaccatggcgactagggtttagtggtgccacaataacctccatcgcggccatcctcaacttcctatcggatctggacgaggcgtcgattcatcctcaacaccggttagtatagacttgggattcaactagtgaccaaaaatctggtctcggtcttgatcagttcgatttggcatttagtttttggttaattatgttctatcctagtcatgtgaggtttggtaagatgatcgaaaatcatatataaaacacctaatttcatgtcaaataaaattaatgtttgagaaggttcataccatagaaattgatttgagtagttataaaagtcggctaagaatggtttctcgtactagttcaagtttagaaatgcattttgacacgattttagttggttttggtgttccactagataagaaaatcccaccatgtatatataaaggaccatgactcattgaactgaagccaatcaaatcaatctacaagtctacttttatcatgtcttcacttttgaactacttttctaacctgatgttgcaactactcttttgatccattaacaaggacgacacactatatttggtgggcgacctaggacaacttgctattattctcaccccaatgggatctttttcagtctagagttttaacaaatttttgctaatttgcttgaaacctagttgttc

SEQ ID NO: 198984 - DNA, 3368 bp, Zea Mays
ctggcattgccacccccaggccccagctagtgggcagggtcgtcgatcgacagggtagaaaaggaggcgaggagcctgtcagcctcgtgttccccctctcgttccttctgcctgcctgccatagcacggcggctccacaacccctggcggcctggccttgtgcttcgtgcgtgcctacccccctataagtacgcggcaccgtctcgcagacaccttgcagaaccatcactagtgagtagtagtgagtgacctgcaaagacacgcgaggcacgcagagctggagcagctgatctgagaaccaggaattaggatggcgatggagaaaggctggaaggcgagagacgctgctggtgctttcatgatggacttggagctggtggccgaggaaaccgacgacgcggtgccgtcgataccgccaccgcagacgccgctggagcccatggagtacctctcccggtcgtggagcgtgtcggcgtcggagatttccaagattctcctcggtggaggcaagaagagcagcgttgcggcggcgagccggcttccggaggtgaccataccggagcagtctgcgctcgccaccacgtcctccgtcgttcctctaccgtgtcatcagcagaacagagccgcaagaaggtcttccacgagcagcggccaccaccaccagtcgatcggcaagtggttccaggtccaccacagggaaacacgccgggcgaagcagagcagcaaggagaagcagcgcgccgagaaggcccacgtgcacgccatggtgtccgtggcccgggtcgctgccgccgtcgccgccgtcgcgtcggccacgagctccaacgcccaggctaccactaccaagatggcgacagccatggcgtcggccaccgagctgctggcctcccactgcgtcgaggcagctcagcacgcgggggcgcgccacgaccaggtggccgccgccgtgcaggccgcggttggcgtcagaagccccggcgatctgatgacgctcacggcggccgcagcgaccgctctgcgaggagcggcgacactgaggcagagggcgcagcgagagacgaggagcaacgcgagcatcctgctcccgtacgagaaagccgcgaattcgtggagcccggacatctggtgcaaggagggggcgctgctgaaacgcgcaaggaaagggggtttgcacaagataagagtatgtatctacatcaacaagaggtcagaggtgatactgaagctgaaaagcaaacacatcggaggcgcgctgacaaagaagaacaagagcgtggtttacggcgtatacagcgagcttccgacgtgggctgagccagggaaggactgcatagaggagacatgctgctgctttggcctcagcacggcgcagggcctagtggagttcgagtgcgagggcaacgcgagcaagcaggagtggatcgacgacgtgcagaacctgcttcgtcaggcggctctgcatgaccgagtaggggataaactgggattagtaaaactcagctagtgcagtctcagtatataaccctctttcatggtagcagcagattgctgtgtcctgctgctcctgcatcagcgatgcgaggggtacattaacatatattggtcgtactcttgtcactgacatgctatacaacatctatagtgatagacatacggaatatattagtatatgttttgtaaagggccggagcagacaatcaaaatcgttgggaggacgctgatcccagtttattttttagaaaaaaaaaaacagctagcccgagttttaattaagttcggttaggcctagaggggtggacgttcggtcttcaacccatcagctgttcggactaattattcacgatcggaatttcgtagcattgtatctaacactgtcatatcataaaaatgttgtgaaactatgaatgaaacaatgtgtctcaatacaatagttcacttcactatttcataagctaacataccaattaagtattgcaacttaatagccaatagaagcacggttttcaagaacttggaaacgagttgacatgatttcattctatgaaactcaatcctcttaaatgctataccatatcatcaaaaattatgatgtgtcacaccattaaatgtgcatgaaacaaccatagtgatgagtttaaatacactattttcattttccaatgctaccatatcagatttaaactagataacttgtatccacatgaaactctaccatatcccatgaactctctctatatctcttctcttaattgcactgccatatcacaagtatgatgatgtgttaccatatttaatcagtatggaacttccattgagaatgtcataaggtcattttagaaattcggccatctaaaaacagagaataattaattaaattttaaacttaggaccgaacatgttcagtctaaagaccattttggatctcatgagctaaagcaaagtgactaaagtttagccattttagaagctaaagaattacaatttaaaatagacgacttctcaaaacaaatattttggccgtgagggagaataacgaaaaagaaatcacaaacactttggaatcgacgattcattcccccccaagtctcgactcccgtctccagactctcgactctctacctaagcttctactcagccccatccctaagcgtctccttccgactctcatattgctctgcgctcgcctctaccatggcgactagggtttagtggtgccacaataacctccatcgcggccatcctcaacttcctatcggatctggacgaggcgtcgattcatcctcaacaccggttagtatagacttgggattcaactagtgaccaaaaatctggtctcggtcttgatcagttcgatttggcatttagtttttggttaattatgttctatcctagtcatgtgaggtttggtaagatgatcgaaaatcatatataaaacacctaatttcatgtcaaataaaattaatgtttgagaaggttcataccatagaaattgatttgagtagttataaaagtcggctaagaatggtttctcgtactagttcaagtttagaaatgcattttgacacgattttagttggttttggtgttccactagataagaaaatcccaccatgtatatataaaggaccatgactcattgaactgaagccaatcaaatcaatctacaagtctacttttatcatgtcttcacttttgaactacttttctaacctgatgttgcaactactcttttgatccattaacaaggacgacacactatatttggtgggcgacctaggacaacttgctattattctcaccccaatgggatctttttcagtctagagttttaacaaatttttgctaatttgcttgaaacctagttgttc

SEQ ID NO: 198985 - DNA, 1413 bp, Zea Mays
agctcaaccgtgcaatgtgcatctgcatctgtctacaagacacacacggaagggagaagcaaaagatggagccgaggcaggaacacgagaagcgtgtggtgcttgagaccatcgtgactctgctgcccaaggagaggaactccatgtccgtgagcttcctctcgatgctgcttcgagcagcgctgtgcctggacacgaccctggcgtgccggctcgacctcgagaagcggatggccgcgcagctcgggcaggccgtgctcgacgacctcctgatcccgatcttcttgcccgacgccggcaacacgttcgacgtcgacgcggtccagaggatcctggtcgggtacctggagcacgaggccgaggcggaccggctggactacaacaccgacgacgacttcacctcgacggcgtcgccgcccaacgacgtcggaatggtcggcaagctcatggagtcctacctggctgagatcgcctcggacgtggacctgcccgttgacaagttcaccggcctcgccgagatgatcccggaacgcgctaggttcaacgacgacggcatgtaccgttccatcgacatctacttgaaggcgcatccgtatctgagcgaggccgagcggaagacggtgtgccgggtgatggactgccagaagctgtcgcgcgaggcgtgcgcgcacgcggcgcagaacaatcggctgccagtgcagacagtggtgcaggttctccaccacgagcagcggcgcctgcgcgaggcccctacgtcgtcgttctacggcggcgagtccccgaccccggcgccgagcctccagggccggcacggccggagcgtgccggacgagatgtcacagctgcagcgggagaacgaggagctcaagatggagctgctgcggctgaagatgaacctgagggacccgtcggcgcccccgcagcacagcgacgctccaccatcggggcgccgcccgctgccgaagaaggcggcaggcggcagcggggggttcattaacaacgtgtccaagaagctcgggcggctgaacccgttcctgcggcctgacgccgtgggtggcgccaaagtgcgcaccaagccgtccaggaccaaggatcggaggcactccatcggctagtgattggaattggctcatgctcattgccggcttctttcatcttgaatcttcttgacggctatttcactcgatgaacgtaaaaaaacactcgttgattgattgattgaatggccgagtcgtgagtaaagatgtgtagctatcgcacttgaacataaataagatgctatgttatactttcttcattctttttttatatgccgtgttttagtttaaaaataaactagcgaataacacatatttgaaagtggaataatagtaactctagcggaccatccaaattaggtcctctacttctact

SEQ ID NO: 198986 - DNA, 2481 bp, Zea Mays
gtcaccgggaagccacgcagaaccggcagccccttgagatgtctttagcataagtagccggagcatcgggttgacccggcagacgacacgccaccagcaccaaccatccggcgagagcgagatggagaccccgccgcggggccggtggccgccaggcttccgcttcagccccaccgacgaggagcttgttctctacttcctgaagcgccggatcgcctccggccgcccctctccctacgtcgccgacgtcgaagtgtacaagtcacacccctcccacctccccgagaggtcggcgctgcagacgggggacaggcagtggttcttcttcagccggatggaccgcaagtaccccaacggctcgcgcgccagccgcaccactggcgacggctactggaaggccacggggaaggaccgcttcatctgcggcggcggccgggcggttggcaacaagaagacgctggtgtaccaccatggccgcgccccgcgcggggagcgtacggactgggtcatgcacgagtataccctacttgccgatgcgctcccgcctgctgcgcagggtcgggagttctacgcgctttataagctgttccagaagagcggggccgggccaaagaacggcgaacagtacggtgctccctttcgagaggaggattggttggatgacgacgatgagagagtgattgcgggtgcagccgctaatcctgttcctaacaccaacagcccaccatctacaatggaggagcatgcaattactgaccgtgagcttccgattgagggtcttgatcaaccactgtcagattttggaaatgatccggagttgttttctgaagcacagcctgtttcttcccatggtcaaggtcagggttggctcagtgaggggggtgacaaagctgaggtcgtggatgcttccattagcaatgatgttgtggtagtagcagagaacacctgcactgatatctctcttggggatattgagcagtttctcatgcaaatatctgatgatcagcaaaacgatgaattgttctcagatttatcaacaccacttccaaaattgcagttccagtgcgatgatcgtcaggtttggcttgatgccgaaatgggacatgaagtttatgctgcggatcctactgccagcagtggtgctgttgtaactgcagaatgcactgtcacagaacttccacttggagatcttgaagggcttctgctgcaaatagccaatgaccagcacatggtcgaatcccaatcagatctttctgcaccaactccacatcataacttcaatcagttcaggaaagcacattttgtgaaccacggactgaaccaagtgatcaatttccacagtctaatgtaaccaatttgccatttagcggagaagcaaattcttctgaagggaccagtgtggcacattctgtgtcaggtttgatcagttaccacagtcaagatgctgatgaagagttccttgaaatcaacgatttctttgatctggaggatgtaggtcagaatgcaaattgtatgacaactgagtacatgatgtctgcaacaaatgggatgtttgacaatttggaatactctgatgcttcttcgtttctacctgggtcatttgacacagttggattggtagctgaaaatcaatattttgataccgattacagtggaattcaaaaccagggatatcaaaatacaaccgaagtaaggacatataatcaggctgctcttactgtgcggagccatatgaagcatgatcatgtagtcttatcctcgcatgcatcaggcactctgaatatccatgcggcaaatgagctacataaccagagctccacatcttcacaatcatggttcaatgcggctctatcagccttgttggactctgtacctagtagtccagcattagctgctgaaatcgaaaacactgttatcaacagaacactccagcgcatctctagcttccgaccacatcaaactgcaggtgaagaaaacacttttatcaacagaacacttcagcacatctctagcttcaggtcacagcaagcaacaggggaagaaccaggcacccctagtattcaggttaccagaggtggcaggctgatgttcatatctctactggttatacttgcttctgttatatggacctttacttcaggctccgccctcaacttttgcaagggtttatggaaatcctcttctacgtgacagattaagtgggaacctggtgaccttgtcctctgtaaattttttggtcctcggtaccatttatggtttgaatatcatttccctttcaaaagggtgaagaggtagaaacattttgagggtggtaatatgattataggttgtagagcctatttaaaacggtaaaatgcaagggggaaaagcatatctgatggtaatatttgaaactaatgggttactgttctcatttgtattttgacagatatatgtactgaatgcaattaacctattaatatagcttcagtttctgtgcat

SEQ ID NO: 198987 - DNA, 2289 bp, Zea Mays
ccgccctcccggtattatattaagaagagaccgaaacaatagtcccggccgagaaaatccccgaaccctggtccccatcactaacgggtcggcgtcaactgtccactctgtaacgacccaaccggagggtggcgcacaggacatcgtaacccgagagcggataggacacagcgagggaatttttttaaccaagtctgaaaattcgctcccgggggaaatcgaacccaggacttggagtgctactcggaagttcttaaccactaggctagaggccctttcgctcgttttcctctttgattgccacgaagcagcaagcaccgccccctcctcaccaccaccagtgtccatggcccaatgctgcaggagcagctctcgtcgggcccgcaggcagtgccgggctcacggtattgcgacgccgacgccgacgccgttccgttggaattgaccgccgtccggcgcgacccgatggaaaaagcaaaccggcggcatgtccgccgtccaaagaaagtccaacccagaccaaatccaccgtttcgttgctgttctattcggtcgcgcggttcgatttctcgtggggagacgccgcctaccaccaggagacgctcgagaacctcaagctcgccatcaagtccaccaagaagctgtgcgctgttatgcttgacacggttggaccggagctgcaggtggtcaacaagagtgaaacccccatctccctcgaggagaacgggactgtcgtgctcacgccgcatcagggccaagaagcctcctccaccttgctgcccatcaacttcgatggactcgccaaggctttgacaccaggtgcaacgatatttgtgggccaatacttgttcactggtagcgagactacttcagtttggttggaggtttctgaagttaaaggagatgatgtggtttgtatcatcaagaacacagctaccttggctgggtcgctcttcacgctgcattgttcccagattcatattgacttgcccacgctgtctgatgaggataaggatgttatcaaaaaatggggtgctccaaataagattgacttcctctctctgtcttacacaagacatgcagaagatgtgcggcaggcacgtgagttcctctcgaaattgggtgatcttagccaaactcagatctttgccaaaattgagaatgttgagggcttgaaccattttgatgaaatactggcagaggcagatggtatcattctgtcaagaggaaaccttggaattgaccttccacctgagaaggtctttttgtttcaaaagtctgcgcttcacaagtgcaacatggctggaaagcctgctgttgttactcgtgtcgtggacagcatgactgacaacctcagacctactcgcgcagaggcaactgatgtggcaaatgcagttcttgacgggagtgacgccattctccttggtgctgagactctccgtggtttatatccagtggagactatttcaacagtgggcagaatttgtgctgaggctgagaaggtattcaaccaagatttatactacaagcggactgtgaagtatgtgggagaacctatgacccacttggagtctattgcttcttcagcagtgcgagctgcactcaaagttaaggcatcagtcatcatttgcttcacctcttctggacgagctgcaaggctcattgctaagtacaggcccagcatgcctgttttgtctgttgtcattcctcgtctaaagacaaaccaactgaggtggagtttcacaggtgtttttgaggcaagacaatcactcatagttagaggcctcttccctatgcttgctgatccacgacacccagctgaatctaccagtgctacaaatgagtctgtgttgaaggttgctcttgaccatggcaaagcctcgggcgtgatcaagtcccacgaccgcgtcgtcgtttgccagaaagtgggtgattcctctgtggtgaagatcattgagctggatgattagacaatcaggctatgctgttgtctactagggcacgtttttgccaatttttttgcctaggccgaaacttattggctatgtataatcctatagcgcttgaaaactgagcagtttttcctatggtgacatcataggatttgcttttacagttccaattatggtgtagttcgaaatttgctcgactaaactgcggtgtaacagttaaatgggcagatggaataatgtaatcatactgttccctcgttaggttgtcacttgaattgatgatctgggcttttttttttggttaatcctacctcttgctgcggtgcggcctgctagt

SEQ ID NO: 198988 - DNA, 1448 bp, Zea Mays
cacccctcctccccccgagtatattagtttactcgctgcctgtgttccaaaacctttcgtcttttcccccgtctacaaaggcttgacaggcactcgcagccccaggcagagagactccttccctgcgaaggcttctcctctcccctatcccccccccccccccccccccccaactcgtcgcattctcctcggttcagcagcgacgggatggcgatagaccacgcggcgcgtctcggactgacgagcagagggaggcggcgggtgcggagacgacgtcgacgccgagaaccggcggtggccgccgtggctgaagccgctgctgtgcacgagcttcttcgtccaatgcaggatccacgccgacgcgcacaagagcgagtgcaacatgtactgcctcgactgcatggacggcgcgctctgctccctctgcctcgcgcgccaccgcgaccaccactccatccagatacggaggtcgtcgtaccacgacgtgatccgggtgtcggagatacacaaggtgctggacatcgccggcgtgcagacgtacatcatcaacagcgcgcgcgtggtgttcctcaacgagcgcccgcagcctcgcccgggcaagggcgtcaccaacacctgcgaggtctgcgagcgcagcctcctcgactgcttccgcttctgctccctcgggtgcaagatagtgggcacggcgcgtggttaccgtcccaagaagaagcacggcggcggaggcggcggcggtaacaagaggaagagagcggcgcttaaggacgtgcgctctgactcggaggagtcgtgcaccagcaccagcggcgccagcagcgacaagagcagcgtcgtgcagagcttctcgccgtcgaccccgccgccggcctccgctagctaccgccgcccagggaacaagcgccggaagggcgtcccgcaccggtcgcccttcggtagcctcatcgtcgagttctaggactccttcgtcagcgcctaggcaatgcgctctctactgtacaggacatgacaaagcccggaagggaagggaataacaggacgcgcttctggacgtggaggccggccggcggcgcaaatgccagcgacgggcgagagcggtaagcacacaccagcggtgcagcccgtgctgctatagttttgcttctttttcgcgctttgttacttcagttggtactaagttttgcagccttgtacattgtaatatactagtactactctccaatgctagatgtacatatacatacacagtgttggcagtatcataatgtgggggtagcagtaggcagcgaggtgtgttcgtatgcgcatcatcagctgtgtaataaaaataaagaaatgcttgctccaaatcatgccggaatggcaccgttggtcgcgctcccccggcattcgctgctgctggactgctactactgctactgcagcaggataagattggtttgatagag

SEQ ID NO: 198989 - DNA, 2636 bp, Zea Mays
cggcagcgccgaatgaagaattaaaaagcccccctaaaactgcagaaaaccagggaaacccgagaaaatcgagtatactgaagccatcgagagcagctttcttgcaactcccatggccctataaggcagagagagatagagcaagcgagcggggagaagagattgagcattgctggtggccctgtgctttgagagaggagagaggacttgaggaataggcaggaggctttgtggtggagcaatggcgacagcggcctgggccgcatggctgctcatcctcacgtgcttcggcgcttggaccccgcggcaaatcttggttgctgcagccaccgacgcgaatgatgttactgccctcaacacgctgtttaccagcatgaattcgccgggacagctgcagggctggaaggtgagtggtggcgacccatgcggcgaatcgtggcagggcatcacttgctctgggtcctctgttactgcaattaaattgccgaacttgggcctctcgggaaatctggcctacaacatgaacaccatggattcattaagacatgagccacaacaatctcggtggtggccaacagattccatacaatcttccaaataagaagcttgaaagactcaatctggcagaaaaccagttctctggatctgtgccatactcaatttcaacgatgcctaatattaagtacctaaaccttaatcataaccagctatcaggagatatcacggacatattttccaacctcccaagtttaaccacagtagacctttcctccaattctcttactggcaatctaccacaaagtttcacttctttgtcaagcctgaaaacactgtatttgcagaacaatcaacttactggttcaatcaatgtacttgcaaatcttccccttgatgatctgaatgttgcaaacaaccgcttcactggttggattcctgaggagttaaagaagataaatagtctgcaaactgacggcaactcttggagcacaggctcagcaccaccaccaccaccatttacagctcctccacgttcgcgcaaccgtcgaaagagcccaggccagcactccaatggaagtaacaactcgagttcaggtggaagctctagcataggtgctggagccatagcaggcattatcatatctgttcttgttgttggagcacttgttgcattcttcctgataaagagaaataaaagaaaaagtgcaatgccagaacactatgaacaacgccagcctttcaattcgttcccttcaaatgaagttaaaaatatgaagccaattgaagaggctaccactgtagaggtggagtctttgccttctcctgctgcagttaacctgaaaccacctcccaagattgagcggaatcaatcatttgatgatgatgattttgcaaacaagcctgttgccatgaaaagtaatgcagcagcagcaccagttaaggcaactgtttattcagttgctgacctacagatggcaacagatagcttcaacatggacaaccttattggagagggtactttaggacgtgtgtacaaggcacaatttagtgatggaaaggttctagctgtgaagaaattaaacagtacaacactgccaaggcaatcatcagatgatttctatgagctggtgtcgaacatttcgaaattgcaccatcccaatctcagtgagcttgtgggctactgcatggagcacggacagcacttgcttgtttatgatttccacaggaatggttcactgcatgatatgctccatctctcagatgattataacaaaccacttagttggaattctcgtgttaagattgcgttgggctctgcacgtgcactagagcatcttcatgaaatttgttctccatctataattcacaagaactttaagtcgtccaatattttactggacaccgagctcaatcctcacatttctgatgctggacattcaagttttgttccagatgctgaattccaggcttcagatcaggggtctgggtatagtgcccctgaggtcgagatgtccggtcagtataccctcaagagtgatgtctacagctttggggtcgtcatgctggaactcttgacaggccgtaaaccatttgacagttctaggccccggtcagagcaatcacttgtccggtgagcaactccccagctgcatgacattgacgccttggaccagatggttgatccggcgctcaagggtctttaccccgccaaatccctttcccgttttgcggatgttattgctctgtgtgtccagcctgagccagagttcagacctccaatgtctgaggtggtgcaagcgctggtgcggctcgttcagagggccaacatgaccaggagaatgctagatggcgaggaggcttctcggcggccggatgaccaggaacaggaattcgtctaacaagctactgaaacaatatacacatcatgtgctgtacctgcaccatcttaatgttgtgactgttgataaaacagggaaaacagctttgtcgacttccattcagtatatattacaggttttatttcatataacgaaatatatatgttattttttagataatgggaattgaaagtttctggcctttgtttcaaagagactagccaaattattacagactcagatagtaacatcactatctga

SEQ ID NO: 198990 - DNA, 1024 bp, Zea Mays
gtcgcctgccgagctcgctctcagtctgcttcctcgtctaatgaactttgggagaggggatgacgcggacaagttgctcgaggatttgctcaaacagcatggcgaggtggtgtacagctccggtggacctccggatcccaccgttgaggccgacgacgatgccgagtgcttgtcctttgccgtctcgttggctaaagctgcaagtgagataaaggctactgatatccgtgtactttgtgtgaggcggcttgtctactggactaggttcttcatcatcctcactgccttctcaaatgctcagatagatgctatcagttccaaaatgagggatattggtgagaagcagtttagcaaagttgcatctggtgatacaaaaccgaattcttggacattactggattttggtgatgttgtggtccatatattccttccgcagcagcgagcattctacaacctggaagagttctacggcaacgctacacccatcgaactcccttttgacacccaacggcagtgatcgttgatcgttacatccgagccagcgctaggaagcatcccagtgaaaagtgagattttttcgtgaagccagccagaagacattgttaccggcatctcactagtcatcagatgtggtgagctgcccagagaaaagaaacctgcggtgcgaggtcgcaactgacaaaacgcttcctacaaccgaagcggcgcgctgctcgcagcctccgatgcagtgctgaaacggcaacttgatgcgaaaattctaggtttctgttgtgtcatgtcatgctctgcataccctgtgtgaactatcgaataatgttggcaaccgcaccgcaccgcacttggcttcccatgaccgggaggatcagtgtgtcgatccagaaattgttcactggctcctggctcgctaatattaacaccatctgactgatctgacagcttgtaaaatttcactgctggtttacgcaaggctgcactgaacaagcttgctagaagaggcaagttaaagcactaattagtctac

SEQ ID NO: 198991 - DNA, 1919 bp, Zea Mays
agcccagtccgaggtgctggaggctattcagctgttttggcttggcttgtggccggtgagaggtggacacgacgacggtgacggtgaggtggagagcggagtggcggatcgtggctccgatccacaagggacggctccacacatcgggttcctgcctctgctcagcagccatgccggtgaggcggcggcagccgcgtcggccggagacgggtgcggcggagaggtacagggagatggggatcggggctgcgctgtcgcggccctgggactatcccacggcctgcggcgagcttgcagcgctgctgcgcctcggatacgcggacctccctaaggcagcccaggcgctcgttgcctccgacgtgctactcgcgtttcgcctccttcccgatgtgcagacaggatatgcagtaagcacagctaatgttcttctccaagcagtagaagttgctctaccaaagcaaaagaaggcgcaggctgtttcagagttcaagcactctattattgcacataaaaggcgtgcaagagtccaacaaatttcaggttcaccacacataccacaagatatacttgtccatatcttcagtttcctggacatgcattctttggtagcagcaggtcttgtctgctggtcttggaattcagcggcaaatgacaacaaactgtggaagatgaattactcgattttctttggcctcagccatttgagttgcaacaacattcctgtatctggtgtgcaatacagcacgaattcggtgccaaattatccaaactttagctggaaggagtccttccacactaagtatgcagaatgcgcgtcatggaaatttgtatcaaatagagcactatgtgcgcattgcagatcagttatttggctgagcaacctcacatgtgcttctccacaccattgccctaagaatagacaccatgaagtaaaactacgacctctgttacctgatacatcctggatcaggttgctaaatacatattgcgcgttgaagatctagcagcttcatcatctgaaagtgatgacacagatgactcagattatgagaattggcacccaagattttgggcgctataggacaatgatattcggattgtgactatttatgtcctcgattctactagtttgctgtatttagtatgtagcaactacaaacatcatacgaatggaacacattgtatattgtattgtctattgtagtcttggtacaactatatttaggagaagcaactgttgggttgatttcatttagggcgtcgagctagggagcgtggtgccgagcgaggagagggacgccgccgcgccgggagctaggcgctggggagcagggcgcaacaggaataacgacgacgatggtgtggtctacagaggttcttggtttggaaacgaccgaccaatgctaatagtgctcaacggctgatgggagactagcatgatgtgatctgcaggagctaacaggtacatatgtgctactagtgctcaatagctgaaacgaccgtgcaaactactgtgatgtggtgtgtaggagcaggcgttgccaaatagatacagttgctgctactacatgcactgccagtgagtgatgactgatgaagcaatgctactgcagaaaccgatacagacaatcagacataaaagaccgtgctagcgaaaccagtgatcactctttattccgagtttctaatgagtgtttggtttgagaaatgatatagtccatcatcttctcactccttattttttttatttggtttgtataatggagtgagttaatctatcatcacctcatttctcatagttagttgtttagtactaatatgtggaatagagttatcccaccaaatttgaggaatggacctatgatacaccactttattttagatagagtgattcattaaaccaaacacctcgtaagttt

SEQ ID NO: 198992 - DNA, 1759 bp, Zea Mays
agcccagtccgaggtgctggaggctattcagctgttttggcttggcttgtggccggtgagaggtggacacgacgacggtgacggtgaggtggagagcggagtggcggatcgtggctccgatccacaagggacggctccacacatcgggttcctgcctctgctcagcagccatgccggtgaggcggcggcagccgcgtcggccggagacgggtgcggcggagaggtacagggagatggggatcggggctgcgctgtcgcggccctgggactatcccacggcctgcggcgagcttgcagcgctgctgcgcctcggatacgcggacctccctaaggcagcccaggcgctcgttgcctccgacgtgctactcgcgtttcgcctccttcccgatgtgcagacaggatatgcagtaagcacagctaatgttcttctccaagcagtagaagttgctctaccaaagcaaaagaaggcgcaggctgtttcagagttcaagcactctattattgcacataaaaggcgtgcaagagtccaacaaatttcaggttcaccacacataccacaagatatacttgtccatatcttcagtttcctggacatgcattctttggtagcagcaggtcttgtctgctgaaggtcttggaattcagcggcaaatgacaacaaactgtggaagatgaattactcgattttctttggcctcagccatttgagttgcaacaacattcctgtatctggtgtgcaatacagcacgaattcggtgccaaattatccaaactttagctggaaggagtccttccacactaagtatgcaggttgctaaatacatattgcgcgttgaagatctagcagcttcatcatctgaaagtgatgacacagatgactcagattatgagaattggcacccaagattttgggcgctataggacaatgatattcggattgtgactatttatgtcctcgattctactagtttgctgtatttagtatgtagcaactacaaacatcatacgaatggaacacattgtatattgtattgtctattgtagtcttggtacaactatatttaggagaagcaactgttgggttgatttcatttagggcgtcgagctagggagcgtggtgccgagcgaggagagggacgccgccgcgccgggagctaggcgctggggagcagggcgcaacaggaataacgacgacgatggtgtggtctacagaggttcttggtttggaaacgaccgaccaatgctaatagtgctcaacggctgatgggagactagcatgatgtgatctgcaggagctaacaggtacatatgtgctactagtgctcaatagctgaaacgaccgtgcaaactactgtgatgtggtgtgtaggagcaggcgttgccaaatagatacagttgctgctactacatgcactgccagtgagtgatgactgatgaagcaatgctactgcagaaaccgatacagacaatcagacataaaagaccgtgctagcgaaaccagtgatcactctttattccgagtttctaatgagtgtttggtttgagaaatgatatagtccatcatcttctcactccttattttttttatttggtttgtataatggagtgagttaatctatcatcacctcatttctcatagttagttgtttagtactaatatgtggaatagagttatcccaccaaatttgaggaatggacctatgatacaccactttattttagatagagtgattcattaaaccaaacacctcgtaagttt

SEQ ID NO: 198993 - DNA, 1635 bp, Zea Mays
ggcgtagccgcgcagcccagtccgaggtgctggaggctattcagctgttttggcttggcttgtggccggtgagaggtggacacgacgacggtgacggtgaggtggagagcggagtggcggatcgtggctccgatccacaagggacggctccacacatcgggttcctgcctctgctcagcagccatgccggtgaggcggcggcagccgcgtcggccggagacgggtgcggcggagaggtacagggagatggggatcggggctgcgctgtcgcggccctgggactatcccacggcctgcggcgagcttgcagcgctgctgcgcctcggatacgcggacctccctaaggcagcccaggcgctcgttgcctccgacgtgctactcgcgtttcgcctccttcccgatgtgcagacaggatatgcagtaagcacagctaatgttcttctccaagcagtagaagttgctctaccaaagcaaaagaaggcgcaggctgtttcagagttcaagcactctattattgcacataaaaggcgtgcaagagtccaacaaatttcaggttcaccacacataccacaagatatacttgtccatatcttcagtttcctggacatgcattctttggtagcagcaggtcttgtctgctggtcttggaattcagcggcaaatgacaacaaactgtggaagatgaattactcgattttctttggcctcagccatttgagttgcaacaacattcctgtatctggtgtgcaatacagcacgaattcggtgccaaattatccaaactttagctggaaggagtccttccacactaagtatgcagaatgcgcgtcatggaaatttgtatcaaatagagcactatgtgcgcattgcagatcagttatttggctgagcaacctcacatgtgcttctccacaccattgccctaagaatagacaccatgaagtaaaactacgacctctgttacctgatacaggcgtcgagctagggagcgtggtgccgagcgaggagagggacgccgccgcgccgggagctaggcgctggggagcagggcgcaacaggaataacgacgacgatggtgtggtctacagaggttcttggtttggaaacgaccgaccaatgctaatagtgctcaacggctgatgggagactagcatgatgtgatctgcaggagctaacaggtacatatgtgctactagtgctcaatagctgaaacgaccgtgcaaactactgtgatgtggtgtgtaggagcaggcgttgccaaatagatacagttgctgctactacatgcactgccagtgagtgatgactgatgaagcaatgctactgcagaaaccgatacagacaatcagacataaaagaccgtgctagcgaaaccagtgatcactctttattccgagtttctaatgagtgtttggtttgagaaatgatatagtccatcatcttctcactccttattttttttatttggtttgtataatggagtgagttaatctatcatcacctcatttctcatagttagttgtttagtactaatatgtggaatagagttatcccaccaaatttgaggaatggacctatgatacaccactttattttagatagagtgattcattaaaccaaacacctcgtaagttt

SEQ ID NO: 198994 - DNA, 1640 bp, Zea Mays
caggcgtagccgcgcagcccagtccgaggtgctggaggctattcagctgttttggcttggcttgtggccggtgagaggtggacacgacgacggtgacggtgaggtggagagcggagtggcggatcgtggctccgatccacaagggacggctccacacatcgggttcctgcctctgctcagcagccatgccggtgaggcggcggcagccgcgtcggccggagacgggtgcggcggagaggtacagggagatggggatcggggctgcgctgtcgcggccctgggactatcccacggcctgcggcgagcttgcagcgctgctgcgcctcggatacgcggacctccctaaggcagcccaggcgctcgttgcctccgacgtgctactcgcgtttcgcctccttcccgatgtgcagacaggatatgcagtaagcacagctaatgttcttctccaagcagtagaagttgctctaccaaagcaaaagaaggcgcaggctgtttcagagttcaagcactctattattgcacataaaaggcgtgcaagagtccaacaaatttcaggttcaccacacataccacaagatatacttgtccatatcttcagtttcctggacatgcattctttggtagcagcaggtcttgtctgctgaaggtcttggaattcagcggcaaatgacaacaaactgtggaagatgaattactcgattttctttggcctcagccatttgagttgcaacaacattcctgtatctggtgtgcaatacagcacgaattcggtgccaaattatccaaactttagctggaaggagtccttccacactaagtatgcagaatgcgcgtcatggaaatttgtatcaaatagagcactatgtgcgcattgcagatcagttatttggctgagcaacctcacatgtgcttctccacaccattgccctaagaatagacaccatgaagtaaaactacgacctctgttacctgatacaggcgtcgagctagggagcgtggtgccgagcgaggagagggacgccgccgcgccgggagctaggcgctggggagcagggcgcaacaggaataacgacgacgatggtgtggtctacagaggttcttggtttggaaacgaccgaccaatgctaatagtgctcaacggctgatgggagactagcatgatgtgatctgcaggagctaacaggtacatatgtgctactagtgctcaatagctgaaacgaccgtgcaaactactgtgatgtggtgtgtaggagcaggcgttgccaaatagatacagttgctgctactacatgcactgccagtgagtgatgactgatgaagcaatgctactgcagaaaccgatacagacaatcagacataaaagaccgtgctagcgaaaccagtgatcactctttattccgagtttctaatgagtgtttggtttgagaaatgatatagtccatcatcttctcactccttattttttttatttggtttgtataatggagtgagttaatctatcatcacctcatttctcatagttagttgtttagtactaatatgtggaatagagttatcccaccaaatttgaggaatggacctatgatacaccactttattttagatagagtgattcattaaaccaaacacctcgtaagttt

SEQ ID NO: 198995 - DNA, 1980 bp, Zea Mays
ttataatgatggcaatttcatagtcttcggcatttgttgggtttgtgtgattcagcactctgggcattcactacatttgctctcagttgctaagcaactttttgttcatatttgggaggtcataaaagatggccctagccttcagttagagtacagcataatccttagacagcttctaaatgtgaaggagtaccgctatcagatgaaacctcgaacatatagcaattttgtatcactctacatgaagaaggttgctagtgcttttgatgcaaaattcagcaatcaggcgagctccaaggatgaatccttccgctgtacattgacacttcatgttctacttgaaaacccaccaagtgattaccctgatattatgcgggaggaggttcttaatggatttagtgcaatcttcttacatattagggaggagggaaagctgactcgcaaacttatggaatgcattaacacctttttactgaaggatgggccaaatctgggatacaaatctgtgaagatccataatgcagttcaagagtttatattccgttgttggatgacaactcatgatcaggccttgaagagtttgttcataacctacgtgaaagttcagctgaagattgccaggaatattccagagattttggaaaaacttattgatgtcatcattaaggaactagacaaaaatgttaacactggacctggacttctatggtgtgaggcaccaagagatgagaaagctgtgtccttaaggtgtttccaagaggaatggatggatctctctgctactgttttttatctggcctgcaaatgcacaacaaagacagcaaacagggagaaaaggatgaagaaagaacacattatgaaccttatcgttgatggcctttttagaggatctttgttttggtttgaaatcctcttccgaggtatgactgataagtacattgcccccagagtcacctgttattaatctgtgccctttttcctgtacttctccatgcctttaaatgatgcttcctagtttgtgtggtgactggtgactatagcttcttctgacaagagtatgcagtttccttacatgtatctgtataagccaaatgtgatattattccctcagaaagctcattccagtctcttccctgaaaaaaatctcctgtcttctgtaaagtcttactatttccatgtgttgctgcccaaacccccctgagttaaatcttgggcgctattatactttaatacatgttgggagcctgatattcagtatttggggcatctttcatcatcccataaacacccttgcatcaaactgctgtctcttgctccatttgttctattattttgatttgatgaccccacaattgataaccttactgttacattgatttttatctagtagaacttactatcaataacatttttggtgcagaagtagtgagagttcacaacttttccattttatgcacacgctattagcttctctttacacttcttttctcccacaggagtggttctgtttgttttctgattcacaagtatggatatcatctagagaaatctttgctaattagttggtttgaagcaagttgcaaagctttgagaagtatcttgatccatgcaaatgccatacgttttcaggattcactactctggcttctcaggacattcaaggagttctccacagtgctcatgcttgacactagggataaagtgcaattttgtttaacaaaaggcgagatgtcaattgttgaagattgttggcaagccatatggaattcccttgttcacgcatttccgttgttaagcagcatagatctagttgctgattcagctctgattttgctgggtggaatgatcatgcgggaccaagttcatacatcatttctatcagaagatacatggaacctgcaaatatttaaaaaatttccatcgccggctgaaccctactgtaatatgagagataacaatgatgttgaaatacagcagagt

SEQ ID NO: 198996 - DNA, 979 bp, Zea Mays
ctcgccgcgcggcttccctgatgcgctcgccccccgccgcggcctcccagccgaaaccctagctccgattcccataccgatggcggccgtggccactgcgcgcgacgtggaggaggtcgtccagaagcttcagtctgatcgggccagagtccgcgacgagggggtgaagctgctggggacatggctgcagggtgaccgcgctgcgtccttctgccgcctcctcggccgcaacaccgtcaggttcaagcccggccacgggaaccttaccggagggcattcactacatttgctctcagttgctaagcaactttttgttcatatttgggaggtcataaaagatggccctagccttcagttagagtacagcataatccttagacagcttctaaatgtgaaggagtaccgctatcagatgaaacctcgaacatatagcaattttgtatcactctacatgaagaaggttgctagtgcttttgatgcaaaattcagcaatcaggcgagctccaaggatgaatccttccgctgtacattgacacttcatgttctacttgaaaacccaccaagtgattaccctgatattatgcgggaggagagtttgttcataacctacgtgaaagttcagctgaagattgccaggaatattccagagattttggaaaaacttattgatgtcatcattaaggaactagacaaaaatgttaacactggacctggacttctatggtgtgaggcaccaagagatgagaaagctgtgtccttaaggtgtttccaagaggaatggatggatctctctgctactgttttttatctggcctgcaaatgcacaacaaagacagcaaacagggagaaaaggatgaagaaagaacacattatgaaccttatcgttgatggcctttttagaggatctttgttttggtttgaaatcctcttccgaggtatgactgataagtacattgcccccagagtcacctgttattaa

SEQ ID NO: 198997 - DNA, 2898 bp, Zea Mays
caaaaacggtggtggggtttctgtttctttaagatttataggaagatagtgttaggcagcccttattggtgggcaggagtatattattgctcgaggtaggaggagagccaggggttgttagaacaagtccagtctagagagggagcgaaccaaaagggagaaataacaaaaaaagaatagagacacacacacacagctctgttcttcttattccaatcctctctcatcttgctggttcatccttgggatcggctctgtcgtcccctagctagttcgttcggtgctgtggtttctgccgctgtatccaagaactcttgctcttgctgagtctgggacttcagttcctcgcagagttaggtgatgccttcacccaaaacaacttgaaggcttgctatgtcccaggtagctatatatctcaaaagttttggtggcagtcttcgaggaagtggagtcatctcaagtttttatcgatcgtcccaggctttacatatcttgggtgccgcacacagtatctatgcacctttgacaacaccaatctgattctgatgacaacaacagccactatctcccgtcatccttgcatcgatctgtcagctggcgtcgcctcgtgcttctgaagacgatggccacattcttctccacttccacgaaccagagggacctcgccggaggcggcggcgacatgtcgtcgttccaccactacgcctactcggacccaccagccggcggcctcatgcctttccccgccaccatcgtgtcgtcggaaggccacgtcgcgcacggcggtgacgacggcggcaggggcgcgttcgtggacgtgaacgcgagggacgggccgacgggcggcgccgagatgggcctgcagacgcagctgctcatggcgaacgccgcgtcggcggtgcagcaccaggggctgtcgcttagccttggcacgcagggggtgccggtgtctctttaccagtaccgccaggcggaggcaggcatggccgccgccgcctttctaagcccgaaccaggcgtcggtggcggcgaccaggagcgcgcagagcatctacgtccagaactccaggtacctcaaggccgcgagggagctgctggacgaggtggtcaacgtccaggacgcgatcaagcggaagggggacaagagccagcagggcaaggattccggcggcggcggcggtggcggcgagggcaaggacgccgagacgagcgacgagaaggctggcgagcacgaggggaactcctccgcgccggagctgtcgccgtcggagaggcaggacctccagaacaaagtgtcggcactgatggcgctgctggatcaggtggaccgcaagtacaggcactaccaccaccagatgcagatggtgatgtcgtccttcgacgcggtggccggcgccggcgcggcgaggccgtacacggcgctggcgctgcagaccatctcgcggcacttccggtcgctgcgcgacgccgtcggcgcgcaggtgcagtcgctgcggcggagcctgggcgagaaggacgggtccgcgcagggaggcgggctgccccggctgcgctacatcgaccagcagctgcggcagcagcgcgccatgcagcagttcggcatgatgcagcagccgcagcacgcctggcgcccgcagcgcggcctcccggagtccgccgtctccgtgctccgcgcctggctcttcgagcatttcctccacccgtacccgaaagattccgagaagctgatgctcgctaggcaaacaggcttgtctaggggtcaggtgtccaactggttcatcaacgcgcgcgttcgactgtggaagccgatgatcgaggagatgtacagggaagagttcggggcggagatggactcgcactcgtcgtcggagaacgcggcgggcaacaagggcaaggacgaggcgatatcctcggaggaccacgaggagttccagagcccgtcgagcgccgccgcggccgcagtgccactgccaggccacctcagcgcgttcaagtcggaggcgatcggtgtcatggacgccgccggcattggagcgagctccagcctcgacggcgccgtcatcggcccgtacgcgacgagcctcaacctcggcggcggcggcggcatcctgcaggaggccctcgcgcaccaccaccaccaccacggcggcgccgacgcgaggttcgtgcaggcgtacggcgacatggccggcttcggcggctacgacggcggcagcgtgtcgctgactctgggcctgcagcactgcaacgaggccggcgccggagccggccccgctgagccgcaggccctcctgtacggcagcgccggcgacttcgacttcatcagcggctccgaggacaggcagcggttcgggtcgtcgcagctgctgcacgattttgtggcgtgagcggctggactggacgtcgttggggaataacgtgcgcggacggcgtcagaagcctgggatggccggccggcgccgccgcgggtatacctaccaaccatatgatggccgtacgtcatggtacatggtctcaaattaaccagcaaggttaagcatgcatatatatacatacacatatatatataaggtgtggtaagtgaggtagcataagcagggtaagcagctgtatatgatatgaggtgtggtataaagtaagtgtagggattattattggtattatttttggtagcttgaagattcgtctaatgatgattcaagtccggccagatatggtgtggtgttgttggacctcaagtgagtccatgtacacacaaatgtttcatgttttgtactgtaccagttgttcagttcagcgctaacaacaacgcagaaacattaagcatactactctgcttttctatacatatataaactcatgatttgaaccttattgtgacatctgatctgagacagat

SEQ ID NO: 198998 - DNA, 760 bp, Zea Mays
ttctgttttacttttactacgagatgttcgtggaaacctgccagcgccttcgtctgatgaaaggttcagaggccgtgaacttggcaccaagagccgcccgatgaggcacactccgttgggcgttggcacgcacgcacgcactggcgtcttgaaggaaagggggaactctgctggtcttgatgaggatcttcacgtgagataggaacgtgtgtacagttgtcgccttatggtattgagttgaggaaacttggaagttccattacttgtctgtagtctctactttatatagatgcgaagaagcttgagatacacattgcctacaatgtcttttgatgaataagaccagacagcaccgaaccgaactcgtcctccacacggttgctttgccatctcggtggttttgtggtggtggtggtggtcgtgcttcctataggtgtgaggctgatggcgtggctgccatttatacaatctttaatcgtgttttgttgagctttattatatggttttgtttgagagttcatggctctgcatcctgttcctacgggatgctggtcagcttttcccctagcaagtacattctggtttgcttcgtctcctcgtcgtgcctgtttgtttcgtcgtaacactggctgacatgcgtaacaaagcttgatgttccactcccgttcatgcgcagtaggatgtttcaatggttatagttgggctgaaactagttggtgacgatctaggatttaatttatgcaagaatttaaagaagcct

SEQ ID NO: 198999 - DNA, 2341 bp, Zea Mays
gacgtggatatagtagtactacagtagcggtagtgtgtacgtcaagagtacaagcgaggactttaattgacaatgtcgtatggaagtggtgttgacagattcatcatcatcaggaagtgcttcttttctctataattttttgagctctgatagagttctcctttttcatgcacaccaaagtgctcactgttaagcaggccgaaaaaaacctaatttgctttgcaacagttactgcagttctttctaatgtgaatgtggtccatggcaatgtgaggatccagaaccagcaaggaggaatggcgacgcaagaagatggcggggaacggcgaagcgcatggaagaaatatttgagtagcaaagtgtttggtccgcaatgggccgtgtgattgtaataaggccgtgtatggagctgatacttgtatcgtgcgtgtataaaacgctaagaacgaaaaggctgaaggcagcaaatgagaaataacagaatcgttcccctgcctgtcattctgttcttcttcttccctgatttctccaattcttctccgctcaattcctctatcagttcatttgctgacaatctggtatcagacttgttgcaatcctggagggcattacgcaaccaccggttcggcggacacgttcatcgacagccgcgggcatggaggtggcgatgaagaaggtgctcgacgaaatgtcgcacatggagacgcgtttgctcgctgcgatagtaggaccgtcctactaggacgctgcgacgatctcgaatgcaggatggaggagtcggaacaaaagacggaggcacgtcttatctccctggagatggactacggccagattgaagggtggaaaccagaggtcgagaagcgtctcaagaacttgatgctggaattgaaacgcgccaataaaatcatggagcgcgggattctggagaacgatggaccacaacacggtctgctgcgtcctgaagggtcaacggccgcgcgcacatctgtcgggattcacaccgtcgacgggcctaatggctaccgcggggatcatgatcaccgggatcgcgggtttggacacgtcacgttccaaacccacggcccggtcaagggcttcaaccgtgggggtgtgttttcaaaggtccaactgtttctgcatttccatatgcaccacgacatggttacgatggcttccattttccaaggacggggcatgcgcattctgattgttagagaagccaaaggtatgttggagatgtggagaggcgtgaccctaatcagatgccagcaccttcgactgtagctgcacctcaggaatagggatcttctagagatgcgagattatctgccggttgaaaaagcgtggtcaaaaaccatagatgtttcttgtgaggagcccaacctttctttatatgcttcataaagtactgacgctttgtctatatggttatgtacttgatttccgcttgtatcccgaatagttgcaatcagattttgtcggtgcctcactattgcccttgcatgaaagaattttgttcgagcatcaccaagagtagccaatttgatttgccctctttgtttctagtatgctttttgttttgataatagctcttgaaggttctataagagaatatccttgaagttccattcttgcactgttaagtctctattttcttccactaggtctagaaattgtgctaccaattttatgttatcaatcaccttatttaggttaggaagattcatgtgccattctttgatggcctttctggttcttttgaatctagccatcagtctcttgtccgggtcatgttgatgaatttgtatattccaagcactttggaaagttgtctggaaatcctcatctacagctagtaattttcgaatatgaaaacatgtggtcttgggacatttgtttaactgtgatcacccaagggacatggtcgaaggtgtcctttgctagagtcagctgttgtactagggaattgtgatgaccaaatgtgagaggcgaaacaacagcccattttttcaagaagagggtggcgttgcatattagactaggtgtacgcctgaccctttacagggatttcttgaactccaagctgacttatggccatgttaatgtccaacatcctttgtatattggcgcttggcttgttacaatttttagggcttctgatcatattgaaatcacctaatatgatccaaggtctgtctagaggcattatgatgttggagaacaattggagaaatagctccctctcttcattcatgcatggtgcatatatgtttgtgagccaccatttctggtgcgatagtctagagcagaagtgaactgtatgagcaaaattgttttgttg

SEQ ID NO: 199000 - DNA, 1340 bp, Zea Mays
gacgtggatatagtagtactacagtagcggtagtgtgtacgtcaagagtacaagcgaggactttaattgacaatgtcgtatggaagtggtgttgacagattcatcatcatcaggaagtgcttcttttctctataattttttgagctctgatagagttctcctttttcatgcacaccaaagtgctcactgttaagcaggccgaaaaaaacctaatttgctttgcaacagttactgcagttctttctaatgtgaatgtggtccatggcaatgtgaggatccagaaccagcaaggaggaatggcgacgcaagaagatggcggggaacggcgaagcgcatggaagaaatatttgagtagcaaagtgtttggtccgcaatgggccgtgtgattgtaataaggccgtgtatggagctgatacttgtatcgtgcgtgtataaaacgctaagaacgaaaaggctgaaggcagcaaatgagaaataacagaatcgttcccctgcctgtcattctgttcttcttcttccctgatttctccaattcttctccgctcaattcctctatcagttcatttgctgacaatctggtatcagacttgttgcaatcctggagggcattacgcaaccaccggttcggcggacacgttcatcgacagccgcgggcatggaggtggcgatgaagaaggtgctcgacgaaatgtcgcacatggagacgcgtttgctcgctgcgatagtaggaccgtcctactaggacgctgcgacgatctcgaatgcaggatggaggagtcggaacaaaagacggaggcacgtcttatctccctggagatggactacggccagattgaagggtggaaaccagaggtcgagaagcgtctcaagaacttgatgctggaattgaaacgcgccaataaaatcatggagcgcgggattctggagaacgatggaccacaacacggtctgctgcgtcctgaagggtcaacggccgcgcgcacatctgtcgggattcacaccgtcgacgggcctaatggctaccgcggggatcatgatcaccgggatcgcgggtttggacacgtcacgttccaaacccacggcccggtcaagggcttcaaccgtgggggtgtgttttcaaaggtccaactgtttctgcatttccatatgcaccacgacatggttacgatggcttccattttccaaggacggggcatgcgcattctgattgttagagaagccaaaggtatgttggagatgtggagaggcgtgaccctaatcagatgccagcaccttcgactgtagctgcacctcaggaatagtttgaagtagatttgctgcaaggacaaagagatgggggg

SEQ ID NO: 199001 - DNA, 1950 bp, Zea Mays
cgtcatcctagggccaaggaaacgccaccgctccagtcatatccccgccgcccgcgccgccgaaggccgaaccctcgtcgcctcccctgcccacgcccgccgcctccagcaggaccacaccgccggattcgacttttttgtcctcgccctctccccctcctctcgtctcctttgatggcgtcgaggggaggctcctccggctttatcgagtattttcataacagcacaaagcgtcatggcagcaatagagagaacacaagtcagcaaggcatgaatgctatcagggtgcaaaaagaaatgaaaaaagaatgggcaagacctggaagagttttcaatagaaatattactagaggaggctactctcgaagttcattgcctgtaccacatctgttcattatgtcgttatcctgtttctgaagctcaaccaaaaagcttgctgcccaacaccacttggttacttgcaatgttaatgggcatggagcggcccatgctgacaatggtatcaaaattgcggctcaagcccatgacaaggaagtcaagccttctattgtccgaaaaatggaacaatatgaagggacacaagcatcattggttggatctcatgcagttcttggaaagggcaaccagaacacggtggacactgcagcatcagggaaaaataattttggtggcgaactttgctgttcttcatcagatccaatccatgtgccctctcctggttctaaatcagctggaacttttggagccataaagcgtgaagttggagtagttggtgctaggcaaaggccagctgatagtgcagcaatatacacatctacttctaatggcttagtcaaagtggtatcagcaccaaaggttagcccacatttggaatggaagcccaaatcagtaagccccagcactgctgcacctcctggtgctccatcacctgttgatgatggaagtaaaacagaagtgtctgctttgtctaagaagctttcacatgctaatgtatcacatgaacatgtcattataccggagcacatcaggataccagattctgaaagaactcatttcatcttcggttcttttgaatctgaaatttatccaaaggcttctttagcagcctattatgatgctgtggctaaagaagacttgaatgatcactctccatcaagcgtggcagcattgggtttcacatcaactgatgggactcttaatgataggatggataatgttggttcctgcagtccacttccacagtcagagcctgctgtttcagtttctgaacatgagcagtcattgacggagtgtgtggatgttcggagccctggtgttgtcggtggaacaaatgagacgatttcaagcaaggtaacacattctcaacctcgactccagcatcaggaagctgcacagaattttaaggcatatgagccagattctggttatgggatgtcatttattactaaagttgatggtgaagcagcccaaggtatagcttattcatctgaggctatggttttacattctgtaaatggctatcagttacctgcatctacagcaactcaacaaccagtgccccagatgttttctcaacaattccaagcacctcagtatccaaactttttgccatatcggcatgttttctcaccacagtttgggtctctaatggttgttccaaactattcaagcaaccatgcatttcctcagttgccacatgccagcagctatctggtaatgccaaatggagcctcacaactagctgccaatggcatgaaatatggatcaaaccatcagtataagcaagtatttcaaggagcccctgctggatatggctacggaaatcataatggttaccctaacggtgttattggcggcacaggtgctattgaggatatgaatatgagtaaatataaggacaactgcctctatgcacccaatccacagccttttattttccgtgattgtcag

SEQ ID NO: 199002 - DNA, 1738 bp, Zea Mays
caatctcatcatgttattaataaaaaagttagcccacatttggaatggaagcccaaatcagtaagccccagcactgctgcacctcctggtgctccatcacctgttgatgatggaagtaaaacagaagtgtctgctttgtctaagaagctttcacatgctaatgtatcacatgaacatgtcattataccggagcacatcaggataccagattctgaaagaactcatttcatcttcggttcttttgaatctgaaatttatccaaaggcttctttagcagcctattatgatgctgtggctaaagaagacttgaatgatcactctccatcaagcgtggcagcattgggtttcacatcaactgatgggactcttaatgataggatggataatgttggttcctgcagtccacttccacagtcagagcctgctgtttcagtttctgaacatgagcagtcattgacggagtgtgtggatgttcggagccctggtgttgtcggtggaacaaatgagacgatttcaagcaaggtaacacattctcaacctcgactccagcatcaggaagctgcacagaattttaaggcatatgagccagattctggttatgggatgtcatttattactaaagttgatggtgaagcagcccaaggtatagcttattcatctgaggctatggttttacattctgtaaatggctatcagttacctgcatctacagcaactcaacaaccagtgccccagatgttttctcaacaattccaagcacctcagtatccaaactttttgccatatcggcatgttttctcaccacagtttgggtctctaatggttgttccaaactattcaagcaaccatgcatttcctcagttgccacatgccagcagctatctggtaatgccaaatggagcctcacaactagctgccaatggcatgaaatatggatcaaaccatcagtataagcaagtatttcaaggagcccctgctggatatggctacggaaatcataatggttaccctaacggtgttattggcggcacaggtgctattgaggatatgaatatgagtaaatataaggacaactgcctctatgcacccaatccacaggtggaaacagcagatgtatggattcaaagtcagaaagagagtcccaatatgccatctgcaccgttctacaatatggtgggacaaccagtgtctccacatgcagcatacttaccaccacaaagtggccacactgccttcagtcccgccccttcccatcctggtcacttgcagtacccgggctttgtgcatgcactgcagccaacatccatgaccatggtgcagaacccgcagaccatgatacatcagccggctgcaccgccattggcaggaaatctaggcctggacatgtcggccatggttcctggaaatcaagtaggagcgtttcaacataaccagcttgcccatcttggctggaccacacaatccttttgagattttggtgtgcttctatggctggataagtgaaatttcggttccgtgtggatagaacctaattgaagtgatatgctgtaatatgcaggataggcctgatgaataccaggtttttctttgttttaattataaaaggggaaccgttttttcgtgccgttgtgatttgcaagaacgtgtttaatgttcacttccagtttttgttccaaaattttgttgtaagtgctagtttggaaactcaaattctctttcgggattagaatgaccctac

SEQ ID NO: 199003 - DNA, 2818 bp, Zea Mays
ctcagcagcagtcctcccccacaaaagcagagacgcgtccgacgccgccaccaaaagcaccttccccagccacgctccgccgccatagccgcaggaaaatatcaaatcggagccgcgaagcacaacagaaatttttttccctagggcttgcacgcaaaaccctcctgaattccccaattccgtgccgtccctcgcttcttgtgggccacgaatctagggtttatgcatggcttctgaccctcccggagatggcaccagtggtgaggagacggcgccgggccctgcccccgccgtggaggcgccgcctgctcccgccgttccggccaggtcgcgctgggccgctgagatcaaggtctacacccgtaagcacccccgcaaaaaccctaaacctcctccagaatcagcggctgaccccgtttctgttccttccccggctccgaatcccctttctgaaaccttatcctcgattcgccgctccatccaccgcacggaggcggtggacgctgcggcgctgtccgatccggcagcgccggcctcggttcccacccgggcgccgtctggggaacgtggcgccgcctctggggatccctcgtctgggctgaaccgggtcggcggcggtattcctaacggccacggcgacgaccgggcggccgccgctgctgtgaaagctgagaaagcacggaaacgcaggttaaggagtgagctgcggcgctgtctggcaggagagctcgaccaggtccgcgtgctctccaggcgactgaaggaggctgccgaggccctggcgcaacaggaggcttctgagcccgtgcctttgcctttgatggtgctgccaacacagcagcaggtggtggatgctgggtatgttcagcaccagttcttggctggtgatatggcggtgcccatgcctactcagattgcagctgccgttactcctgcccgctcgctgctgcatcgcagaccactaaccgtgtcagttgttcataatgaagcctttgagaaggagaaacggacgccgaaggccaatcaattgtaccaaaattcagagttcttgcttgccaaggataggattcctccctcagattcacatgtgcgcaagaaacccaagcaccacaagaagaaacataggtccctagaatctcgtggcgcagactttgatgccgagcggcgcctgtactctcatgcgttcaagaagtcctcatcacttctgagccgcttaatgaagcacaagtttgggtgggtgttcaacaagcctgttgatccagtcacacttggtttgcatgattattttactattatcaagcacccaatggatcttggcacaataagggggcggctgagccgtgggcagtacaggaaccctaaggagtttgctgaggatgtccgtcttactttccataatgcgatgacatataatcccaagggtcaggatgtgcatttcatggcggagcagttgttaggaatctttgaggcacagtggcctgagattgaggctgaggttaactacctcgcatcatgtcctccattgccgaagaagtttcccccgccaccaattgacctgcgcttcctagagaggtcagattcaatgagacaccatgtggcattggacaccaattcaagaccgatcagtcatactcccacttatacccgaactccgtcaatgaagaaaccaagagcaaaggatccaaataagagggacatgacaatagatgagaagcgtaagcttagtgagaacctccagaatttgccgccggtgaagcttgatgctgttgtgcaagtcattaagaacaagaacttatcagttaagcaacatgatgatgagatagaggttgaaattgatagcatggatgctgagacactttgggagcttgacaggtttgtgtcgaactacaagaagaacctgagcaagcaaaagagaaaggccgagcgagcgatgcttgcccgacaagatgcagagttgcgtgcacagcaccctatacaacaaccacaaccaaccccagtcccccaagaaccttttggtgaaaaatctccaaaacaagttgtgaaagattcgctggaaggcgagcaactgccagcatctgcaccagaacaaaatggtgagaatagacagaatgcgagtagttcaagcaattcaagcagctccagcagtggctcaggatcatcttctagtgacagtgatagctcctcttcagatggatctgatgctggcaattcatcttgagatataggccatacaacccctgatggtgtttagtttgccaccatctttctgtggagtaccagtgactgcggaggcttcatcaccacaccatgcgcaaaagtctgttcgattggctgctctaaatttgggtcttgggtttgcataaagtttgttgatgcacatgatgttcctcatcacgatcattgatggtccattgttatgttatggagtgatgaggaataggtggttgtgttgggcacgagcacgagagatgatgtgtagcagttcggacctttgggtgggtagcagtaggtagcctcccctcctttcccctggtctggtgatgatggtttgttggagatgtggctatatgtgcgtatgatatgccgtggctccttttgagctgtttgctggctggcgtcttccagcgatggataatacgtgaaggctgggctgcgacggcctccagcatgcagtcagttgaagtgaagtgtacgtgtggatgttccgtctgttgggtgtgccttcctttggcactgtacgtttggttcgtcagctcaggtgtctggtctacgaggagcaatgtagtaaaggcagcaggctgttcgtattggttatttg

SEQ ID NO: 199004 - DNA, 2366 bp, Zea Mays
ctggcaccagccacacgagcgccctcacctgctcctgcgacgctcgtcggctcagcagcagtcctcccccacaaaagcagagacgcgtccgacgccgccaccaaaagcaccttccccagccacgctccgccgccatagccgcaggaaaatatcaaatcggagccgcgaagcacaacagaaatttttttccctagggcttgcacgcaaaaccctcctgaattccccaattccgtgccgtccctcgcttcttgtgggccacgaatctagggtttatgcatggcttctgaccctcccggagatggcaccagtggtgaggagacggcgccgggccctgcccccgccgtggaggcgccgcctgctcccgccgttccggccaggtcgcgctgggccgctgagatcaaggtctacacccgtaagcacccccgcaaaaaccctaaacctcctccagaatcagcggctgaccccgtttctgttccttccccggctccgaatcccctttctgaaaccttatcctcgattcgccgctccatccaccgcacggaggcggtggacgctgcggcgctgtccgatccggcagcgccggcctcggttcccacccgggcgccgtctggggaacgtggcgccgcctctggggatccctcgtctgggctgaaccgggtcggcggcggtattcctaacggccacggcgacgaccgggcggccgccgctgctgtgaaagctgagaaagcacggaaacgcaggttaaggagtgagctgcggcgctgtctggcaggagagctcgaccaggtccgcgtgctctccaggcgactgaaggaggctgccgaggccctggcgcaacaggaggcttctgagcccgtgcctttgcctttgatggtgctgccaacacagcagcaggtggtggatgctgggtatgttcagcaccagttcttggctggtgatatggcggtgcccatgcctactcagattgcagctgccgttactcctgcccgctcgctgctgcatcgcagaccactaaccgtgtcagttgttcataatgaagcctttgagaaggagaaacggacgccgaaggccaatcaattgtaccaaaattcagagttcttgcttgccaaggataggattcctccctcagattcacatgtgcgcaagaaacccaagcaccacaagaagaaacataggtccctagaatctcgtggcgcagactttgatgccgagcggcgcctgtactctcatgcgttcaagaagtcctcatcacttctgagccgcttaatgaagcacaagtttgggtgggtgttcaacaagcctgttgatccagtcacacttggtttgcatgattattttactattatcaagcacccaatggatcttggcacaataagggggcggctgagccgtgggcagtacaggaaccctaaggagtttgctgaggatgtccgtcttactttccataatgcgatgacatataatcccaagggtcaggatgtgcatttcatggcggagcagttgttaggaatctttgaggcacagtggcctgagattgaggctgaggttaactacctcgcatcatgtcctccattgccgaagaagtttcccccgccaccaattgacctgcgcttcctagagaggtcagattcaatgagacaccatgtggcattggacaccaattcaagaccgatcagtcatactcccacttatacccgaactccgtcaatgaagaaaccaagagcaaaggatccaaataagagggacatgacaatagatgagaagcgtaagcttagtgagaacctccagaatttgccgccggtgaagcttgatgctgttgtgcaagtcattaagaacaagaacttatcagttaagcaacatgatgatgagatagaggttgaaattgatagcatggatgctgagacactttgggagcttgacaggtttgtgtcgaactacaagaagaacctgagcaagcaaaagagaaaggccgagcgagcgatgcttgcccgacaagatgcagagttgcgtgcacagcaccctatacaacaaccacaaccaaccccagtcccccaagaaccttttggtgaaaaatctccaaaacaagttgtgaaagattcgctggaaggcgagcaactgccagcatctgcaccagaacaaaatggtgagaatagacagaatgcgagtagttcaagcaattcaagcagctccagcagtggctcaggatcatcttctagtggctcagacagtgatagctcctcttcagatggatctgatgctggcaattcatcttgagatatagatgcatgcctttttcttttgagaccagtgccatggggccttgggcgcctccgttctggtcagccctgatgttaacgtttctgcta

SEQ ID NO: 199005 - DNA, 4318 bp, Zea Mays
cccactacaacgagcgaaacctatcgcctcctccgatcgccattaacgggtcggtggctctgcgccaccacggcaccacctgtgcccgcgcggacgagacgctgctggcaagctcaccgcccctacagtcgacagcgagcacggcagctagcaggctagcgcacaccgaaccaactcccttttggccgtttcaaactcttttaaagccccaccagctggtgcaggcaccgtcatcactcctaggctcgaccgctcgaggccgaaaggcacgaccttcggccagtcgagcagctgggcgcgtggcgcggccagggacgagggcgccatgagctcgccggagaatggcgccgccccggaggccagcgggaagaagaagaagaaggcggaagaggaggaggtggtggccaaggtgccgttcctgaagctgttctcgttcgcggaccggtgggactgcgtgctgatggcggtgggctcgctgggcgcgtgcgcgcacggcgcctccgtcccggtcttcttcatcttcttcggcaagctcatcaacatcatcggcctcgcctacctcttccccaccaccgtctccggccgcgtcgccaagtactcgctggacttcgtgtacctcggcatcgtcatattcttctcgtcgtggaccgaggtggcgtgctggatgcacacgggcgagcggcaggcggcgaagatgcggctggcctacctgcgcgcgatgctggaccaggacatcgccgtcttcgacacggaggcgtccaccggcgaggtcatcaacgccatcaccagcgacatcctcgtcgtccaggacgccatctccgagaaggtgggcaacttcatgcactacatcagccggttcctggccggcttcgccatcggcttctcgcaggtgtggcagatcagcctcgtcaccctcgccatcgttccgctcatcgccatcgccggcggcacctacgcctacgtcaccatcggcctcatggcccgcgtgcgcaagtcctacgtcaaggctggcgagatcgccgaggaggcgttcgtcggcgaggagaaggccgtgaggtcgtaccgggaggcgcttctgaggacgtacaagtacggcaagaggggcggcctcgccaagggcctcggcctcggctccatgcactctgtgcttttcctctcgtgggcgctgctcatctggttcaccagcgtcgtcgtccacaagcggatatccaatggcggcgagtccttcaccaccatgctcaacgtcgtcatcgctggcctgtcgctcggccaggcggcgccgaacatttcgacgttcctgcgggcgaggacggcggcgtaccccatcttccagatgatcgagaggagcaccgtgaacacggcgagctccaggacgggccgcacgctgccggtggtcgacgggcacatccagttccgcaacgtcgacttcagctacccgtcacggccggacgttgtcatcctcgataggttcagcctgaacttccctgccggcaagatcgtcgctctcgtcggcggcagcgggtccggcaagagcaccgttgtctcgctcatcgagcgcttctatgagccgctgtccggctccattctgctcgatgggcacgacatcaaagagctcgacgtcaagtggctccgccgccagatcgggctggtcaaccaggagccggccctgttcgcgacgagcatccgggagaacatactctacggcaaaggcgacgctaccgcggaggagatcaaccacgcggcgaagctgtcggaggcgatcacgttcatcaaccacctccctgatcggtacgagacgcaggtcggcgagcgcgggatacagctgtccggcggccagaagcagcgcatcgcgatctcgagggcgatactgaagaacccgtcgatactgctcctagacgaggcgacgagcgcgctggacgccgagtccgagaagagcgtgcaggaggcgctggaccgcgtcatggtcggccgcaccaccgtggtgatcgcgcaccgcctgtcgaccatccggaacgccgatacgatcgcggtcgtcgacggaggcaggatcgtcgagacaggcacgcacgagcagctcatggcgaacccgtacagtgcctactcctcgctgatccaactccaagaggctgcccagctccaacacaagccttctttgtctgacagcgcaagcattaccaggccactaagtttcaagtattcaagggagttgtccgggaggacgagcatgggcgccagcttccgctccgacaaggactcaatcagccggtacggcggcgccggagaggcgcatgacgaggtgcgcaaggggaagcccgtgtccatgaagaagctctactccatggtgcgcccggactggttcttcggcctgtcgggcaccatcagtgccttcgtggccggctcccagatgccgctcttcgcgcttggcgtcacgcaggcactggtgtcctactacatgggctgggagaccacgaagctggaggtgcgaaagattgccgtgctcttctgctgcggcgcggtgctgacggtcgtgttccacgtgatcgagcatctcagcttcggcatcatgggcgagcggctcaccctgcgcgtccgggagaagatgttctcggcgatactgcggaacgagatcggctggttcgatgataccagcaacacgagcgccatgctgtcgtcgcggctcgaggctgacgcgacgcttgtgcgcaccatcgtcgtcgaccgctccaccatcctgctccagaacgtcggtatgatcgtgacgtcgctcatcatcgctttcatactcaactggagaatcacgctggtcgtccttgccacctatcccctcatggtcagcggccacatcagcgagaaaatgttcatgaaaggctacggcggcaacctcggcaagtcctatctgaaggccaacatgctcgccgcggaggcagtgagcaacatccggacggtggctgccttctgctccgaggagaaggtgataaagctctacgcggacgagctcagggagccttctaagaggtccttccggcgaggccagggcgccggcctcttttacggagtctcccagttcttcctcttctcatcctacgcactggcgttatggtatggttcagtgctgatgagcaaggaattggccagcttcaagtccgtgatgaagtccttcatggtgctcatagtgacggcgctggccatgggggagacactggcaatggcacctgatatcatcaaagggaaccagatggcgtcctcggtgttcgagatcctggaccgtaagaccgacgtccggatcgacacaggtgaggacatcaagagggtcgaggggctgatcgagctgcgcggcatcgagttccggtacccgtcgaggcccgacgtgaccgtgttcaagggacttgacctgctgatgaaggctggcaagagcatggcgcttgtcggcatgagcggctccggcaagagtaccgtgctgtcgctcatcctccgcttctacgacccgatcgccggaagagtcttgatcgatgggaaggacgtcaagaagcttaagctcaagtgtctcaggaaacacatcggcctggtccagcaagagccggcgctgttcgcgacgacgatctacgacaacatcctgtatggcaaggacggggccacggaggccgaggtcgtcgaggcggccaagctggcgaacgcgcactcgttcatcagctcgctgccggaggggtacaagaccaaggtcggggagcgcggcgtgcagctgtcgggcgggcagaagcagcgcatcgcgatcgcgcgcgccatcgtgaaggacccggccatcctgctgctggacgaggcgacgagcgcgctggacgtggagtcggagcgcgtcgtgcagcaggcgctgaacagggtgatgaggaaccggaccaccgtgatggtggcgcaccggctgtccacggtcaagaacgccgacgtcatctcggtgctgcaggacggcaagatcatagagcagggggcgcaccagcacctgatcgaggacaagaacggcgcctaccacaagctcgtcagcttgcagcagcagcaacagatgcagacgcagcagagctcatcagaagacatttgaataagatcgtgcgtttctgtatcttgctgtggctttgtctttcttgggcttttgtaaaagatctgcgctggttatcttttcaatgaaagggagtgttcagaattacaggatgaagcattattgggttcttattcctgactcccgtaaaaaaatatatatattgtacatagaatcttgcaatgtaattctgctccatggatctcaatgtttagtgcctacttctgattctat

SEQ ID NO: 199006 - DNA, 2976 bp, Zea Mays
gccggctgatggcctgacccactacaacgagcgaaacctatcgcctcctccgatcgccattaacgggtcggtggctctgcgccaccacggcaccacctgtgcccgcgcggacgagacgctgctggcaagctcaccgcccctacagtcgacagcgagcacggcagctagcaggctagcgcacaccgaaccaactcccttttggccgtttcaaactcttttaaagccccaccagctggtgcaggcaccgtcatcactcctaggctcgaccgctcgaggccgaaaggcacgaccttcggccagtcgagcagctgggcgcgtggcgcggccagggacgagggcgccatgagctcgccggagaatggcgccgccccggaggccagcgggaagaagaagaagaaggcggaagaggaggaggcgatcacgttcatcaaccacctccctgatcggtacgagacgcaggtcggcgagcgcgggatacagctgtccggcggccagaagcagcgcatcgcgatctcgagggcgatactgaagaacccgtcgatactgctcctagacgaggcgacgagcgcgctggacgccgagtccgagaagagcgtgcaggaggcgctggaccgcgtcatggtcggccgcaccaccgtggtgatcgcgcaccgcctgtcgaccatccggaacgccgatacgatcgcggtcgtcgacggaggcaggatcgtcgagacaggcacgcacgagcagctcatggcgaacccgtacagtgcctactcctcgctgatccaactccaagaggctgcccagctccaacacaagccttctttgtctgacagcgcaagcattaccaggccactaagtttcaagtattcaagggagttgtccgggaggacgagcatgggcgccagcttccgctccgacaaggactcaatcagccggtacggcggcgccggagaggcgcatgacgaggtgcgcaaggggaagcccgtgtccatgaagaagctctactccatggtgcgcccggactggttcttcggcctgtcgggcaccatcagtgccttcgtggccggctcccagatgccgctcttcgcgcttggcgtcacgcaggcactggtgtcctactacatgggctgggagaccacgaagctggaggtgcgaaagattgccgtgctcttctgctgcggcgcggtgctgacggtcgtgttccacgtgatcgagcatctcagcttcggcatcatgggcgagcggctcaccctgcgcgtccgggagaagatgttctcggcgatactgcggaacgagatcggctggttcgatgataccagcaacacgagcgccatgctgtcgtcgcggctcgaggctgacgcgacgcttgtgcgcaccatcgtcgtcgaccgctccaccatcctgctccagaacgtcggtatgatcgtgacgtcgctcatcatcgctttcatactcaactggagaatcacgctggtcgtccttgccacctatcccctcatggtcagcggccacatcagcgagaaaatgttcatgaaaggctacggcggcaacctcggcaagtcctatctgaaggccaacatgctcgccgcggaggcagtgagcaacatccggacggtggctgccttctgctccgaggagaaggtgataaagctctacgcggacgagctcagggagccttctaagaggtccttccggcgaggccagggcgccggcctcttttacggagtctcccagttcttcctcttctcatcctacgcactggcgttatggtatggttcagtgctgatgagcaaggaattggccagcttcaagtccgtgatgaagtccttcatggtgctcatagtgacggcgctggccatgggggagacactggcaatggcacctgatatcatcaaagggaaccagatggcgtcctcggtgttcgagatcctggaccgtaagaccgacgtccggatcgacacaggtgaggacatcaagagggtcgaggggctgatcgagctgcgcggcatcgagttccggtacccgtcgaggcccgacgtgaccgtgttcaagggacttgacctgctgatgaaggctggcaagagcatggcgcttgtcggcatgagcggctccggcaagagtaccgtgctgtcgctcatcctccgcttctacgacccgatcgccggaagagtcttgatcgatgggaaggacgtcaagaagcttaagctcaagtgtctcaggaaacacatcggcctggtccagcaagagccggcgctgttcgcgacgacgatctacgacaacatcctgtatggcaaggacggggccacggaggccgaggtcgtcgaggcggccaagctggcgaacgcgcactcgttcatcagctcgctgccggaggggtacaagaccaaggtcggggagcgcggcgtgcagctgtcgggcgggcagaagcagcgcatcgcgatcgcgcgcgccatcgtgaaggacccggccatcctgctgctggacgaggcgacgagcgcgctggacgtggagtcggagcgcgtcgtgcagcaggcgctgaacagggtgatgaggaaccggaccaccgtgatggtggcgcaccggctgtccacggtcaagaacgccgacgtcatctcggtgctgcaggacggcaagatcatagagcagggggcgcaccagcacctgatcgaggacaagaacggcgcctaccacaagctcgtcagcttgcagcagcagcaacagatgcagacgcagcagagctcatcagaagacatttgaataagatcgtgcgtttctgtatcttgctgtggctttgtctttcttgggcttttgtaaaagatctgcgctggttatcttttcaatgaaagggagtgttcagaattacaggatgaagcattattgggttcttattcctgactcccgtaaaaaaatatatatattgtacatagaatcttgcaatgtaattctgctccatggatctcaatgtttagtgcctacttctgattctat

SEQ ID NO: 199007 - DNA, 315 bp, Zea Mays
tgtctttcatgtctcctgagatgcttgaatcagctccaaattgttgcgtaatgtgaggaccaaaagcattccatttgggattcgaattccatgaagttttctttacctgtacgaacccccctttctggctttagtagattgaagataatttccatctggataatctgtaaagccttgcaaatatataatgagttcaatgttctttctggttcttgaatggaatctatattctttctgttgatgtactgtaacactcccttccctcttatacaatgagtacatgcattgcctttcaaaagcccctccttttgtgac

SEQ ID NO: 199008 - DNA, 1717 bp, Zea Mays
agcaaaaatctgcacagtatacaatacaaccactagagggcgaaaacgtcattcagcattatcctcacacccatttccgcaaatttttgcacctaaaaagtctactcggagaaatactacgtactcccacctcacctcccttcccttcccctctccgagtccgctctccgctccaatgccgttgcctctctcctccacctgcttcttctcataaacgcttccggcctcccggagtcccggacacaaaccctagcattcaaccacgccgagctcgccggaacaagcccaacccgagcccaatcccgctcgggccccagccgatccgacggctcctcaccagcacaatccggggtaccccgcggatgctagcctgatcgggtccccacggtcgatgggttcgcccgggtccgccaatggcagacgcggcgactatgtgaggatcccggaggaggcggaggtggcgtccaagggggagggagatgccgcggcggccgtcaaggcggccgcggcggcggagtgccctagggtgctgcggtgcagcgcgatccggtggtgggccaaggtcgccgtgctcgggatcgtccttgctggggccggagctgccgcggtcgtcttcctcggcccgctccttatcaagaaggtttagaatattaggtcagatcagacgcttatatgtataataagtcaatagcacgtgcaaggagcagctgtaagattgttgtacctattcttcactgggaatcaacaacgttcagcaggccatctattgctctaatatgtttcggcacaatcgcattattcccaagtgttttgttaccttcttcgcccttcatgtggcttgcggggatgacttttggatatctttatggttttttaataatcacagtgggtatgagcataggcatgtcattgccgtattttataggttctgcattccactgtaggatacatagatggctggagaagtggccaaagaaagcagcttttgtaaggcttgctggcgagggagattggcaccatcaatttaaggctgtagctttactcaggatttctccatttccatatatagtttttaactatgcttctgtggctacgaatgtcaaatattacccatatatcgctggttccatggctggaaccatacatgaaactttccttgcaatatacagtgggaaacttttacagagcttggctgtagcaactagccaagggtccttcttgtctgtggatcagatcatctacaatggaatcggatttatagttgcagcagcttctactgccacgatcactatttatgcaaagaaagcacttcaaaggctccaagcagaggaggagatattgtgagcgcatgaggtccaagcccaggatcaaaacccataacgctagtttcctttcaggtgtattatacatgaagggcttgtttggcagcaaggggggaggggaatctagcccctccaaccccctccatttcccttgctgccaaacatgcctgaacagttgctactaatctggtttcctgtgtcgactacctgactgccactaccatctgaggagagggaagggtgggtgctgaagcaattgtaaagaaaaacagacccagaaaaacttacgttttcggttcttgtttagttttctgtaaagagaactatcaacttcagtgtattgcattgcgcgatgtagattcccaagtctaaagttgtttcctcttggatgctgg

SEQ ID NO: 199009 - DNA, 1472 bp, Zea Mays
aaaaagtctactcggagaaatactacgtactcccacctcacctcccttcccttcccctctccgagtccgctctccgctccaatgccgttgcctctctcctccacctgcttcttctcataaacgcttccggcctcccggagtcccggacacaaaccctagcattcaaccacgccgagctcgccggaacaagcccaacccgagcccaatcccgctcgggccccagccgatccgacggctcctcaccagcacaatccggggtaccccgcggatgctagcctgatcgggtccccacggtcgatgggttcgcccgggtccgccaatggcagacgcggcgactatgtgaggatcccggaggaggcggaggtggcgtccaagggggagggagatgccgcggcggccgtcaaggcggccgcggcggcggagtgccctagggtgctgcggtgcagcgcgatccggtggtgggccaaggtcgccgtgctcgggatcgtccttgctggggccggagctgccgcggtcgtcttcctcggcccgctccttatcaagaagattgttgtacctattcttcactgggaatcaacaacgttcagcaggccatctattgctctaatatgtttcggcacaatcgcattattcccaagtgttttgttaccttcttcgcccttcatgtggcttgcggggatgacttttggatatctttatggttttttaataatcacagtgggtatgagcataggcatgtcattgccgtattttataggttctgcattccactgtaggatacatagatggctggagaagtggccaaagaaagcagcttttgtaaggcttgctggcgagggagattggcaccatcaatttaaggctgtagctttactcaggatttctccatttccatatatagtttttaactatgcttctgtggctacgaatgtcaaatattacccatatatcgctggttccatggctggaaccatacatgaaactttccttgcaatatacagtgggaaacttttacagagcttggctgtagcaactagccaagggtccttcttgtctgtggatcagatcatctacaatggaatcggatttatagttgcagcagcttctactgccacgatcactatttatgcaaagaaagcacttcaaaggctccaagcagaggaggagatattgtgagcgcatgaggtccaagcccaggatcaaaacccataacgctagtttcctttcaggtgtattatacatgcctgaacagttgctactaatctggtttcctgtgtcgactacctgactgccactaccatctgaggagagggaagggtgggtgctgaagcaattgtaaagaaaaacagacccagaaaaacttacgttttcggttcttgtttagttttctgtaaagagaactatcaacttcagtgtattgcattgcgcgatgtagattcccaagtctaaagttgtttcctcttggatgctgg

SEQ ID NO: 199010 - DNA, 1778 bp, Zea Mays
cccacacacattgcctcaggtactccatcacacacctgaaaaggataaaatgccaacaccaacaatgggtaccgaggatatagatgtcacacatagtgcctccaatgtcagcaagaagaggaaacataagcataaaaacataacaaaagcaaagaggagcaaaaaaattcacaacagaaaaacatagaagatgatggtcttgatcccctttggactcccccctttcatcaacgatctccaccaccagttccaaataataaacaatttgtgccagggcaggctttagcatctagtgcattgcttaagaggatgggtaaacagagccattgtttccacaaatggtattttgctatgaccacaccaatatctcgaaggcaaagtgccacacacttcatggtacgatacgaagaacatgattttcttgaaaaatctggggtctatgcagtagaattcagtgatgtatttcacatctacaatgatcttgcccttgacatatccttacatcggagttggatgctggcttttggtgcttatgtcgacaaaaaaggtcgccataacaataattttggtcgcacagttatatggaaacattttcagggtcgtgttggttttgcaacctgtccattattgcttgatgagatagcaaatgtccgagaatggttgctcgacttcttcatgaatgaggtggggacgtcgtttgagagggccgatgaggtcatcttcgaggaggaggaagatgatggacagacaacgaggacacgccccgaggacccctcacctatcactagcggcatggagagtggcagggaatcctcatcgttgtaccgacgtactggtggaaagtgtttatctgtagaatgcactgacaaggttggtgaaattgccaagagccatggcttgaagcttcatatcgatggagctcgcatcttcaatgcgtctgtggcacttggagttcctgtagatagactcgtgaaagctgctgattcagtttcagtatgcctatcaaaagggttaggcgcacccgtcggatcagtgattgtcggttcgaaggccttcattgacaagaattctccggaagaccctaggcggtggaatgagacaggtgggagttctttgtgctgctgctcatgttgtcgttcgtgacactgtgggaaagcttgcggatgaccacaggaaggctaaagctttggcagagggactgaagaaaatcgagcagattacagtggacttagcttcggtcgagaccaatatgttcaagctctgcaaggtgaggtatgtttagtttggccagaaaggcatcccctacctgaacaccaatgacggtcgcaccatccgctaccccgacccgctcatcaaggccaacgacaccatcaagatcgatctggagaccaacaagatcatggacttcatcaagtttgacgtcggcaacatggtcatggtgaccggcgggaggaacatagggtgtgtaggagtgatcaagaatagggagaagcacaagggcagcttcgagaccatccacgtgatgcttggagctttttgctatgtctagttttctcctatttgttgtacaggaaaacatagaatggaattcaaatttggtggccgcaaaagtgtggagacttgaattcatataaagttaggcttaacattagtgcaaacagttgtattttagtttagatttagagtacacttatgtatgtgttgtttgacaatgcttatttatgatatattgaatggtacttatttatattatattaattataatgttgttcaatata

SEQ ID NO: 199011 - DNA, 704 bp, Zea Mays
gccgactacaatgacgacctcaagctactccatgcgtgctaagcacatatttcgagaccttaaggaagatccatatgttgttgaactagatacccgagtggatgggcgtgacattcaaagtgttctcctggacctagttgggcgtcgtactgtgccacaggtgtttgtcaatggacagcatattggtggctcagacgatacagtaaatgcgctttcaaatggacagctccagaaacttctcgggaagagtcagtcacaatgatgggtcgctggacaagcttgcactgtcaagaacacgtgagtatatgtttgggaggggtgttcttttgtgtttagggctgaacagaatctggtgttgtgacaaccatctgtactgctggatttgtgatctgctcaattgcacccatccatgttttaccttgttcattatggaaattattagtataggtagctcaatgaactagctgcataggctatcctcagaaaaaaaattcctaaacttctgacgactttattggtatcgacatcctccgttacaaagtcattttagattttctaggtacataatttttgctatatatatggacctcagacatagcacatttaggtccttttaacttgcgtcgcttgtttcagtcctctctcaattgtatttgtatcacgtcactctaaaatcatactacctccgtttttgaatatttgtc

SEQ ID NO: 199012 - DNA, 765 bp, Zea Mays
gtttctacaagctcgcgcgaagcgatggcgatggtgtttttgatgttcaggacagaatcaatggccgcaccttatgtgattgtgatagcatagttgtttgcgaggtaattacaaagctgcaggctgccgcctggaggcagtgggaggccctgggcgaccgaagggtgcatgatattctagtttcagatcaatgctgagtgcagggagaggcaatgtcttacctcttggatgttcatctctatattagtccatccataggtatgcagctttggaccgtcgatgttaaatcttgtctcaccagcgactacttctgatggtgtggctacctgagcagcttgtaccgattctgccttagcttgccgatcaacgctgtccaccaggacagagctgaaaacttgaaatggcaagaccagaaccctgaagttgaagtgttggcaagaaactcagataggtggatgaacgttgtgagccacctagctaagagcttgaagacgacagatggtaggtgttagaaatggaaggccatgcggctcccatgttatggaaaaaaaacccaatcatgaattttggaaagctcaagaacctttgttgaaggagataaggcggatccgttcaaggtcaacaatcgtgatgagaaattacagaaaagaggaagaatattgtcgatgaaaaaaagtgctcaaagtaggtgatgtaagtaaaggtgacagactctaaattttacactataagatttaaagacccatttatagttatttttaaaca

SEQ ID NO: 199013 - DNA, 2250 bp, Zea Mays
gtcgttattaaaaaaacacaccggaggcgcgaccgcctcgtccgcgtctgcttctgcatctgcttctgcttgtgctgctgctgacatcgaatcaaagctgctaaacctcggtccatccatcacccgcggcgcgacacacccaaaggcctctccctcccgtcccgtgtcccgatcgcaccgctccccacgatggcgtcgcacatcatcctgccgccggacgacgccgacgagaaccacaaccaccaggcggcggcggcggcggaggaggaggaggaagagcgggacgagctggggcgcgacgacgacgacgacgagcacggggtgccaccggcgctgccgcccaaggcggcgctgccgttctcggccacgtgcgtgcggatctcccgcgactcgtaccccaacctccgcgcgctccgcaacgcctcctccgtcagcctcgctgacgccgcctacgtcaagatctccgaggccgactttggatacgtcctcgacgacgtgccgcacttcaccgactacctccccgacatcccgacttatcctaatccactacaagatcatccagcctattcaactgtcaagcagtattttgtcaatgaagatgacaccgttcctcaaaaggttgttgttcagaagaacagtcggcgtggtgttcacttccgtcgtgctgggcctcgtcagagggtttattttggcaccgatgaagtgaaagcctgcattgtaacttgtggaggcctgtgccctgggcttaacactgttatcagggaactgaatgggtacaagggtttctattctagcaactaccttcccctgacaccaaagagcgtcaatgacatccacaaaaggggtggtacagttcttggaacatcacgcggtggccatgataccaaaaagattgttgataacattcaagatcgtggaatcaaccaggtgtatatcattggaggagatggaactcagaagggagcatatgagatcttcaaggaaatccggaagcgtggcctcaaagtttctgttgctggagttccaaagacaatagataatgacattgcgatcatcgacaagtcttttggttttgatacggctgtggaagaggcccagcgtgccattgattcagctcatgtggaagcttgcagtgctgagaatggaataggtttagtaaaactgatgggccgttatagtgggttcattgcgatgtatgctactcttgctagtcgagatgtggactgctgtttgattccagagtctccattttatctggatggagagggtggattgcttcaatatgtagagaagaggctgaaagagaacaagcacatggttattgttgttgctgagggagcagggcaggatcttatcgcgaaaagtttagccacatcagatcaacaagatgcgtctggaaataagctgcttcttgatattggtctttggctgactcacaagataaaggactacttcaaaagcaaaaagatggagatgacgattaaatacatagatcctacatacatggtccgtgctattccaagcaatgcatcagacaatgtctactgtacacttctagcccacagtgctatccatggtgcaatggcggggtacagcttcactgttgggatggtcaacggaagacatacctatatacctttctacagggtgacatccacaaggaacaaggttaaagtcactgacaggatgtgggcaaggcttctgtcgtccaccaaccagccaagtttcctgagtcagaaggatatcgacgaagcgagtgaggcggataggctggcaaacaggccaccactgccaacgggtgccagctctcgcgtggtgaggtctttcgatcaatcttcgtcgtgttcttccaatggagagatctaagtgattgctggtgcaccgcaattgtgtacagaacctacttactatcgttctgagctctggtgcttgggcagcttcgccacgcaacgagttttgctcttgttgttagtcgttatgcatatgccttgagttgtgtaggaggacacgcggatgtgggccctgttagcacgcgtaataaagaaacaccattgatgaagctacttactagaggctctccatctatcatgtatttgctgcagttattatgcaatcggctggtgttctatctgtcttcgcctatctgtactaccgtgcattttcctttggcaccgtgaaatttgtaaggacaattctacatatgccattttaattttatcttctagtatcttatttgtcgtctttctatac

SEQ ID NO: 199014 - DNA, 2042 bp, Zea Mays
atcggggccctctcactttccgtgcctcgtcgttattaaaaaaacacaccggaggcgcgaccgcctcgtccgcgtctgcttctgcatctgcttctgcttgtgctgctgctgacatcgaatcaaagctgctaaacctcggtccatccatcacccgcggcgcgacacacccaaaggcctctccctcccgtcccgtgtcccgatcgcaccgctccccacgatggcgtcgcacatcatcctgccgccggacgacgccgacgagaaccacaaccaccaggcggcggcggcggcggaggaggaggaggaagagcgggacgagctggggcgcgacgacgacgacgacgagcacggggtgccaccggcgctgccgcccaaggcggcgctgccgttctcggccacgtgcgtgcggatctcccgcgactcgtaccccaacctccgcgcgctccgcaacgcctcctccgtcagcctcgctgacgccgcctacgtcaagatctccgaggccgactttggatacgtcctcgacgacgtgccgcacttcaccgactacctccccgacatcccgacttatcctaatccactacaagatcatccagcctattcaactgtcaagcagtattttgtcaatgaagatgacaccgttcctcaaaaggttgttgttcagaagaacagtcggcgtggtgttcacttccgtcgtgctgggcctcgtcagagggtttattttggcaccgatgaagtgaaagcctgcattgtaacttgtggaggcctgtgccctgggcttaacactgttatcagggaactggtgtgtggcttgtcacacatgtacaatgtcagcagcatttttggaatacagaatgggtacaagggtttctattctagcaactaccttcccctgacaccaaagagcgtcaatgacatccacaaaaggggtggtacagttcttggaacatcacgcggtggccatgataccaaaaagattgttgataacattcaagatcgtggaatcaaccaggtgtatatcattggaggagatggaactcagaagggagcatatgagatcttcaaggaaatccggaagcgtggcctcaaagtttctgttgctggagttccaaagacaatagataatgacattgcgatcatcgacaagtcttttggttttgatacggctgtggaagaggcccagcgtgccattgattcagctcatgtggaagcttgcagtgctgagaatggaataggtttagtaaaactgatgggccgttatagtgggttcattgcgatgtatgctactcttgctagtcgagatgtggactgctgtttgattccagagtctccattttatctggatggagagggtggattgcttcaatatgtagagaagaggctgaaagagaacaagcacatggttattgttgttgctgagggagcagggcaggatcttatcgcgaaaagtttagccacatcagatcaacaagatgcgtctggaaataagctgcttcttgatattggtctttggctgactcacaagataaaggactacttcaaaagcaaaaagatggagatgacgattaaatacatagatcctacatacatggtccgtgctattccaagcaatgcatcagacaatgtctactgtacacttctagcccacagtgctatccatggtgcaatggcggggtacagcttcactgttgggatggtcaacggaagacatacctatatacctttctacagggtgacatccacaaggaacaaggttaaagtcactgacaggatgtgggcaaggcttctgtcgtccaccaaccagccaagtttcctgagtcagaaggatatcgacgaagcgagtgaggcggataggctggcaaacaggccaccactgccaacgggtgccagctctcgcgtgttattatgcaatcggctggtgttctatctgtcttcgcctatctgtactaccgtgcattttcctttggcaccgtgaaatttgtaaggacaattctacatatgccattttaattttatcttctagtatcttatttgtcgtctttctatac

SEQ ID NO: 199015 - DNA, 1925 bp, Zea Mays
tcatcaatgctaaagtaaaaccgtccccaggtgaattttgtacaagagagacaggatggagataatatgcatcaatcagcctgccggactttgacctacgggatgagagcactgtcggaagtcaaagaagacgaactgcagaatccctcctctttacttatcctaatccactacaagatcatccagcctattcaactgtcaagcagtattttgtcaatgaagatgacaccgttcctcaaaaggttgttgttcagaagaacagtcggcgtggtgttcacttccgtcgtgctgggcctcgtcagagggtttattttggcaccgatgaagtgaaagcctgcattgtaacttgtggaggcctgtgccctgggcttaacactgttatcagggaactggtgtgtggcttgtcacacatgtacaatgtcagcagcatttttggaatacagaatgggtacaagggtttctattctagcaactaccttcccctgacaccaaagagcgtcaatgacatccacaaaaggggtggtacagttcttggaacatcacgcggtggccatgataccaaaaagattgttgataacattcaagatcgtggaatcaaccaggtgtatatcattggaggagatggaactcagaagggagcatatgagatcttcaaggaaatccggaagcgtggcctcaaagtttctgttgctggagttccaaagacaatagataatgacattgcgatcatcgacaagtcttttggttttgatacggctgtggaagaggcccagcgtgccattgattcagctcatgtggaagcttgcagtgctgagaatggaataggtttagtaaaactgatgggccgttatagtgggttcattgcgatgtatgctactcttgctagtcgagatgtggactgctgtttgattccagagtctccattttatctggatggagagggtggattgcttcaatatgtagagaagaggctgaaagagaacaagcacatggttattgttgttgctgagggagcagggcaggatcttatcgcgaaaagtttagccacatcagatcaacaagatgcgtctggaaataagctgcttcttgatattggtctttggctgactcacaagataaaggactacttcaaaagcaaaaagatggagatgacgattaaatacatagatcctacatacatggtccgtgctattccaagcaatgcatcagacaatgtctactgtacacttctagcccacagtgctatccatggtgcaatggcggggtacagcttcactgttgggatggtcaacggaagacatacctatatacctttctacagggtgacatccacaaggaacaaggttaaagtcactgacaggatgtgggcaaggcttctgtcgtccaccaaccagccaagtttcctgagtcagaaggatatcgacgaagcgagtgaggcggataggctggcaaacaggccaccactgccaacgggtgccagctctcgcgtggtgaggtctttcgatcaatcttcgtcgtgttcttccaatggagagatctaagtgattgctggtgcaccgcaattgtgtacagaacctacttactatcgttctgagctctggtgcttgggcagcttcgccacgcaacgagttttgctcttgttgttagtcgttatgcatatgccttgagttgtgtaggaggacacgcggatgtgggccctgttagcacgcgtaataaagaaacaccattgatgaagctacttactagaggctctccatctatcatgtatttgctgcagttattatgcaatcggctggtgttctatctgtcttcgcctatctgtactaccgtgcattttcctttggcaccgtgaaatttgtaaggacaattctacatatgccattttaattttatcttctagtatcttatttgtcgtctttctatac

SEQ ID NO: 199016 - DNA, 3258 bp, Zea Mays
gtaaccaaatcccacctgccctccctgctcccccacctaacaatactccatgatccatccatccatcctcacatatcctttgccacaaatacaaaacaagatttggtgcctgcctgcctgcctgcttgtgacgctgctactgatccggccagattatctgctgctactgatacatacagccagactatccgctgttatcattaccactaccagtggtgattagattgcagtggttgatttggggggagatggagtaggccgctagcctttccctgttcctccggttaaagaattaacagcggtgggacaacgaggattgatgcccactgtccgattaattgattcctctttcttcctcctccctcccttttaatacccgcccttgctttccctgcccgtcttttccattcccatttgttttggcggcggcggcggctgccgcgccaccagctttcctgtgcctctttcgcctcgcgggctatttctcctcctcctacctctcggcctcgtccttatacgagcgccattgtgaattttcgagcagcagctagctagcctgtcgtctcctccctcttgttcttggctactgatcctgttctgtcggcgatatccaagaaaacaaagacttggtctttttcctctgcgtgagcgagctgagtgagggagctcacttcttcgaacagccggagcctggagcagcagttgagctcccccggagaaagctgagccacggcgcctttgttgctctccgccgcacatggacagacagctcgctcttcccggcagtaacagctcaaggttctaggtctcggtcggcgatggagagggagtcgaggtcaagggtgctctcggagacggcgtcctgcgccggcacgccgaggtcggttcagtcgacttgcagtctccagcgccggtactcttcacggaggttagttcgcgcgctgtactttctctcgcacgcgccctctcagctctcaaacgctgtgaaacctgaatggagatttatttttttcctctcccgtcctctacacgcagcgattttttgcattgtttcagttcggcagcctattaacttcctgctgtacaattcaaccgtcctcttcacgccgcatcgaattcctttgggccacaagtacagtacccgctagctgtagtgtagtccactgcccggagaccatcctcatgaacaccggttgacaatggtgccaggctgccagcatgcatggatcgaactcacactggctgtaaaaatagttttcgtgcagagttttttttttgttctaatgtcagcaaggcctagggcgactttcagctgatttgcgccagcatatcaagatggaaaaaaactgttctaatcatttactgcttgtcatcttagcattctgaagccacatgatggcgcactggacatgtcgccacggttctcctactgcaagcctgccgccgacagagagaagatgttcaacagaagacactccctgaatttaccagagcaattgccaggtcattactccagaaaagcaacagaacggacccaaaaggctagctcaaagtctgttgcagatttggttggggagatcgcagcgctcgagcaggaagtcatacgcaaggaactgcacctgctcgctctctacagaagagcgtttgatcaatacgtatctgaatcctgcagcttcacaagcgagcaggtggaccaagaatttctgaaaagcatcgacgagggcgcgctacgtctgagggacataaagcgctccgcggcgttcgacctgccgacgacgaccatctcaggctctgtcagtgctgcgcacggatcgttttcatccattctttaactgtttcgaggagcaggaggaggcaccaccagaggcaaaggcaggcgcgaggcattccagcctcgtcaacttcctgagcgcctccatctcggagtacgtgcccaagatctcgtgcaagctgtcggaggacatcctgggctgcatcgccgccgtctactgcaagctctcgggcgcggagggggagtgctgcgtggcttcgccgagcccttcggtctcgtcttggagcaccttctctccgaggcgccggaacgatagctggagccctcggtctcggtgcaacaacttcgatagctggagcccgcggccgtgtggagtcgagaaggagagcggtgagcagagcccaggcgtgatgatggtcgtcgttccgaggatacgcgtcgacgctgacacgtttgagtacgcgtcgaagatgctcgagactaccaggtctctgatacagcgcctggagaaagtcgacccggtgaagatgacgcacgaggagcagctctgcttttggatcaatatccacaatgctctggtcatgcatgcttttctggcctatggtctgcacgacaagcgcatgaagagcacggacatgattctgaaggctgcgtataatgttggcggccaatcagtaaatgcgcagactattcagaactcgattcttggatgccgccagtcccaccgtccatcattgtgggtccgcgcgctgttcacgccggcgaaaagatccgcggcgaggcacccgtatgcgctccagcacccagaacccgttgcgcatttcgcgctgtcgaccggagcgttttcggacccacctgtgcggctgtacacggcgaagaagatacagcagcagctggaggcggcgcggacggagttcatccggggcagcgtggcggtgcggaagcaggcgctgctgctgcccaaggtgctgcactgctacgcccgggacgccgcgctggagctgcggcacctggtggagctggtgtgcgagaccttgtcggacgcgcagcagaagcagctgcagctcggcctccggcggagggccgtcgacaagtgcgtcgagtggatgccgtacaagtcgtccttcagatacgttgtacatagggatctggctgacgactaggcgggagccagccacgtacggtttgctctgtgtgattgcttgcttggttggttggtttacaaagtgtacaagtagtgggggtgggggtgtacatgcatgcatgtaaatacaggtgtgcatgctcactacttttgagctagtgagctgtggctttgaaacactgtacattctctctttgtgggctttgcgttgaggaatttgggatttgagactgaatcttgatgctagtgccgtccagtggaaaaatcagcggttcaaaatccgaatggctcagatcgatggtggagccattcgtccgtccaaccgccacatggcgttcggttg

SEQ ID NO: 199017 - DNA, 1503 bp, Zea Mays
ttttcatccattctttaactgtttcgaggagcaggaggaggcaccaccagaggcaaaggcaggcgcgaggcattccagcctcgtcaacttcctgagcgcctccatctcggagtacgtgcccaagatctcgtgcaagctgtcggaggacatcctgggctgcatcgccgccgtctactgcaagctctcgggcgcggagggggagtgctgcgtggcttcgccgagcccttcggtctcgtcttggagcaccttctctccgaggcgccggaacgatagctggagccctcggtctcggtgcaacaacttcgatagctggagcccgcggccgtgtggagtcgagaaggagagcggtgagcagagcccaggcgtgatgatggtcgtcgttccgaggatacgcgtcgacgctgacacgtttgagtacgcgtcgaagatgctcgagactaccaggtctctgatacagcgcctggagaaagtcgacccggtgaagatgacgcacgaggagcagctctgcttttggatcaatatccacaatgctctggcttttctggcctatggtctgcacgacaagcgcatgaagagcacggacatgattctgaaggctgcgtataatgttggcggccaatcagtaaatgcgcagactattcagaactcgattcttggatgccgccagtcccaccgtccatcattggtacgtgcatttgcaaacaaaaacgaatgagagcaaacaaaacaaactgacgtgaatgaaatctgcagtgggtccgcgcgctgttcacgccggcgaaaagatccgcggcgaggcacccgtatgcgctccagcacccagaacccgttgcgcatttcgcgctgtcgaccggagcgttttcggacccacctgtgcggctgtacacggcgaagaagatacagcagcagctggaggcggcgcggacggagttcatccggggcagcgtggcggtgcggaagcaggcgctgctgctgcccaaggtgctgcactgctacgcccgggacgccgcgctggagctgcggcacctggtggagctggtgtgcgagaccttgtcggacgcgcagcagaagcagctgcagctcggcctccggcggagggccgtcgacaagtgcgtcgagtggatgccgtacaagtcgtccttcagatacgttgtacatagggatctggctgacgactaggcgggagccagccacgtacggtttgctctgtgtgattgcttgcttggttggttggtttacaaagtgtacaagtagtgggggtgggggtgtacatgcatgcatgtaaatacaggtgtgcatgctcactacttttgagctagtgagctgtggctttgaaacactgtacattctctctttgtgggctttgcgttgaggaatttgggatttgagactgaatcttgatgctagtgccgtccagtggaaaaatcagcggttcaaaatccgaatggctcagatcgatggtggagccattcgtccgtccaaccgccacatggcgttcggttg

SEQ ID NO: 199018 - DNA, 992 bp, Zea Mays
tgagggaaccatatgctcatgggaggaggagggtccttctctgctggtgggcctggaaagggaatgcattctcgattgtatctccgtgtcttgaccaacttccaacagattgaatcattctctgctttcaatagcgtctataacaattcgggcctttttggaatttatgcagtcactagcccagacttttcatcgaaggctgtggatttggcagcaggggaactcctggagattgcgacacctggaaaagttacacaagaacaacttgatcgtgctaaagaggcaaccaaatctgcagttctgatgaacttggaatcaaggtctatagcatctgaagatattggaagacaggttcttacttatggggaaaggaagcccatcgagtatttcctgaaaacagttgaggagatcactttgaatgacattttgtcaaccgcaaaggagatgatgtctacaccactcacaatggcatcgtggggcgacgttattcatgttcctagctacgagtctgttagccgcaagtttcactcgaagtgagaggatccagcatcggacttgcatgacctgttccaacaactgatgtgaagcctgcaacggccctcagctgggacagttactccccccacagaataaaaaagcatgtggtttctagcgccccccctaattactccctctgcatgtatacgccaaacatgttttttttttgtggtaagaatcatcaagccccttggcgactcgtttctgagtttcgcagcggcgctagattttattttatgtggacaagcgagctttcggggtgcgctcgtgcagaaatattttgccaacgtattttgcagtttagaccagaagcagaaaggaccagcgtatcacttttcctgttgttggatgcatgagttcatgacgtccacatttttgcaattttggctgttaccgtttccatcgattctggtgtgcgcgcgcgctcgcgcacttgttattattgttgtgataag

SEQ ID NO: 199019 - DNA, 630 bp, Zea Mays
ggtcgctcctgcgctgtgtgtttctggataataaaagccccgccagcccccgcagcggagaaccgcgcaagtgggtcaactcgcaactgaagaccaaaggcgagccggctgcccggattccggaagcgcccaagccccccaacgcgaccgtcgctgtcgccaccgcgctcggctcgcccgcgtccacagaagccgccagggccatacgccgatgaatcctgccgcgacggcggatcccagcagctccagcacctcggcggccacgctgcggaagcggatgatctctatagacacggctcgacgaggagccgacggcgcgtcgcctgagaccgcgcccaggccagatcgggcgggtagtgataaggcgccgcaggagcgggaggaggagggctcgatggcggcctccgcgcctgcggcggcagcagcgagggagagtgacctggaggcggtgggcgagccgatgagccccgcggggcggctgttccgcgagacgcacttcaactgctacatcgtggccgtgatcgggctgggcgcggcggtggacgtcgcggcggcgcgcgcggggctggaagtcacgctcgtccgccacccacgcttctccagcgtccagtattgccaccaaacgttttt

SEQ ID NO: 199020 - DNA, 1593 bp, Zea Mays
ttagaatacaatgtactgtacatttgtcatcataaaaaacaattcgtgcccgatgggtagttgggtacacacagacagacacggtggtttttttggcacgaggttgagcccacccacctaggctccaatcagcaccctccctgtcgccagacggcccactggctgtggctggctcacttcactcggcgctcggcggccgcacccaagtcccaaccgcactgcgccgcctcgatcaaagcaaacccccaggcccccaacccgcccagcgccctgcccccccgccgcagtgagtgagatgatcatcggaggggcagcgggcgccgggaacccgaggaggaggaggacgcaatgaaggcgcagccgctgctaccggcggcgctcaagaggcggaggggcccgcgcgtggcggtgcttgcgctcgtcctctgctccctgctcgtgcccttggccttcctcttcgaccgcgccccctccgggtacgtgacgacggaggagcggcaccgacaggaggtcgttctgccttcgttggatcacgtggagaagaggcgtcgcagtggcgctgacagtggagagcgacaggatgcgccggagaagatccccagaagtagtgcaggaacgattcatcaacgaacaccagagaagaacatctccaaaggcagtgctgcagtcattcatcaacaaacaccggagaagaacatctccaaaggcagtgctggagtcattcatcaacaaacaccagagaagaacatctccaaaggcagtgcaggagtcgttcgtcagcataagcaaattggtagcaacacgacaagggatgatgctaaaccaaaagtttttgcagcaccaaaagttgaaccatcagcggatgtgacggattctactaaagtcgcaagattcgaattcaaggatgagctgtccctgcgagcagcagcatttcctctgagcttgctatccttccaacatctaatatatcccctagatgaaaaattgaccctggctggacttggatacgattatggaatcgatgaagaggttgcgcggagatctgcatcattgcactacaatggcaacatgaaaccttggcttgaattaggtataccggactacaagaagtactggaagaggtttcttgaccgaggagatcgatttatggacgagtgcaacgtaaatccgtgatgcagatggacccaagatgagaacaattgagtaaatctgggacgcagagctggacctgaaatcagaacaacatcagcaagccttaccgaagcttgtgtcgacgagaacgaatactagtggtgaagccaggattttttgagttggatattcccaacctgaaagtagtgtacacaagagtatatacggtagcataaatttgagtaaatgctggggactacgatccatcgacctccctctacggtaacaaaaaaattcaaatcagtcgacttcatcttacaaaatcttcatgaaatacagataattgtacatgctacgaaacgagataacaatgtcaattgcgctataaaatttggatttgggatatagagaagtgaattattgcacaacatgcccttgcaccctgctattaaataggatcaa

SEQ ID NO: 199021 - DNA, 1147 bp, Zea Mays
gcgtatttgaagacagtgttttaagacacggaggaaaaagaaactgacaatcccaagttacagtgttacacatggccccccaaatatctcgcctagatcatctccctacccctcaaaatttcgactataaaactgcactgctcccttggtcctccaagaagaaaggaacaaaggagagagatctcgatccgcacacctcacgcctctcttcctctcgccccaaggacaacgaaaacatcaaacaagagaaccaaaggaaacagagcaagagcatcgctctcgaagcaaaacgcgcaccacgccgtcgccggccggccacttcgcacgtacgtaggacgcgcacgcaccggtgcatatatggggctcctgaaccagctgtgggacgacacggtggccgggccgcgcccggactccggcctcggcaagctccgcaactgcagcgacgacgcccaggggagagggctggacgaagaagctgcgcgggaaagccaggatgggcggcggcggcggtgacgacgcccccggcacgccgaggagccccaccgtgtacgactgggtggtgatcagttcgctggacctctgaagcccaagccaagacgagaactgcacaaggaaacccaccaccaccatcaacacagctagcgaactgaaggagggagggggcagaggggccatggccatgtaatgtaacgaccaatctctttcagagcttctggtgacgtgtccagttactatatacatacatacgttaacggtgtactatgtgtcttgttgtaaatgtcacccctgcgaggtgttgccgattttgtaagctactacgtactactacgctcggcatgtcaccgtgtgcaagtgcaacacaagtttgtaaaaatgactagctagtagtagcaatgctgttgctgtacgagtaggcctccctctgctttgtacaggggtagtccaacaagtatatggtttgctggtgccatgtaaaaatgtatatagaatcctacgttcacgcccagcaaggatgcgtggttgagtgttctggactctggacaatactactatccaataacagccataccgtgtttttttcctgggccaattaattgtatgcgattggaaaatatactcgttctttgcgtgccactagttatatatg

SEQ ID NO: 199022 - DNA, 1061 bp, Zea Mays
caaatatctcgcctagatcatctccctacccctcaaaatttcgactataaaactgcactgctcccttggtcctccaagaagaaaggaacaaaggagagagatctcgatccgcacacctcacgcctctcttcctctcgccccaaggacaacgaaaacatcaaacaagagaaccaaaggaaacagagcaagagcatcgctctcgaagcaaaacgcgcaccacgccgtcgccggccggccacttcgcacgtacgtaggacgcgcacgcaccggtgcatatatggggctcctgaaccagctgtgggacgacacggtggccgggccgcgcccggactccggcctcggcaagctccgcaacgacgacgcccaggggagagggctggacgaagaagctgcgcgggaaagccaggatgggcggcggcggcggtgacgacgcccccggcacgccgaggagccccaccgtgtacgactgggtggtgatcagttcgctggacctctgaagcccaagccaagacgagaactgcacaaggaaacccaccaccaccatcaacacagctagcgaactgaaggagggagggggcagaggggccatggccatgtaatgtaacgaccaatctctttcagagcttctggtgacgtgtccagttactatatacatacatacgttaacggtgtactatgtgtcttgttgtaaatgtcacccctgcgaggtgttgccgattttgtaagctactacgtactactacgctcggcatgtcaccgtgtgcaagtgcaacacaagtttgtaaaaatgactagctagtagtagcaatgctgttgctgtacgagtaggcctccctctgctttgtacaggggtagtccaacaagtatatggtttgctggtgccatgtaaaaatgtatatagaatcctacgttcacgcccagcaaggatgcgtggttgagtgttctggactctggacaatactactatccaataacagccataccgtgtttttttcctgggccaattaattgtatgcgattggaaaatatactcgttctttgcgtgccactagttatatatg

SEQ ID NO: 199023 - DNA, 1459 bp, Zea Mays
atttcgactataaaactgcactgctcccttggtcctccaagaagaaaggaacaaaggagagagatctcgatccgcacacctcacgcctctcttcctctcgccccaaggacaacgaaaacatcaaacaagagaaccaaaggaaacagagcaagagcatcgctctcgaagcaaaacgcgcaccacgccgtcgccggccggccacttcgcacgtacgtaggacgcgcacgcaccggtgcatatatggggctcctgaaccagctgtgggacgacacggtggccgggccgcgcccggactccggcctcggcaagctccgcaagtacgcctccttctccccctcgtcgtcgtcgtcggcggcggtggcggcggcggcggcggcgggctccgcgccgcctccgggcgccgtgacgcggagcttgaccatgctgcggcggccggcggcgctgtccgtcgtcacgtcgccccgcagcgagtccagctccgcgccgtcgtccccgtcgcccgcaagcggcgctccggattcgcccttcggcgcaggtgaccggctggcgccaccatgtctctttttttcccccagctcttgctgtctctgtctgtgtgtgtgtgtgtgtggtgtttcggttttggccagccgaatgaatctttgggatagctagatgatactgtagatccgaaacaaaaaaaaaacgaagcacggctgatttttgttgtatctctctgcacggtcgccatcgtgacatgatgctagctgcagcgacgacgcccaggggagagggctggacgaagaagctgcgcgggaaagccaggatgggcggcggcggcggtgacgacgcccccggcacgccgaggagccccaccgtgtacgactgggtggtgatcagttcgctggacctctgaagcccaagccaagacgagaactgcacaaggaaacccaccaccaccatcaacacagctagcgaactgaaggagggagggggcagaggggccatggccatgtaatgtaacgaccaatctctttcagagcttctggtgacgtgtccagttactatatacatacatacgttaacggtgtactatgtgtcttgttgtaaatgtcacccctgcgaggtgttgccgattttgtaagctactacgtactactacgctcggcatgtcaccgtgtgcaagtgcaacacaagtttgtaaaaatgactagctagtagtagcaatgctgttgctgtacgagtaggcctccctctgctttgtacaggggtagtccaacaagtatatggtttgctggtgccatgtaaaaatgtatatagaatcctacgttcacgcccagcaaggatgcgtggttgagtgttctggactctggacaatactactatccaataacagccataccgtgtttttttcctgggccaattaattgtatgcgattggaaaatatactcgttctttgcgtgccactagttatatatg

SEQ ID NO: 199024 - DNA, 1235 bp, Zea Mays
aactgcactgctcccttggtcctccaagaagaaaggaacaaaggagagagatctcgatccgcacacctcacgcctctcttcctctcgccccaaggacaacgaaaacatcaaacaagagaaccaaaggaaacagagcaagagcatcgctctcgaagcaaaacgcgcaccacgccgtcgccggccggccacttcgcacgtacgtaggacgcgcacgcaccggtgcatatatggggctcctgaaccagctgtgggacgacacggtggccgggccgcgcccggactccggcctcggcaagctccgcaagtacgcctccttctccccctcgtcgtcgtcgtcggcggcggtggcggcggcggcggcggcgggctccgcgccgcctccgggcgccgtgacgcggagcttgaccatgctgcggcggccggcggcgctgtccgtcgtcacgtcgccccgcagcgagtccagctccgcgccgtcgtccccgtcgcccgcaagcggcgctccggattcgcccttcggcgcagctgcagcgacgacgcccaggggagagggctggacgaagaagctgcgcgggaaagccaggatgggcggcggcggcggtgacgacgcccccggcacgccgaggagccccaccgtgtacgactgggtggtgatcagttcgctggacctctgaagcccaagccaagacgagaactgcacaaggaaacccaccaccaccatcaacacagctagcgaactgaaggagggagggggcagaggggccatggccatgtaatgtaacgaccaatctctttcagagcttctggtgacgtgtccagttactatatacatacatacgttaacggtgtactatgtgtcttgttgtaaatgtcacccctgcgaggtgttgccgattttgtaagctactacgtactactacgctcggcatgtcaccgtgtgcaagtgcaacacaagtttgtaaaaatgactagctagtagtagcaatgctgttgctgtacgagtaggcctccctctgctttgtacaggggtagtccaacaagtatatggtttgctggtgccatgtaaaaatgtatatagaatcctacgttcacgcccagcaaggatgcgtggttgagtgttctggactctggacaatactactatccaataacagccataccgtgtttttttcctgggccaattaattgtatgcgattggaaaatatactcgttctttgcgtgccactagttatatatg

SEQ ID NO: 199025 - DNA, 619 bp, Zea Mays
cttggtttatcgcactgtaatcgcgtgggtggtgatcagttcgctggacctctgaagcccaagccaagacgagaactgcacaaggaaacccaccaccaccatcaacacagctagcgaactgaaggagggagggggcagaggggccatggccatgtaatgtaacgaccaatctctttcagagcttctggtgacgtgtccagttactatatacatacatacgttaacggtgtactatgtgtcttgttgtaaatgtcacccctgcgaggtgttgccgattttgtaagctactacgtactactacgctcggcatgtcaccgtgtgcaagtgcaacacaagtttgtaaaaatgactagctagtagtagcaatgctgttgctgtacgagtaggcctccctctgctttgtacaggggtagtccaacaagtatatggtttgctggtgccatgtaaaaatgtatatagaatcctacgttcacgcccagcaaggatgcgtggttgagtgttctggactctggacaatactactatccaataacagccataccgtgtttttttcctgggccaattaattgtatgcgattggaaaatatactcgttctttgcgtgccactagttatatatg

SEQ ID NO: 199026 - DNA, 1752 bp, Zea Mays
caaagtggccggccgtacgtctcgtcgcctttccagtttccacgccggaagtggaggcgagccagccagccggtcgctccccactgcttccacacccaccctcgctctctctctttcgctgtcacgcggggcccacccgccgtgcgtgcgccccatccaccaccgaccaggcgccgtcgccgccatcgaagcgtttcgtttgatttgggtttcgaggcaagtggtgccgcggcggggtcgggagaggaggggccatggcggacgaggcggcgccgaggctgctgccggtggcggcagacagggacaaggacgaccgccgccgctgggcggcccgctgcggcttcgccgtcctcggcatcatgagtaccctcctcgtctacggcgtcctccaggagaagatcatgagagtcccgtatggagtggagaaggagttcttcagatactcgcttttccttgttttctgtaaccgcatcaccacatccatggtgtctgcaatggtgttactggcaagtaagaaatccttggaccctgtggctccgctacacaaatatggtgttgtctccatatcaaatatactgaccactacctgccagtatgaggccctcaagtatgtaagcttccctgtccaaacgcttgccaaatgcgccaagatgatacctgtcatgatctggggcacaataataatgagaaagaagtatgttgcaaaagattacttcttttctgtcgtcgtgactatgggttgcgcattgttcattctatatccggcgtcgatggatgtgagtccatttaataaaggcagagaaagcactatttggggtgtttcactcatgctcggttatcttggggctgattctccagaatcatctgattccagctgtggattttatgttccgtcacccagattgcttctccgatgttgtaatcctgtccagcgttgcaacagcgagtcagttcttcatatcctacaccattcggacatttggcgctctcacatttgctaccataatgacaactagacagcttgtgagcatattgctgtcctgcatctggtttgtacatcctctcagctggatgcagtgggttggcgcggccattgtgttcgtagccctatacacaaagagcttcctgaggagtaaaccgcagaagctagcggggtcaagcccgccacgtggttccagtccgaaccctgttagcaatagttgacaattggtgacataataacataggaaacaatggacttgttgcggtgtaacgggacgaagtctccgtgtctgagatcaatggcaccatggctgcatatgcaaggcgaggtaactggacagataggttccagatgttgctgtgttactgctccctgacattttttcaaggtcatgaaggtggccattttttcaagctagtcgaccctagtgttagtttagtgtccagagacccaattttgtagcccagtgagctgtgttaccaattttgtagcctcaacaaagcatcgtgtgtgtgtgtatttgtcgagcgttggcgactgagagttgaagaagtcacagcagaccatctgcaaaaactcaccagataactagaactgcgatgcgtaacaaattgcaaaacacaggagattgtcagctaacagctgtggtccgatgtaaagatcagcagataacaactgaaggcctgtttaccatggtttttgagtataccgtagtattttataccaaaagacatttggaagcgcatataaaaactctattttaaaccatg

SEQ ID NO: 199027 - DNA, 1859 bp, Zea Mays
caaagtggccggccgtacgtctcgtcgcctttccagtttccacgccggaagtggaggcgagccagccagccggtcgctccccactgcttccacacccaccctcgctctctctctttcgctgtcacgcggggcccacccgccgtgcgtgcgccccatccaccaccgaccaggcgccgtcgccgccatcgaagcgtttcgtttgatttgggtttcgaggcaagtggtgccgcggcggggtcgggagaggaggggccatggcggacgaggcggcgccgaggctgctgccggtggcggcagacagggacaaggacgaccgccgccgctgggcggcccgctgcggcttcgccgtcctcggcatcatgagtaccctcctcgtctacggcgtcctccagatcatgagagtcccgtatggagtggagaaggagttcttcagatactcgcttttccttgttttctgtaaccgcatcaccacatccatggtgtctgcaatggtgttactggcaagtaagaaatccttggaccctgtggctccgctacacaaatatggtgttgtctccatatcaaatatactgaccactacctgccagtatgaggccctcaagtatgtaagcttccctgtccaaacgcttgccaaatgcgccaagatgatacctgtcatgatctggggcacaataataatgagaaagaagtatgttgcaaaagattacttcttttctgtcgtcgtgactatgggttgcgcattgttcattctatatccggcgtcgatggatgtgagtccatttaataaaggcagagaaagcactatttggggtgtttcactcatgctcggttatcttggttttgatgggttcacaagcacgttccaagataaactcttcaaagggtatgacatggaaatacacaaccaaatattctacacaacagtctgctcttgtcttcttagtttaagcgggctgattctccagaatcatctgattccagctgtggattttatgttccgtcacccagattgcttctccgatgttgtaatcctgtccagcgttgcaacagcgagtcagttcttcatatcctacaccattcggacatttggcgctctcacatttgctaccataatgacaactagacagcttgtgagcatattgctgtcctgcatctggtttgtacatcctctcagctggatgcagtgggttggcgcggccattgtgttcgtagccctatacacaaagagcttcctgaggagtaaaccgcagaagctagcggggtcaagcccgccacgtggttccagtccgaaccctgttagcaatagttgacaattggtgacataataacataggaaacaatggacttgttgcggtgtaacgggacgaagtctccgtgtctgagatcaatggcaccatggctgcatatgcaaggcgaggtaactggacagataggttccagatgttgctgtgttactgctccctgacattttttcaaggtcatgaaggtggccattttttcaagctagtcgaccctagtgttagtttagtgtccagagacccaattttgtagcccagtgagctgtgttaccaattttgtagcctcaacaaagcatcgtgtgtgtgtgtatttgtcgagcgttggcgactgagagttgaagaagtcacagcagaccatctgcaaaaactcaccagataactagaactgcgatgcgtaacaaattgcaaaacacaggagattgtcagctaacagctgtggtccgatgtaaagatcagcagataacaactgaaggcctgtttaccatggtttttgagtataccgtagtattttataccaaaagacatttggaagcgcatataaaaactctattttaaaccatg

SEQ ID NO: 199028 - DNA, 1042 bp, Zea Mays
gttgcggagcgcttgggccggacctggatcgagtacaatcagagccataactgattttggtcctatgggtcatgagtgttctcgggaagaaaagaaaagacacaatgagaaagttgaggtgaagaaacaaagttcatgtgtcgtccacctaatcaacaagtccaacgactatgttgctttcaaggttaaaacaacatctcctaaaagatactgtgttcgaccaaatactggggttatccttccaaggaaaacatgtgaattcacagttaccatgcaagcgctccgaactgctccgccagacatgcaactaaaggacaagtttttggtacagaccacaattgttccttatggtacatctgacgaggaactcgttcctgcctttgtaacagaagatgttcagaatctgaaatcaaagctcaacaatctcgaatcaaaattggaagaggctggaaagatgataataaggctaaaagaagagagcagaagtaccacccaggagcgggataagctacagcaagaaatggtattcctaagaaagaagggaaccccaaggagccaagtgggtttccccttgctgtttgttgtctacgtcgcgcttcttggtaccttactcggttacctgctccgtctatgaattcagaactctaagaaaacaaaaaagttcagcagctgggatgcctcatatgcggcaagagaactgaattgaacggcagttgcactctaaaatgttggagaggtgaatttatttgcattattagttcaggacttcgtatggttttttgcacataacagcagtaccaaactaccagcagttgcgtgcatatatagaacagtttttttttttttttggcgttgtatagaatagaaccgacccaaaagatgcctgctgtcttgtagactaattatggggattcttcctatgcctaagctttctcttttcttctgtctcttttacagtttgctggattcgcttgtcctgaatcggtattgaactgtcgtgtgactatttacacctagtttccttccagttattgattttatg

SEQ ID NO: 199029 - DNA, 4395 bp, Zea Mays
gcgacaaatgcgacgcggggtggactcgccccgtctcctccttccgcaccccccttttccctccatccaatccaggccttcattgcctgagccgaacctcccatccaccacctcctccctccgccgcccctggacctccctcccagcgagtcaatcgcccacaacacacgcggttcgttcttactggtttccaggagggaggtgtttttttcccattttctttgtgtgtgtttgcgctgctgccttcttatcaagtcttcttgcacgtccttctcttctctcccggattcatgcttggcgatatttagactgttttcgtctgagattctttctgcctcctgcgttcttggtccccggccagcagtcggcaatatcgctctgtcgatcctcctgatacttcgtcttccattggttttttaatcccatgtgagcagcagcagtaagaagaggatctgattcgatcggaggagacctagtgacgccgccaaatcgaatcgaatttcttggcaacagcaacagtaacaaaaactagattctggattcgtcccattttttgcactagggaaataaaatgaggctggtggtacgcgtcatcgaggcgcggggcctcccgcccacggacgcagacgggacgcgggacccctacgccaaggcgcagctcgggaagcagcgggccaagaccaaggtgatgcgcaagacgctctgccccgcctgggacgaggagttcgccttccgggtcggggacctcagggacaacctcctcgtctccgtgttccacgaggaccgctacttcgccgccgacgtcctcggccaggtcaagttgcccctcaccgccgtgctcgacgccgacaaccgcacgctcggaacgcagtggtaccaactgcagcccaagagcaagaagtccaagctcaaggattgcggagaaattcgtctcaacgtttctctggctcaaaactactctgaagaagagacgacggcacctgcacattgggcctcagatgaccttgcatcaaattcagacaaatcaactgaattggtgaaaggatcttctttgctgaatgttcctattgaagtatccacagcagtaccagagatctatgagatagaagctgccgaggaggataaatcaaacgctgctccatcatttgtcaacaagctatatcaaatgtttaatagtaaaccaaaagatacagaagcttctgccccacttccctccaagctgaacgacccttcagatattgccgaagaaacactgtcaaccagctctgaagctcctgagaagcaggatcatgatgtcagtgcaactatgacctttgatgagctactaaaggccttcggttctcagcatgaagggaaagaaatgcctgaaaatttgtctggtggagttgttcttgatcaagtttatgctgttgcaccgagtgacctgaacacacttcttttctctccaagttcagactttctgcagtcacttgcggagattcaaggaactacaggtcttgaaattcaacaatggcgacttgaaaatgacggtgaaatcctgaggagggtggtaagctacacaaaagctcctaccaaactagttaaggccgtgaaagcaacagaggacatgacatatttgaaggcagatggagagatgtttgcagtttttgcagatgttagtactcctgaagttccttttggcaatactttcagagtggaggttttgacctgtataatgccaggacctgaactacgaggtgacgaaaaatcttcacgtcttatggtctcttggcacataaattttgtccaaagtaccatgatgaagagcatgattgaaaatggagccaaacaaggcttgaaggataactatgttcagttctctgagctgctggctaaacattgtaggccagttgatacaaaagatacaactagcagtaatgaagtgctttcttctgtgcaaccagagcaagaatctgactggaagctagcttttcgaatatttggaaatttcgcacttttgtcctcagtttttgcatttttttatgtttctgcacacatcatccttgcaagccctagtataattcaaggtcttgagttcccgggcctggacctgccagattctgctggtgaagttgtagtttgtggagttcttgttctacaaggacagcgtgtgctaaatatgattgcacgatttatccaggcgaagaggcagagaggtgatcatggagtcaaagcacaaggggatggctggttgctgactgttgctctgatggagggaaccaacttggcagcaaccaaatcatctggttactctgatccatatgttgtatttacatgcaatgggaagacaaagacaagttcgattaactttcacacccttgaccctcagtggaatgaaatttttgaatttgacgccatggaagatcctccatcagtgatgaaaatacatgtgtatgatttcgatggaccctttgacgaagttgcatcccttggtcatgctgaagtgaatttcttgaaatataataatatatccgagcttgctgacatttggattcctttgaaaggaaagctggctcaagcatgccagtcaaaattgcatctaagaatcttcttaaacaatacaaggggtactgaagtcgtgaaggattacctggataaagtggagaaagaagttggcaaaaagaattcattctacagattgctatgaggtctcctcacacaaacttagcattccagaaaatcttttctttgccaccagaagaatttcttatcaatgattttacttgtcacttaaagaggaaaatgctaacacagggtcgtatttttctatctccaagaatatttgggttttacacaaatctttttggccacaaaacaaaattcttctttctttgggaagatattgaagacatcctactggtccctgcaaccctgtcttccatgggaagtccgtctctggttattattcttcgaaaggacagaggaatggatgcaaagcatggagcaaagcaactggacagtcaagggagactaaagttccatttccagtcttttgtttcattcaatgtggcacataaaacaattacagcactgtggaaggcaaggtccttaacccctgaacaaaaggtacagcttgtagaagaggaatcagaaacagaagacttccaaaatgaggagggagaatctttgttagggatagaggatgccaaaatgtcaggagttttttcatgtacaaaaccttttgatgtatcaacactaatgggcatatttgagggtggtcctttggagtgccgggtgatggagaaagttggctgtatggactactctgttacagcatgggaacctgtcagagctgatatttaccagaggcaagttcattataagtttgacaagaaatcagcacggcacggaggagaagcaatgagcacccagcaaaagtcccctttgtctaataagaatggctggcttgttgaagaagtgatgacacttgaaggtatccctgttggcgaatgtttcaatctccatatccgataccaactggagagcaatgcatccaagcacaagacatgcacaatccaggtatttattggcatagtatggctaaagagctgcaagaaccgaaagaagatcacgcaggatgtagcaaccagtgcatcttctcgcctgaagaagatattcaaccaacttgagaaggaatctataccagcaaagtaggaaccttgtttttgtctgcgtcctacttttgctgctgcacatatgctggcactatgtttgtccttgctggctgctgcccatgctgagcaaagatcagtgacctaatgaggaagttgcagcacaagccaaagccctcaggcagagttttataaagcaacacgaagcaaggaccgcattgcaagatttcagattagagaactaactgtagagcctggaacgtggtttagcttaaccatgtatacataacgttcaaacatcgttctgacttctacaaaaagttaagaggatctgaaattctaaatcttgcctacgcctttttagttagattggaagcaaagatagcttccatgaccacagaaaaataactattcttttcctgttgtaatttctagaagttttgagatattttgtctggtttaaatgcggtgtgtcagcttaatggcaatagccatgacacctctccgccccatgtggaggcggctctctgggaccagttaggcattcacaagtagaggctgcaggtattgaagcatcacccggagcagtacttggtaattttctcagattttagggatcgacagagggtggttcgtcaaggggccattccgcacaggggccgcactttcaactttgaagcatggactgagcgaaggtatggatcgctggctcgttgggaatttcgggtgcaccttcgcattgagg

SEQ ID NO: 199030 - DNA, 1132 bp, Zea Mays
cacatggtgggctcccgtattattttggtttcaagcacttcatgtttttggactcattgatattgcagcgaagcagttgctagggcaagggttggtactgttgctaaggcttccactggaacatttgaagcatggattcttcaaaattgaagctgtacatataccaggcacacctcggccatttatatggaccgacacatataccatatatgcccgatatagcgcactgcaaatccattttaaaaataagtttggaaaggagcaagactataattctgttcaagatgctctgcagaagtgtgtttcactttacaaagagcctcatacacgaaggttggtgaaaaatgctgccaagcaggactacatgatatgcctgacgagcctgatcgatatggttcagagcttgtttcccattccacacataccggggttgcaggagttgctttgcgaggccgaacaaattttaggagagctagaagaagagagtactaggaagaagcaatgatacgtaggaaccaacacccatatgggtggaagcatttgttaattgcaagttgtgagccatatattttttcagttggtcgagatcgcccacctatatgggtggaagcatttgtttgacgaggtgctgaatcgagtgacgggttaaagagtttaatgcttgtttgcgcagtggtgttatgacgtggtcttcaacatagagtcctagtttctcggtggtggtggtccacaagatagatcatgttgctgaaatcttggatgctttctaaatcaaaatccttgacattggcgaccaaaaaaaaagatccctatcaatggcggatggccaaactgaaccaaggattggttttggcatagaagctcttcctaaaagttgtgctggctgtttgcgtaattcttttagatattgtggtcttagactatctctagcaacttactcatctttatctctatatttaaactccacattataaacaatgcactttacaatacaaaacaatattttgcatggctattgtttttaaacttagctttagatatttttttggagaggatagttttaagtggctaaaaaatttgggagcattttttttgccatttttaaaatctcgtttttgcatcataaatccta

SEQ ID NO: 199031 - DNA, 1500 bp, Zea Mays
ctgctctccagtgctttggttgccaatcgcctgtttcccgtctcgcatcagcgtcagcagctgggaggcttgttaactcccttttattaccgctcgggtcgggtggggataagatcgtggcgtcattgccaccggcggggcaatgcaatcgctctgccttgcctctcgatccgttgccccgtccctgttaatctctcgcttgcctacatatttataaggtaaaacaaagcgcgcggtggccatgtcgtccgacgcggtggccgaggccaggaagggccggctgaagcagcgctacgacaacgagttccgcctcgtcgcagggtgcgtgccgtaccgggtgaataagaaggacgacgacgaggtagcaggcagcccgtgcagcagcagcctcggcgacgacacgggcacggccgaggtggaggtgctcatgatctccacgcctaaccgggccgacatggtcttccccaagggcgggtgggaggacgacgaggacgtgtaccaggcggcgtcccgcgagaccatggaggaggccggcgtcaagggcgtcatccacagagctgccttggggcactgggtgttcaagagcaagagcagccaaagcagggccggcccgacgggagcctgcaagggctacatcttcgccatggaggtcacggaggagctggacacgtggccggagcaggacacgcacgaccggcggtgggtcgctcccgccgaagcctaccagctctgccggtacgactggatgcgggaggcgctcaccgcgctgctggagaggctgccggtgctcgaaccggtggtggctgccgcggcggctgcagccacggcggaactgacgaccgaccaagctggcatgtacatgatgctgcaggcgacctcggacggcgctgtggcgctgtgctagctgattgatggacgacattggtgttcgattctcagctagtcacgagtcttcagtatgccctgcaagtgtcgtcggtccagtaacagcagtgagcacatcagtttgcaggcgtttcccgtccaccacattggttttggttttggttggctagcttcagatgttaggacaaataattaaggaaaatttggatccataccattaaaagatcaccactttggatccataccattactatctcacttacatgtgggtccacatgagtcaatgacatgtggggtccatggtatatatgtaaagtttggatcttttaatggtataaatccaattgttccaataattaatgtagtattctgtccccttggcccttgcatgatcaatgcgattagtgagggttgctgtgtcatattccgtggtgtaaatgtaatatgcgaaaaatggtatggcaatttacccatgtcctgtgtctgtaagtgccaataatacccttaaatgtacttactacattgtaaccaatgctgaaaatgaggtggatgctggatgggctattagacagccgtagaacataattcctttgcacaacacgacgtttttattag

SEQ ID NO: 199032 - DNA, 1005 bp, Zea Mays
gcccctcctagtcttccactcttcctccccttctctccggctcccccgaggcccccgacagcgaactcgggactcgccaaccgagaaggaagaactagtcgcgaggtgaagaggagaacctgaggtggtcccgaatcagagacggaagaaggtgggttcaggagcaagccagcctgccgccgccatgaggcgcacctcgaagaaatcgtcgtcgtctacggcgaccgccagcgctggtgtggaacaagtaaatgaaaaacaaaacagaaaaagaaaaggagtcagtacaaacctgaccagcaggaaagcacaacgtggccctactaaagcagtttccaaggaagtagaacggattgatcaatttttctatacttacgctgataactcatctggcatgattgacccagaaggcattgaaacactctgttctcaccttgaagttccccacactgatgttaggattctaatgttagcatggaaaatgggctgtgataagcaaggttattttaccttggatgaatggagaactggcttgaaagctcttcgagctgacagtattagtaaactgaagaaagcatttccagaactggtccaagaggttacaaggccatccaatttccaggatttctacatatatgcatttcgttattgcctcacagaggataagaagaaatgtatagaaataccagttgcttgtgagttgctgaatctagtattaggcttgcagttccgccctcaggttgacaagcttaataattacctcatgtaccaaaatgactacaaggtgataacaatggaccagtggatgggatttattcgtttctgtaatgagataaacttcccatcgcttgacaattatgattcagaccttgcctggcctttgattctagacaattttgttgagtggctacgagaaaataaaagctagatattctattcctgtggtgaagttgtcatccaaaatgtaattttcaagaattttcagcaccccggaggcattagagg

SEQ ID NO: 199033 - DNA, 924 bp, Zea Mays
gcccctcctagtcttccactcttcctccccttctctccggctcccccgaggcccccgacagcgaactcgggactcgccaaccgagaaggaagaactagtcgcgaggtgaagaggagaacctgaggtggtcccgaatcagagacggaagaaggtgggttcaggagcaagccagcctgccgccgccatgaggcgcacctcgaagaaatcgtcgtcgtctacggcgaccgccagcgctggccctactaaagcagtttccaaggaagtagaacggattgatcaatttttctatacttacgctgataactcatctggcatgattgacccagaaggcattgaaacactctgttctcaccttgaagttccccacactgatgttaggattctaatgttagcatggaaaatgggctgtgataagcaaggttattttaccttggatgaatggagaactggcttgaaagctcttcgagctgacagtattagtaaactgaagaaagcatttccagaactggtccaagaggttacaaggccatccaatttccaggatttctacatatatgcatttcgttattgcctcacagaggataagaagaaatgtatagaaataccagttgcttgtgagttgctgaatctagtattaggcttgcagttccgccctcaggttgacaagcttaataattacctcatgtaccaaaatgactacaaggtgataacaatggaccagtggatgggatttattcgtttctgtaatgagataaacttcccatcgcttgacaattatgattcagaccttgcctggcctttgattctagacaattttgttgagtggctacgagaaaataaaagctagatattctattcctgtggtgaagttgtcatccaaaatgtaattttcaagaattttcagcaccccggaggcattagagg

SEQ ID NO: 199034 - DNA, 995 bp, Zea Mays
gcccctcctagtcttccactcttcctccccttctctccggctcccccgaggcccccgacagcgaactcgggactcgccaaccgagaaggaagaactagtcgcgaggtgaagaggagaacctgaggtggtcccgaatcagagacggaagaaggtgggttcaggagcaagccagcctgccgccgccatgaggcgcacctcgaagaaatcgtcgtcgtctacggcgaccgccagcgctgcccagaaggcattgaaacactctgttctcaccttgaagttccccacactgatgttaggattctaatgttagcatggaaaatgggctgtgataagcaaggttattttaccttggatgaatggagaactggcttgaaagctcttcgagctgacagtattagtaaactgaagaaagcatttccagaactggtccaagaggttacaaggccatccaatttccaggatttctacatatatgcatttcgttattgcctcacagaggataagaagaaatgtatagaaataccagttgcttgtgagttgctgaatctagtattaggcttgcagttccgccctcaggttgacaagcttaataattacctcatgtaccaaaatgactacaaggtgataacaatggaccagtggatgggatttattcgtttctgtaatgagataaacttcccatcgcttgacaattatgattcagaccttgcctggcctttgattctagacaattttgttgagtggctacgagaaaataaaagctagatattctattcctgtggtgaagttgtcatccaaaatgtaattttcaagaatgtaggtgactatatcattgtttgcgtttgtaagacatcaattttggaccacccacatgtatatacttcggcagtagtgcaaactcactgataactcccttaccgaattttgtgtttagtagcagttttgggcagccacgttctattccatttaggccttgttctaatattctaattccatat

SEQ ID NO: 199035 - DNA, 1093 bp, Zea Mays
tttgtccaaaacaattgctgctagctgctattgatttggttgatgccaactccaaaactggtggttacattgtttactcaacttgttcgataatgatcccggagaatgaggcagtgattgactatgcacttaaaaagagaaatgtaaaacttgtgccttgcgggttggattttgggcgtccaggattcatccggtaccgggaacatcggtttcatacttctttagaaaagacaagaagattttatcctcatgtcaataacatggatggattttttgtagccaagctgaaaaagttaagcaatacaatcccggtgacttctgagcagcctaaagcgtccgaaggagcagctgagaaggccgatggagaagatgagaaagttatttctaatgaacaggagacagctgttcctggtaaagatgaaaaaactgtgcagatgataaatcataaaaagagtaaggtgactaataaaagaacaagtgtgaccaaagaggctggagggcataaacgtgaacctaataggtcaggaaagcatctcaataaaaataaggataccgataccaaggaagttgatggccctgaaagcactgaaacaaatggagatgggaaagaagagcaacgtgaacaaaccaagcaaacgagccacaaaaggaagatagattctgttaaaactaaaaaatctggccctgtgagcttctcgggtgttcaagagaagaatcaggtgagtggcaagaagacaaaaaggaaatggcaattcaagctgaggcgagactgggaagctgaaaagaaaggtaccaagaggagtaaggtatgagtattcagatatccacaaatcccaatgaaatttgatgcgctgggcaacaaacaattttgaccaagcatgggtttgcacccaggatttttttttggatgtacgaaatagcgattgtaatttgttgtattttattcgatgtgcgtgtagacgagtgacatatctgtcagtgggaactgaagcaaattatcttgatgaatgccatgtgaatcctgctgcttaaatatgtcaaattttagtttctagtgcttatctcccagaaaatatgctgttgtttgtgttgt

SEQ ID NO: 199036 - DNA, 1737 bp, Zea Mays
caaattggcccatactctgtttctaagtttatttgaatgaagtatacgaggagggaatgtgtattgtctattatgttgacaaacaaaacatagttgaaatccagaaaaaagaaaaaagttaacctacggcaggggcatccacgtgttgatgccctactggtcgcctcacatccctcacgataacgaagcgaatcctattgcgacgcagccaccagccaccatcggccatcgctctagccagcccgcccgccagcgagaggtcaaaaaccactacgagccaaaaactggagcccagggaaagcgacgagcaaaccaaacatggcggcgatcctcgcgcgcgccggcgtcatcgccaccgccggcaaaggtttctcgggccgccgccggggcaatggtatcgtcgtcgcggcggtcactaaaacgggggctgctgtgccacaggagggggcgctggaacggccggcgtggtccggcgagaccacgctgtcgcgtctggttggcgcgctcatcgcgttcaagccgctctacgcggtattgaagctcgcctcccgcgaggtcatcatcaggacggcggagaagtcgaacatcccgtggagggagatgacgaaggaggtgctggagtcggacgtgtacgaggtgttcgagagaatccaagacccaaacctcgtgtaccctgactgtcagctcacttcccctttcctttcctttccttcagttccgttgattaatttcagcattatattcgaccaaaagataccctatatgaagtaaagtaaactggagtacataatgctaacgcctcatttctcttgatcagactatctcaacccgtttcatgcctacgacgaagggaatctatcatggctggctgcagcagaggcggagcctgcaacaatgtcgatcgcaaagagggcaatacctgaggctacatcaatcgaagaggccaaccaaattgtccgcggcaactggctgaatgtgattgaggagcatcatctgaagtactcggggaactgtcaggggctcgacctatcaccgtactttcttgctgtggcggcacaaaaggaagaaaaactgtcacggccaaagcctattcgctgggttcatgccaatggtgaagcgaccgggctgtcttcagattcatttgaccttgtctcccttgcttatgtgtgccatgagtgcccagcacgagcaatcacgggattagtgaaggaagcattcagggtccttcgcccgggaggaacaatcgccttaactgacaattcgcctaaatccaaagtgcttcaggaactatccccagttttgttcactctgatgaagagtaccgagcctttcctggacgagtactacatgctggatttggaggagacgatgagaaaagtgggctttgttaacgtttgctccgtcctgacagaccccaggcacagaacagtcactgcaaccgtgccttactaattgggtcagaccatcaaatcccaagcccggccggtgtacaacaattgactatttgaaattttgtatccttactggtatggttgcacctgtataaagtagagcaatctgagtgaaacaacaaatcgaagtacaccaatttaccttccacgcatggacattatgaagtccaacactaggactgttatggtcagatgattcagggaaccaatctaaaaaaaaactcatgtgatattgtagccaggaatcactttcatgaaccttaattaactctgaaatatttatcag

SEQ ID NO: 199037 - DNA, 1215 bp, Zea Mays
ccttccatccatggccgtggccccctccgcgccgcgattcttcccatcctctccctccgcgcggtttgcggctgccaatcctctccctccgcgtcgtgttcttcccatcctctccctccgcgtcggatctctccccatgtccaccaacgccggcgtccgtgatggcgcgcccggggcggcggtggacgcggctttcgccaggcatgcgctccaggccgaggccctcctcgggtacctccccgcactggccaccagcccgcgtgccgggggcaacagggtaaaccccgccgtcgccgcgacgcagctcggggcgctcggccggtggaagggctcggcgaggggccttctcgagtacatggtcgtccacgacatcggtggtgccatcgtcgccgcccctgggagagccaaagccaagcggaggaggccgcagtcgaccggatttgggaatcatgctcctgccaaacgggatgaacggaaggaagcgagatctttctgggttgatttggcttgaaggaagcgggatctttctggacaatggctgtctagcttcatccattctgggaacaaagaaaaaacaagaaacatctggtgtctgagtccagtagaaagttgtgcaaagagaagagcaaaatatctacaccagacgtctcttttaggtacagagggacggagtcttgtaagaaggtagttgcaagcttgaagtcgtgtgagccatgggggaacagggcattctggacaaacgccgttgggccaggttggaagttgagctttgctgttgagccatggactaagggctttagcatgtcgtgtgcggcgccatattctgctggagccacagagcatcaattatcgctcgatgagaaggtggataactccaccgttgcatctgattctgatgggtaaagttatctatcagctagactcatggcgggaaaggttttttctattgtcggtatccagcacctaatggcaattctgtgaagcccaaaggttccaagtcaccatgagaaaattgaaatggcgagatctcttaatctaattgttgcaccttggaaggtctgaaccatcagagtttaattgtatcacccatttacacaagttcctaccatcagagttcaactgtatcacccatccataagcaattccttgtgttgaaatttatgagaagacatatgcctctgttaaggtaaaccttattcttcagttacaaatact

SEQ ID NO: 199038 - DNA, 3319 bp, Zea Mays
atggcgggtgccggtgcgatgggcttcccacgggagctgatggttcagcgtatacagagcttagtggaggaggggttctgggacgcgctccgccgccacaagctcgacgtcctcggcaccgacgactcccccatcccaatcaccggaacaattgcccagttccagggaccctcataaacactaataacatgaggggatttgaaaacctagatagagaacaacttctgaaagcagaagcaaagaagatcttgcatgacattgtgtctggtaaagtagaagaggatccttctgttctacttagattccttgtgacatcatttgctgatttgaagaattggaaggtctattacaatgttgcattcccctcattggttttcaactcaagaatcaccttgctcagcctgcaacctgcctcaaaagtgctcaccaaagaagaggcagcatccatgtatacatcattgcaaaagtggcgtacttctagtgaaacaacagttattccattctttctggttagtatatcctcagattcctctgcctctataagacaacttaaggaatggaaagcttgccaggggaactatcaaaagctgctatttggattttatgaccatggatgccgctcagattgccctggctgggttcttagaaactatgttgcctttctgagcatccgatggaagattgagaaagcccagattttctgctaccgtgaatataaagggaaccctgatctagaacagtccctcattggtgaagcatcatttccatcaccttatggttgggataaccctgaatttctacctgatgctattggatgggaaggagtaaagccagggaagggaacaaaagaaatgaaaccaaaagaaatagatcttcaatcaatgaatccagcaaggatgaagaaaaacaattgatgcacttaaagcttatggggtggcgccactttcctgtgaatatagacaggttatcacatgttcgagttcttctcttgggtgctggaactcttggatgcgaagttgctcgccttcttatgacctggggtgtacggaaactaacggttgttgatagtggtagtgttgttatgtctgaccttgccaagcaatcactctacatagataaggattgtggagttccaagagtatctgcaatagctccacatctgaaagaaagatgtcctgcagtggaggttgaaagcatccaactggaaataccgatgcctgggcatcctgtttcttccagcaaaatggcaagtgtgcttgatgactgcaagcatctgcaaaccttagtggctgccaatgatgcaatcttcttgttaactgacacatgggagagcaggtggcttccaactcttctctgttcaagtgaaaacaagattgctattagtgcattattaggacatgacagttaccttgtcatgcgacatggtgctggaccaggaacaagtgggggtacagatgaagtgactactcagaaattgtccacagaaaatgctcttggtcatcaaagattgggctgttgtttctgcaatgataccgcttcccttattaatccaatttcttatgaaacactacctggacttacctcagttgcatctggcaaagcagtggagctctttgctaggatgttacatcatcctgacgagatacgggccccaggcgatactgctggtacagaaacagaacatcaacttggtctattgccacatcagctacgaggatcactccccaagtgtgatttatttgtggagctcaacaattcctcagtcaactgtactgcatgttctgttgctgtattgtcggagtatagaagaagaggattggattttgtcatgcaggctatcaactatccagcatatctgaaagattttacaggcatttctgattcgaaaagaccagatacttgtcctaaaataccgcccaacatctctgtaaattcagacaagatttctgatgtccgatgtctactattgggtgctggaactcttggatgtgatgtcgctcgcattcttatggactgtggtgtacggaagataacagtagttgatagtggtcatgtagttgtgtcaaatttagcgagacaatcactctatacttctgatgaccgtggtgctccaaaagcaactgcaatacttaggcatctagtggagagatgtccttcagtggatgcacaaggcattaaaatggaaatacctatgcctgggcatcctgtgtctcctggtgaagcagcgggtgtgctccaagattgcgagcgccttaaggaattggtgttgtcccacgatgctatcttcttgttgaccgacacaagagaaagcaggtggcttccaactctcctatgcactaacgaaaacaagattgctatcactgcagcattagggtatgatagttaccttgtcatgcgacatggggctggccctggcataagctgtgaagcttccagtgtggtcactgccatagacaagatgtccacggaggatgcccttgggcgtcaaaggctggggtgttatttctgcaatgacgtcattgctcctgtcgactcagtttccaatcggacactggatcaacaatgtacagtgacacgaccggggttggcctctattgcatcaggacgcgctgcagacctcttcagaagaatgttacaccatcctgatgggatacatgctccaggagagattgctggtacaggcagtggtcatgagcacggccttttacctcaccagatgcgtggatcactatcgcagtacaacatattaaccctgttgggctattcctcgagtaattgcacggcatgctcccatgcggtattgtatcaatatcggaggagagggatggatttcgtgatgcaagtaatcaatgaaccaacctatttggaagacctgaccggcctcacggagttgatgaaatccgcgtcttgctcacaggtcgagtgggtagatgaaattgatgaagacgatttcgtcgaggtctgatatgttacatggttttgacgactggtagatagtatcattctttacaacatggtaaagagatgacgaagcaatcaaagcaaccaccctatatatttgtaactcgctgctagctttttactctgtccgtcttaaaatgtaattcgttttaggctaaacctacattcattaatctgctccgtctcaaaatgtaattcattttaggctaaacctacattcattaatcaggtactcgtgaatgtagcttgaatgtatgtctacatttataatcattcaaataatttgaatgtggacttaaaaaaaagagggatatatattttgatacggggtgattatatatttgtaacgtacaaaaac

SEQ ID NO: 199039 - DNA, 3418 bp, Zea Mays
atggcgggtgccggtgcgatgggcttcccacgggagctgatggttcagcgtatacagagcttagtggaggaggggttctgggacgcgctccgccgccacaagctcgacgtcctcggcaccgacgactcccccatcccaatcaccggttattatactccgcgccagcgtcgcccgatggcaagcttcttcaacctacggtccggatcattggtgccaccatctcacagttctgttggcgacaggaacaattgcccagttccagggaccctcataaacactaataacatgaggggatttgaaaacctagatagagaacaacttctgaaagcagaagcaaagaagatcttgcatgacattgtgtctggtaaagtagaagaggatccttctgttctacttagattccttgtgacatcatttgctgatttgaagaattggaaggtctattacaatgttgcattcccctcattggttttcaactcaagaatcaccttgctcagcctgcaacctgcctcaaaagtgctcaccaaagaaggcagcatccatgtatacatcattgcaaaagtggcgtacttctagtgaaacaacagttattccattctttctggttagtatatcctcagattcctctgcctctataagacaacttaaggaatggaaagcttgccaggggaactatcaaaagctgctatttggattttatgaccatggatgccgctcagattgccctggctgggttcttagaaactatgttgcctttctgagcatccgatggaagattgagaaagcccagattttctgctaccgtgaatataaagggaaccctgatctagaacagtccctcattggtgaagcatcatttccatcaccttatggttgggataaccctgaatttctacctgatgctattggatgggaaggagtaaagccagggaagggaacaaaagaaatgaaaccaaaagaaatagatcttcaatcaatgaatccagcaagtcaggatgaagaaaaacaattgatgcacttaaagcttatggggtggcgccactttcctgtgaatatagacaggttatcacatgttcgagttcttctcttgggtgctggaactcttggatgcgaagttgctcgccttcttatgacctggggtgtacggaaactaacggttgttgatagtggtagtgttgttatgtctgaccttgccaagcaatcactctacatagataaggattgtggagttccaagagtatctgcaatagctccacatctgaaagaaagatgtcctgcagtggaggttgaaagcatccaactggaaataccgatgcctgggcatcctgtttcttccagcaaaatggcaagtgtgcttgatgactgcaagcatctgcaaaccttagtggctgccaatgatgcaatcttcttgttaactgacacatgggagagcaggtggcttccaactcttctctgttcaagtgaaaacaagattgctattagtgcattattaggacatgacagttaccttgtcatgcgacatggtgctggaccaggaacaagtgggggtacagatgaagtgactactcagaaattgtccacagaaaatgctcttggtcatcaaagattgggctgttgtttctgcaatgataccgcttcccttattaatccaatttcttatgaaacactacctggacttacctcagttgcatctggcaaagcagtggagctctttgctaggatgttacatcatcctgacgagatacgggccccaggcgatactgctggtacagaaacagaacatcaacttggtctattgccacatcagctacgaggatcactccccaagtgtgatttatttgtggagctcaacaattcctcagtcaactgtactgcatgttctgttgctgtattgtcggagtatagaagaagaggattggattttgtcatgcaggctatcaactatccagcatatctgaaagattttacaggcatttctgattcgaaaagaccagatacttgtcctaaaataccgcccaacatctctgtaaattcagacaagatttctgatgtccgatgtctactattgggtgctggaactcttggatgtgatgtcgctcgcattcttatggactgtggtgtacggaagataacagtagttgatagtggtcatgtagttgtgtcaaatttagcgagacaatcactctatacttctgatgaccgtggtgctccaaaagcaactgcaatacttaggcatctagtggagagatgtccttcagtggatgcacaaggcattaaaatggaaatacctatgcctgggcatcctgtgtctcctggtgaagcagcgggtgtgctccaagattgcgagcgccttaaggaattggtgttgtcccacgatgctatcttcttgttgaccgacacaagagaaagcaggtggcttccaactctcctatgcactaacgaaaacaagattgctatcactgcagcattagggtatgatagttaccttgtcatgcgacatggggctggccctggcataagctgtgaagcttccagtgtggtcactgccatagacaagatgtccacggaggatgcccttgggcgtcaaaggctggggtgttatttctgcaatgacgtcattgctcctgtcgactcagtttccaatcggacactggatcaacaatgtacagtgacacgaccggggttggcctctattgcatcaggacgcgctgcagacctcttcagaagaatgttacaccatcctgatgggatacatgctccaggagagattgctggtacaggcagtggtcatgagcacggccttttacctcaccagatgcgtggatcactatcgcagtacaacatattaaccctgttgggctattcctcgagtaattgcacggcatgctcccatgcggtattgtatcaatatcggaggagagggatggatttcgtgatgcaagtaatcaatgaaccaacctatttggaagacctgaccggcctcacggagttgatgaaatccgcgtcttgctcacaggtcgagtgggtagatgaaattgatgaagacgatttcgtcgaggtctgatatgttacatggttttgacgactggtagatagtatcattctttacaacatggtaaagagatgacgaagcaatcaaagcaaccaccctatatatttgtaactcgctgctagctttttactctgtccgtcttaaaatgtaattcgttttaggctaaacctacattcattaatctgctccgtctcaaaatgtaattcattttaggctaaacctacattcattaatcaggtactcgtgaatgtagcttgaatgtatgtctacatttataatcattcaaataatttgaatgtggacttaaaaaaaagagggatatatattttgatacggggtgattatatatttgtaacgtacaaaaac

SEQ ID NO: 199040 - DNA, 3453 bp, Zea Mays
cgccttgccggcggagggaagacggaagacgagaggtatggcgggtgccggtgcgatgggcttcccacgggagctgatggttcagcgtatacagagcttagtggaggaggggttctgggacgcgctccgccgccacaagctcgacgtcctcggcaccgacgactcccccatcccaatcaccggttattatactccgcgccagcgtcgcccgatggcaagcttcttcaacctacggtccggatcattggtgccaccatctcacagttctgttggcgacaggaacaattgcccagttccagggaccctcataaacactaataacatgaggggatttgaaaacctagatagagaacaacttctgaaagcagaagcaaagaagatcttgcatgacattgtgtctggtaaagtagaagaggatccttctgttctacttagattccttgtgacatcatttgctgatttgaagaattggaaggtctattacaatgttgcattcccctcattggttttcaactcaagaatcaccttgctcagcctgcaacctgcctcaaaagtgctcaccaaagaagaggcagcatccatgtatacatcattgcaaaagtggcgtacttctagtgaaacaacagttattccattctttctggttagtatatcctcagattcctctgcctctataagacaacttaaggaatggaaagcttgccaggggaactatcaaaagctgctatttggattttatgaccatggatgccgctcagattgccctggctgggttcttagaaactatgttgcctttctgagcatccgatggaagattgagaaagcccagattttctgctaccgtgaatataaagggaaccctgatctagaacagtccctcattggtgaagcatcatttccatcaccttatggttgggataaccctgaatttctacctgatgctattggatgggaaggagtaaagccagggaagggaacaaaagaaatgaaaccaaaagaaatagatcttcaatcaatgaatccagcaagtcaggatgaagaaaaacaattgatgcacttaaagcttatggggtggcgccactttcctgtgaatatagacaggttatcacatgttcgagttcttctcttgggtgctggaactcttggatgcgaagttgctcgccttcttatgacctggggtgtacggaaactaacggttgttgatagtggtagtgttgttatgtctgaccttgccaagcaatcactctacatagataaggattgtggagttccaagagtatctgcaatagctccacatctgaaagaaagatgtcctgcagtggaggttgaaagcatccaactggaaataccgatgcctgggcatcctgtttcttccagcaaaatggcaagtgtgcttgatgactgcaagcatctgcaaaccttagtggctgccaatgatgcaatcttcttgttaactgacacatgggagagcaggtggcttccaactcttctctgttcaagtgaaaacaagattgctattagtgcattattaggacatgacagttaccttgtcatgcgacatggtgctggaccaggaacaagtgggggtacagatgaagtgactactcagaaattgtccacagaaaatgctcttggtcatcaaagattgggctgttgtttctgcaatgataccgcttcccttattaatccaatttcttatgaaacactacctggacttacctcagttgcatctggcaaagcagtggagctctttgctaggatgttacatcatcctgacgagatacgggccccaggcgatactgctggtacagaaacagaacatcaacttggtctattgccacatcagctacgaggatcactccccaagtgtgatttatttgtggagctcaacaattcctcagtcaactgtactgcatgttctgttgctgtattgtcggagtatagaagaagaggattggattttgtcatgcaggctatcaactatccagcatatctgaaagattttacaggcatttctgattcgaaaagaccagatacttgtcctaaaataccgcccaacatctctgtaaattcagacaagatttctgatgtccgatgtctactattgggtgctggaactcttggatgtgatgtcgctcgcattcttatggactgtggtgtacggaagataacagtagttgatagtggtcatgtagttgtgtcaaatttagcgagacaatcactctatacttctgatgaccgtggtgctccaaaagcaactgcaatacttaggcatctagtggagagatgtccttcagtggatgcacaaggcattaaaatggaaatacctatgcctgggcatcctgtgtctcctggtgaagcagcgggtgtgctccaagattgcgagcgccttaaggaattggtgttgtcccacgatgctatcttcttgttgaccgacacaagagaaagcaggtggcttccaactctcctatgcactaacgaaaacaagattgctatcactgcagcattagggtatgatagttaccttgtcatgcgacatggggctggccctggcataagctgtgaagcttccagtgtggtcactgccatagacaagatgtccacggaggatgcccttgggcgtcaaaggctggggtgttatttctgcaatgacgtcattgctcctgtcgactttccaatcggacactggatcaacaatgtacagtgacacgaccggggttggcctctattgcatcaggacgcgctgcagacctcttcagaagaatgttacaccatcctgatgggatacatgctccaggagagattgctggtacaggcagtggtcatgagcacggccttttacctcaccagatgcgtggatcactatcgcagtacaacatattaaccctgttgggctattcctcgagtaattgcacggcatgctcccatgcggtattgtatcaatatcggaggagagggatggatttcgtgatgcaagtaatcaatgaaccaacctatttggaagacctgaccggcctcacggagttgatgaaatccgcgtcttgctcacaggtcgagtgggtagatgaaattgatgaagacgatttcgtcgaggtctgatatgttacatggttttgacgactggtagatagtatcattctttacaacatggtaaagagatgacgaagcaatcaaagcaaccaccctatatatttgtaactcgctgctagctttttactctgtccgtcttaaaatgtaattcgttttaggctaaacctacattcattaatctgctccgtctcaaaatgtaattcattttaggctaaacctacattcattaatcaggtactcgtgaatgtagcttgaatgtatgtctacatttataatcattcaaataatttgaatgtggacttaaaaaaaagagggatatatattttgatacggggtgattatatatttgtaacgtacaaaaac

SEQ ID NO: 199041 - DNA, 3309 bp, Zea Mays
ggcaaactagaaaataaaaactagaaacgaagtgtagcgccgctcgccttgccggcggagggaagacggaagacgagaggtatggcgggtgccggtgcgatgggcttcccacgggagctgatggttcagcgtatacagagcttagtggaggaggggttctgggacgcgctccgccgccacaagctcgacgtcctcggcaccgacgactcccccatcccaatcaccggttattatactccgcgccagcgtcgcccgatggcaagcttcttcaacctacggtccggatcattggtgccaccatctcacagttctgttggcgacaggaacaattgcccagttccagggaccctcataaacactaataacatgaggggatttgaaaacctagatagagaacaacttctgaaagcagaagcaaagaaggcagcatccatgtatacatcattgcaaaagtggcgtacttctagtgaaacaacagttattccattctttctggttagtatatcctcagattcctctgcctctataagacaacttaaggaatggaaagcttgccaggggaactatcaaaagctgctatttggattttatgaccatggatgccgctcagattgccctggctgggttcttagaaactatgttgcctttctgagcatccgatggaagattgagaaagcccagattttctgctaccgtgaatataaagggaaccctgatctagaacagtccctcattggtgaagcatcatttccatcaccttatggttgggataaccctgaatttctacctgatgctattggatgggaaggagtaaagccagggaagggaacaaaagaaatgaaaccaaaagaaatagatcttcaatcaatgaatccagcaagtcaggatgaagaaaaacaattgatgcacttaaagcttatggggtggcgccactttcctgtgaatatagacaggttatcacatgttcgagttcttctcttgggtgctggaactcttggatgcgaagttgctcgccttcttatgacctggggtgtacggaaactaacggttgttgatagtggtagtgttgttatgtctgaccttgccaagcaatcactctacatagataaggattgtggagttccaagagtatctgcaatagctccacatctgaaagaaagatgtcctgcagtggaggttgaaagcatccaactggaaataccgatgcctgggcatcctgtttcttccagcaaaatggcaagtgtgcttgatgactgcaagcatctgcaaaccttagtggctgccaatgatgcaatcttcttgttaactgacacatgggagagcaggtggcttccaactcttctctgttcaagtgaaaacaagattgctattagtgcattattaggacatgacagttaccttgtcatgcgacatggtgctggaccaggaacaagtgggggtacagatgaagtgactactcagaaattgtccacagaaaatgctcttggtcatcaaagattgggctgttgtttctgcaatgataccgcttcccttattaatccaatttcttatgaaacactacctggacttacctcagttgcatctggcaaagcagtggagctctttgctaggatgttacatcatcctgacgagatacgggccccaggcgatactgctggtacagaaacagaacatcaacttggtctattgccacatcagctacgaggatcactccccaagtgtgatttatttgtggagctcaacaattcctcagtcaactgtactgcatgttctgttgctgtattgtcggagtatagaagaagaggattggattttgtcatgcaggctatcaactatccagcatatctgaaagattttacaggcatttctgattcgaaaagaccagatacttgtcctaaaataccgcccaacatctctgtaaattcagacaagatttctgatgtccgatgtctactattgggtgctggaactcttggatgtgatgtcgctcgcattcttatggactgtggtgtacggaagataacagtagttgatagtggtcatgtagttgtgtcaaatttagcgagacaatcactctatacttctgatgaccgtggtgctccaaaagcaactgcaatacttaggcatctagtggagagatgtccttcagtggatgcacaaggcattaaaatggaaatacctatgcctgggcatcctgtgtctcctggtgaagcagcgggtgtgctccaagattgcgagcgccttaaggaattggtgttgtcccacgatgctatcttcttgttgaccgacacaagagaaagcaggtggcttccaactctcctatgcactaacgaaaacaagattgctatcactgcagcattagggtatgatagttaccttgtcatgcgacatggggctggccctggcataagctgtgaagcttccagtgtggtcactgccatagacaagatgtccacggaggatgcccttgggcgtcaaaggctggggtgttatttctgcaatgacgtcattgctcctgtcgactcagtttccaatcggacactggatcaacaatgtacagtgacacgaccggggttggcctctattgcatcaggacgcgctgcagacctcttcagaagaatgttacaccatcctgatgggatacatgctccaggagagattgctggtacaggcagtggtcatgagcacggccttttacctcaccagatgcgtggatcactatcgcagtacaacatattaaccctgttgggctattcctcgagtaattgcacggcatgctcccatgcggtattgtatcaatatcggaggagagggatggatttcgtgatgcaagtaatcaatgaaccaacctatttggaagacctgaccggcctcacggagttgatgaaatccgcgtcttgctcacaggtcgagtgggtagatgaaattgatgaagacgatttcgtcgaggtctgatatgttacatggttttgacgactggtagatagtatcattctttacaacatggtaaagagatgacgaagcaatcaaagcaaccaccctatatatttgtaactcgctgctagctttttactctgtccgtcttaaaatgtaattcgttttaggctaaacctacattcattaatctgctccgtctcaaaatgtaattcattttaggctaaacctacattcattaatcaggtactcgtgaatgtagcttgaatgtatgtctacatttataatcattcaaataatttgaatgtggacttaaaaaaaagagggatatatattttgatacggggtgattatatatttgtaacgtacaaaaac

SEQ ID NO: 199042 - DNA, 3420 bp, Zea Mays
tcctccgaacccggggggcaaactagaaaataaaaactagaaacgaagtgtagcgccgctcgccttgccggcggagggaagacggaagacgagaggtatggcgggtgccggtgcgatgggcttcccacgggagctgatggttcagcgtatacagagcttagtggaggaggggttctgggacgcgctccgccgccacaagctcgacgtcctcggcaccgacgactcccccatcccaatcaccggaacaattgcccagttccagggaccctcataaacactaataacatgaggggatttgaaaacctagatagagaacaacttctgaaagcagaagcaaagaagatcttgcatgacattgtgtctggtaaagtagaagaggatccttctgttctacttagattccttgtgacatcatttgctgatttgaagaattggaaggtctattacaatgttgcattcccctcattggttttcaactcaagaatcaccttgctcagcctgcaacctgcctcaaaagtgctcaccaaagaagaggcagcatccatgtatacatcattgcaaaagtggcgtacttctagtgaaacaacagttattccattctttctggttagtatatcctcagattcctctgcctctataagacaacttaaggaatggaaagcttgccaggggaactatcaaaagctgctatttggattttatgaccatggatgccgctcagattgccctggctgggttcttagaaactatgttgcctttctgagcatccgatggaagattgagaaagcccagattttctgctaccgtgaatataaagggaaccctgatctagaacagtccctcattggtgaagcatcatttccatcaccttatggttgggataaccctgaatttctacctgatgctattggatgggaaggagtaaagccagggaagggaacaaaagaaatgaaaccaaaagaaatagatcttcaatcaatgaatccagcaagtcaggatgaagaaaaacaattgatgcacttaaagcttatggggtggcgccactttcctgtgaatatagacaggttatcacatgttcgagttcttctcttgggtgctggaactcttggatgcgaagttgctcgccttcttatgacctggggtgtacggaaactaacggttgttgatagtggtagtgttgttatgtctgaccttgccaagcaatcactctacatagataaggattgtggagttccaagagtatctgcaatagctccacatctgaaagaaagatgtcctgcagtggaggttgaaagcatccaactggaaataccgatgcctgggcatcctgtttcttccagcaaaatggcaagtgtgcttgatgactgcaagcatctgcaaaccttagtggctgccaatgatgcaatcttcttgttaactgacacatgggagagcaggtggcttccaactcttctctgttcaagtgaaaacaagattgctattagtgcattattaggacatgacagttaccttgtcatgcgacatggtgctggaccaggaacaagtgggggtacagatgaagtgactactcagaaattgtccacagaaaatgctcttggtcatcaaagattgggctgttgtttctgcaatgataccgcttcccttattaatccaatttcttatgaaacactacctggacttacctcagttgcatctggcaaagcagtggagctctttgctaggatgttacatcatcctgacgagatacgggccccaggcgatactgctggtacagaaacagaacatcaacttggtctattgccacatcagctacgaggatcactccccaagtgtgatttatttgtggagctcaacaattcctcagtcaactgtactgcatgttctgttgctgtattgtcggagtatagaagaagaggattggattttgtcatgcaggctatcaactatccagcatatctgaaagattttacaggcatttctgattcgaaaagaccagatacttgtcctaaaataccgcccaacatctctgtaaattcagacaagatttctgatgtccgatgtctactattgggtgctggaactcttggatgtgatgtcgctcgcattcttatggactgtggtgtacggaagataacagtagttgatagtggtcatgtagttgtgtcaaatttagcgagacaatcactctatacttctgatgaccgtggtgctccaaaagcaactgcaatacttaggcatctagtggagagatgtccttcagtggatgcacaaggcattaaaatggaaatacctatgcctgggcatcctgtgtctcctggtgaagcagcgggtgtgctccaagattgcgagcgccttaaggaattggtgttgtcccacgatgctatcttcttgttgaccgacacaagagaaagcaggtggcttccaactctcctatgcactaacgaaaacaagattgctatcactgcagcattagggtatgatagttaccttgtcatgcgacatggggctggccctggcataagctgtgaagcttccagtgtggtcactgccatagacaagatgtccacggaggatgcccttgggcgtcaaaggctggggtgttatttctgcaatgacgtcattgctcctgtcgactcagtttccaatcggacactggatcaacaatgtacagtgacacgaccggggttggcctctattgcatcaggacgcgctgcagacctcttcagaagaatgttacaccatcctgatgggatacatgctccaggagagattgctggtacaggcagtggtcatgagcacggccttttacctcaccagatgcgtggatcactatcgcagtacaacatattaaccctgttgggctattcctcgagtaattgcacggcatgctcccatgcggtattgtatcaatatcggaggagagggatggatttcgtgatgcaagtaatcaatgaaccaacctatttggaagacctgaccggcctcacggagttgatgaaatccgcgtcttgctcacaggtcgagtgggtagatgaaattgatgaagacgatttcgtcgaggtctgatatgttacatggttttgacgactggtagatagtatcattctttacaacatggtaaagagatgacgaagcaatcaaagcaaccaccctatatatttgtaactcgctgctagctttttactctgtccgtcttaaaatgtaattcgttttaggctaaacctacattcattaatctgctccgtctcaaaatgtaattcattttaggctaaacctacattcattaatcaggtactcgtgaatgtagcttgaatgtatgtctacatttataatcattcaaataatttgaatgtggacttaaaaaaaagagggatatatattttgatacggggtgattatatatttgtaacgtacaaaaac

SEQ ID NO: 199043 - DNA, 3515 bp, Zea Mays
cttcctccgaacccggggggcaaactagaaaataaaaactagaaacgaagtgtagcgccgctcgccttgccggcggagggaagacggaagacgagaggtatggcgggtgccggtgcgatgggcttcccacgggagctgatggttcagcgtatacagagcttagtggaggaggggttctgggacgcgctccgccgccacaagctcgacgtcctcggcaccgacgactcccccatcccaatcaccggttattatactccgcgccagcgtcgcccgatggcaagcttcttcaacctacggtccggatcattggtgccaccatctcacagttctgttggcgacaggaacaattgcccagttccagggaccctcataaacactaataacatgaggggatttgaaaacctagatagagaacaacttctgaaagcagaagcaaagaagatcttgcatgacattgtgtctggtaaagtagaagaggatccttctgttctacttagattccttgtgacatcatttgctgatttgaagaattggaaggtctattacaatgttgcattcccctcattggttttcaactcaagaatcaccttgctcagcctgcaacctgcctcaaaagtgctcaccaaagaagaggcagcatccatgtatacatcattgcaaaagtggcgtacttctagtgaaacaacagttattccattctttctggttagtatatcctcagattcctctgcctctataagacaacttaaggaatggaaagcttgccaggggaactatcaaaagctgctatttggattttatgaccatggatgccgctcagattgccctggctgggttcttagaaactatgttgcctttctgagcatccgatggaagattgagaaagcccagattttctgctaccgtgaatataaagggaaccctgatctagaacagtccctcattggtgaagcatcatttccatcaccttatggttgggataaccctgaatttctacctgatgctattggatgggaaggagtaaagccagggaagggaacaaaagaaatgaaaccaaaagaaatagatcttcaatcaatgaatccagcaaggatgaagaaaaacaattgatgcacttaaagcttatggggtggcgccactttcctgtgaatatagacaggttatcacatgttcgagttcttctcttgggtgctggaactcttggatgcgaagttgctcgccttcttatgacctggggtgtacggaaactaacggttgttgatagtggtagtgttgttatgtctgaccttgccaagcaatcactctacatagataaggattgtggagttccaagagtatctgcaatagctccacatctgaaagaaagatgtcctgcagtggaggttgaaagcatccaactggaaataccgatgcctgggcatcctgtttcttccagcaaaatggcaagtgtgcttgatgactgcaagcatctgcaaaccttagtggctgccaatgatgcaatcttcttgttaactgacacatgggagagcaggtggcttccaactcttctctgttcaagtgaaaacaagattgctattagtgcattattaggacatgacagttaccttgtcatgcgacatggtgctggaccaggaacaagtgggggtacagatgaagtgactactcagaaattgtccacagaaaatgctcttggtcatcaaagattgggctgttgtttctgcaatgataccgcttcccttattaatccaatttcttatgaaacactacctggacttacctcagttgcatctggcaaagcagtggagctctttgctaggatgttacatcatcctgacgagatacgggccccaggcgatactgctggtacagaaacagaacatcaacttggtctattgccacatcagctacgaggatcactccccaagtgtgatttatttgtggagctcaacaattcctcagtcaactgtactgcatgttctgttgctgtattgtcggagtatagaagaagaggattggattttgtcatgcaggctatcaactatccagcatatctgaaagattttacaggcatttctgattcgaaaagaccagatacttgtcctaaaataccgcccaacatctctgtaaattcagacaagatttctgatgtccgatgtctactattgggtgctggaactcttggatgtgatgtcgctcgcattcttatggactgtggtgtacggaagataacagtagttgatagtggtcatgtagttgtgtcaaatttagcgagacaatcactctatacttctgatgaccgtggtgctccaaaagcaactgcaatacttaggcatctagtggagagatgtccttcagtggatgcacaaggcattaaaatggaaatacctatgcctgggcatcctgtgtctcctggtgaagcagcgggtgtgctccaagattgcgagcgccttaaggaattggtgttgtcccacgatgctatcttcttgttgaccgacacaagagaaagcaggtggcttccaactctcctatgcactaacgaaaacaagattgctatcactgcagcattagggtatgatagttaccttgtcatgcgacatggggctggccctggcataagctgtgaagcttccagtgtggtcactgccatagacaagatgtccacggaggatgcccttgggcgtcaaaggctggggtgttatttctgcaatgacgtcattgctcctgtcgactcagtttccaatcggacactggatcaacaatgtacagtgacacgaccggggttggcctctattgcatcaggacgcgctgcagacctcttcagaagaatgttacaccatcctgatgggatacatgctccaggagagattgctggtacaggcagtggtcatgagcacggccttttacctcaccagatgcgtggatcactatcgcagtacaacatattaaccctgttgggctattcctcgagtaattgcacggcatgctcccatgcggtattgtatcaatatcggaggagagggatggatttcgtgatgcaagtaatcaatgaaccaacctatttggaagacctgaccggcctcacggagttgatgaaatccgcgtcttgctcacaggtcgagtgggtagatgaaattgatgaagacgatttcgtcgaggtctgatatgttacatggttttgacgactggtagatagtatcattctttacaacatggtaaagagatgacgaagcaatcaaagcaaccaccctatatatttgtaactcgctgctagctttttactctgtccgtcttaaaatgtaattcgttttaggctaaacctacattcattaatctgctccgtctcaaaatgtaattcattttaggctaaacctacattcattaatcaggtactcgtgaatgtagcttgaatgtatgtctacatttataatcattcaaataatttgaatgtggacttaaaaaaaagagggatatatattttgatacggggtgattatatatttgtaacgtacaaaaac

SEQ ID NO: 199044 - DNA, 3241 bp, Zea Mays
tccgcgccgtaaaaaattggacgttcccgctccctccatctttttggttcgggtttcgttttcccactgccgctcccgcctcctctctgccctgtttccacatttgaccgatcctcttcgattcgatttctacacccccagagcttgccaaacccctcgtctcccaaccctagagagcagcagcagcagcagcagctaccgcatcccttgccatggcgccaagctccccgtcatccgctaggcccacgcgcgcctccggccggaagcgctccgccatggccgaggagatccaccagaaccaggaggaggaggaggaggttgtggctgcgtccaccgccaagcgcagacgcaaggcggcgtcttccgggaagaagcccaagccgacgcccaagcaggccaaaccggccgtggcggggatgaagaagaagggggagaccgagaagacggagcccgttgtggacgacgtgtgcgccgaggagcccgacgaggaggagttggccatgggcgaggaggaggcggaggccgaggagcaggccatgcaggaggtggtggccgcggtcgcggccgggtcgcccggtaagaagagggtggggagaaggagcgccgccgcctcgggcgaccacgtgcccgagttcatcggcagccccgttgctgcggccgaggcgcacagcaactggcccaagcgctacgagcgcagcactgccgcaaataaaccggaggaggacgatgagctcaaggccaggtgccactaccggagcgctaaggtggacaacattgtctactgcctcggggatgacgtttatgtcaaggctggagaaaatgaggctgattacattggtcgcattactgaattttttgagggcactgatcgatgccactattttacttgccgttggtttttccgtgcagaggacacggtcatcaattcgttggtgtcgattaatgttgatggccacaagcatgaccctagacgtgtttttctttccgaggaaaagaatgacaatgtgcttgattgcatcatctccaaggtcaagatagtccatgttgatccaaatatggatccaaaagctaaggcccaactgatagaacattgtgacctatactatgacatgtcttactctgttgcatattctacatttgctaatatctcatcagaaaatgggcagtcaggcagtgaaaccgcttcgggtatttcttctgatgatgcgggtttggagacgtcatctaatatgccagagaggacagcaacccttcttgacttgtattcgggctgtgggggcatgtccactggtctttgcttgggtgctgctctttctggcctgaaacttgaaactcgatgggctgttgatcttaacagttttgcgtgccaaagtttaaaatacaatcatccacagactgaggtgcgaaatgagaaagctgatgagtttcttgctctccttaaggaatgggcagtcttatgtgaaaaatatgttcatcaagacgtggattcgaatttagcaggttcagaggatcaagaggatgctgacactcttgacaaggatgaatttgttgtacagaagcttattggaatacgctatgatggcactggaaggaaaaaaggcgtatattttaaggtccaatgggaaggatatggtcctgaagaggatacatgggaacctattgataacctgagtgactgtccgctgaaaattagagaatttgtacaagaagggcgcaaaagaaaaattctcccgcttcctggtgatgttgatgtcatttgtggaggcccaccatgtcaaggtataagtgggtttaatcggttcaggaaccgtgatgagccacttaaagatgagaaaaacaagcaaatggtgactttcatggatattgtggcatacttgaagcccaagtatgttctcatggaaaatgtcgtggacatactgaaatttgctgatggctacctaggaaaatatgctttgagctgcctagttgctatgaagtaccaagcacgccttggaatgatggtggcaggctgctatggtctgccacagttcaggatgcgtgtgttcctctggggtgctctttcttccatggtgctccctaagtatcctctgcctacatatgacgttgtagtacgtggaggagcacctaatgccttttcgcaatgtatggttgcatatgatgagacacaaaggccatccctgaagaaagctttgcttcttggtgatgcattttcagatttaccaaaggtcgaaaaccatcaacctaacgatgtaatggagtatggtggttcccccaagacagagttccagcgctacattcgacttggtcgtaaagacatgttggattggtcgtttggtgaggaggctggtccagatgaaggcaagctcttggatcaccagcccttacggcttaacaatgatgattatgagcgggttaagcaaattcctgtcaagaagggagccaacttccgtgacctaaagggtgtcaaggttggagcaaataatgttgttgagtgggatccagaagtcgaacgtgtgtacctttcgtctgggaaaccactggttcctgactatgcgatgtcattcatcaagggcaaatcactcaagccattcgggcgcctgtggtgggacgagacggttcctacagttgtgaccagagcagagcctcataaccaggttatattgcatccgactcaagcaagagtcttgactatccgggagaacgcaaggttacagggcttccccgattactaccgattgtttggaccgatcaaggagaagtatattcaagtcgggaacgcagtggcagtccctgttgcacgggcactgggctactgtctgggtcaagcctacctgggtgaatctgacgggagtcagcctctgtaccagctgcctgcaagttttacctctgtggggcgaaccgcggttcaggcgaatgccgtttctgttggcactcctgcgggggaggtagtcgagcagtaaaaggatagcggagcaaccctgggtgtactcgagctcgagtgcttgttgtactgtaggttgaggtttctcatccattggcctgcctatttgtggatgacgtttcatttcagattagcaatgtgcttatttaaggtttcgtcatgtacctgtattctacaatccactattgtttccaaagacagcatttgatccttgttcaacgcgagcagattttcgtccaccaaagctgtgtagggatcgaaatgtcaacaatgaattgagtcattcaatcatttgtctaa

SEQ ID NO: 199045 - DNA, 2549 bp, Zea Mays
gtttcgttttcccactgccgctcccgcctcctctctgccctgtttccacatttgaccgatcctcttcgattcgatttctacacccccagagcttgccaaacccctcgtctcccaaccctagagagcagcagcagcagcagcagctaccgcatcccttgccatggcgccaagctccccgtcatccgctaggcccacgcgcgcctccggccggaagcgctccgccatggccgaggagatccaccagaaccaggaggaggaggaggaggttgtggctgcgtccaccgccaagcgcagacgcaaggcggcgtcttccgggaagaagcccaagccgacgcccaagcaggccaaaccggccgtggcggggatgaagaagaagggggagaccgagaagacggagcccgttgtggacgacgtgtgcgccgaggagcccgacgaggaggagttggccatgggcgaggaggaggcggaggccgaggagcaggccatgcaggaggtggtggccgcggtcgcggccgggtcgcccggtaagaagagggtggggagaaggagcgccgccgcctcgggcgaccacgtgcccgagttcatcggcagccccgttgctgcggccgaggcgcacagcaactggcccaagcgctacgagcgcagcactgccgcaaataaaccggaggaggacgatgagctcaaggccaggtgccactaccggagcgctaaggtggacaacattgtctactgcctcggggatgacgtttatgtcaaggctggagaaaatgaggctgattacattggtcgcattactgaattttttgagggcactgatcgatgccactattttacttgccgttggtttttccgtgcagaggacacggtcatcaattcgttggtgtcgattaatgttgatggccacaagcatgaccctagacgtgtttttctttccgaggaaaagaatgacaatgtgcttgattgcatcatctccaaggtcaagatagtccatgttgatccaaatatggatccaaaagctaaggcccaactgatagaacattgtgacctatactatgacatgtcttactctgttgcatattctacatttgctaatatctcatcagaaaatgggcagtcaggcagtgaaaccgcttcgggtatttcttctgatgatgcgggtttggagacgtcatctaatatgccagagaggacagcaacccttcttgacttgtattcgggctgtgggggcatgtccactggtctttgcttgggtgctgctctttctggcctgaaacttgaaactcgatgggctgttgatcttaacagttttgcgtgccaaagtttaaaatacaatcatccacagactgaggtgcgaaatgagaaagctgatgagtttcttgctctccttaaggaatgggcagtcttatgtgaaaaatatgttcatcaagacgtggattcgaatttagcaggttcagaggatcaagaggatgctgacactcttgacaaggatgaatttgttgtacagaagcttattggaatacgctatgatggcactggaaggaaaaaaggcgtatattttaaggtccaatgggaaggatatggtcctgaagaggatacatgggaacctattgataacctgagtgactgtccgctgaaaattagagaatttgtacaagaagggcgcaaaagaaaaattctcccgcttcctggtgatgttgatgtcatttgtggaggcccaccatgtcaaggtataagtgggtttaatcggttcaggaaccgtgatgagccacttaaagatgagaaaaacaagcaaatggtgactttcatggatattgtggcatacttgaagcccaagtatgttctcatggaaaatgtcgtggacatactgaaatttgctgatggctacctaggaaaatatgctttgagctgcctagttgctatgaagtaccaagcacgccttggaatgatggtggcaggctgctatggtctgccacagttcaggatgcgtgtgttcctctggggtgctctttcttccatggtgctccctaagtatcctctgcctacatatgacgttgtagtacgtggaggagcacctaatgccttttcgcaatgtatggttgcatatgatgagacacaaaggccatccctgaagaaagctttgcttcttggtgatgcattttcagatttaccaaaggtcgaaaaccatcaacctaacgatgtaatggagtatggtggttcccccaagacagagttccagcgctacattcgacttggtcgtaaagacatgttggattggtcgtttggtgaggaggctggtccagatgaaggcaagctcttggatcaccagcccttacggcttaacaatgatgattatgagcgggttaagcaaattcctgtcaagaagggagccaacttccgtgacctaaagggtgtcaaggttggagcaaataatgttgttgagtgggatccagaagtcgaacgtgtgtacctttcgtctgggaaaccactgatgagatggtgcaagtactgtgagattcatggttaagacatgctaagttattgcacaaatc

SEQ ID NO: 199046 - DNA, 3215 bp, Zea Mays
cacatttgaccgatcctcttcgattcgatttctacacccccagagcttgccaaacccctcgtctcccaaccctagagagcagcagcagcagcagcagctaccgcatcccttgccatggcgccaagctccccgtcatccgctaggcccacgcgcgcctccggccggaagcgctccgccatggccgaggagatccaccagaaccaggaggaggaggaggaggttgtggctgcgtccaccgccaagcgcagacgcaaggcggcgtcttccgggaagaagcccaagccgacgcccaagcaggccaaaccggccgtggcggggatgaagaagaagggggagaccgagaagacggagcccgttgtggacgacgtgtgcgccgaggagcccgacgaggaggagttggccatgggcgaggaggaggcggaggccgaggagcaggccatgcaggaggtggtggccgcggtcgcggccgggtcgcccggtaagaagagggtggggagaaggagcgccgccgcctcgggcgaccacgtgcccgagttcatcggcagccccgttgctgcggccgaggcgcacagcaactggcccaagcgctacgagcgcagcactgccgcaaataaaccggaggaggacgatgagctcaaggccaggtgccactaccggagcgctaaggtggacaacattgtctactgcctcggggatgacgtttatgtcaaggctggagaaaatgaggctgattacattggtcgcattactgaattttttgagggcactgatcgatgccactattttacttgccgttggtttttccgtgcagaggacacggtcatcaattcgttggtgtcgattaatgttgatggccacaagcatgaccctagacgtgtttttctttccgaggaaaagaatgacaatgtgcttgattgcatcatctccaaggtcaagatagtccatgttgatccaaatatggatccaaaagctaaggcccaactgatagaacattgtgacctatactatgacatgtcttactctgttgcatattctacatttgctaatatctcatcagaaaatgggcagtcaggcagtgaaaccgcttcgggtatttcttctgatgatgcgggtttggagacgtcatctaatatgccagagaggacagcaacccttcttgacttgtattcgggctgtgggggcatgtccactggtctttgcttgggtgctgctctttctggcctgaaacttgaaactcgatgggctgttgatcttaacagttttgcgtgccaaagtttaaaatacaatcatccacagactgaggtgcgaaatgagaaagctgatgagtttcttgctctccttaaggaatgggcagtcttatgtgaaaaatatgttcatcaagacgtggattcgaatttagcaggttcagaggatcaagaggatgctgacactcttgacaaggatgaatttgttgtacagaagcttattggaatacgctatgatggcactggaaggaaaaaaggcgtatattttaaggtccaatgggaaggatatggtcctgaagaggatacatgggaacctattgataacctgagtgactgtccgctgaaaattagagaatttgtacaagaagggcgcaaaagaaaaattctcccgcttcctggtgatgttgatgtcatttgtggaggcccaccatgtcaaggtataagtgggtttaatcggttcaggaaccgtgatgagccacttaaagatgagaaaaacaagcaaatggtgactttcatggatattgtggcatacttgaagcccaagtatgttctcatggaaaatgtcgtggacatactgaaatttgctgatggctacctaggaaaatatgctttgagctgcctagttgctatgaagtaccaagcacgccttggaatgatggtggcaggctgctatggtctgccacagttcaggatgcgtgtgttcctctggggtgctctttcttccatggtgctccctaagtatcctctgcctacatatgacgttgtagtacgtggaggagcacctaatgccttttcgcaatgtatggttgcatatgatgagacacaaaggccatccctgaagaaagctttgcttcttggtgatgcattttcagatttaccaaaggtcgaaaaccatcaacctaacgatgtaatggagtatggtggttcccccaagacagagttccagcgctacattcgacttggtcgtaaagacatgttggattggtcgtttggtgaggaggctggtccagatgaaggcaagctcttggatcaccagcccttacggcttaacaatgatgattatgagcgggttaagcaaattcctgtcaagaagggagccaacttccgtgacctaaagggtgtcaaggttggagcaaataatgttgttgagtgggatccagaagtcgaacgtgtgtacctttcgtctgggaaaccactggttcctgactatgcgatgtcattcatcaagggcaaatcactcaagccattcgggcgcctgtggtgggacgagacggttcctacagttgtgaccagagcagagcctcataaccaggttatattgcatccgactcaagcaagagtcttgactatccgggagaacgcaaggttacagggcttccccgattactaccgattgtttggaccgatcaaggagaatggcagtccctgttgcacgggcactgggctactgtctgggtcaagcctacctgggtgaatctgacgggagtcagcctctgtaccagctgcctgcaagttttacctctgtggggcgaaccgcggttcaggcgaatgccgtttctgttggcactcctgcgggggaggtagtcgagcagtaaaaggatagcggagcaaccctggttggtattttgattcgagcccatccagtagcatgtttaccaataaataatcattggtcgtgctgattcttatggttggagatgaatgtatgtagggtgtactcgagctcgagtgcttgttgtactgtaggttgaggtttctcatccattggcctgcctatttgtggatgacgtttcatttcagattagcaatgtgcttatttaaggtttcgtcatgtacctgtattctacaatccactattgtttccaaagacagcatttgatccttgttcaacgcgagcagattttcgtccaccaaagctgtgtagggatcgaaatgtcaacaatgaattgagtcattcaatcatttgtctaa

SEQ ID NO: 199047 - DNA, 3120 bp, Zea Mays
agcagcagcagctaccgcatcccttgccatggcgccaagctccccgtcatccgctaggcccacgcgcgcctccggccggaagcgctccgccatggccgaggagatccaccagaaccaggaggaggaggaggaggttgtggctgcgtccaccgccaagcgcagacgcaaggcggcgtcttccgggaagaagcccaagccgacgcccaagcaggccaaaccggccgtggcggggatgaagaagaagggggagaccgagaagacggagcccgttgtggacgacgtgtgcgccgaggagcccgacgaggaggagttggccatgggcgaggaggaggcggaggccgaggagcaggccatgcaggaggtggtggccgcggtcgcggccgggtcgcccggtaagaagagggtggggagaaggagcgccgccgcctcgggcgaccacgtgcccgagttcatcggcagccccgttgctgcggccgaggcgcacagcaactggcccaagcgctacgagcgcagcactgccgcaaataaaccggaggaggacgatgagctcaaggccaggtgccactaccggagcgctaaggtggacaacattgtctactgcctcggggatgacgtttatgtcaaggctggagaaaatgaggctgattacattggtcgcattactgaattttttgagggcactgatcgatgccactattttacttgccgttggtttttccgtgcagaggacacggtcatcaattcgttggtgtcgattaatgttgatggccacaagcatgaccctagacgtgtttttctttccgaggaaaagaatgacaatgtgcttgattgcatcatctccaaggtcaagatagtccatgttgatccaaatatggatccaaaagctaaggcccaactgatagaacattgtgacctatactatgacatgtcttactctgttgcatattctacatttgctaatatctcatcagaaaatgggcagtcaggcagtgaaaccgcttcgggtatttcttctgatgatgcgggtttggagacgtcatctaatatgccagagaggacagcaacccttcttgacttgtattcgggctgtgggggcatgtccactggtctttgcttggcgatgggctgttgatcttaacagttttgcgtgccaaagtttaaaatacaatcatccacagactgaggtgcgaaatgagaaagctgatgagtttcttgctctccttaaggaatgggcagtcttatgtgaaaaatatgttcatcaagacgtggattcgaatttagcaggttcagaggatcaagaggatgctgacactcttgacaaggatgaatttgttgtacagaagcttattggaatacgctatgatggcactggaaggaaaaaaggcgtatattttaaggtccaatgggaaggatatggtcctgaagaggatacatgggaacctattgataacctgagtgactgtccgctgaaaattagagaatttgtacaagaagggcgcaaaagaaaaattctcccgcttcctggtgatgttgatgtcatttgtggaggcccaccatgtcaaggtataagtgggtttaatcggttcaggaaccgtgatgagccacttaaagatgagaaaaacaagcaaatggtgactttcatggatattgtggcatacttgaagcccaagtatgttctcatggaaaatgtcgtggacatactgaaatttgctgatggctacctaggaaaatatgctttgagctgcctagttgctatgaagtaccaagcacgccttggaatgatggtggcaggctgctatggtctgccacagttcaggatgcgtgtgttcctctggggtgctctttcttccatggtgctccctaagtatcctctgcctacatatgacgttgtagtacgtggaggagcacctaatgccttttcgcaatgtatggttgcatatgatgagacacaaaggccatccctgaagaaagctttgcttcttggtgatgcattttcagatttaccaaaggtcgaaaaccatcaacctaacgatgtaatggagtatggtggttcccccaagacagagttccagcgctacattcgacttggtcgtaaagacatgttggattggtcgtttggtgaggaggctggtccagatgaaggcaagctcttggatcaccagcccttacggcttaacaatgatgattatgagcgggttaagcaaattcctgtcaagaagggagccaacttccgtgacctaaagggtgtcaaggttggagcaaataatgttgttgagtgggatccagaagtcgaacgtgtgtacctttcgtctgggaaaccactggttcctgactatgcgatgtcattcatcaagggcaaatcactcaagccattcgggcgcctgtggtgggacgagacggttcctacagttgtgaccagagcagagcctcataaccaggttatattgcatccgactcaagcaagagtcttgactatccgggagaacgcaaggttacagggcttccccgattactaccgattgtttggaccgatcaaggagaagtatattcaagtcgggaacgcagtggcagtccctgttgcacgggcactgggctactgtctgggtcaagcctacctgggtgaatctgacgggagtcagcctctgtaccagctgcctgcaagttttacctctgtggggcgaaccgcggttcaggcgaatgccgtttctgttggcactcctgcgggggaggtagtcgagcagtaaaaggatagcggagcaaccctggttggtattttgattcgagcccatccagtagcatgtttaccaataaataatcattggtcgtgctgattcttatggttggagatgaatgtatgtagggtgtactcgagctcgagtgcttgttgtactgtaggttgaggtttctcatccattggcctgcctatttgtggatgacgtttcatttcagattagcaatgtgcttatttaaggtttcgtcatgtacctgtattctacaatccactattgtttccaaagacagcatttgatccttgttcaacgcgagcagattttcgtccaccaaagctgtgtagggatcgaaatgtcaacaatgaattgagtcattcaatcatttgtctaa

SEQ ID NO: 199048 - DNA, 2314 bp, Zea Mays
gctgccgcctagaggcagtgaagaggtaggggatctcgcgggaggcagggccgctgctgccacctggagatcccgaatcccgaccgccgccgcctggagctcccaaccgctgacgcctggagtgtttcgcgtcaaaatgggcagtcaggcagtgaaaccgcttcgggtatttcttctgatgatgcgggtttggagacgtcatctaatatgccagagaggacagcaacccttcttgacttgtattcgggctgtgggggcatgtccactggtctttgcttgggtgctgctctttctggcctgaaacttgaaactcgatgggctgttgatcttaacagttttgcgtgccaaagtttaaaatacaatcatccacagactgaggtgcgaaatgagaaagctgatgagtttcttgctctccttaaggaatgggcagtcttatgtgaaaaatatgttcatcaagacgtggattcgaatttagcaggttcagaggatcaagaggatgctgacactcttgacaaggatgaatttgttgtacagaagcttattggaatacgctatgatggcactggaaggaaaaaaggcgtatattttaaggtccaatgggaaggatatggtcctgaagaggatacatgggaacctattgataacctgagtgactgtccgctgaaaattagagaatttgtacaagaagggcgcaaaagaaaaattctcccgcttcctggtgatgttgatgtcatttgtggaggcccaccatgtcaaggtataagtgggtttaatcggttcaggaaccgtgatgagccacttaaagatgagaaaaacaagcaaatggtgactttcatggatattgtggcatacttgaagcccaagtatgttctcatggaaaatgtcgtggacatactgaaatttgctgatggctacctaggaaaatatgctttgagctgcctagttgctatgaagtaccaagcacgccttggaatgatggtggcaggctgctatggtctgccacagttcaggatgcgtgtgttcctctggggtgctctttcttccatggtgctccctaagtatcctctgcctacatatgacgttgtagtacgtggaggagcacctaatgccttttcgcaatgtatggttgcatatgatgagacacaaaggccatccctgaagaaagctttgcttcttggtgatgcattttcagatttaccaaaggtcgaaaaccatcaacctaacgatgtaatggagtatggtggttcccccaagacagagttccagcgctacattcgacttggtcgtaaagacatgttggattggtcgtttggtgaggaggctggtccagatgaaggcaagctcttggatcaccagcccttacggcttaacaatgatgattatgagcgggttaagcaaattcctgtcaagaagggagccaacttccgtgacctaaagggtgtcaaggttggagcaaataatgttgttgagtgggatccagaagtcgaacgtgtgtacctttcgtctgggaaaccactggttcctgactatgcgatgtcattcatcaagggcaaatcactcaagccattcgggcgcctgtggtgggacgagacggttcctacagttgtgaccagagcagagcctcataaccaggttatattgcatccgactcaagcaagagtcttgactatccgggagaacgcaaggttacagggcttccccgattactaccgattgtttggaccgatcaaggagaagtatattcaagtcgggaacgcagtggcagtccctgttgcacgggcactgggctactgtctgggtcaagcctacctgggtgaatctgacgggagtcagcctctgtaccagctgcctgcaagttttacctctgtggggcgaaccgcggttcaggcgaatgccgtttctgttggcactcctgcgggggaggtagtcgagcagtaaaaggatagcggagcaaccctggttggtattttgattcgagcccatccagtagcatgtttaccaataaataatcattggtcgtgctgattcttatggttggagatgaatgtatgtagggtgtactcgagctcgagtgcttgttgtactgtaggttgaggtttctcatccattggcctgcctatttgtggatgacgtttcatttcagattagcaatgtgcttatttaaggtttcgtcatgtacctgtattctacaatccactattgtttccaaagacagcatttgatccttgttcaacgcgagcagattttcgtccaccaaagctgtgtagggatcgaaatgtcaacaatgaattgagtcattcaatcatttgtctaa

SEQ ID NO: 199049 - DNA, 1848 bp, Zea Mays
cctggagctcccaaccgctgacgcctggagtgtttcgcgtccgatgggctgttgatcttaacagttttgcgtgccaaagtttaaaatacaatcatccacagactgaggttcagaggatcaagaggatgctgacactcttgacaaggatgaatttgttgtacagaagcttattggaatacgctatgatggcactggaaggaaaaaaggcgtatattttaaggtccaatgggaaggatatggtcctgaagaggatacatgggaacctattgataacctgagtgactgtccgctgaaaattagagaatttgtacaagaagggcgcaaaagaaaaattctcccgcttcctggtgatgttgatgtcatttgtggaggcccaccatgtcaaggtataagtgggtttaatcggttcaggaaccgtgatgagccacttaaagatgagaaaaacaagcaaatggtgactttcatggatattgtggcatacttgaagcccaagtatgttctcatggaaaatgtcgtggacatactgaaatttgctgatggctacctaggaaaatatgctttgagctgcctagttgctatgaagtaccaagcacgccttggaatgatggtggcaggctgctatggtctgccacagttcaggatgcgtgtgttcctctggggtgctctttcttccatggtgctccctaagtatcctctgcctacatatgacgttgtagtacgtggaggagcacctaatgccttttcgcaatgtatggttgcatatgatgagacacaaaggccatccctgaagaaagctttgcttcttggtgatgcattttcagatttaccaaaggtcgaaaaccatcaacctaacgatgtaatggagtatggtggttcccccaagacagagttccagcgctacattcgacttggtcgtaaagacatgttggattggtcgtttggtgaggaggctggtccagatgaaggcaagctcttggatcaccagcccttacggcttaacaatgatgattatgagcgggttaagcaaattcctgtcaagaagggagccaacttccgtgacctaaagggtgtcaaggttggagcaaataatgttgttgagtgggatccagaagtcgaacgtgtgtacctttcgtctgggaaaccactggttcctgactatgcgatgtcattcatcaagggcaaatcactcaagccattcgggcgcctgtggtgggacgagacggttcctacagttgtgaccagagcagagcctcataaccaggttatattgcatccgactcaagcaagagtcttgactatccgggagaacgcaaggttacagggcttccccgattactaccgattgtttggaccgatcaaggagaagtatattcaagtcgggaacgcagtggcagtccctgttgcacgggcactgggctactgtctgggtcaagcctacctgggtgaatctgacgggagtcagcctctgtaccagctgcctgcaagttttacctctgtggggcgaaccgcggttcaggcgaatgccgtttctgttggcactcctgcgggggaggtagtcgagcagtaaaaggatagcggagcaaccctgggtgtactcgagctcgagtgcttgttgtactgtaggttgaggtttctcatccattggcctgcctatttgtggatgacgtttcatttcagattagcaatgtgcttatttaaggtttcgtcatgtacctgtattctacaatccactattgtttccaaagacagcatttgatccttgttcaacgcgagcagattttcgtccaccaaagctgtgtagggatcgaaatgtcaacaatgaattgagtcattcaatcatttgtctaa

SEQ ID NO: 199050 - DNA, 982 bp, Zea Mays
attgatatgttgcttagacaaatcgagtctctttataaacaaaagaagccatattgattttctgatacaggaagattacttttatctatactccaccttctttcgtggctatggcactagcagctatctataaccttttcatcattaacaaatccggcggccttatatactacaaggactatggttcagcagggaggatggataccaatgacagtttaagattagcaagcctctggcattcgatgcatgctatctcgcagcaactgtcccctaccactggctgtactggcattgatctcttacaagctcataactttgatctccattgctttcaatccctcacagggacgaaatttttcgtcgtatgcgaaactggagctccaaatatggaaatgctgctgaaagcgatttacgagctgtacacagacttcgttctgaagaatccgttctatgagatggagatgccgattcggtgcgagctgtttgatcacaacctggctcagatgcagatcttcgtgaagaccctcgccggcaagagcatcaccctggaggtggagagctcggacacggtcgagaacgtcaaggccaagatccaggacaaggagggcatccctccggaccagcagcgcctcatcttcgccggcaagcagctggacgacggccgcatcttggccgactacaacatccagaaggagtccacgctccacctcgtcctccgcctccgtggtggtggcggcggccagtgatctggtctgctgatcgcctcctgccatggggactggctagcacatgccgccttcctgcctgccagtgcgtgctcgtttcgtctttcattacgtcatgtcttgctcaggccgtctcatgcatctccatcagtctcttgtcttaggtcgtcgtttcttcttcacattggtaggaacgcacgctgtgcagtgctttggttaaaacaatttggagtaataaatctggcatattgttctac

SEQ ID NO: 199051 - DNA, 786 bp, Zea Mays
gatttctgatacaggaagattacttttatctatactccaccttctttcgtggctatggcactagcagctatctataaccttttcatcattaacaaatccggcggccttatatactacaaggactatggttcagcagggaggatggataccaatgacagtttaagattagcaagcctctggcattcgatgcatgctatctcgcagcaactgtcccctaccactggctgtactggcattgatctcttacaagctcataactttgatctccattgctttcaatccctcacagctccaaatatggaaatgctgctgaaagcgatttacgagctgtacacagacttcgttctgaagaatccgttctatgagatggagatgccgattcggtgcgagctgtttgatcacaacctggctcaggtgatccagaaggaccgtgttgcgctcctgggtcggtgaaattggaaagcttttggtcctaaccataccatgtatcttgtactttcccccctttttctacattatgctcggacttcctgtgcaattgtctcggcagaagacagctggcgaccaacaactgtttggtcctgactattagcaccgtatttggaacagatctatggacgatccgccgtgtgttcttctcatcgtcaatttccagtttttttccccttacaagagccaaaagatgccatagcccatggatgggtcgtttgaacactagtgagcatgaggagacgcgagatcctccgacgtcaaaacaagcgacctcgccagtcgctaattgccatg

SEQ ID NO: 199052 - DNA, 1410 bp, Zea Mays
aagggctgcacttgaataaaccagtgtgaaatgcttattttgtgaaattaagagttgctacttgctagtgcatcttgttgtatgtctggagcaatccttctggaacttttcataattgatcttggttcttggctttcatttgctctagcagcaagtcaaatgaaggacaaggctcgtgttgttgccatggatctaagggggcatggaaaatcaacaacgaatgatgatctggatttgtccattgaaactcttaccaatgatgtcatagctgttatacgtacaatgtatggagatttgccaccagcaattatacttgttgggcatagcatgggcggttcagtggctatacatgtggctgcaagaaaagaaattagaaatcttcatgggcttgttgtcgttgatgttgtcgagggaacagcaatggcttcattagttcatatgcagaagatcttagcaaaccgggcacagcattttcctagcattgaaaaagcaattgaatggagtgtcaaaggtgggccattaaggaacatcgagtctgctcgtgtgtccattccatctaccctgaaatacgatgaatcacgagaatgctatacatatcgcactcctcttgagcaaacagaaaagtactggaaaggatggtatgaaggtctttcagacaagttcctatcttgcccagtgcaaaagatcctgttgttagctggtaccgacagactggacagttggtttacaatttgcagagctttaacaatcggtcaaatgcaaggaaaatttcaaatggtggtgattcggcacactggacatgctatacaggaagatgtacctgaagaatttgcatcgcacatactgaagttcatatcccgcaacaaaatagggcctaatggtgtcgagatacctgggctcattaaaaaatggcagcagtagacataatgtacaagttaccgttctggaaaatgttcaggaaaatgatgagtaggtctgcctatccgagttctcttcatatcgaattaaaaaaaggttcaagatgatcatgcgatcgttaacaatcagtcattggtttcgtcatctgttggcaactctcccatgtcgcttgagttgctttgtttctgacatcactctgcgacctgccggcgtcttttgtacgagggttcttgtatgtttttaggtagagctgagtgcagtgcgttgtaatgctttccgtgaggttactatactgctatcaagcaggatcagctcgttatgacagctctgtttcgaatttctgctggcctcggcaagcttgatgggagtaaatcgaagaagcctttgataattatctatttatcttccgcttcaacggagccgagatgtgcaaaaaaaaaacaaacatgagaaatgagcataggtacataaagaaaattgagcttagaagag

SEQ ID NO: 199053 - DNA, 1659 bp, Zea Mays
tcggaatcgggcgttctgggctcctctgtttcctttcgtcaccgtcctcgccgttgtgttcctctctcagtctcggggcttcttctcgcgggcacctccggctgcttcctttgccaccgcagcaccagcgctgtccatggagcccccgccgctctcctcgttgcaggaggagggggaggaggggcctaccgtcgaggactcgtccgtcttctccgccgccgttgtgccgcctcgccccgccacgcaccactcgctccacaagtacgcgcctctggactggtccgcctacttcgacgaggagcgccgcgtagccatccccgacaccgacaacgttttcaatgcgtacacgaccggatcggaggggcccgtcgtgttctgcctgcacggaggcggttattcggggctttcatttgctctagcagcaagtcaaatgaaggacaaggctcgtgttgttgccatggatctaagggggcatggaaaatcaacaacgaatgatgatctggatttgtccattgaaactcttaccaatgatgtcatagctgttatacgtacaatgtatggagatttgccaccagcaattatacttgttgggcatagcatgggcggttcagtggctatacatgtggctgcaagaaaagaaattagaaatcttcatgggcttgttgtcgttgatgttgtcgagggaacagcaatggcttcattagttcatatgcagaagatcttagcaaaccgggcacagcattttcctagcattgaaaaagcaattgaatggagtgtcaaaggtgggccattaaggaacatcgagtctgctcgtgtgtccattccatctaccctgaaatacgatgaatcacgagaatgctatacatatcgcactcctcttgagcaaacagaaaagtactggaaaggatggtatgaaggtctttcagacaagttcctatcttgcccagtgcaaaagatcctgttgttagctggtaccgacagactggacagagctttaacaatcggtcaaatgcaaggaaaatttcaaatggtggtgattcggcacactggacatgctatacagatgtacctgaagaatttgcatcgcacatactgaagttcatatcccgcaacaaaatagggcctaatggtgtcgagatacctgggctcattaaaaaatggcagcagtagacataatgtacaagttaccgttctggaaaatgttcaggaaaatgatgagtaggtctgcctatccgagttctcttcatatcgaattaaaaaaaggttcaagatgatcatgcgatcgttaacaatcagtcattggtttcgtcatctgttggcaactctcccatgtcgcttgagttgctttgtttctgacatcactctgcgacctgccggcgtcttttgtacgagggttcttgtatgtttttaggtagagctgagtgcagtgcgttgtaatgctttccgtgaggttactatactgctatcaagcaggatcagctcgttatgacagctctgtttcgaatttctgctggcctcggcaagcttgatgggagtaaatcgaagaagcctttgataattatctatttatcttccgcttcaacggagccgagatgtgcaaaaaaaaaacaaacatgagaaatgagcataggtacataaagaaaattgagcttagaagag

SEQ ID NO: 199054 - DNA, 3323 bp, Zea Mays
gaaatgggagttgggtgcagaagacttggcccagaaataaaaaaaaagaagctgtgtgttggtgctgtcctatatgcatgtcccaatcccatctccatgtaatggtcttcttcccttcccatccatcgtccgtgagctccgagcgtgagggcgagaggcgtcgctagctggctctcacggccggcaaatctgcgatcaactgcaggttcgccggattcatcgccccattccgctctgggctaaggttccaccagcacaaccctatggcagaagcagtgctccttgctgtcactaagattggttccgttcttggagatgaacctgccaagaccattataaacaagctgtctgaaaaaattcaagctctgagggaactcccacggaaagtggatcacataaggatgaaactaataataatgagcaaagttatacagcagattggcacagtctaccttacagatgaacttgtgaagagttggattggggaggtccggaaggtggcttaccgtgttgaggatgtagtagacaaatactcataccatcttcttcaactggaggaagaagggtttctgaagaaatttttcgtcaagggtacccattatgccattgttttcagtgaaattgctgatgaggtagctgagatagaagaggagattcagcaagttattcagatgaaggatcagtggttgcagccatcccagcttgtccctcaccctgagcaactcgctgaaatcgaaagacagcgttcccaagacagtttcccagaatttgtcaaagatgaagatctagtaggaattgaagaaaatagaaaattgctgactggatggatttactcagaagagcaggctagcatggtgataacagtttctggtatgggtggactgggaaaatctacactggttacaaacatttatgaacgtgaaaaggtcaacttcccggtacatgcttggattgttgtgtcacaggtctacacagtcgagtctttgttgagaaagctactatggaagattgggcatatgcaaccaccagtgccaagagagattgacaaaatggatgtacatgacttgaaggaggaaataaagagaaagctccagaatagaaaatgcttgattgtgttggatgatgtttgggagcaagaagtatacttcaaaatacatgatgctttccagacactccatggaagccgcatcatcattacaacacgaaaggaccatgttggtgctattgcttcctttgaccaccatcttgagctccaaccgttgtgtgggcctgatgcatttgaacttttctgtagaagggcttttcacaacaagaaggaccacaaatgccccgaggagcttaaggaaattgctggtgaaatagtgaaaaggtgccaaggcctgccactagcaattgttacagtcggcagcttgctgtcatctagaccacaaataaacatttggaatcaaacatacaaccagcttcggagtgagttgtcaaccaatgatcatgtccgagcaatcttaaatctaagctaccatgatctatctggagatctcagaaactgcttcttgtattgcagcttgtttcctgaagactaccccatgtcacgcgaagcccttgtgcggctctgggtcgcagaaggttttgttctgagtaaagaaaagaatacaccagaggaggtggctgagggaaatctcatggaattgatccaccgtaatatgcttgaagttgtagactatgatgagcttggcagggttagcacttgcaagatgcatgatatcatgagggacctggcactttgtgttgccaaagaagagaagtttggttctgcaaacgattatggtgaactgatacaggtggaccagaaggttcgtcgcttgtcgttatgtgggtggaatgttaaggcagcagctaagtttaaatttccatgtctccgtactcttgtggctcagggaataatttcattctctcctgacatggtatcctcaattatgtctcaatcaaattatttgacagttcttgagctgcaagattctgagatcactgaggtgccagcatttataggaaatctctttaacctacggtatattgggttaaggcgcaccaaagtcaagtcactcccagagtctattgagaagctcctcaacctccacactctggatatcaaacaaactcaaatagagaaactaccacgagggattgttaaggtcaagaagctaaggcaccttttagctgacaggtttgctgatgagaagcagacggagttcagatatttcatcggagtggaagcacctaaaggtctgttgaacctggaagaactacagactcttgaaacagtgcaagcgagcaaagacttgcctgaacagctgaagaaactgatgcaactcagaagcttatggatcgacaatgtaagcggtgcagattgtgataaccttttcgcgactctttcaaccatgccacttctttccagcctcctaatctccgcaagagatgtgaatgagacactttgcctccaagcccttgctccggaatttccaaagctccacaggctaattgtaaggggccgctgggctgccgagacactggaatatccaatattttgcaaccatgggaaacatctaaaatatttagcgcttagctggtgtcagcttggtgaagatccattgggggtccttgctccgcacgtgccgaacctcacctatttgagcatgaacagggtcagtagtgcaagcactttggttctttctgcagggtgctttcctcacctgaaaacactcgtcctgaagaaaatgcctaacgtcgagcagctggagattggacatggtgctcttccatgcatccaaggtctgtacatcatgtccctagcgcagctggataaggtccctcaaggcatcgaatcgcttctctccctcaagaagctttggcttctgtacctgcacgcggagtttagaacgcagtggctaacgaacgggatgcaccagaagatgcagcatgttcctgagattcgtgtctaggacacaggaaagccagatggttatttctgcagtactatgctggtatatatggtgtgtctgtgaaaaaactattttttgtaccttttcttcccttaagtcctgagttgttgtatgtggacttcacttgcagacacaaacgctcgctttgggtagctcgttagacccatatatatacgtgttgtgttggttcagttgctttaagttacttgtttgttcgaggcatttgccttctgtattgaacttcatgcaaatgatgttatgatcaaacttgtatgtccatgtattttaaatttttttacatgcctcatagaaagtatggattcccat

SEQ ID NO: 199055 - DNA, 3257 bp, Zea Mays
cgttgcgcctagtcgacgaaatgcgacgccgagatcactgggctacgagtacggctgcgcgccggcacagccaagcgcggcagcggcgcttgcgtcgaagggaaatggttacatgataggggagagctggatatgcattgttcgccggattcatcgccccattccgctctgggctaaggttccaccagcacaaccctatggcagaagcagtgctccttgctgtcactaagattggttccgttcttggagatgaacctgccaagaccattataaacaagctgtctgaaaaaattcaagctctgagggaactcccacggaaagtggatcacataaggatgaaactaataataatgagcaaagttatacagcagattggcacagtctaccttacagatgaacttgtgaagagttggattggggaggtccggaaggtggcttaccgtgttgaggatgtagtagacaaatactcataccatcttcttcaactggaggaagaagggtttctgaagaaatttttcgtcaagggtacccattatgccattgttttcagtgaaattgctgatgaggtagctgagatagaagaggagattcagcaagttattcagatgaaggatcagtggttgcagccatcccagcttgtccctcaccctgagcaactcgctgaaatcgaaagacagcgttcccaagacagtttcccagaatttgtcaaagatgaagatctagtaggaattgaagaaaatagaaaattgctgactggatggatttactcagaagagcaggctagcatggtgataacagtttctggtatgggtggactgggaaaatctacactggttacaaacatttatgaacgtgaaaaggtcaacttcccggtacatgcttggattgttgtgtcacaggtctacacagtcgagtctttgttgagaaagctactatggaagattgggcatatgcaaccaccagtgccaagagagattgacaaaatggatgtacatgacttgaaggaggaaataaagagaaagctccagaatagaaaatgcttgattgtgttggatgatgtttgggagcaagaagtatacttcaaaatacatgatgctttccagacactccatggaagccgcatcatcattacaacacgaaaggaccatgttggtgctattgcttcctttgaccaccatcttgagctccaaccgttgtgtgggcctgatgcatttgaacttttctgtagaagggcttttcacaacaagaaggaccacaaatgccccgaggagcttaaggaaattgctggtgaaatagtgaaaaggtgccaaggcctgccactagcaattgttacagtcggcagcttgctgtcatctagaccacaaataaacatttggaatcaaacatacaaccagcttcggagtgagttgtcaaccaatgatcatgtccgagcaatcttaaatctaagctaccatgatctatctggagatctcagaaactgcttcttgtattgcagcttgtttcctgaagactaccccatgtcacgcgaagcccttgtgcggctctgggtcgcagaaggttttgttctgagtaaagaaaagaatacaccagaggaggtggctgagggaaatctcatggaattgatccaccgtaatatgcttgaagttgtagactatgatgagcttggcagggttagcacttgcaagatgcatgatatcatgagggacctggcactttgtgttgccaaagaagagaagtttggttctgcaaacgattatggtgaactgatacaggtggaccagaaggttcgtcgcttgtcgttatgtgggtggaatgttaaggcagcagctaagtttaaatttccatgtctccgtactcttgtggctcagggaataatttcattctctcctgacatggtatcctcaattatgtctcaatcaaattatttgacagttcttgagctgcaagattctgagatcactgaggtgccagcatttataggaaatctctttaacctacggtatattgggttaaggcgcaccaaagtcaagtcactcccagagtctattgagaagctcctcaacctccacactctggatatcaaacaaactcaaatagagaaactaccacgagggattgttaaggtcaagaagctaaggcaccttttagctgacaggtttgctgatgagaagcagacggagttcagatatttcatcggagtggaagcacctaaaggtctgttgaacctggaagaactacagactcttgaaacagtgcaagcgagcaaagacttgcctgaacagctgaagaaactgatgcaactcagaagcttatggatcgacaatgtaagcggtgcagattgtgataaccttttcgcgactctttcaaccatgccacttctttccagcctcctaatctccgcaagagatgtgaatgagacactttgcctccaagcccttgctccggaatttccaaagctccacaggctaattgtaaggggccgctgggctgccgagacactggaatatccaatattttgcaaccatgggaaacatctaaaatatttagcgcttagctggtgtcagcttggtgaagatccattgggggtccttgctccgcacgtgccgaacctcacctatttgagcatgaacagggtcagtagtgcaagcactttggttctttctgcagggtgctttcctcacctgaaaacactcgtcctgaagaaaatgcctaacgtcgagcagctggagattggacatggtgctcttccatgcatccaaggtctgtacatcatgtccctagcgcagctggataaggtccctcaaggcatcgaatcgcttctctccctcaagaagctttggcttctgtacctgcacgcggagtttagaacgcagtggctaacgaacgggatgcaccagaagatgcagcatgttcctgagattcgtgtctaggacacaggaaagccagatggttatttctgcagtactatgctggtatatatggtgtgtctgtgaaaaaactattttttgtaccttttcttcccttaagtcctgagttgttgtatgtggacttcacttgcagacacaaacgctcgctttgggtagctcgttagacccatatatatacgtgttgtgttggttcagttgctttaagttacttgtttgttcgaggcatttgccttctgtattgaacttcatgcaaatgatgttatgatcaaacttgtatgtccatgtattttaaatttttttacatgcctcatagaaagtatggattcccat

SEQ ID NO: 199056 - DNA, 1323 bp, Zea Mays
accaggaaaacttgaatgcttatgatataggtgacagatttatttcccgcaagcttgtacagcgtatttacgacaaagcacttgcaattggtctgaagggctatgcaaaattacatcaacctgtcttggcccgacttgcaaattgggaaggtattaaaaagtcacgatctatccgagagtttgaccaccatgctacttgtgttgtctcaagatatgagacagtggatacttactatcgccggtgcagtagtgctagttacgtcggaaatgtgtcagttcccttgctttgtatcaatgctttggatgatcctctttgcacaagggaggctattccttgggatgaatgcagggccaataagaacattgttttagcaactactccaaatggtggtcatcttgcattctttcaaggactaactgcgcggagactatggtgggttggagctacttctgagttcctttctgctcttcatgacagctcctacatgcataggcagaaggcaaatgatcatgttttgctctcgtctttggaatcctccattgataagagtccgtatgttaatctcatggaagatggaatggtagctgcggtaacaaaagatggccctagcaatgacgggtcacctttgaaccatgcagctgatgaacaattaagtaacgaggcgggcggtggacaacagaatgtggtatctgcattgaaccataatgaaaactccattggagtgggaaacgacagccctgcagagccagtaaaacagcaaggtgatgacatccacagcaataagcttcatgagataattgctcctgtcaagagatctatgagccaactgactcgataccaagggaggtcagtctggttgcttgcctacattgcttttgtaacatcctggccgctgcttggctccctagctttcatcaccttccggaaaaagtccaggaatccgttgcgagctaaatgaatcatacttatattatgttattacaattacatcatgcaacatcctctgagctacgaaggccatttttccccgggtcgtcacagctcctgtgtacagtatcatcaccgatcatcagcaaacattgggggcgcctggataaactgatactttgtaatttgtattgtatttacaacaaaataatacgcaggataagcatctgtgtaattttactcggtaaatctggctggatttgctgtttggcatctgtcgagcttaacattatttttaatccaaaggatgcgaaacgtgtggtgaatgaacggtaaaaactatcagatagttgaggcgggaattttaattttaatttattactacttttttgttg

SEQ ID NO: 199057 - DNA, 1602 bp, Zea Mays
cctctcatctccgcatgcggtcttgtccgcccttccccttcattccttgccttgggtccagtgcctccctttgttaccatctgccagaccgcggtggaacccagggtgctgcttcgtcatatgcccctcaagggaggaagctgacaaggcggtgaatgcctaccacaacaagcaaacgctctctggggcatcaagtcctttgcaagtaaaatatgctgatggggagttggagaggcttgaacataagcttttcattggaatgcttccgaaaaatgttacagacactgagttgactgatttgttttccaaatatgggaatgtcacggatttgcaaattttgagaggttcacaacaaacaaacaaagctggctgtgccttcattaaatatcaaacaaaagatcaagcattggcagctattgaagctctaaacgggaagcacaaaatagagggttctagcgtgccattggttgtcaaatgggctgatacagaaaaggaaaggcaggctcggaaagcacaaaaagctcagtcacagctatctcatatacccaatgcaagtccaatgcagcagcactcttcagtatttggtgctttacagatgggatatatgcctcaatacaatggatttggttatcagccaccagggacatacggacttatgcagtaccctctatctcctatgcaaaatcaaggccccttccagaatatggttcaacctcttaaccaagggaactcgataagaggagtcaatcctgaagtgtctcccagttcagttcaaaggtcatttaatgcaatgcagctaggcagcccttatcctgctatgcctggtatgcagtatcctggatcatatcccggtggtcccatgggcaaccgtcatttgggaaattctcacaatccgattaaagctccaaattcgaatgccaattccactgtttcttctagtcccagcagcaatgctggtgggcaggttgaaggtcctcctggagccaacctatttatttatcatatcccacaagaatacggtgaccaggagctttccagcgccttccagagtttcggaagagtagtaagcgctaaggtgttcgtagataaagcaacgggcgtgagcaaatgcttcggttttgtgagctacgactctcctgcctccgcgcaggcagccatcaacaggatgaacggctaccagttaggcggtaaaaagctcaaggtacaactgaagagagaaaacaacaccaagcacagtagtaaaccgttttgacagacaaggcagcagccgtccggtacccggtacatattaattgaccatcaacacattgcagcagcagcctcagggcctggggagggaagagacccgtgtacccctctttgttcacttcaacattcttggagattcgtcagtcagctcagctcgtgtaattcattgcagcagacataggccgtagcagcagtttgtaccatgatcagatcacttgtacacatgattcattcaattgttactgacagccggctttcatcctagaataattcgctgtgacaaccttatcatttgctgacgaatgaagtcaggtagacttgttcatctatggaatgatggcaactttcgagcga

SEQ ID NO: 199058 - DNA, 7596 bp, Zea Mays
atgcgacgccacacccccggccttctcgccgccaatctcctccgcgcctcgtcgctcctcagacccccgtccgtcctcgccgcccgcgcggccttgctccaccatgcgccggacgacgcccaccgcctgctcgacgaaacgccgcgcgggagggcggccgccatcgtacgtgccctcacgtccgcaccgtcttcctcctccggtgacacggcctgcatcgcgtgcctccactgcgcggccctcaagtcaggcgccgtgctggacccgccagtgcgcacgtccctgctcgcggcgtacgccagggccggccgcggcgcgggagcgggagccggagcaggcgccgccctggcgctcttccgcgaggccgttgcgcccgacgtgatcctgtggaacgcggccgtcggcgccctgacgacgagctgccggtacgacgacgccgcggctctgttccggcggatggcgcgcgagctcggggagtttgactccaccaccgtggtcgtcatgctgtcgggggcgtcccgcgcgggtaaccttcggcgtggaatggagctccatggcatggcggccaagagttgtctcggcgctcattgtctcggcgcgtggaacgctctcgttgacatgtatgcaaagtgtggtgagtttaggtccgcagaggttgtgtttcatagcatgccgtgcagggacaccacctcatggaactctgtcataagtgggagcatttttaacgggctcgctgaggtgtcagcgtgctacttcagggaaatgagttgctccatcttccagccagatgaggtgagcctctcttctgtcctctcagcctgctctcgtctggatgatctcttctcctttggggagtctgtgcatagctgtgcagtcaaactcggttatgaggacaccgcgtcttgctcagtagcgaattctctcgtgacgttctactctgagtttggaatgccagaggctgcgaagaaggtcttcgccagcaatttgaacaggaatttggtatcatggaatgctatgatcaagggtctagtccagaatgaaagagtaaccgaggcccttgctgttttgaggcaaatgagattggagaaccagccagatgtcgccactttggtgaccatagtttcaggctgtgctgatcaaggcctactttctgaaggggaaacactccatggatacgtaatcagaaaaggacttcttcgtgaggagccttccatgggaaatagcttactcgatctgtatttgaaatgtgacgaaccatctaatgcaggcctgttgtttatgacaatgccaagaagggacttgatatcgtggaacacaatgatttctggttactcaagatatggcccactgagagaagaggctcagttaatgttcaaaggattactttctgaaggttcatcgtgcagcttggccactatgctagctgtcataccatcatgctccattccggaagaacttagctttgggaaagcacttcactctttcagcctgaagtgtggatttacatctagtggggtttcggctgttaatgctttgatacacatgtatatgagctgtggtgatccactggccgccttttcgcttattgaaagaataataccggtatcagatatcatttcctggaatacggtcatagttgggtgtctgcaaaatgaactccataaagatgcattggaaatctttcggttcatgtattgttctttggccataaaccctgacagtattacaatagttagtgtcttatcagcatgtggagatcttaatctactagcacttgggaaatccatccactgcatgatcctgaagcacttgtttgcttccaatttgagggtgaaaaattcattattgaccatgtattttcgctttggagatactagaagtgctgagttagtcttttatagcatgggagacacaaatttgtgctcctggaactgtatgatctctggctttgcacagaataacaaaggctggagagcattgcagttctatcagaagatggaggatttcgaacctaatgaaatatctgttgtcggtatcatctgtgcttgcacacagcttggtggttatagacaaggaaagagcatacacgggcatgtgttcaggtctgttctgcacaataatgtttttatttcagcatcacttgttgatatgtattgcaagtgtgggagactggacattgctgtcagagtatttgaagcttctgccgaaaaatcgattgccgggtggaactccttgatatcagcttttggattccatggccatgggatgaaatctatagatcttttctggaagatgcatgattctggaatgaaagccacgaaaagcacatttattgctctactgtcagcttgcagtcactctggacttgttgatgaagggtggaagtattattgccttatgtcagaaaagtttgggatcacaccagccccagagcaccatgtctgcattgtagacatgcttgggcgggctggtcggctgcaggaagcgcacaagtttgtggagagcttgccgtctcaacaaacacacggaatttggggcgcactgttaaatgcttgcagtagcaggagtgaactcaagatgggcgaatccatcgcaaaacatttgctacatttggagcctggaaatagcggttattatgtaactgcagcaaacctttatgcatacaaagacatgtggagtggtgtggcccaagttaggagcgttttgcaagataaagggctggtgaagccccatggtcgtagcactgttggttaagcggtgggtcataaaccatggaagccatacaatatgacgaatcgccatgaatgtttgtcaacttcccaagttcttctcacaagccgtctcaattatgagctgcaagttgcacgctggtatagtggtatcttattcaacatggtaattttataaagggtgccttcctccaacatggtgtgctgggcagctggatggtgtttgggcgaagaagatgaagggcagagaggaacggagacggcctttgggcggcggctgcagataatataggaactgctggcagccgatactgcttgcgagttacccccgccaaagctgctggccgctcaagcgccggttgtcattcctggtgcctccatgggccacgagggcaccacacagccacaactgcatgcatgccttctcatgatccaaggaaaggaagaagacaggctgagatgtgtgaggagaagaaaaggaagggcggtgggcccaccaagaaacaggagcatacgtgcaaatatgcgaaaccggagagcagaagcaagcagttgtcaattgtcatcgggaggaggaggaggaggaggagaagaagatagggcctgcctgcaatagaatccctctggaatctggatgatggatggctgtcttttgaacacaccgccacccaatcactatcgtagtatctcgtcccactctgcaccactcaaacccgctgctcccctctgcatttcacccgtcctccacctcctcccagacaccacaccagcgctccctttctggctgcagcttccccggacagctagctgcctgcctctcactcgagagtcacagagaccacccctagctagggatggccgcagtgatgaaggctcttgctgtcgcctcgccggtgtcggcacgggcagcacagcatccccgtcggtaccacgtcgcaggtgtccctagccagcagcatcaacagcagaacttgagcctgcacctgcagtcgttgttccacggcgtatcgtcggttcagtgccctgggcgatggcggcgggcgcaggtggtggcgatggcgggccggcctgcgatccagttcatccagggcacggacgagcagacggtcccggacgtgcggctgaccaagtcccgcgacggcaccaacggcgtggccgtcttcgcgttcgagcgtccgtcggtgttcgactcgtcggcggagctgggcgacatcacgggcttttacatggtggacgacgagggcgtgctgcagtccgtggacgtgagcgccaagttcgtgaacggcaagccggcgcggatcgaggccaagtacgtgatgcgcacgcctcaggagtgggaccgcttcatgcgcttcatggagcggtactcccgggccaacggcctccagttcgtcaggaactgaatgaaagcaactcatgagcccgacgagcctgcctgcctgcctgctttgagctctctctctctcgctgcctgtctgtctctttctcctctgcgcccctgtgtgagttggaatgcttttggattaacggccggattggaagaggactaatcgtacagtctgacaagtattgtgcatcctctgattgctcgcacacaggctggccacatgcaacccctcctccctgttcattgtccgtggcagttgtaccgtcccgttagagccttggccttggcatgacacaaagcatgtggcgtgcgctgtgtcactgtgtctgtgtgaaggaacaaggaagggtatcgaaattcgaacaccctaaatcgatctatcgatgaatttgggccgttttgtgttatttctcactacaactgtcccaaggtatcgaggatgagcaagtaccaatccatcaatcgtacggatctgctataccagctactagcttctgataaagaccgaagcatcatgagagaagaagctttgcattactgcatgccgcgaaccgtctgccatactgtctattaattacacgaccaatggcatcatcgaaaagcagatcaagcaaagccatccagggtctaaatccccgacctttttctagctggccccgcagcgccctccatatcctcctatgttcgttatatatatcccgcctgtctcgatcccccctctcctttttcatcaaatgactatatattcaagcgaacgaggataaatctagacacatatgtaaaatacatccctcaagtctttgatgaattcaccgttgacttaaaacgaaatttattttgatacggatggagtattagattaaaataaaatatatttttacagaaagcctattgataagatgtagatattatagactttaagaaagtttattagctggctgggcatcgagcatccacatcttctttctttgtatgtaaccatgtgatgaaggcaaggcaacggcacccacggtcccacgcctgttctggtctggtctgatgatgtccctctctgggtccagtctcctccaggtccagctcgctggatggagttggagcttggaggggcagacatgccatctctgtcgtgggaggatggacagcgagggttctgtctcgtctcttgctcttgttgcctcaccctttcctctcatctccgcatgcggtcttgtccgcccttccccttcattccttgccttgggtccagtgcctccctttgttaccatctgccagaccgcggtggaacccaggttcttgtttgccattgccacctactgctgttgtaactaataataataagaacaaacaaagctgtgttattaacctgcaaagaatacacacatctgtgtgactgtgtttaataaaacacacatttttttcttcttttctgacgacgaatatatcaatcatgaagggggcaaaaaaaccatgcatgttgcagctagctaatactgagtaggaaggaaagacactgacacaccattggcaagggagagaagagaaaagtgagctgggaaggaggctcaaggagtcaagtcatcattgcagcaagtagggtggaggctggaggggaggggaggggagtgtccagtccaactgcaggcatgcatatccactaggcaattattattagttaaactgctccgcttccgacgccttcaactccatcgcctcttccaccacaacctaaacccaaaaaaacaattggcagcgcaaccgcccacagctcgtgacgaggcgacccaacccccccgtagcggcggcggcggcggcggcaggaggcggaggagccaaggagggcggcgaggagaggaccgtcaagctcttcgtgggccaggtgcccaagcacatggccgaggccgacctgctcgccttgttccgcgaggtagccgccgtcgacgaggtcaccgtcatcaaggacaaggccaccaaggtctcccgagggtgctgcttcgtcatatgcccctcaagggaggaagctgacaaggcggtgaatgcctaccacaacaagcaaacgctctctggggcatcaagtcctttgcaagtaaaatatgctgatggggagttggagaggcttgaacataagcttttcattggaatgcttccgaaaaatgttacagacactgagttgactgatttgttttccaaatatgggaatgtcacggatttgcaaattttgagaggttcacaacaaacaaacaaagctggctgtgccttcattaaatatcaaacaaaagatcaagcattggcagctattgaagctctaaacgggaagcacaaaatagagggttctagcgtgccattggttgtcaaatgggctgatacagaaaaggaaaggcaggctcggaaagcacaaaaagctcagtcacagctatctcatatacccaatgcaagtccaatgcagcagcactcttcagtatttggtgctttacagatgggatatatgcctcaatacaatggatttggttatcagccaccagggacatacggacttatgcagtaccctctatctcctatgcaaaatcaaggccccttccagaatatggttcaacctcttaaccaagggaactcgataagaggagtcaatcctgaagtgtctcccagttcagttcaaaggtcatttaatgcaatgcagctaggcagcccttatcctgctatgcctggtatgcagtatcctggatcatatcccggtggtcccatgggcaaccgtcatttgggaaattctcacaatccgattaaagctccaaattcgaatgccaattccactgtttcttctagtcccagcagcaatgctggtgggcaggttgaaggtcctcctggagccaacctatttatttatcatatcccacaagaatacggtgaccaggagctttccagcgccttccagagtttcggaagagtagtaagcgctaaggtgttcgtagataaagcaacgggcgtgagcaaatgcttcggttttgtgagctacgactctcctgcctccgcgcaggcagccatcaacaggatgaacggctaccagttaggcggtaaaaagctcaaggtacaactgaagagagaaaacaacaccaagcacagtagtaaaccgttttgacagacaaggcagcagccgtccggtacccggtacatattaattgaccatcaacacattgcagcagcagcctcagggcctggggagggaagagacccgtgtacccctctttgttcacttcaacattcttggagattcgtcagtcagctcagctcgtgtaattcattgcagcagacataggccgtagcagcagtttgtaccatgatcagatcacttgtacacatgattcattcaattgttactgacagccggctttcatcctagaataattcgctgtgacaaccttatcatttgctgacgaatgaagtcaggtagacttgttcatctatggaatgatggcaactttcgagcga

SEQ ID NO: 199059 - DNA, 4427 bp, Zea Mays
gccgcagccgccgcctaagctcgacgcgccgcggcggtggatgcgacgccacacccccggccttctcgccgccaatctcctccgcgcctcgtcgctcctcagacccccgtccgtcctcgccgcccgcgcggccttgctccaccatgcgccggacgacgcccaccgcctgctcgacgaaacgccgcgcgggagggcggccgccatcgtacgtgccctcacgtccgcaccgtcttcctcctccggtgacacggcctgcatcgcgtgcctccactgcgcggccctcaagtcaggcgccgtgctggacccgccagtgcgcacgtccctgctcgcggcgtacgccagggccggccgcggcgcgggagcgggagccggagcaggcgccgccctggcgctcttccgcgaggccgttgcgcccgacgtgatcctgtggaacgcggccgtcggcgccctgacgacgagctgccggtacgacgacgccgcggctctgttccggcggatggcgcgcgagctcggggagtttgactccaccaccgtggtcgtcatgctgtcgggggcgtcccgcgcgggtaaccttcggcgtggaatggagctccatggcatggcggccaagagttgtctcggcgctcattgtctcggcgcgtggaacgctctcgttgacatgtatgcaaagtgtggtgagtttaggtccgcagaggttgtgtttcatagcatgccgtgcagggacaccacctcatggaactctgtcataagtgggagcatttttaacgggctcgctgaggtgtcagcgtgctacttcagggaaatgagttgctccatcttccagccagatgaggtgagcctctcttctgtcctctcagcctgctctcgtctggatgatctcttctcctttggggagtctgtgcatagctgtgcagtcaaactcggttatgaggacaccgcgtcttgctcagtagcgaattctctcgtgacgttctactctgagtttggaatgccagaggctgcgaagaaggtcttcgccagcaatttgaacaggaatttggtatcatggaatgctatgatcaagggtctagtccagaatgaaagagtaaccgaggcccttgctgttttgaggcaaatgagattggagaaccagccagatgtcgccactttggtgaccatagtttcaggctgtgctgatcaaggcctactttctgaaggggaaacactccatggatacgtaatcagaaaaggacttcttcgtgaggagccttccatgggaaatagcttactcgatctgtatttgaaatgtgacgaaccatctaatgcaggcctgttgtttatgacaatgccaagaagggacttgatatcgtggaacacaatgatttctggttactcaagatatggcccactgagagaagaggctcagttaatgttcaaaggattactttctgaaggttcatcgtgcagcttggccactatgctagctgtcataccatcatgctccattccggaagaacttagctttgggaaagcacttcactctttcagcctgaagtgtggatttacatctagtggggtttcggctgttaatgctttgatacacatgtatatgagctgtggtgatccactggccgccttttcgcttattgaaagaataataccggtatcagatatcatttcctggaatacggtcatagttgggtgtctgcaaaatgaactccataaagatgcattggaaatctttcggttcatgtattgttctttggccataaaccctgacagtattacaatagttagtgtcttatcagcatgtggagatcttaatctactagcacttgggaaatccatccactgcatgatcctgaagcacttgtttgcttccaatttgagggtgaaaaattcattattgaccatgtattttcgctttggagatactagaagtgctgagttagtcttttatagcatgggagacacaaatttgtgctcctggaactgtatgatctctggctttgcacagaataacaaaggctggagagcattgcagttctatcagaagatggaggatttcgaacctaatgaaatatctgttgtcggtatcatctgtgcttgcacacagcttggtggttatagacaaggaaagagcatacacgggcatgtgttcaggtctgttctgcacaataatgtttttatttcagcatcacttgttgatatgtattgcaagtgtgggagactggacattgctgtcagagtatttgaagcttctgccgaaaaatcgattgccgggtggaactccttgatatcagcttttggattccatggccatgggatgaaatctatagatcttttctggaagatgcatgattctggaatgaaagccacgaaaagcacatttattgctctactgtcagcttgcagtcactctggacttgttgatgaagggtggaagtattattgccttatgtcagaaaagtttgggatcacaccagccccagagcaccatgtctgcattgtagacatgcttgggcgggctggtcggctgcaggaagcgcacaagtttgtggagagcttgccgtctcaacaaacacacggaatttggggcgcactgttaaatgcttgcagtagcaggagtgaactcaagatgggcgaatccatcgcaaaacatttgctacatttggagcctggaaatagcggttattatgtaactgcagcaaacctttatgcatacaaagacatgtggagtggtgtggcccaagttaggagcgttttgcaagataaagggctggtgaagccccatggtcgtagcactgttggttaagcggtgggtcataaaccatggaagccatacaatatgacgaatcgccatgaatgtttgtcaacttcccaagttcttctcacaagccgtctcaattatgagctgcaagttgcacgctggtatagtggtatcttattcggtgctgcttcgtcatatgcccctcaagggaggaagctgacaaggcggtgaatgcctaccacaacaagcaaacgctctctggggcatcaagtcctttgcaagtaaaatatgctgatggggagttggagaggcttgaacataagcttttcattggaatgcttccgaaaaatgttacagacactgagttgactgatttgttttccaaatatgggaatgtcacggatttgcaaattttgagaggttcacaacaaacaaacaaagctggctgtgccttcattaaatatcaaacaaaagatcaagcattggcagctattgaagctctaaacgggaagcacaaaatagagggttctagcgtgccattggttgtcaaatgggctgatacagaaaaggaaaggcaggctcggaaagcacaaaaagctcagtcacagctatctcatatacccaatgcaagtccaatgcagcagcactcttcagtatttggtgctttacagatgggatatatgcctcaatacaatggatttggttatcagccaccagggacatacggacttatgcagtaccctctatctcctatgcaaaatcaaggccccttccagaatatggttcaacctcttaaccaagggaactcgataagaggagtcaatcctgaagtgtctcccagttcagttcaaaggtcatttaatgcaatgcagctaggcagcccttatcctgctatgcctggtatgcagtatcctggatcatatcccggtggtcccatgggcaaccgtcatttgggaaattctcacaatccgattaaagctccaaattcgaatgccaattccactgtttcttctagtcccagcagcaatgctggtgggcaggttgaaggtcctcctggagccaacctatttatttatcatatcccacaagaatacggtgaccaggagctttccagcgccttccagagtttcggaagagtagtaagcgctaaggtgttcgtagataaagcaacgggcgtgagcaaatgcttcggttttgtgagctacgactctcctgcctccgcgcaggcagccatcaacaggatgaacggctaccagttaggcggtaaaaagctcaaggtacaactgaagagagaaaacaacaccaagcacagtagtaaaccgttttgacagacaaggcagcagccgtccggtacccggtacatattaattgaccatcaacacattgcagcagcagcctcagggcctggggagggaagagacccgtgtacccctctttgttcacttcaacattcttggagattcgtcagtcagctcagctcgtgtaattcattgcagcagacataggccgtagcagcagtttgtaccatgatcagatcacttgtacacatgattcattcaattgttactgacagccggctttcatcctagaataattcgctgtgacaaccttatcatttgctgacgaatgaagtcaggtagacttgttcatctatggaatgatggcaactttcgagcga

SEQ ID NO: 199060 - DNA, 2110 bp, Zea Mays
cgtgtcacatgcgctcgagaatttttaggaaagcgtttcatctgcgagagtttcatttgggggctctaaaatagcctcaccctcctcgtgccttatcttcatctcacctgctctttctcctccgtgctgatcggcagtctctaagctttgcaacaactgatagccgaattccgcgcgccggtccctaaaaaaatgcaagtactaggaagtagataagatgcatttccctgtaatttttcgttattatatatactcagcacgggaaggaggggagacactctgttcaaccaccagccgagttcgcagcggcactccagggtccaggcccagcagcctcttcggctcttcgttgggggtgcgtggacaccggaaattgcctcggggattgcgttcctgatctaagcccggcatgaagggctgctcagagcgtttgctgctcctgctgctgctggcatcgtcgttgttactgtccgtcgtggttgccgcgcagcagacttgccctgccgacctcgacagcaaatgcgacggtggcgcgcctgatgactgggagggggaattcttccccggcgtcccgaaaatcaagtatgagggtccaacaagcaagaaccctcttgcttataagtggtataacaaggaggaagtcattctcggaaagaagatgaaggactggatgcgcttcagtgttgcgttctggcacacgttccgtggtactggtgctgatccttttggtgcgcctacaaaggtttggccttgggaggacggcacaaattcgttggccatggctaagagaagaatgagagctcactttgagttcatggagaagctgggggttgacaaatggtgcttccatgatagggatattgcccctgatgggaaaactctcgaagaaacaaatgctaacttggatgagatagttgagctggcaaagcagctccagggtgagaccaatataaagccattgtggggtactgcacagctctttatgcatcctcgttacatgcacggagctgctactagcccagaggttaaagtatatgcatatgcggctgcacaagttaagaaagctttggaggtggtgaaaactatgtgttttggggtggaagagagggttaccaaactcttctgaacactgatcttaagagagaacttgaccatttggctaactttcttcaagctgctgttgactacaagaagaagattggattcaacggaacactgttgatagagcctaaaccacaggaacctacaaaacaccagtatgactgggatgttgcaactacgtttgcttttctacagaagtatggtcttaccggagagttcaagattaatgttgagtgcaaccatgctactctatctggacatagctgccatcatgaactggagactgcacgcattaatgggctgcttgggaacattgatgcaaacactggtgatcctcaagttggctgggacacggatcagttcatgacagacattgcagaggctactttggttatgtcaactgtggttaagaatggtggacttgcacctggtggcttcaactttgacgccaaattgcggagggaaagcactgatgttgaggacttgtttcttgctcatatctccggaatggacaccctggcccgtggcctccgcaacgccgccaagctgatcgaggatggttccctagatgctctcgtccgcaagcggtaccagagctttgatagtgagattggtgccttgatcgaggctgggaaaggagactttgaggcgctagagaagaaggtccttgagtggggtgagcccactgttccgtccggcaaacaggaactggcggagattctgttccactctgctctatagatggcgccatgtccgtagcggtagctcctggaataagcaagcactgagcctgcgccctcccaacgcgcgcggtcgtcctcaccagtcaccaccaagggaatgtttctggttgcgcgcgatgaaccatgtacaatacaccgtggaactgaaataaattgaaatagctagtcagaatttttagaactgttgcctctttgtttggaacggaatgaaactgaacttggttagtttgagcttatccttgcattttttctttgatgcggtggtt

SEQ ID NO: 199061 - DNA, 1446 bp, Zea Mays
tgattataagagtagtacaggattgcagggcctgaagaatccgattaccttgatgagccatgttacaccagtgatggccatcgccactatgatactatctctattactggatccttggagtgaatttcaaaagaattcatattttgatagcccttggcatgtcatgcgcagttgcttacttatgcttatcggaggatccttagcttttttcatggtgttaacagagtatatacttatttcagcaacaagtgccataaccgtgacgatagctggggtagtaaaagaagctgtaaccattttggttgcggtattttatttccatgatgaatttacttggttgaaagggtttggtcttttcaccattatggttggtgttagcttgttcaattggtacaagtatgagagattcaaaaggggtcagataaatgaggatgacgtcagctctccatttactggtgacgtcaagtacattattatagacgacttggaatatcagaatgaatttgaggaagatacataattctgtaatacagtgaattctaactgccactggcttgttcatgcctgaacctattgaaatagtagttacttatcgaggttttctccggaaaacatgcacgaagaacacagctaaggctaggtgtgattatactatgcacaccaaaatctgatgtgagctatgtttgtcacgatggatgttcaattctcgtcttggttgaacagccaggctgactacactgtcaagcaaagagctaactccatcggatcagaattcccattttgagaagactagcagtgggttgcatattgatatacatgcttatagcgggaactgctgagaatgctccggcatctgtatatttgttgttctcttcgcgttagtgcgctgggcgcatattcattcttgaacctccacatttttagtgacgaggtgtattcattctctatataggtctgttttgtaaatgtgaccagaggataccatacacgtgctgttttcccttgaaacctagggagcggcatttgattttttctgtagactgtttcggggtaccgaatatgttgtggatatttgattgaagaattaagaacagcagggtagattggctaacttgccttttgaggtgttaatgggctctaagttttagactataaaatctaatgattgaatcatattagaatcaggttttatttctattcatttttaaactagaatttattaatggtccaaacttattatgaagaaacatttagatcgtgatctattaccgccccattcttacctcatttatttatgccgcgaagtaaaggcaacatgttagaataattgccaaaatttttgttcgcaggacaaaaagtcctcagttcacaaaaaaaaaaaaaaaaaattcttgcttgcctcgcttttcttcacaacaccagatttgcctgaatcttcttggctag

SEQ ID NO: 199062 - DNA, 5531 bp, Zea Mays
gatttctccttcccctcccgctgccgttcacgtcctcaataaataccccaccctactccatcttctcgtgttgttcggcgcacgcggagacagcccgcgatcccgatcccgatccttcttcacgcgaatctcgacgatcccccccttccttccttcaagaaggagagcaccctccacctggtgctccgcctgaggggtggcaatggtaatgcagatctttgtgaagaccttgactgccatgtatgataccgtctttgaagtatttgtattgtctgtcgtgactaagtttgtttcgtggaccggttgtcttctaccctacccaaaactacagtgtggcagcaaatgatgaataaatgtgatgtttgaatttaaaaatatgtgctgaataatgttgtttttttgttatgtcagttaatgttactaaattggctagcttttaaattttgtttactagtgttcgtcgcacctacatctttgtactgaatgtttgctttaggttctgacaaactcattttgagactagttaaatacttaggacctaaaatgaatgcagtaaatatttatcatattttctatgaatttggtcagacttaatttggctgaatccaaacctaatgtttttttactaatcatattgatatacatgtttgattgtctgattatctggtttgttactattttacttggttcgggtctctatttcttggtgaatctacatagacttgtgcagaacctggttgtgatcataattctacttcctctggagataaagtggcttgcttttctgtatgtctaattttttgtttgaccattgaaaaacaaacaaccaacttacggatcaaatcagtattactgccagaagtatatttgacccttaacactatttataaattacataaagtttcacgattaaaactgacggacggatgttattggcctagaaatagctcgaaagctctaggcttaacaacccttgcactaaattattgtgattaacgttgtactttatagtgacaaaaattaattggaattatatagtttcttttgttttgtagaagcaaactaagttaggctataataatatagatagatgattaggtttatatatggtttcttttgtgaattttattaaggatcaactagtgtcatgaagttgatagacataaaatagcgacacatttcttttgccgtactataaaaagcgctggaataattaagatagtcaagagggtgaatttggtgtctctaacttttcttggacaaatttaaattttgaacacaagcttaactatctccgtgtgttcaataacgtgtctaataatatgataaaaagtttatatcctgattttctattttatactacgatggtaattttaaggatgctaattttaaaattgaattgcttaaatataaatgtataaaataagtaaaagatcaatggactcctcgatgttttgtattatagatgttgttaattgattaacttgtactgagttatttaagagcaaggtagtaagctgttgccaacaactgattcggttgtcacggattagtggccttaaataatttctagccggattacttctctaatcttaacgatttctgatctatttcttaaaaaacgaataaggtctgaatcaagatcagagctggagatgtgcatgggtgcatctcatatggcacaccgcagacaaaagattgcatagttggctccgatcctatttggcaagtgattagagatggcaatggcccaatggttacccgcgatccgatactcgatgagtatttactctattagggtatatatatggtctaaatgttctacctatggatttcttgttaggtaaaaaccttcaaccaattggtaaacgggtataagaaaattctgtccctacccatacttgttaacccgtgggtataaacttagcctaaaaacatgaacttgggctttacttatatatttcttttgacttagcctaaaaacatgaacttgggctttacttatatatctcttttgactatttaacaaccttttcggcgataataccatagaaggcttaacaactatttgatgatcatgtaatagaacatgtaatgtgttatgtgttactatcctagtgttgctactatatccaattatctatggtgttcttgaatagatgattgaatgatgttagaaattttgtaatggatatattgacatttgtataatgtagatgtttaatctttgtgagtacggatctgacgggtaactcatacctatatgggtaatataagtgacccgatgggactattttttttatcttaggtatggatatgagatagataagagatcataatgctcatgtacgccatcaatgccatttttttaaatgaacaacatttgaagccttttccatgagaaagagaaaggggaactaagatatttatagaagttccttagagcaacttcaataggaaccctaatcacataaacaaattaaaatatagagctttaataagaaaagacagctacccaagagccttattttaatgaaattcgtgtaaacttgaagggtagcatatttggatctgagatccgcagccctatatggttcgcgctcgtcccaaccacctcggatattttcgctttcttcttcgccgccaccggctcccattccaccgccaaggtcagcttcgtttccatcgccgcatcgcgttcgcgtgtgccaaccccgctcccatctcaactgtcaccgtccgaagaactgatccgttctgcacaaccgctcgtcactctccaaatttgctgcacctgccctctccaaagttcttgcactcgtccctctccaaagttcctgcagattcacttctctccaaagttcaggaggatgtgtggtgtgacagcgctacaacaaatctgtcaacggggactctcatcctcttgctcatagaaagaactgcagtgttacaggtaggtaattactagagtactactactaagtaaatctgtcaaaggcagtcatggcatccatatccttcacatcagtactgggagtggcacacgcaccgcacacatactactacatctactagtatgtagtggagtgcttgaaaggcataagcgaattttcttcttgtttggtctacgtccatttgcttgtccactaaccggctagtttactctgctttttgggttttccacgtctctacaattgtgactgttagagcaactccagtagttctctaaaaaatagcttgctaaaatcatgtttagcaagttgctaaatagctattggaagtaaaaaataacttagtttccaatagttgctcatatttaggaagtagttcgattttgaatctagctttagcggccctgtccctatgagatctgcctgataataaggttgagagcagaggatatgagggcggaagaaaaaaggtcggtcgatatgaattatggatgagtggtggtccggtgacgcaacttatgagaaagttaggttcgacggtgaaggagaaacttgcgtcatacgtgtttgacctagctacctcattatgctagaaaataaaaaagagtgtgttataactggctatctcactgtataggaaaggtaaaaataatcacgctagtgtgaagaaattgacgtcaactgtatttagggagttcctaccgagttgctaaatgtggagagtaaatagagttgaatagcaactaactaaatttagcaagtctatttagagaaccattggagaagtatttttctgttcacttcttaaatttaagatttagagagttatttagagaactattgaagttgctcttagaccacctataattgtgactgttgaccacctatagatgcggttcaactagccctccgaccccctctcgagagttccgctccaccgcggcgaaggaagtggcggaggaggaggatccgcgcctgcgctgggccttcgtgcggaaggtgtacgcggccccccgctgccgtctggcccacgtacatcgccatcctcctatccctgtccccgctcggactcttcctcgctaccgccgtgtctgcggatctggccaagtagcccggtaggaagcgccgtgggaggagacaggcgaggcgttcgaccgccgccggcagcttaggacgtaccacgtctctgttctatgggttcacgagtttcggggccctacatggattctccgcctccgcctccgcctcgtccgccatcgccgccgcgacaccctcctcaccctcagggcgagcgtcacgtcggcggggagatgctgtaccaggacacagaccataggctccgcgcgctggtcgggagcgccgagggcttcggccgccacgccatcgggggcctctacggggccatccaccgcgtcacgtcgctccaagacgacgggcccgggagtctgagggaggcgtgccgggcggaggagcccctgtggatcgtcttcgaggtgtccggcaccatccacctccactcctacctccgcgtctcctcgtacaagaccatcgacgggcgcggccagcgcgtggtgctcaccggcaaggggctccggctcaagtcatgccatcacgtcatcatctgcaacctggtgttagaaggaggccgtgggcacgacgtggatggcatccaggtcaagcccgactccaccaacatctggatcgaccgctgcaccctcgccgactacgatgacggcctcatcgacatcacgcgccagagcacagacatcacagtctcaagatgccattttatgcggcacgacaagacgatgctcatcggtgccgaccccacgcacgtcggcgaccgctgcatcagggtcaccatccaccactgcttcttcgacggcacgcgacagaggcacccccgcctccgcttcggaaaggttcacctctacaacaactacacgcgcagctggggcatctacgccgtctgcgcaggcgtagaggcccagatcgtgtcccagtgcaacatctacgaggcaggtggagggcccccaaagaagacaactgtattcaagtacatgccggagaaggccggcgaccgagaggacgtggtggcagggtcgatcagctcggaaggggacgccttcctcaatggcgcgctgccctgcctgatcgataaccctgggtctgtcttcaggccagaggagtactaccagcagtggaccatggagccagcgtcgccggcgctcaaggacataatacagctctgcgcaggatggcagccggtgccccgccccccggatgatcgctgactttcatcattctgatatgctgcagctcgcttctagcttgatggtttagctgtggcatggtggttatgacaaaggatcctccaaaagctaataaataaaaaggaggtggagacgggagcttgactgggacgcggcggcctacacgaactcggtggcgtcggaggcggcgaggtcggcgataagcaacagggggcgagagcggtgacaaggacaggcgtgtgagagtgggattctcttgcttctctggcttctagtttctcgaggtcaagttgcatgtgtactcacg

SEQ ID NO: 199063 - DNA, 5986 bp, Zea Mays
aagcattgaacgggcatctctctcggctgctctcgaaagctccgcgcttggcgtggcggagccgagccgagggctgatctcgtccacacggcactaggatttctccttcccctcccgctgccgttcacgtcctcaataaataccccaccctactccatcttctcgtgttgttcggcgcacgcggagacagcccgcgatcccgatcccgatccttcttcacgcgaatctcgacgatcccccccttccttccttcaagaaggagagcaccctccacctggtgctccgcctgaggggtggcaatggtaatgcagatctttgtgaagaccttgactgccatgtatgataccgtctttgaagtatttgtattgtctgtcgtgactaagtttgtttcgtggaccggttgtcttctaccctacccaaaactacagtgtggcagcaaatgatgaataaatgtgatgtttgaatttaaaaatatgtgctgaataatgttgtttttttgttatgtcagttaatgttactaaattggctagcttttaaattttgtttactagtgttcgtcgcacctacatctttgtactgaatgtttgctttaggttctgacaaactcattttgagactagttaaatacttaggacctaaaatgaatgcagtaaatatttatcatattttctatgaatttggtcagacttaatttggctgaatccaaacctaatgtttttttactaatcatattgatatacatgtttgattgtctgattatctggtttgttactattttacttggttcgggtctctatttcttggtgaatctacatagacttgtgcagaacctggttgtgatcataattctacttcctctggagataaagtggcttgcttttctgtatgtctaattttttgtttgaccattgaaaaacaaacaaccaacttacggatcaaatcagtattactgccagaagtatatttgacccttaacactatttataaattacataaagtttcacgattaaaactgacggacggatgttattggcctagaaatagctcgaaagctctaggcttaacaacccttgcactaaattattgtgattaacgttgtactttatagtgacaaaaattaattggaattatatagtttcttttgttttgtagaagcaaactaagttaggctataataatatagatagatgattaggtttatatatggtttcttttgtgaattttattaaggatcaactagtgtcatgaagttgatagacataaaatagcgacacatttcttttgccgtactataaaaagcgctggaataattaagatagtcaagagggtgaatttggtgtctctaacttttcttggacaaatttaaattttgaacacaagcttaactatctccgtgtgttcaataacgtgtctaataatatgataaaaagtttatatcctgattttctattttatactacgatggtaattttaaggatgctaattttaaaattgaattgcttaaatataaatgtataaaataagtaaaagatcaatggactcctcgatgttttgtattatagatgttgttaattgattaacttgtactgagttatttaagagcaaggtagtaagctgttgccaacaactgattcggttgtcacggattagtggccttaaataatttctagccggattacttctctaatcttaacgatttctgatctatttcttaaaaaacgaataaggtctgaatcaagatcagagctggagatgtgcatgggtgcatctcatatggcacaccgcagacaaaagattgcatagttggctccgatcctatttggcaagtgattagagatggcaatggcccaatggttacccgcgatccgatactcgatgagtatttactctattagggtatatatatggtctaaatgttctacctatggatttcttgttaggtaaaaaccttcaaccaattggtaaacgggtataagaaaattctgtccctacccatacttgttaacccgtgggtataaacttagcctaaaaacatgaacttgggctttacttatatatttcttttgacttagcctaaaaacatgaacttgggctttacttatatatctcttttgactatttaacaaccttttcggcgataataccatagaaggcttaacaactatttgatgatcatgtaatagaacatgtaatgtgttatgtgttactatcctagtgttgctactatatccaattatctatggtgttcttgaatagatgattgaatgatgttagaaattttgtaatggatatattgacatttgtataatgtagatgtttaatctttgtgagtacggatctgacgggtaactcatacctatatgggtaatataagtgacccgatgggactattttttttatcttaggtatggatatgagatagataagagatcataatgctcatgtacgccatcaatgccatttttttaaatgaacaacatttgaagccttttccatgagaaagagaaaggggaactaagatatttatagaagttccttagagcaacttcaataggaaccctaatcacataaacaaattaaaatatagagctttaataagaaaagacagctacccaagagccttattttaatgaaattcgtgtaaacttgaagggtagcatatttggatctgagatccgcagccctatatggttcgcgctcgtcccaaccacctcggatattttcgctttcttcttcgccgccaccggctcccattccaccgccaaggtcagcttcgtttccatcgccgcatcgcgttcgcgtgtgccaaccccgctcccatctcaactgtcaccgtccgaagaactgatccgttctgcacaaccgctcgtcactctccaaatttgctgcacctgccctctccaaagttcttgcactcgtccctctccaaagttcctgcagattcacttctctccaaagttcaggaggatgtgtggtgtgacagcgctacaacaaatctgtcaacggggactctcatcctcttgctcatagaaagaactgcagtgttacaggtaggtaattactagagtactactactaagtaaatctgtcaaaggcagtcatggcatccatatccttcacatcagtactgggagtggcacacgcaccgcacacatactactacatctactagtatgtagtggagtgcttgaaaggcataagcgaattttcttcttgtttggtctacgtccatttgcttgtccactaaccggctagtttactctgctttttgggttttccacgtctctacaattgtgactgttagagcaactccagtagttctctaaaaaatagcttgctaaaatcatgtttagcaagttgctaaatagctattggaagtaaaaaataacttagtttccaatagttgctcatatttaggaagtagttcgattttgaatctagctttagcggccctgtccctatgagatctgcctgataataaggttgagagcagaggatatgagggcggaagaaaaaaggtcggtcgatatgaattatggatgagtggtggtccggtgacgcaacttatgagaaagttaggttcgacggtgaaggagaaacttgcgtcatacgtgtttgacctagctacctcattatgctagaaaataaaaaagagtgtgttataactggctatctcactgtataggaaaggtaaaaataatcacgctagtgtgaagaaattgacgtcaactgtatttagggagttcctaccgagttgctaaatgtggagagtaaatagagttgaatagcaactaactaaatttagcaagtctatttagagaaccattggagaagtatttttctgttcacttcttaaatttaagatttagagagttatttagagaactattgaagttgctcttagaccacctataattgtgactgttgaccacctatagatgcggttcaactagccctccgaccccctctcgagagttccgctccaccgcggcgaaggaagtggcggaggaggaggatccgcgcctgcgctgggccttcgtgcggaaggtgtacgcggccccccgctgccgtctggcccacgtacatcgccatcctcctatccctgtccccgctcggactcttcctcgctaccgccgtgtctgcggatctggccaagtagcccggtaggaagcgccgtgggaggagacaggcgaggcgttcgaccgccgccggcagcttaggacgtaccacgtctctgttctatgggttcacgagtttcggggccctacatggattctccgcctccgcctccgcctcgtccgccatcgccgccgcgacaccctcctcaccctcagggcgagcgtcacgtcggcggggagatgctgtaccaggacacagaccataggctccgcgcgctggtcgggagcgccgagggcttcggccgccacgccatcgggggcctctacggggccatccaccgcgtcacgtcgctccaagacgacgggcccgggagtctgagggaggcgtgccgggcggaggagcccctgtggatcgtcttcgaggtgtccggcaccatccacctccactcctacctccgcgtctcctcgtacaagaccatcgacgggcgcggccagcgcgtggtgctcaccggcaaggggctccggctcaagtcatgccatcacgtcatcatctgcaacctggtgttagaaggaggccgtgggcacgacgtggatggcatccaggtcaagcccgactccaccaacatctggatcgaccgctgcaccctcgccgactacgatgacggcctcatcgacatcacgcgccagagcacagacatcacagtctcaagatgccattttatgcggcacgacaagacgatgctcatcggtgccgaccccacgcacgtcggcgaccgctgcatcagggtcaccatccaccactgcttcttcgacggcacgcgacagaggcacccccgcctccgcttcggaaaggttcacctctacaacaactacacgcgcagctggggcatctacgccgtctgcgcaggcgtagaggcccagatcgtgtcccagtgcaacatctacgaggcaggtggagggcccccaaagaagacaactgtattcaagtacatgccggagaaggccggcgaccgagaggacgtggtggcagggtcgatcagctcggaaggggacgccttcctcaatggcgcgctgccctgcctgatcgataaccctgggtctgtcttcaggccagaggagtactaccagcagtggaccatggagccagcgtcgccggcgctcaaggacataatacagctctgcgcaggatggcagccggtgccccgccccccggatgatcgctgactttcatcattctgatatgctgcagctcgcttctgtaagaatattcgtttcacggaagcactgcatttgtatgcatctcatcctaggtaattcaacatttgtttcatggtagagtggcatttgtatgccactcctcttcatctgccccctctctgaaatgtagtagaaaagttgttatggttttctatttgtgtctttatttatggtacatacaattcccaatgtaaagatatttctctcgtccatagcagtacaatagcttttagttgtgaatgctactcgtatgtcttatactagaaagctgcaagacacgtcaatctgctttgtagacattcacagaggatgaggatctccattcataaggaatgcaggaattttaactgaacttgcagagcttgatggtttagctgtggcatggtggttatgacaaaggatcctccaaaagctaataaataaaaaggaggtggagacgggagcttgactgggacgcggcggcctacacgaactcggtggcgtcggaggcggcgaggtcggcgataagcaacagggggcgagagcggtgacaaggacaggcgtgtgagagtgggattctcttgcttctctggcttctagtttctcgaggtcaagttgcatgtgtactcacg

SEQ ID NO: 199064 - DNA, 4768 bp, Zea Mays
ctcgtccacacggcactaggatttctccttcccctcccgctgccgttcacgtcctcaataaataccccaccctactccatcttctcgtgttgttcggcgcacgcggagacagcccgcgatcccgatcccgatccttcttcacgcgaatctcgacgatcccccccttccttccttcaagaaggagagcaccctccacctggtgctccgcctgaggggtggcaatggtaatgcagatctttgtgaagaccttgactgccatgtatgataccgtctttgaagtatttgtattgtctgtcgtgactaagtttgtttcgtggaccggttgtcttctaccctacccaaaactacagtgtggcagcaaatgatgaataaatgtgatgtttgaatttaaaaatatgtgctgaataatgttgtttttttgttatgtcagttaatgttactaaattggctagcttttaaattttgtttactagtgttcgtcgcacctacatctttgtactgaatgtttgctttaggttctgacaaactcattttgagactagttaaatacttaggacctaaaatgaatgcagtaaatatttatcatattttctatgaatttggtcagacttaatttggctgaatccaaacctaatgtttttttactaatcatattgatatacatgtttgattgtctgattatctggtttgttactattttacttggttcgggtctctatttcttggtgaatctacatagacttgtgcagaacctggttgtgatcataattctacttcctctggagataaagtggcttgcttttctgtatgtctaattttttgtttgaccattgaaaaacaaacaaccaacttacggatcaaatcagtattactgccagaagtatatttgacccttaacactatttataaattacataaagtttcacgattaaaactgacggacggatgttattggcctagaaatagctcgaaagctctaggcttaacaacccttgcactaaattattgtgattaacgttgtactttatagtgacaaaaattaattggaattatatagtttcttttgttttgtagaagcaaactaagttaggctataataatatagatagatgattaggtttatatatggtttcttttgtgaattttattaaggatcaactagtgtcatgaagttgatagacataaaatagcgacacatttcttttgccgtactataaaaagcgctggaataattaagatagtcaagagggtgaatttggtgtctctaacttttcttggacaaatttaaattttgaacacaagcttaactatctccgtgtgttcaataacgtgtctaataatatgataaaaagtttatatcctgattttctattttatactacgatggtaattttaaggatgctaattttaaaattgaattgcttaaatataaatgtataaaataagtaaaagatcaatggactcctcgatgttttgtattatagatgttgttaattgattaacttgtactgagttatttaagagcaaggtagtaagctgttgccaacaactgattcggttgtcacggattagtggccttaaataatttctagccggattacttctctaatcttaacgatttctgatctatttcttaaaaaacgaataaggtctgaatcaagatcagagctggagatgtgcatgggtgcatctcatatggcacaccgcagacaaaagattgcatagttggctccgatcctatttggcaagtgattagagatggcaatggcccaatggttacccgcgatccgatactcgatgagtatttactctattagggtatatatatggtctaaatgttctacctatggatttcttgttaggtaaaaaccttcaaccaattggtaaacgggtataagaaaattctgtccctacccatacttgttaacccgtgggtataaacttagcctaaaaacatgaacttgggctttacttatatatttcttttgacttagcctaaaaacatgaacttgggctttacttatatatctcttttgactatttaacaaccttttcggcgataataccatagaaggcttaacaactatttgatgatcatgtaatagaacatgtaatgtgttatgtgttactatcctagtgttgctactatatccaattatctatggtgttcttgaatagatgattgaatgatgttagaaattttgtaatggatatattgacatttgtataatgtagatgtttaatctttgtgagtacggatctgacgggtaactcatacctatatgggtaatataagtgacccgatgggactattttttttatcttaggtatggatatgagatagataagagatcataatgctcatgtacgccatcaatgccatttttttaaatgaacaacatttgaagccttttccatgagaaagagaaaggggaactaagatatttatagaagttccttagagcaacttcaataggaaccctaatcacataaacaaattaaaatatagagctttaataagaaaagacagctacccaagagccttattttaatgaaattcgtgtaaacttgaagggtagcatatttggatctgagatccgcagccctatatggttcgcgctcgtcccaaccacctcggatattttcgctttcttcttcgccgccaccggctcccattccaccgccaaggtcagcttcgtttccatcgccgcatcgcgttcgcgtgtgccaaccccgctcccatctcaactgtcaccgtccgaagaactgatccgttctgcacaaccgctcgtcactctccaaatttgctgcacctgccctctccaaagttcttgcactcgtccctctccaaagttcctgcagattcacttctctccaaagttcaggaggatgtgtggtgtgacagcgctacaacaaatctgtcaacggggactctcatcctcttgctcatagaaagaactgcagtgttacagatgcggttcaactagccctccgaccccctctcgagagttccgctccaccgcggcgaaggaagtggcggaggaggaggatccgcgcctgcgctgggccttcgtgcggaaggtgtacgcggccccccgctgccgtctggcccacgtacatcgccatcctcctatccctgtccccgctcggactcttcctcgctaccgccgtgtctgcggatctggccaagtagcccggtaggaagcgccgtgggaggagacaggcgaggcgttcgaccgccgccggcagcttaggacgtaccacgtctctgttctatgggttcacgagtttcggggccctacatggattctccgcctccgcctccgcctcgtccgccatcgccgccgcgacaccctcctcaccctcagggcgagcgtcacgtcggcggggagatgctgtaccaggacacagaccataggctccgcgcgctggtcgggagcgccgagggcttcggccgccacgccatcgggggcctctacggggccatccaccgcgtcacgtcgctccaagacgacgggcccgggagtctgagggaggcgtgccgggcggaggagcccctgtggatcgtcttcgaggtgtccggcaccatccacctccactcctacctccgcgtctcctcgtacaagaccatcgacgggcgcggccagcgcgtggtgctcaccggcaaggggctccggctcaagtcatgccatcacgtcatcatctgcaacctggtgttagaaggaggccgtgggcacgacgtggatggcatccaggtcaagcccgactccaccaacatctggatcgaccgctgcaccctcgccgactacgatgacggcctcatcgacatcacgcgccagagcacagacatcacagtctcaagatgccattttatgcggcacgacaagacgatgctcatcggtgccgaccccacgcacgtcggcgaccgctgcatcagggtcaccatccaccactgcttcttcgacggcacgcgacagaggcacccccgcctccgcttcggaaaggttcacctctacaacaactacacgcgcagctggggcatctacgccgtctgcgcaggcgtagaggcccagatcgtgtcccagtgcaacatctacgaggcaggtggagggcccccaaagaagacaactgtattcaagtacatgccggagaaggccggcgaccgagaggacgtggtggcagggtcgatcagctcggaaggggacgccttcctcaatggcgcgctgccctgcctgatcgataaccctgggtctgtcttcaggccagaggagtactaccagcagtggaccatggagccagcgtcgccggcgctcaaggacataatacagctctgcgcaggatggcagccggtgccccgccccccggatgatcgctgactttcatcattctgatatgctgcagctcgcttctgtaagaatattcgtttcacggaagcactgcatttgtatgcatctcatcctaggtaattcaacatttgtttcatggtagagtggcatttgtatgccactcctcttcatctgccccctctctgaaatgtagtagaaaagttgttatggttttctatttgtgtctttatttatggtacatacaattcccaatgtaaagatatttctctcgtccatagcagtacaatagcttttagttgtgaatgctactcgtatgtcttatactagaaagctgcaagacacgtcaatctgctttgtagacattcacagaggatgaggatctccattcataaggaatgcaggaattttaactgaacttgcag

SEQ ID NO: 199065 - DNA, 4185 bp, Zea Mays
ctcgtccacacggcactaggatttctccttcccctcccgctgccgttcacgtcctcaataaataccccaccctactccatcttctcgtgttgttcggcgcacgcggagacagcccgcgatcccgatcccgatccttcttcacgcgaatctcgacgatcccccccttccttccttcaaggtctgaatcaagatcagagctggagatgtgcatgggtgcatctcatatggcacaccgcagacaaaagattgcatagttggctccgatcctatttggcaagtgattagagatggcaatggcccaatggttacccgcgatccgatactcgatgagtatttactctattagggtatatatatggtctaaatgttctacctatggatttcttgttaggtaaaaaccttcaaccaattggtaaacgggtataagaaaattctgtccctacccatacttgttaacccgtgggtataaacttagcctaaaaacatgaacttgggctttacttatatatttcttttgacttagcctaaaaacatgaacttgggctttacttatatatctcttttgactatttaacaaccttttcggcgataataccatagaaggcttaacaactatttgatgatcatgtaatagaacatgtaatgtgttatgtgttactatcctagtgttgctactatatccaattatctatggtgttcttgaatagatgattgaatgatgttagaaattttgtaatggatatattgacatttgtataatgtagatgtttaatctttgtgagtacggatctgacgggtaactcatacctatatgggtaatataagtgacccgatgggactattttttttatcttaggtatggatatgagatagataagagatcataatgctcatgtacgccatcaatgccatttttttaaatgaacaacatttgaagccttttccatgagaaagagaaaggggaactaagatatttatagaagttccttagagcaacttcaataggaaccctaatcacataaacaaattaaaatatagagctttaataagaaaagacagctacccaagagccttattttaatgaaattcgtgtaaacttgaagggtagcatatttggatctgagatccgcagccctatatggttcgcgctcgtcccaaccacctcggatattttcgctttcttcttcgccgccaccggctcccattccaccgccaaggtcagcttcgtttccatcgccgcatcgcgttcgcgtgtgccaaccccgctcccatctcaactgtcaccgtccgaagaactgatccgttctgcacaaccgctcgtcactctccaaatttgctgcacctgccctctccaaagttcttgcactcgtccctctccaaagttcctgcagattcacttctctccaaagttcaggaggatgtgtggtgtgacagcgctacaacaaatctgtcaacggggactctcatcctcttgctcatagaaagaactgcagtgttacaggtaggtaattactagagtactactactaagtaaatctgtcaaaggcagtcatggcatccatatccttcacatcagtactgggagtggcacacgcaccgcacacatactactacatctactagtatgtagtggagtgcttgaaaggcataagcgaattttcttcttgtttggtctacgtccatttgcttgtccactaaccggctagtttactctgctttttgggttttccacgtctctacaattgtgactgttagagcaactccagtagttctctaaaaaatagcttgctaaaatcatgtttagcaagttgctaaatagctattggaagtaaaaaataacttagtttccaatagttgctcatatttaggaagtagttcgattttgaatctagctttagcggccctgtccctatgagatctgcctgataataaggttgagagcagaggatatgagggcggaagaaaaaaggtcggtcgatatgaattatggatgagtggtggtccggtgacgcaacttatgagaaagttaggttcgacggtgaaggagaaacttgcgtcatacgtgtttgacctagctacctcattatgctagaaaataaaaaagagtgtgttataactggctatctcactgtataggaaaggtaaaaataatcacgctagtgtgaagaaattgacgtcaactgtatttagggagttcctaccgagttgctaaatgtggagagtaaatagagttgaatagcaactaactaaatttagcaagtctatttagagaaccattggagaagtatttttctgttcacttcttaaatttaagatttagagagttatttagagaactattgaagttgctcttagaccacctataattgtgactgttgaccacctatagatgcggttcaactagccctccgaccccctctcgagagttccgctccaccgcggcgaaggaagtggcggaggaggaggatccgcgcctgcgctgggccttcgtgcggaaggtgtacgcggccccccgctgccgtctggcccacgtacatcgccatcctcctatccctgtccccgctcggactcttcctcgctaccgccgtgtctgcggatctggccaagtagcccggtaggaagcgccgtgggaggagacaggcgaggcgttcgaccgccgccggcagcttaggacgtaccacgtctctgttctatgggttcacgagtttcggggccctacatggattctccgcctccgcctccgcctcgtccgccatcgccgccgcgacaccctcctcaccctcagggcgagcgtcacgtcggcggggagatgctgtaccaggacacagaccataggctccgcgcgctggtcgggagcgccgagggcttcggccgccacgccatcgggggcctctacggggccatccaccgcgtcacgtcgctccaagacgacgggcccgggagtctgagggaggcgtgccgggcggaggagcccctgtggatcgtcttcgaggtgtccggcaccatccacctccactcctacctccgcgtctcctcgtacaagaccatcgacgggcgcggccagcgcgtggtgctcaccggcaaggggctccggctcaagtcatgccatcacgtcatcatctgcaacctggtgttagaaggaggccgtgggcacgacgtggatggcatccaggtcaagcccgactccaccaacatctggatcgaccgctgcaccctcgccgactacgatgacggcctcatcgacatcacgcgccagagcacagacatcacagtctcaagatgccattttatgcggcacgacaagacgatgctcatcggtgccgaccccacgcacgtcggcgaccgctgcatcagggtcaccatccaccactgcttcttcgacggcacgcgacagaggcacccccgcctccgcttcggaaaggttcacctctacaacaactacacgcgcagctggggcatctacgccgtctgcgcaggcgtagaggcccagatcgtgtcccagtgcaacatctacgaggcaggtggagggcccccaaagaagacaactgtattcaagtacatgccggagaaggccggcgaccgagaggacgtggtggcagggtcgatcagctcggaaggggacgccttcctcaatggcgcgctgccctgcctgatcgataaccctgggtctgtcttcaggccagaggagtactaccagcagtggaccatggagccagcgtcgccggcgctcaaggacataatacagctctgcgcaggatggcagccggtgccccgccccccggatgatcgctgactttcatcattctgatatgctgcagctcgcttctgtaagaatattcgtttcacggaagcactgcatttgtatgcatctcatcctaggtaattcaacatttgtttcatggtagagtggcatttgtatgccactcctcttcatctgccccctctctgaaatgtagtagaaaagttgttatggttttctatttgtgtctttatttatggtacatacaattcccaatgtaaagatatttctctcgtccatagcagtacaatagcttttagttgtgaatgctactcgtatgtcttatactagaaagctgcaagacacgtcaatctgctttgtagacattcacagaggatgaggatctccattcataaggaatgcaggaattttaactgaacttgcag

SEQ ID NO: 199066 - DNA, 2319 bp, Zea Mays
aaagaatcgcaggagcagaaaagaaaccaatttttttttgttttctcttacagaagagaacaaacaaaggcttgagagcggtgtacagctagcgcctgcgtcttgacgatacgcgttagcaagtagcaagactcaagactcaagagggatcccttagcaaaaccggtctcgcaaagggacacaattccctaggaaccgcacaaaagcttcctgcaatccggcggctttggcgttgaacctccccccttgatcagtagtagaatcggctgctaaagatttctatttttatttttttctcggttcggaaggtgccgtgcggcgagcgaaataaatcgctgcggcgagaatcctgtggagatgagttgcgttaggtggcaggaccactcataaattctgcctgttcattcagatctgctccgtgctgtgcttcttctgctgctgccttgcagcgaccagcgagaagaaatccattcgctaggccggcccacccacccacgatagcggttgtggtcactcatgcgtcgtcgccggagtccaatctcgccgctcggagtttcttgacttttctggtcggagtttccatttcctcctggaggagattatttctttctcctctttcaccccgagaatctcgtctcgggtcgcgctggtttgattcctcctcgcctgagtccaccgctttcgcttccagtggagaagcttgtccgtgaagcagcgctcgtctcctgcttaaaatttcttccttctgccttggtttctttgctcgcgcccgccgatttgcttgctgcccagtccacactcctccgttcgtgtctcgcggctttccgcactcgttttcccggtctcggatttcgttaccaatgggcaacgcgttcgcgtgcatgccgcgcaaggagcagcgaggcgcggccgcggtgtcgcgcagcaagcggatggggagcgcgcggtcggcgcgcggcgggcccaagctgacgcccgcggaggaggagctcctccaccgccaggctctggccatggccatccaccagcacctcgacgccggcggctccatgtcgcgccgcatcgacgccggggcctccctgtcccggcgcatggccccgggctccaccagctcccgccgccgcggcgacctgccggactccgtcacgaatgccaagcccgccccaattgttctggagaatttggaaacaaagaaaattgtccttgttcatggagaagggttcggtgcttggtgttggtacaagaccatctcacacttggaggaagctggtctagatcctgttgccttagatctcacaggctctggcatagaccatactgatacaaacagcatagctacgttagcagattactccaagccattgattgattacctcgacagacttcctgaagatgagaaggtcattttggtcggccatagttgcggaggtgcgagtgtctcgtatgcactggagcagtacccccgaaagatctcaaaggcggtgtttcttactgctacaatgctccggtcggcggatgttttcttgcaagagtcacagtttctagtctatggaaatgggaaggacaagcctcctactgggctgatgttcgataagcagcagatcaaggggctgtatttcaaccaaaccccttccaaggatatggcactagcagcggtgtccatgaggcctatccctctagccccaatcatggagaagctctccctcaccccggagaactacggctccgtccgtcgctacttcatccaggcactcgacgaccacatgctgtcgccggatgcccaggagaagctggtccgcgagaaccctcccgacggcatcttcaagatcaagggcggcgaccactgccccttcttctcaaagccgcagtccctcaacaagatcctgctggagatcgcgcagatccaagctcctgcggcgctgctcaaggcgagctcccccgaggagaccgccgccgccatggtgacagggccagccaagtcatgactgcatgtatgtagtgtacacgaaaagagaaatgagtaagcacataggttgcaaaagggagggggaggaggtctggggattaactgaagccaagctgtgtcggataataatgtagggaggtcaaagtgtttctttctttcttctgtgatcagatcagatcatatagagaatgagaggtggtcagcagataattgcatttcttttttcctttttaccttgtgaatgaatgagatattcagtgaccaatgtcaacgcggaaagcctttgtggtgatgcttactaattcatcagcaatcattatttaggtaattataataacgtcaatgcaagtaac

SEQ ID NO: 199067 - DNA, 2326 bp, Zea Mays
aagaaaccaatttttttttgttttctcttacagaagagaacaaacaaaggcttgagagcggtgtacagctagcgcctgcgtcttgacgatacgcgttagcaagtagcaagactcaagactcaagagggatcccttagcaaaaccggtctcgcaaagggacacaattccctaggaaccgcacaaaagcttcctgcaatccggcggctttggcgttgaacctccccccttgatcagtagtagaatcggctgctaaagatttctatttttatttttttctcggttcggaaggtgccgtgcggcgagcgaaataaatcgctgcggcgagaatcctgtggagatgagttgcgttaggtggcaggaccactcataaattctgcctgttcattcagatctgctccgtgctgtgcttcttctgctgctgccttgcagcgaccagcgagaagaaatccattcgctaggccggcccacccacccacgatagcggttgtggtcactcatgcgtcgtcgccggagtccaatctcgccgctcggagtttcttgacttttctggtcggagtttccatttcctcctggaggagattatttctttctcctctttcaccccgagaatctcgtctcgggtcgcgctggtttgattcctcctcgcctgagtccaccgctttcgcttccagtggagaagcttgtccgtgaagcagcgctcgtctcctgcttaaaatttcttccttctgccttggtttctttgctcgcgcccgccgatttgcttgctgcccagtccacactcctccgttcgtgtctcgcggctttccgcactcgttttcccggtctcggatttcgttaccaatgggcaacgcgttcgcgtgcatgccgcgcaaggagcagcgaggcgcggccgcggtgtcgcgcagcaagcggatggggagcgcgcggtcggcgcgcggcgggcccaagctgacgcccgcggaggaggagctcctccaccgccaggctctggccatggccatccaccagcacctcgacgccggcggctccatgtcgcgccgcatcgacgccggggcctccctgtcccggcgcatggccccgggctccaccagctcccgccgccgcggcgacctgccggactccgtcacgaatgccaagcccgccccaattgttctggagaatttggaaacaaagaaaattgtccttgttcatggagaagggttcggtgcttggtgttggtacaagaccatctcacacttggaggaagctggtctagatcctgttgccttagatctcacaggctctggcatagaccatactgatacaaacagcatagctacgttagcagattactccaagccattgattgattacctcgacagacttcctgaagatgagaaggtcattttggtcggccatagttgcggaggtgcgagtgtctcgtatgcactggagcagtacccccgaaagatctcaaaggcggtgtttcttactgctacaatggggctcacgttgacctacattcgacagctccggtcggcggatgttttcttgcaagagtcacagtttctagtctatggaaatgggaaggacaagcctcctactgggctgatgttcgataagcagcagatcaaggggctgtatttcaaccaaaccccttccaaggatatggcactagcagcggtgtccatgaggcctatccctctagccccaatcatggagaagctctccctcaccccggagaactacggctccgtccgtcgctacttcatccaggcactcgacgaccacatgctgtcgccggatgcccaggagaagctggtccgcgagaaccctcccgacggcatcttcaagatcaagggcggcgaccactgccccttcttctcaaagccgcagtccctcaacaagatcctgctggagatcgcgcagatccaagctcctgcggcgctgctcaaggcgagctcccccgaggagaccgccgccgccatggtgacagggccagccaagtcatgactgcatgtatgtagtgtacacgaaaagagaaatgagtaagcacataggttgcaaaagggagggggaggaggtctggggattaactgaagccaagctgtgtcggataataatgtagggaggtcaaagtgtttctttctttcttctgtgatcagatcagatcatatagagaatgagaggtggtcagcagataattgcatttcttttttcctttttaccttgtgaatgaatgagatattcagtgaccaatgtcaacgcggaaagcctttgtggtgatgcttactaattcatcagcaatcattatttaggtaattataataacgtcaatgcaagtaac

SEQ ID NO: 199068 - DNA, 3725 bp, Zea Mays
cccaaaccctagacgaagcagacccccccccccccccctagtgaggccgcgatgatgcagatgctaggcctccgcggctccgcgtccaaggaccgtggccgcgggggcgacgcgtccccgtcctctgctgtggcaggggccacgggaaccccgcgctcgccgtggactccggcgtcggcatcgtcgccgcgctcgccgttcgcggcggaggcgggcggcgagggagggggcggccggccgctgcggctggtatactgtgacgagcgcggtcggtttcggatggacccagaggccgtggccgcgctgcagctcgtcaagggacctgtcggggtcgtctctgtctgcggccgcgcgcgccaggggaagagcttcatccttaaccagcttctaggtagaagtagcgggtttcaagtggcaagtactcatcgtccctgcaccaagggcctttggatgtggagtgccccaataaagagaactgcctttgatggaactgaatatagtcttttgctacttgacagcgagggcattgatgcctatgatcagacgggcacttacagcattcagatattctcattggctgtcctactatcgagcatgttcatatataatcagatgggtggtatagatgaggcagcccttgatcgcctttcacttgttactgaaatgaccaagcatatccgtgtgagggcaaatggtgggaggtctactgcatctgaacttgcgcagttttcacctattttcatctggctactgagggatttctatctagatttagtggagaatggtagaaagataactccacgagattacctggaaatcgcactgaggcctcttgaaggcagaggaaaggacatatcttcaaagaatgagatccgtgagtccatccgtgcccttttccctgatcgagaatgtttcacactggtgcgcccattgaacaatgaaaatgaacttcaacgtcttgatcaaatccctctcgagaaattgcgccctgaatttcaagctggactggacgaattaacaaggtttatttttgagaggacaaggcctaagcaagttgctggtacaatcatgacaggaccagtactagctggtattacacagtccttcctggatgcaataaacaatggagctgtgcctaccatttcatcttcttggcagagcgtagaagaagcagaatgccgtagagcatatgattctgctgctgaggtttacatgtcatctttcagccacatcaaattagctgaagaagatgctttaagggatgaatatgaagctgctttaaggaaggcacttgatgcatacaatactactgctgttggaactggcacttcacgtgcccattatgagaaagttcttaacaatttctgcagaaaggcgtttcaggattataaaaagaatgctttcttagaggctgacaagcagtgctcaaatgcgaagcacaacatggagaagaagatccgagcggcatgcactgctcctggtgtcaaagtttctgctgtgattcaggtcctggaaactgcacttgctgaatatgaaacatcttgtactggcccagccaaatggagaatgcttgctgcctttttaagacagtggttggtcctccaagccataaaaatttcatgttcattcctgctgatctttctgtttggaaggacctatattggacctctgcttgaagttaataaatgaagtggaatcagagaagacttccttcactttaagatgccggtcaaatgaagaccaactagaacttctaaaaaagcaacttgaggccaatgaatcacacaagtctgaatatctaaaacgctacaaagctgctataaatgagaaacagaaagcctctgttgatcttagtagtaatcttgcaaacctgaggaccaagtgtagcacattagaagaacgatgtgtaagcatatctaaagaacttgatcatgtccgacatgaatgcactgattggagggtgaagtatgagcaatctgtttctcagcacaaggctgaacaagatagatttgtcgctcagttggcatctcttgagtctaggcatagctctgcagaaggaaagttgggagcagctcgggaacatgcagcatctgctcaagatgaggctgcagaatggaagaagaaatatgaaatggctgccgtgcaggctaaaactgcattggagagactagcatcagtgcaagaacaaattaacaaaattgcacaagaaagggaaagttctataagggcagaatttgcctcacatttggagggaaaggaagaggaaataaggaaattagttgctaagattagagaagcggagagtgaagaaagtgtattgactgaacgcttgctggttgtggaatcaaaaacacaaggccacaacaaggaaactacaggcttgagggatgaaatcaaagaactaacaagcaagttagagtatctaagagatagagcagtatcatatgaaaagcaagctagaatgctcgagcaagaaaaaaaccatcttcaagagaagttcttatctgaatgtaagaaatatgatgaggcagaacaaagatacaagtctgcagaaagggatgcgaagaaagctgttgagttggctgatgcagctcgaacagaggctattgcataccagaaagagaaggacaaggcacagcagttatctattgaaaaggtagcagttatagagagggttcaaagacaggtagacagactagagcaggaaaaggttaatctattgggcgaagttcagaggatgcataattctgaatctgatgcctggtccaaggttactttgcttgagagtagggttgctgagagggagaaagaaatggatgatttactgagccgtagcaacgaacaaaggtctagcactgttcgtgtccttgagagtctgttggcaacggaacgtgcagctagagctgaagccaataagcgtgcagaggccttatctctacagctacaatctgcccaaggtaaacttgatatactccatcaggagctgacatcgattcgccttgttgagactgcacttgacagcaagctcaggaccactacctatggcaaaaggttgagagataatgaagtacgactgtattctatccaagatatggacattgatcctccagagaggagcagaaaaagaaccaaaagcaacactagccccttgaagcctgtccaaactgaggatggtggttctgttcacatgagagaagacagcgttacagttagcacggatgtaaaagatgacaatccagatggttacaaaaagttcaccatagctaaactgaaagaagagctaactaagcatggatttggcacgcagttgttagagctcaagaatccaaacaagaaagatatactcgcactttataagaagcatgttttgtgcgagtaaataatggccacgtgaagttccagtcttcaacacataatctatccaaactagggaaacaatagagtagtctgtcagtatttttaacaagctgatgcctcattgttctccaggcattcgtttctgctgattggtttgtattttggtgttaacatcgaattagttccggtttgtgtctaggctttgtatttcttagcttgctggttggctgggtgaagttcttaggacttctgagtgctaaatgacctcgaccaacgctagtcgtgggcaagtttgtggtacgtttgtatatggtatattgctgtgtaaagagtgctttatccaattcaaatatgatatactcttcaag

SEQ ID NO: 199069 - DNA, 3627 bp, Zea Mays
agtgaggccgcgatgatgcagatgctaggcctccgcggctccgcgtccaaggaccgtggccgcgggggcgacgcgtccccgtcctctgctgtggcaggggccacgggaaccccgcgctcgccgtggactccggcgtcggcatcgtcgccgcgctcgccgttcgcggcggaggcgggcggcgagggagggggcggccggccgctgcggctggtatactgtgacgagcgcggtcggtttcggatggacccagaggccgtggccgcgctgcagctcgtcaagggacctgtcggggtcgtctctgtctgcggccgcgcgcgccaggggaagagcttcatccttaaccaggtagaagtagcgggtttcaagtggcaagtactcatcgtccctgcaccaagggcctttggatgtggagtgccccaataaagagaactgcctttgatggaactgaatatagtcttttgctacttgacagcgagggcattgatgcctatgatcagacgggcacttacagcattcagatattctcattggctgtcctactatcgagcatgttcatatataatcagatgggtggtatagatgaggcagcccttgatcgcctttcacttgttactgaaatgaccaagcatatccgtgtgagggcaaatggtgggaggtctactgcatctgaacttgcgcagttttcacctattttcatctggctactgagggatttctatctagatttagtggagaatggtagaaagataactccacgagattacctggaaatcgcactgaggcctcttgaaggcagaggaaaggacatatcttcaaagaatgagatccgtgagtccatccgtgcccttttccctgatcgagaatgtttcacactggtgcgcccattgaacaatgaaaatgaacttcaacgtcttgatcaaatccctctcgagaaattgcgccctgaatttcaagctggactggacgaattaacaaggtttatttttgagaggacaaggcctaagcaagttgctggtacaatcatgacaggaccagtactagctggtattacacagtccttcctggatgcaataaacaatggagctgtgcctaccatttcatcttcttggcagagcgtagaagaagcagaatgccgtagagcatatgattctgctgctgaggtttacatgtcatctttcagccacatcaaattagctgaagaagatgctttaagggatgaatatgaagctgctttaaggaaggcacttgatgcatacaatactactgctgttggaactggcacttcacgtgcccattatgagaaagttcttaacaatttctgcagaaaggcgtttcaggattataaaaagaatgctttcttagaggctgacaagcagtgctcaaatgcgaagcacaacatggagaagaagatccgagcggcatgcactgctcctggtgtcaaagtttctgctgtgattcaggtcctggaaactgcacttgctgaatatgaaacatcttgtactggcccagccaaatggagaatgcttgctgcctttttaagacagtgtttggaaggacctatattggacctctgcttgaagttaataaatgaagtggaatcagagaagacttccttcactttaagatgccggtcaaatgaagaccaactagaacttctaaaaaagcaacttgaggccaatgaatcacacaagtctgaatatctaaaacgctacaaagctgctataaatgagaaacagaaagcctctgttgatcttagtagtaatcttgcaaacctgaggaccaagtgtagcacattagaagaacgatgtgtaagcatatctaaagaacttgatcatgtccgacatgaatgcactgattggagggtgaagtatgagcaatctgtttctcagcacaaggctgaacaagatagatttgtcgctcagttggcatctcttgagtctaggcatagctctgcagaaggaaagttgggagcagctcgggaacatgcagcatctgctcaagatgaggctgcagaatggaagaagaaatatgaaatggctgccgtgcaggctaaaactgcattggagagactagcatcagtgcaagaacaaattaacaaaattgcacaagaaagggaaagttctataagggcagaatttgcctcacatttggagggaaaggaagaggaaataaggaaattagttgctaagattagagaagcggagagtgaagaaagtgtattgactgaacgcttgctggttgtggaatcaaaaacacaaggccacaacaaggaaactacaggcttgagggatgaaatcaaagaactaacaagcaagttagagtatctaagagatagagcagtatcatatgaaaagcaagctagaatgctcgagcaagaaaaaaaccatcttcaagagaagttcttatctgaatgtaagaaatatgatgaggcagaacaaagatacaagtctgcagaaagggatgcgaagaaagctgttgagttggctgatgcagctcgaacagaggctattgcataccagaaagagaaggacaaggcacagcagttatctattgaaaaggtagcagttatagagagggttcaaagacaggtagacagactagagcaggaaaaggttaatctattgggcgaagttcagaggatgcataattctgaatctgatgcctggtccaaggttactttgcttgagagtagggttgctgagagggagaaagaaatggatgatttactgagccgtagcaacgaacaaaggtctagcactgttcgtgtccttgagagtctgttggcaacggaacgtgcagctagagctgaagccaataagcgtgcagaggccttatctctacagctacaatctgcccaaggtaaacttgatatactccatcaggagctgacatcgattcgccttgttgagactgcacttgacagcaagctcaggaccactacctatggcaaaaggttgagagataatgaagtacgactgtattctatccaagatatggacattgatcctccagagaggagcagaaaaagaaccaaaagcaacactagccccttgaagcctgtccaaactgaggatggtggttctgttcacatgagagaagacagcgttacagttagcacggatgtaaaagatgacaatccagatggttacaaaaagttcaccatagctaaactgaaagaagagctaactaagcatggatttggcacgcagttgttagagctcaagaatccaaacaagaaagatatactcgcactttataagaagcatgttttgtgcgagtaaataatggccacgtgaagttccagtcttcaacacataatctatccaaactagggaaacaatagagtagtctgtcagtatttttaacaagctgatgcctcattgttctccaggcattcgtttctgctgattggtttgtattttggtgttaacatcgaattagttccggtttgtgtctaggctttgtatttcttagcttgctggttggctgggtgaagttcttaggacttctgagtgctaaatgacctcgaccaacgctagtcgtgggcaagtttgtggtacgtttgtatatggtatattgctgtgtaaagagtgctttatccaattcaaatatgatatactcttcaag

SEQ ID NO: 199070 - DNA, 3399 bp, Zea Mays
cgatgatgcagatgctaggcctccgcggctccgcgtccaaggaccgtggccgcgggggcgacgcgtccccgtcctctgctgtggcaggggccacgggaaccccgcgctcgccgtggactccggcgtcggcatcgtcgccgcgctcgccgttcgcggcggaggcgggcggcgagggagggggcggccggccgctgcggctggtatactgtgacgagcgcggtcggtttcggatggacccagaggccgtggccgcgctgcagctcgtcaagggacctgtcggggtcgtctctgtctgcggccgcgcgcgccaggggaagagcttcatccttaaccagcttctaggtagaagtagcgggtttcaagtggcaagtactcatcgtccctgcaccaagggcctttggatgtggagtgccccaataaagagaactgcctttgatggaactgaatatagtcttttgctacttgacagcgagggcattgatgcctatgatcagacgggcacttacagcattcagatattctcattggctgtcctactatcgagcatgttcatatataatcagatgggtggtatagatgaggcagcccttgatcgcctttcacttgttactgaaatgaccaagcatatccgtgtgagggcaaatggtgggaggtctactgcatctgaacttgcgcagttttcacctattttcatctggctactgagggatttctatctagatttagtggagaatggtagaaagataactccacgagattacctggaaatcgcactgaggcctcttgaaggcagaggaaaggacatatcttcaaagaatgagatccgtgagtccatccgtgcccttttccctgatcgagaatgtttcacactggtgcgcccattgaacaatgaaaatgaacttcaacgtcttgatcaaatccctctcgagaaattgcgccctgaatttcaagctggactggacgaattaacaaggtttatttttgagaggacaaggcctaagcaagttgctggtacaatcatgacaggaccagtactagctggtattacacagtccttcctggatgcaataaacaatggagctgtgcctaccatttcatcttcttggcaggattataaaaagaatgctttcttagaggctgacaagcagtgctcaaatgcgaagcacaacatggagaagaagatccgagcggcatgcactgctcctggtgtcaaagtttctgctgtgattcaggtcctggaaactgcacttgctgaatatgaaacatcttgtactggcccagccaaatggagaatgcttgctgcctttttaagacagtgtttggaaggacctatattggacctctgcttgaagttaataaatgaagtggaatcagagaagacttccttcactttaagatgccggtcaaatgaagaccaactagaacttctaaaaaagcaacttgaggccaatgaatcacacaagtctgaatatctaaaacgctacaaagctgctataaatgagaaacagaaagcctctgttgatcttagtagtaatcttgcaaacctgaggaccaagtgtagcacattagaagaacgatgtgtaagcatatctaaagaacttgatcatgtccgacatgaatgcactgattggagggtgaagtatgagcaatctgtttctcagcacaaggctgaacaagatagatttgtcgctcagttggcatctcttgagtctaggcatagctctgcagaaggaaagttgggagcagctcgggaacatgcagcatctgctcaagatgaggctgcagaatggaagaagaaatatgaaatggctgccgtgcaggctaaaactgcattggagagactagcatcagtgcaagaacaaattaacaaaattgcacaagaaagggaaagttctataagggcagaatttgcctcacatttggagggaaaggaagaggaaataaggaaattagttgctaagattagagaagcggagagtgaagaaagtgtattgactgaacgcttgctggttgtggaatcaaaaacacaaggccacaacaaggaaactacaggcttgagggatgaaatcaaagaactaacaagcaagttagagtatctaagagatagagcagtatcatatgaaaagcaagctagaatgctcgagcaagaaaaaaaccatcttcaagagaagttcttatctgaatgtaagaaatatgatgaggcagaacaaagatacaagtctgcagaaagggatgcgaagaaagctgttgagttggctgatgcagctcgaacagaggctattgcataccagaaagagaaggacaaggcacagcagttatctattgaaaaggtagcagttatagagagggttcaaagacaggtagacagactagagcaggaaaaggttaatctattgggcgaagttcagaggatgcataattctgaatctgatgcctggtccaaggttactttgcttgagagtagggttgctgagagggagaaagaaatggatgatttactgagccgtagcaacgaacaaaggtctagcactgttcgtgtccttgagagtctgttggcaacggaacgtgcagctagagctgaagccaataagcgtgcagaggccttatctctacagctacaatctgcccaaggtaaacttgatatactccatcaggagctgacatcgattcgccttgttgagactgcacttgacagcaagctcaggaccactacctatggcaaaaggttgagagataatgaagtacgactgtattctatccaagatatggacattgatcctccagagaggagcagaaaaagaaccaaaagcaacactagccccttgaagcctgtccaaactgaggatggtggttctgttcacatgagagaagacagcgttacagttagcacggatgtaaaagatgacaatccagatggttacaaaaagttcaccatagctaaactgaaagaagagctaactaagcatggatttggcacgcagttgttagagctcaagaatccaaacaagaaagatatactcgcactttataagaagcatgttttgtgcgagtaaataatggccacgtgaagttccagtcttcaacacataatctatccaaactagggaaacaatagagtagtctgtcagtatttttaacaagctgatgcctcattgttctccaggcattcgtttctgctgattggtttgtattttggtgttaacatcgaattagttccggtttgtgtctaggctttgtatttcttagcttgctggttggctgggtgaagttcttaggacttctgagtgctaaatgacctcgaccaacgctagtcgtgggcaagtttgtggtacgtttgtatatggtatattgctgtgtaaagagtgctttatccaattcaaatatgatatactcttcaag

SEQ ID NO: 199071 - DNA, 2717 bp, Zea Mays
caaagcaatttcgaacaagcttggacatggtagaggtaaaaccaatgtctccaacaaaacatgactaccagcaaaagacaggtgtatataaaacagagagtttgagtaaaaataatagttcatcgaataagacaagtaccagtatccttaagaatggtgagaagatttggtcgtgcatcgttcggaagtataatgaactgagagcgtagaagaagcagaatgccgtagagcatatgattctgctgctgaggtttacatgtcatctttcagccacatcaaattagctgaagaagatgctttaagggatgaatatgaagctgctttaaggaaggcacttgatgcatacaatactactgctgttggaactggcacttcacgtgcccattatgagaaagttcttaacaatttctgcagaaaggcgtttcaggattataaaaagaatgctttcttagaggctgacaagcagtgctcaaatgcgaagcacaacatggagaagaagatccgagcggcatgcactgctcctggtgtcaaagtttctgctgtgattcaggtcctggaaactgcacttgctgaatatgaaacatcttgtactggcccagccaaatggagaatgcttgctgcctttttaagacagtgtttggaaggacctatattggacctctgcttgaagttaataaatgaagtggaatcagagaagacttccttcactttaagatgccggtcaaatgaagaccaactagaacttctaaaaaagcaacttgaggccaatgaatcacacaagtctgaatatctaaaacgctacaaagctgctataaatgagaaacagaaagcctctgttgatcttagtagtaatcttgcaaacctgaggaccaagtgtagcacattagaagaacgatgtgtaagcatatctaaagaacttgatcatgtccgacatgaatgcactgattggagggtgaagtatgagcaatctgtttctcagcacaaggctgaacaagatagatttgtcgctcagttggcatctcttgagtctaggcatagctctgcagaaggaaagttgggagcagctcgggaacatgcagcatctgctcaagatgaggctgcagaatggaagaagaaatatgaaatggctgccgtgcaggctaaaactgcattggagagactagcatcagtgcaagaacaaattaacaaaattgcacaagaaagggaaagttctataagggcagaatttgcctcacatttggagggaaaggaagaggaaataaggaaattagttgctaagattagagaagcggagagtgaagaaagtgtattgactgaacgcttgctggttgtggaatcaaaaacacaaggccacaacaaggaaactacaggcttgagggatgaaatcaaagaactaacaagcaagttagagtatctaagagatagagcagtatcatatgaaaagcaagctagaatgctcgagcaagaaaaaaaccatcttcaagagaagttcttatctgaatgtaagaaatatgatgaggcagaacaaagatacaagtctgcagaaagggatgcgaagaaagctgttgagttggctgatgcagctcgaacagaggctattgcataccagaaagagaaggacaaggcacagcagttatctattgaaaaggtagcagttatagagagggttcaaagacaggtagacagactagagcaggaaaaggttaatctattgggcgaagttcagaggatgcataattctgaatctgatgcctggtccaaggttactttgcttgagagtagggttgctgagagggagaaagaaatggatgatttactgagccgtagcaacgaacaaaggtctagcactgttcgtgtccttgagagtctgttggcaacggaacgtgcagctagagctgaagccaataagcgtgcagaggccttatctctacagctacaatctgcccaaggtaaacttgatatactccatcaggagctgacatcgattcgccttgttgagactgcacttgacagcaagctcaggaccactacctatggcaaaaggttgagagataatgaagtacgactgtattctatccaagatatggacattgatcctccagagaggagcagaaaaagaaccaaaagcaacactagccccttgaagcctgtccaaactgaggatggtggttctgttcacatgagagaagacagcgttacagttagcacggatgtaaaagatgacaatccagatggttacaaaaagttcaccatagctaaactgaaagaagagctaactaagcatggatttggcacgcagttgttagagctcaagaatccaaacaagaaagatatactcgcactttataagaagcatgttttgtgcgagtaaataatggccacgtgaagttccagtcttcaacacataatctatccaaactagggaaacaatagagtagtctgtcagtatttttaacaagctgatgcctcattgttctccaggcattcgtttctgctgattggtttgtattttggtgttaacatcgaattagttccggtttgtgtctaggctttgtatttcttagcttgctggttggctgggtgaagttcttaggacttctgagtgctaaatgacctcgaccaacgctagtcgtgggcaagtttgtggtacgtttgtatatggtatattgctgtgtaaagagtgctttatccaattcaaatatgatatactcttcaag

SEQ ID NO: 199072 - DNA, 3211 bp, Zea Mays
cttctccgctccgctcttggttggttctcccaaagtctccggccaccgcccattcccgaaattcccaagcacgcatcgagatctcttgaggcccctgctcctcgcctttgacgtgcacaacccccagtctcagatcacaccaccaccatggggagcataccgccgccgcatgctcctgccgccgcctcgccgccgccgcatcctctccggcgctcccgctcgccctcgcgctccgcctcggcctgccaccgccaccgccgtctcacccgctgctccccgccgccccctgccccgccgacgctcgcaggctcctccgatcgctccaccgcctccgccgcctcctcgggctctggcgccgcctcccatccggctccggctacgcttcctcgtccctgtcctccccgtccctcgccgcgttcgagtgggccccgcgcgccactctcgcggcgtcattcctcgccccctccgcgcacggggacgttggcgtctccaagtcccccttcgtgacgctttccatcgaggagtccggcgacacggtggcggtcgttggggaagtgtcggtctgcgtcaattttgtcgggaacaaccacattgtggtggaggcggtggtgggtgaagatgaggagtttgaaatggtgagcggttctccgccggaggagatctacgcgcactttgccaataggaggagccctggggcaggtaggaggaggaggggcaagcaggggaggaaaggaggcgggatggaggcagagcacttcgtgaggattgcggacactgagccgacgaaggcacggccactgcaagggctgtggaaggtgcttcttctgtacacctgttgtatacgatctcctagcactatgctgttttcaattggaaagttctattgtttgcatatttagctgcaacacgctgttgaacgccattgcagcattgctggtttgtgtaattacccataaactagatgcctggcactgcactcattcccatgaagatgcctcattcactcagggaaccttacagccttgggatgggatggaatagaggatcaaaatttaccctgcatcctctaaatgttgaagcggaaagtgccttccgggttgacagcttctcctttttgaagattttggttcacaattgttgtcacacactactagaaccattgttggagattgaactaaaaaccgtactcatctgtttgagttttattcactctctattacagaagaattagatgctcgtagcagatgtccactcaggttgagattttgcacattcagcacatatgcttagtgcttaccacgcatcagggtgacatgcgtaaagttgtgtgcttgctatggtgaactacatctagaatttcagggatcattgttttagttgggctcaattgaataccatttaggagaacatgaagctgcttctttagaattggctagatgctagctttggccttttaatatttatggtgcatttatatactgccttatgggttgtattttctctgacataatttcctgctggtgtttatgtagactttgaacccttaactgttatcagaactacctgtccatgtggcaattgggttaatgaaatgacaagttttctttgtcaagcaaagctgtatggtttggttcctgccattgcatagtcccttgcacagatcgattctcatagtgttatgtcattgttgattaagagccatgaactgaagtgtactacgcctttggccttactgtgagtcttgaccatgaaccggtgtcagcaggaagcatgctagtgctgaattgcattatgtgaatgggttcccaaaacaaccctaagatttgttttaatttcatcggatcttgatacttcagaagcttggaaaaatctcattcaatcatcccaaaacatttctagacacaaaaactactctatgactggttagtttcaaatgctatctgtatgtgtccaaataataatggttttctggattatttcgttactaaaagctggggaattatcagttaacttttccagattccgatattgctgtgttgttatcaactacattttttatgaggaaacaattgtgggaggctgaatataattagctgtgcctgtagctgcatattattagggtgaattagttgtggtttaactaatcacgatccttgtaccgaatcctacaatattttgcagttagtatcatcttgtttagcattttgcatcttacctctgatttggagaaggcagatgtcatcttgtttattcattttcatcgaaatgttataaatttttgtttttatctcatcaatgatgaatgaccatttaatttttaatattcatttatctgtttctttgaaaaattgttttcatgttgttgatcactaggcatgcacacaacagaatgacgttaccaattttgaattggaggactactatgtacttggcagaatgatttattattagttgaccttttgccaagcacaatggattaatttccatgttcccaaacagggtatatgcgaggataggactttggaattttaccttgtcacctatgatgacattggtggagtaacttgtcgacgatttagggatacacagagccaaaactctggctactctcctgttttttggacaacagatactacatttcttgaaccaccattctctgagcaagagctggttaattatgccagccgcgatcatatccaaggtgttacttccaatcatgcaggcgctgagaacagggttgtctcaaggatattacgcatcaattccagttatgatgtggttgatactcatctctcaactcccttggatgatgggaggagcgtggagggaaggatttggctatatgaggatggaaccttcggttttggatttgttggcagtaattcaattatagatctgaggcatgtctcctcggctggctgtattcttgatacttaacattagatgatctggatcttgctggcacataatttttgccagcgagccccttgtacagtacttggtgtgaggcatgttgcctccgatttgttgtactctcgatgataaggtcactgaatactggtcccttctggcacttagctgttgctagaatgcccttgtaaaccgaaccttggttcctttgggcatgtacttgttgacataataccgatgtatattacagtactatttgttcattgaattccaataaactgcaactgttacttccttgtga

SEQ ID NO: 199073 - DNA, 2666 bp, Zea Mays
cgccaacagtagcccaaaattaggttggtttctcctacacttccatgttcgacgcgagcggcgaaccgacttccctctcattcgtcttccacaaaccccataaccctagcaccgctgccaccatgtcctcgtctccatcttcagtgaaccgccgtcccccgggcccgctagcgttagggctggagtccttggcgaagaagaagacacataggaagaagctcaccgccaaacctcctccagatccagtcgttgccctccaatggtcggatacagaacgtctcgtctcttcctttgaatccagcagtcggtgctcctcctctggatccggcggtcaactccatcatccgcagcttctatggcacctcccctagtccccctccatcgccgccctcacccaccgcttctatatcgccacctctctcattatagaagaagacactgagaatctggtgagcttccacctttttagcttattccgtttagatctgttgtctatatttgattctcgttatggaagaagctgctagtgcttgcttgcatcatcgctgaggatctgctggtaggatagattagcttgatagcttgatcggtgcatccatgcgtgcaatctaaacttgcaatctagaactccacctagaaatctttctcttttgattaggtcttttctgataaattggtcggtgcatccgtggatgcagtttaaacatagcttagttttttttaaacagtgcacttcaggcttagtttttttaaacattgcactttaggcttgctttatattcttgttcctattaagaactgagcaactagctaagctgagatcaagttacagtttactaaatactggtatgttaaaaaggaaccctcatgtagctgtgagagtaaatttcttcttcttgtgccagagtatattagcatttcttggttttcaattatatgtcagtttgcatttctcacaaacacatgcattcattctctggtgctatcaaactgatgcatattttgatgagcagcactaggactatggtcatacgattagtgctagatgctgagttactgacaacaataatctcatctgttgtttgatgtggtggttgtgtcaatcaaaaaaacatttttccatcaccaacagaggaactgcgatttagcaagcgctgcgcaatgttgatgacctccattttcagattacttgttgtttctagacccgaagagtgtaggttctagtaattatttgtgcctagctctatattttttctttaaagaaaaaggaagaaaagcattagaatctttcacgctgaatttagaagaagctctatcatcaaacaattttttattgagaaatattttttccacactttttctagcagttctctaaaataaaccatggaactgagagttaaaaaagcagcttcttctcatttagttgatgcatggaatcctatatgtgtcactgagtttactttagagaattacagagaatcaattctgatgatcaatgaatcaccatacacaaagaacacaatcaggaagagctcaaccaatctgtctcttgctagctgctagggctactgtttccattttgcagactttgtgattcgtaaaattctttggttggtgcaaaatagaatttttctaaaaataattaaatatttatattgtcaaataaaagcaccagcaatggtacctccatgttcatgtttataattatctgtgattcttacatatttcaattactatgcttatttgttaaggttaaaatgtattatcatgtgacctgccttttgtccacctgcactgcttgttcgtagatgtgcatgcttgtccctcttgcactgcttgtctgttacctgcagcaatctttgccaaacggacacagggaacctatgccccacaggactgcaccacacgtgggacaggtaatgcaggtattgcccccgctgtggctggccggtgtgcaattcaccaggctgccaaacgagccctaaaggccccagcatgggcgaccctctccaggccgccgtcgcagccgcccacgcgctctccctgctatggagaaaaccgctcatggaggttaaatatcctatttatgatcaaacagtgtaccttaacgattatcataagaagatgttgaaggatcaatatgttcaagctctgcaaggtgatgtctgttcagtttggccaaaaaggcatcccctacctgaacacctacgacggccgcaccatccgctaccccgacccgctcatcaaggctaacgacaccatcaagatcgatctggagaccaacaagatcatggacttcatcaattttgatgtcggcaatgtggtcatggtgactggcgggaggaacaccgggcgtgtaggagccatcaagaacagggagaagcacaagggcagctttgagaccatccacgtgctgcttggagctttttgctatgtctagttttctcctatttgttgtacaggaaaacatagaatggaattcaaatttggtggtcgcaaaagtctgaagactttaattcatataaagttaggcttaacattagtgcaaacagttgtattttagtttagatttagagtacacttatgtatgcgttgtttgacaatgcttatttatgatatattgaatggtacttatttatattatattaattataatgttgttcagt

SEQ ID NO: 199074 - DNA, 2736 bp, Zea Mays
cacttccatgttcgacgcgagcggcgaaccgacttccctctcattcgtcttccacaaaccccataaccctagcaccgctgccaccatgtcctcgtctccatcttcagtgaaccgccgtcccccgggcccgctagcgttagggctggagtccttggcgaagaagaagacacataggaagaagctcaccgccaaacctcctccagatccagtcgttgccctccaatggtcggatacagaacgtctcgtctcttcctttgaatccagcagtcggtgctcctcctctggatccggcggtcaactccatcatccgcagcttctatggcacctcccctagtccccctccatcgccgccctcacccaccgcttctatatcgccacctctctcattatagaagaagacactgagaatctggtgagcttccacctttttagcttattccgtttagatctgttgtctatatttgattctcgttatggaagaagctgctagtgcttgcttgcatcatcgctgaggatctgctggtaggatagattagcttgatagcttgatcggtgcatccatgcgtgcaatctaaacttgcaatctagaactccacctagaaatctttctcttttgattaggtcttttctgataaattggtcggtgcatccgtggatgcagtttaaacatagcttagttttttttaaacagtgcacttcaggcttagtttttttaaacattgcactttaggcttgctttatattcttgttcctattaagaactgagcaactagctaagctgagatcaagttacagtttactaaatactggtatgttaaaaaggaaccctcatgtagctgtgagagtaaatttcttcttcttgtgccagagtatattagcatttcttggttttcaattatatgtcagtttgcatttctcacaaacacatgcattcattctctggtgctatcaaactgatgcatattttgatgagcagcactaggactatggtcatacgattagtgctagatgctgagttactgacaacaataatctcatctgttgtttgatgtggtggttgtgtcaatcaaaaaaacatttttccatcaccaacagaggaactgcgatttagcaagcgctgcgcaatgttgatgacctccattttcagattacttgttgtttctagacccgaagagtgtaggttctagtaattatttgtgcctagctctatattttttctttaaagaaaaaggaagaaaagcattagaatctttcacgctgaatttagaagaagctctatcatcaaacaattttttattgagaaatattttttccacactttttctagcagttctctaaaataaaccatggaactgagagttaaaaaagcagcttcttctcatttagttgatgcatggaatcctatatgtgtcactgagtttactttagagaattacagagaatcaattctgatgatcaatgaatcaccatacacaaagaacacaatcaggaagagctcaaccaatctgtctcttgctagctgctagggctactgtttccattttgcagactttgtgattcgtaaaattctttggttggtgcaaaatagaatttttctaaaaataattaaatatttatattgtcaaataaaagcaccagcaatggtacctccatgttcatgtttataattatctgtgattcttacatatttcaattactatgcttatttgttaaggttaaaatgtattatcatgtgacctgccttttgtccacctgcactgcttgttcgtagatgtgcatgcttgtccctcttgcactgcttgtctgttacctgcagcaatctttgccaaacggacacagggaacctatgccccacaggactgcaccacacgtgggacaggtaatgcaggtattgcccccgctgtggctggccggtgtgcaattcaccaggctgccaaacgagccctaaaggccccagcatgggcgaccctctccaggccgccgtcgcagccgcccacgcgctctccctgctatggagaaaaccgctcatggaggtaaaccactgtgttgcgcgcacatcaagatgtcaagcagtggcttctgttaaatatcctatttatgatcaaacagtgtaccttaacgattatcataagaagatgttgaaggatcaatatgagggactgaagacaatcgagcagattacaatggactcagcttcggtcgagaccaatatgttcaagctctgcaaggtgatgtctgttcagtttggccaaaaaggcatcccctacctgaacacctacgacggccgcaccatccgctaccccgacccgctcatcaaggctaacgacaccatcaagatcgatctggagaccaacaagatcatggacttcatcaattttgatgtcggcaatgtggtcatggtgactggcgggaggaacaccgggcgtgtaggagccatcaagaacagggagaagcacaagggcagctttgagaccatccacgtgctgcttggagctttttgctatgtctagttttctcctatttgttgtacaggaaaacatagaatggaattcaaatttggtggtcgcaaaagtctgaagactttaattcatataaagttaggcttaacattagtgcaaacagttgtattttagtttagatttagagtacacttatgtatgcgttgtttgacaatgcttatttatgatatattgaatggtacttatttatattatattaattataatgttgttcagt

SEQ ID NO: 199075 - DNA, 1712 bp, Zea Mays
gaaaagccgtacggacgctgaacaacacgcattcctacaatcggacaatcctactccaagcattgagggacacggaggcggcgccgttcggcactgcacgctcacgggctcgcgcattagtggatactctcccccggcgccacgaaatcgtccgctctcaccaccttccatcggtccctcacgatcttgccaagaatccaagatccgcctgcggtagctagcggtcctatcttgatccgatggtgtcaccgactccgggagggaaggatgcaagggagggtggcggcaaggcggagtggatgatctacgccttcgtggcgcgcggcaccgcggtgctggcggagtacacggagttcaccggcaacttccccgccatcgccgcgcaatgcctgcagcggctacccgccgggtcgtcctccgccggcaccggccctgacggccgtggcgatgcgccggcacggttcagctacgcctgtgaccgacacacattcaacttcctcttgtaccgcggctacgcctattgtgtagttgcggaggaatccgttccaaagaatgtctcagtggcatttcttgaaaggttaaaagatgacttcatgaagagatatggtggtggtaaagctgacacagctcttgcaaaatgtctaaataaagaatatggacaagttataaagcagcacattcaatatgttcttgatcattcagaggaactagataaaatgttaaaagtgcaagcccaagtttcagaagtgaaaaatataatgttagacagcatagaaaagacactgggccgtggagagaaattgagtgaactccaagacaagacttctgagctacatattcaggcccagcagttcaagaaacagggagtgaagattcgcaggaagacatggctacagaacatgaaaattaagttggtgattcttggaatccttttgctccttgtaatcatagtatgggtatctatttgtcagggctttgactgcaccaagcatgaaacataatagaaatgggttcttttaaaggcttcctcaacagctccttcaataaatctattaaacgacgggcttctctgctggattctctataaaaataggaagaagtcgtctcgagaaacctagcaaagctgagagcccaaaaaagaaggcttctcttgcgtcattcccttcccctgaaaatagaaagagttatgtttctaaccaaataaagcactctttcggacttcctaaaaataatgagaaagttattttctcatatgagatagagctggagttgtgatgcagagtcctaccaaagaagagggtctaagatcttaggccttgttccaatctcgcgagataaactttagcagcttttttttagctacttttagctatttgtaatctaaacaggagagctaatagtggtaattgaagctaaactttagcacttcaattcatatagctaaaatttagcaggaagctaaagtttatctcgtgagattgaaacggggccttacaagttttgtggtactacagttagttatagggttatgagggttatgtcgctggtactacttaaagatatttaacgttcggttagcaacatatctagttcttaaagaggtatggtgctttcatacatactttaaatctaaaacttttattttaaatgcaagggcttttgaatggaagaacctaagaacttttaatggttttagtttttatcttttttac

SEQ ID NO: 199076 - DNA, 1273 bp, Zea Mays
gaacaacacgcattcctacaatcggacaatcctactccaagcattgagggacacggaggcggcgccgttcggcactgcacgctcacgggctcgcgcattagtggatactctcccccggcgccacgaaatcgtccgctctcaccaccttccatcggtccctcacgatcttgccaagaatccaagatccgcctgcggtagctagcggtcctatcttgatccgatggtgtcaccgactccgggagggaaggatgcaagggagggtggcggcaaggcggagtggatgatctacgccttcgtggcgcgcggcaccgcggtgctggcggagtacacggagttcaccggcaacttccccgccatcgccgcgcaatgcctgcagcggctacccgccgggtcgtcctccgccggcaccggccctgacggccgtggcgatgcgccggcacggttcagctacgcctgtgaccgacacacattcaacttcctcttgtaccgcggctacgcctattgtgtagttgcggaggaatccgttccaaagaatgtctcagtggcatttcttgaaaggttaaaagatgacttcatgaagagatatggtggtggtaaagctgacacagctcttgcaaaatgtctaaataaagaatatggacaagttataaagcagcacattcaatatgttcttgatcattcagaggaactagataaaatgttaaaagtgcaagcccaagtttcagaagtgaaaaatataatgttagacagcatagaaaagacactgggccgtggagagaaattgagtgaactccaagacaagacttctgagctacatattcagttcaagaaacagggagtgaagattcgcaggaagacatggctacagaacatgaaaattaagttggtgattcttggaatccttttgctccttgtaatcatagtatgggtatctatttgtcagggctttgactgcaccaagcatgaaacataatagaaatggtacaacgctgctccatccattttaaattataacatgttttggctctttttagatctatagttatgtctagatacatagttaaagctataaattcagaaatgctaaaacattttataatttaggacagaggatagtactaggttggagctgtgatagattttgtgctggtgaagccaagtgtacctctacatatgcttcggctctctagtttcgtatcacggtacaaatgtaaatctgagttggtcctaaagtgtactcgcgatgtaagactaacatgattccttccgtact

SEQ ID NO: 199077 - DNA, 3822 bp, Zea Mays
cggagaagcgagctcagccacaggccacagcctcactcatgcgttcacaatcacacctgctgtttttcttctccagttcacctcgcgcgcgtgacaactagggagcccgccgccgcccaggtcttcgtcgaaccctttgccggcaacgagaacccgccacgccagctccgtaattgtggcgatggttgctcctacgggatcttgaattcttgacacacacacacaccgatggtaatggtgatggagggaggaaggacggaaggcgacgagctgattgctgattatgtggattgccttatgtctctggacaccaacacccggcctgtccacagcgatggtctcatcctcggtgctccaggcgggggaggagggacggtcgatgccggaactgagccagatgccatgagagatatcccctcatccgaggaccccaatgagcccgtgctcggcatgacgtttgagtccgatgaggccgccaaggcattctacaacgactatgccaggcggcttggcttccccttccgcgtcggcaggtctcggcggtcgaagggcacagaggaggttgtcgtcatgaagaggttcgtttgctccagggaaggggtgtacaagaagaaacagacctcgccggatgaggcggcaaggaagcgtgagaggatgtctatgcgagagggttgcaatgctatgatggaggtggttagggaggcggaccattgggttgtctccaaacttgagaaggctcacaaccatgagctcggcacttgtagcgccaaggttgggtaccttcgtgcgagaagttctcttggtggctctgataaggccacaatggtggggcctgacgagatggcgtttcttaggcagaatgtcctgggggaaggaggagacgcccagggccttcttgattatctcaagaagatgcaagccaatgacccggcgttctgccatgctatacaggttgacaagaatggctgtgtggtgaatgttttctgggctgatgctagggccaaagcagcttatcggcatttcggggatgctataacgttcgacacgacgtacaagaagaacaagcatatgatgccctttgttactttctcgggagtcaaccatcatctgcagactgttatttttggatgtgcattgcttatggaagagactgagttctcgtttatatggctatttgaaacatggttagcggcaatgggaggtaaggcaccatgctcattggtcactgaccaaaacagggccatgaaggctgcaattgggaaggtttttccgaattcctgtcaccgtttctgtaagtggagtattctgagtagaaccaagcaaaagctgacccatacatactcagagcatccaaccctaagagatgagcttgagagctgtgtgcttgagactgaaaccatctcgacattcgaaaccacttggatgtcaatcattgatagatatgacttgagaaagaattcatggcttcaagcaatatacaatatccgccaaaaatgggttcctttgtacctgatggatacattctttgcagaaacgttccccacatggaaattggaaaccatgaatgatttctataagaaatatttcaatacaaaaacaacgcttgaagtttttcttaatcagttcgatttgagcttggcaggccgatatgaggatgaggcaaaagcagatatggatgcctacttaaataaggcaactacaaaaactgcatcgctaatagaaaaacaggcagcagggacctataccaaagcagtcttcagtaggtttcaggaggaatttacagagtctctagggtttatcattcagaaaaccgaagacggctgcataagtaaatacagcatcacaaaatatgaagatccatcagacacattctgcgtgacttataatgcttccaataagatggcaaactgtagttgcaagtactttgaattctccggtattctgtgccgccatattcttggagtatacataatagttgatccacgaacacttccaactgaatattttatgaaacgttggacaaggaaggcaagagatgatgatgctttgttagaagataataacaacaatactcatgatgaggatgcttctcagtccaccacaagccgctacaataccctatgtgctgatgccatcagatgtgctgagaaaggagctggatcggaggcagtatataaggcagcaaaagatatcttacagaaggcatatgaagagattattgcttatgaaagaaatactggccagggatctcaaagggatgttataaacatcaacgaggatgtcacgattgatgatgcaatgaatgataaatctatgccagattctggacgaaaggtgactaatctactaggccaatttgttaattccacttggtctccggtctaatccacgtttttgtcatctctttggagatgaaaatgtgatttagcagcattagcagctgtcatgatcgtcatgcaatatctattttggattgggtagcagcgaacaactcaacaacacttggacatttcaacatgaaatgatctccatgagaagaccaggacaatttagtttgaagatgctggatcatttctgtgatgattaagtctttgtcacttcaataagcgtcctgtatggtgttgcctgtagccctgtatggccgaagctactaaaggataaattctgacacgacaacaatgtggcgttggaacatagcaggtaattagggtttgataaagttaaagcaaccgagtcccaaacttttgatcttgattcgtgcaaacggggacgatgcaacacattttcaaggtattctggacctttatgaagcatgctctgggcaggtcatcaacaaagacaagtcttctgttcactaaaaatacgagaagtgagacgaagatggcggtcatgcaagctctaaatttaacacaagggactttcaacgacagatatctgggcttaccagttcgctttgggcagtccaggacaaaaacttcttagtacttaaatgataatgtgacaacgtattcaaggttggaaagaaaagctgctgtcaaaagccagtaaataagtgctgataaaggccgtagcacaaggaattccaacatatgctatgggatgctttgacttaaggaagacttgtctgctcaaatcagcaatgccatattcagatattggtggagtcaacaggacatgggaaacaaagtgcattgggtgaattgggctaaaatgaaaacgctaagggcttgttcgtttcacggttagtccatgtggattggttagtccatgtggattgggtggtattgagtcggtttaaatccataacaaatcaaaatccattccaatacacttcagtccacatgaaactggaataatcgaacaaggtctaaagagttgtgatggaatggagtttagagatatcgtagtatgttcttttataaacttagtcaaaactaaacaagttcaacttcaacttataatgaaattaaatagacgaataagtacattgctaatgctggtcttcagagagtgcgatggtttgtttcatatgattcactatgatgcttgtatcatatataattaattcatgttccgcattcagtgacagattattgggatgatgccacaaactcctaatttctgttacaccggatacttctgttcccatttgtttgctgaaagacagcttgccccggttgcaattaagttcattgctttaaatctgcagaactgagggtactgtacaaaacgaggacgatgtagctgcccagttcttcgaggacgctgatttcttgtttaacgccgatgcctccattaatccgcatcacgtcgatcataaca

SEQ ID NO: 199078 - DNA, 3682 bp, Zea Mays
cctcactcatgcgttcacaatcacacctgctgtttttcttctccagttcacctcgcgcgcgtgacaactagggagcccgccgccgcccaggtcttcgtcgaaccctttgccggcaacgagaacccgccacgccagtttcagcagctccgtaattgtggcgatggttgctcctacgggatcttgaattcttgacacacacacacaccgatggtaatggtgatggagggaggaaggacggaaggcgacgagctgattgctgattatgtggattgccttatgtctctggacaccaacacccggcctgtccacagcgatggtctcatcctcggtgctccaggcgggggaggagggacggtcgatgccggaactgagccagatgccatgagagatatcccctcatccgaggaccccaatgagcccgtgctcggcatgacgtttgagtccgatgaggccgccaaggcattctacaacgactatgccaggcggcttggcttccccttccgcgtcggcaggtctcggcggtcgaagggcacagaggaggttgtcgtcatgaagaggttcgtttgctccagggaaggggtgtacaagaagaaacagacctcgccggatgaggcggcaaggaagcgtgagaggatgtctatgcgagagggttgcaatgctatgatggaggtggttagggaggcggaccattgggttgtctccaaacttgagaaggctcacaaccatgagctcggcacttgtagcgccaaggttgggtaccttcgtgcgagaagttctcttggtggctctgataaggccacaatggtggggcctgacgagatggcgtttcttaggcagaatgtcctgggggaaggaggagacgcccagggccttcttgattatctcaagaagatgcaagccaatgacccggcgttctgccatgctatacaggttgacaagaatggctgtgtggtgaatgttttctgggctgatgctagggccaaagcagcttatcggcatttcggggatgctataacgttcgacacgacgtacaagaagaacaagcatatgatgccctttgttactttctcgggagtcaaccatcatctgcagactgttatttttggatgtgcattgcttatggaagagactgagttctcgtttatatggctatttgaaacatggttagcggcaatgggaggtaaggcaccatgctcattggtcactgaccaaaacagggccatgaaggctgcaattgggaaggtttttccgaattcctgtcaccgtttctgtaagtggagtattctgagtagaaccaagcaaaagctgacccatacatactcagagcatccaaccctaagagatgagcttgagagctgtgtgcttgagactgaaaccatctcgacattcgaaaccacttggatgtcaatcattgatagatatgacttgagaaagaattcatggcttcaagcaatatacaatatccgccaaaaatgggttcctttgtacctgatggatacattctttgcagaaacgttccccacatggaaattggaaaccatgaatgatttctataagaaatatttcaatacaaaaacaacgcttgaagtttttcttaatcagttcgatttgagcttggcaggccgatatgaggatgaggcaaaagcagatatggatgcctacttaaataaggcaactacaaaaactgcatcgctaatagaaaaacaggcagcagggacctataccaaagcagtcttcagtaggtttcaggaggaatttacagagtctctagggtttatcattcagaaaaccgaagacggctgcataagtaaatacagcatcacaaaatatgaagatccatcagacacattctgcgtgacttataatgcttccaataagatggcaaactgtagttgcaagtactttgaattctccggtattctgtgccgccatattcttggagtatacataatagttgatccacgaacacttccaactgaatattttatgaaacgttggacaaggaaggcaagagatgatgatgctttgttagaagataataacaacaatactcatgatgaggatgcttctcagtccaccacaagccgctacaataccctatgtgctgatgccatcagatgtgctgagaaaggagctggatcggaggcagtatataaggcagcaaaagatatcttacagaaggcatatgaagagattattgcttatgaaagaaatactggccagggatctcaaagggatgttataaacatcaacgaggatgtcacgattgatgatgcaatgaatgataaatctatgccagattctggacgaaagcattagcagctgtcatgatcgtcatgcaatatctattttggattgggtagcagcgaacaactcaacaacacttggacatttcaacatgaaatgatctccatgagaagaatgtccgcctgacttcagtagaccaggacaatttagtttgaagatgctggatcatttctgtgatgattaagtctttgtcacttcaataagcgtcctgtatggtgttgcctgtagccctgtatggccgaagctactaaaggtaattagggtttgataaagttaaagcaaccgagtcccaaacttttgatcttgattcgtgcaaacggggacgatgcaacacattttcaaggtattctggacctttatgaagcatgctctgggcaggtcatcaacaaagacaagtcttctgttcactaaaaatacgagaagtgagacgaagatggcggtcatgcaagctctaaatttaacacaagggactttcaacgacagatatctgggcttaccagttcgctttgggcagtccaggacaaaaacttcttagtacttaaatgataatgtgacaacgtattcaaggttggaaagaaaagctgctgtcaaaagccagtaaataagtgctgataaaggccgtagcacaaggaattccaacatatgctatgggatgctttgacttaaggaagacttgtctgctcaaatcagcaatgccatattcagatattggtggagtcaacaggacatgggaaacaaagtgcattgggtgaattgggctaaaatgaaaacgctaagggcttgttcgtttcacggttagtccatgtggattggttagtccatgtggattgggtggtattgagtcggtttaaatccataacaaatcaaaatccattccaatacacttcagtccacatgaaactggaataatcgaacaaggtctaaagagttgtgatggaatggagtttagagatatcgtagtatgttcttttataaacttagtcaaaactaaacaagttcaacttcaacttataatgaaattaaatagacgaataagtacattgctaatgctggtcttcagagagtgcgatggtttgtttcatatgattcactatgatgcttgtatcatatataattaattcatgttccgcattcagtgacagattattgggatgatgccacaaactcctaatttctgttacaccggatacttctgttcccatttgtttgctgaaagacagcttgccccggttgcaattaagttcattgctttaaatctgcagaactgagggtactgtacaaaacgaggacgatgtagctgcccagttcttcgaggacgctgatttcttgtttaacgccgatgcctccattaatccgcatcacgtcgatcataaca

SEQ ID NO: 199079 - DNA, 3876 bp, Zea Mays
ctcactcatgcgttcacaatcacacctgctgtttttcttctccagttcacctcgcgcgcgtgacaactagggagcccgccgccgcccaggtcttcgtcgaaccctttgccggcaacgagaacccgccacgccagaaaaagaaaaagaaaaaacaactacagccatatctacacttatcccgctactagtttcagcagctccgtaattgtggcgatggttgctcctacgggatcttgaattcttgacacacacacacaccgatggtaatggtgatggagggaggaaggacggaaggcgacgagctgattgctgattatgtggattgccttatgtctctggacaccaacacccggcctgtccacagcgatggtctcatcctcggtgctccaggcgggggaggagggacggtcgatgccggaactgagccagatgccatgagagatatcccctcatccgaggaccccaatgagcccgtgctcggcatgacgtttgagtccgatgaggccgccaaggcattctacaacgactatgccaggcggcttggcttccccttccgcgtcggcaggtctcggcggtcgaagggcacagaggaggttgtcgtcatgaagaggttcgtttgctccagggaaggggtgtacaagaagaaacagacctcgccggatgaggcggcaaggaagcgtgagaggatgtctatgcgagagggttgcaatgctatgatggaggtggttagggaggcggaccattgggttgtctccaaacttgagaaggctcacaaccatgagctcggcacttgtagcgccaaggttgggtaccttcgtgcgagaagttctcttggtggctctgataaggccacaatggtggggcctgacgagatggcgtttcttaggcagaatgtcctgggggaaggaggagacgcccagggccttcttgattatctcaagaagatgcaagccaatgacccggcgttctgccatgctatacaggttgacaagaatggctgtgtggtgaatgttttctgggctgatgctagggccaaagcagcttatcggcatttcggggatgctataacgttcgacacgacgtacaagaagaacaagcatatgatgccctttgttactttctcgggagtcaaccatcatctgcagactgttatttttggatgtgcattgcttatggaagagactgagttctcgtttatatggctatttgaaacatggttagcggcaatgggaggtaaggcaccatgctcattggtcactgaccaaaacagggccatgaaggctgcaattgggaaggtttttccgaattcctgtcaccgtttctgtaagtggagtattctgagtagaaccaagcaaaagctgacccatacatactcagagcatccaaccctaagagatgagcttgagagctgtgtgcttgagactgaaaccatctcgacattcgaaaccacttggatgtcaatcattgatagatatgacttgagaaagaattcatggcttcaagcaatatacaatatccgccaaaaatgggttcctttgtacctgatggatacattctttgcagaaacgttccccacatggaaattggaaaccatgaatgatttctataagaaatatttcaatacaaaaacaacgcttgaagtttttcttaatcagttcgatttgagcttggcaggccgatatgaggatgaggcaaaagcagatatggatgcctacttaaataaggcaactacaaaaactgcatcgctaatagaaaaacaggcagcagggacctataccaaagcagtcttcagtaggtttcaggaggaatttacagagtctctagggtttatcattcagaaaaccgaagacggctgcataagtaaatacagcatcacaaaatatgaagatccatcagacacattctgcgtgacttataatgcttccaataagatggcaaactgtagttgcaagtactttgaattctccggtattctgtgccgccatattcttggagtatacataatagttgatccacgaacacttccaactgaatattttatgaaacgttggacaaggaaggcaagagatgatgatgctttgttagaagataataacaacaatactcatgatgaggatgcttctcagtccaccacaagccgctacaataccctatgtgctgatgccatcagatgtgctgagaaaggagctggatcggaggcagtatataaggcagcaaaagatatcttacagaaggcatatgaagagattattgcttatgaaagaaatactggccagggatctcaaagggatgttataaacatcaacgaggatgtcacgattgatgatgcaatgaatgataaatctatgccagattctggacgaaaggtgactaatctactaggccaatttgttaattccacttggtctccggtctaatccacgtttttgtcatctctttggagatgaaaatgtgatttagcagcattagcagctgtcatgatcgtcatgcaatatctattttggattgggtagcagcgaacaactcaacaacacttggacatttcaacatgaaatgatctccatgagaagaatgtccgcctgacttcagtagaccaggacaatttagtttgaagatgctggatcatttctgtgatgattaagtctttgtcacttcaataagcgtcctgtatggtgttgcctgtagccctgtatggccgaagctactaaaggataaattctgacacgacaacaatgtggcgttggaacatagcaggtaattagggtttgataaagttaaagcaaccgagtcccaaacttttgatcttgattcgtgcaaacggggacgatgcaacacattttcaaggtattctggacctttatgaagcatgctctgggcaggtcatcaacaaagacaagtcttctgttcactaaaaatacgagaagtgagacgaagatggcggtcatgcaagctctaaatttaacacaagggactttcaacgacagatatctgggcttaccagttcgctttgggcagtccaggacaaaaacttcttagtacttaaatgataatgtgacaacgtattcaaggttggaaagaaaagctgctgtcaaaagccagtaaataagtgctgataaaggccgtagcacaaggaattccaacatatgctatgggatgctttgacttaaggaagacttgtctgctcaaatcagcaatgccatattcagatattggtggagtcaacaggacatgggaaacaaagtgcattgggtgaattgggctaaaatgaaaacgctaagggcttgttcgtttcacggttagtccatgtggattggttagtccatgtggattgggtggtattgagtcggtttaaatccataacaaatcaaaatccattccaatacacttcagtccacatgaaactggaataatcgaacaaggtctaaagagttgtgatggaatggagtttagagatatcgtagtatgttcttttataaacttagtcaaaactaaacaagttcaacttcaacttataatgaaattaaatagacgaataagtacattgctaatgctggtcttcagagagtgcgatggtttgtttcatatgattcactatgatgcttgtatcatatataattaattcatgttccgcattcagtgacagattattgggatgatgccacaaactcctaatttctgttacaccggatacttctgttcccatttgtttgctgaaagacagcttgccccggttgcaattaagttcattgctttaaatctgcagaactgagggtactgtacaaaacgaggacgatgtagctgcccagttcttcgaggacgctgatttcttgtttaacgccgatgcctccattaatccgcatcacgtcgatcataaca

SEQ ID NO: 199080 - DNA, 4432 bp, Zea Mays
ctcactcatgcgttcacaatcacacctgctgtttttcttctccagttcacctcgcgcgcgtgacaactagggagcccgccgccgcccaggtcttcgtcgaaccctttgccggcaacgagaacccgccacgccagaaaaagaaaaagaaaaaacaactacagccatatctacacttatcccgctactagtttcagcagctccgtaattgtggcgatggttgctcctacgggatcttgaattcttgacacacacacacaccgatggtaatggtgatggagggaggaaggacggaaggcgacgagctgattgctgattatgtggattgccttatgtctctggacaccaacacccggcctgtccacagcgatggtctcatcctcggtgctccaggcgggggaggagggacggtcgatgccggaactgagccagatgccatgagagatatcccctcatccgaggaccccaatgagcccgtgctcggcatgacgtttgagtccgatgaggccgccaaggcattctacaacgactatgccaggcggcttggcttccccttccgcgtcggcaggtctcggcggtcgaagggcacagaggaggttgtcgtcatgaagaggttcgtttgctccagggaaggggtgtacaagaagaaacagacctcgccggatgaggcggcaaggaagcgtgagaggatgtctatgcgagagggttgcaatgctatgatggaggtggttagggaggcggaccattgggttgtctccaaacttgagaaggctcacaaccatgagctcggcacttgtagcgccaaggttgggtaccttcgtgcgagaagttctcttggtggctctgataaggccacaatggtggggcctgacgagatggcgtttcttaggcagaatgtcctgggggaaggaggagacgcccagggccttcttgattatctcaagaagatgcaagccaatgacccggcgttctgccatgctatacaggttgacaagaatggctgtgtggtgaatgttttctgggctgatgctagggccaaagcagcttatcggcatttcggggatgctataacgttcgacacgacgtacaagaagaacaagcatatgatgccctttgttactttctcgggagtcaaccatcatctgcagactgttatttttggatgtgcattgcttatggaagagactgagttctcgtttatatggctatttgaaacatggttagcggcaatgggaggtaaggcaccatgctcattggtcactgaccaaaacagggccatgaaggctgcaattgggaaggtttttccgaattcctgtcaccgtttctgtaagtggagtattctgagtagaaccaagcaaaagctgacccatacatactcagagcatccaaccctaagagatgagcttgagagctgtgtgcttgagactgaaaccatctcgacattcgaaaccacttggatgtcaatcattgatagatatgacttgagaaagaattcatggcttcaagcaatatacaatatccgccaaaaatgggttcctttgtacctgatggatacattctttgcagaaacgttccccacatggaaattggaaaccatgaatgatttctataagaaatatttcaatacaaaaacaacgcttgaagtttttcttaatcagttcgatttgagcttggcaggccgatatgaggatgaggcaaaagcagatatggatgcctacttaaataaggcaactacaaaaactgcatcgctaatagaaaaacaggcagcagggacctataccaaagcagtcttcagtaggtttcaggaggaatttacagagtctctagggtttatcattcagaaaaccgaagacggctgcataagtaaatacagcatcacaaaatatgaagatccatcagacacattctgcgtgacttataatgcttccaataagatggcaaactgtagttgcaagtactttgaattctccggtattctgtgccgccatattcttggagtatacataatagttgatccacgaacacttccaactgaatattttatgaaacgttggacaaggaaggcaagagatgatgatgctttgttagaagataataacaacaatactcatgatgaggatgcttctcagtccaccacaagccgctacaataccctatgtgctgatgccatcagatgtgctgagaaaggagctggatcggaggcagtatataaggcagcaaaagatatcttacagaaggcatatgaagagattattgcttatgaaagaaatactggccagggatctcaaagggatgttataaacatcaacgaggatgtcacgattgatgatgcaatgaatgataaatctatgccagattctggacgaaaggtgactaatctactaggccaatttgttaattccacttggtctccggtctaatccacgtttttgtcatctctttggagatgaaaatgtgatttagcagcattagcagctgtcatgatcgtcatgcaatatctattttggattgggtagcagcgaacaactcaacaacacttggacatttcaacatgaaatgatctccatgagaagaatgtccgcctgacttcagtagaccaggacaatttagtttgaagatgctggatcatttctgtgatgattaagtctttgtcacttcaataagcgtcctgtatggtgttgcctgtagccctgtatggccgaagctactaaaggtaattagggtttgataaagttaaagcaaccgagtcccaaacttttgatcttgattcgtgcaaacggggacgatgcaacacattttcaaggtattctggacctttatgaagcatgctctgggcaggtcatcaacaaagacaagtcttctgttcactaaaaatacgagaagtgagacgaagatggcggtcatgcaagctctaaatttaacacaagggactttcaacgacagatatctgggcttaccagttcgctttgggcagtccaggacaaaaacttcttagtacttaaatgataatgtgacaacgtattcaaggttggaaagaaaagctgctgtcaaaagccagtaaataagtgctgataaaggccgtagcacaaggaattccaacatatgctatgggatgctttgacttaaggaagacttgtctgctcaaatcagcaatgccatattcagatattggtggagtcaacaggacatgggaaacaaagtgcattgggtgaattgggctaaaatgaaaacgctaagggcttgttcgtttcacggttagtccatgtggattggttagtccatgtggattgggtggtattgagtcggtttaaatccataacaaatcaaaatccattccaatacacttcagtccacatgaaactggaataatcgaacaaggtctaaagagttgtgatggaatggagtttagagatatcgtagtatgttcttttataaacttagtcaaaactaaacaagttcaacttcaacttataatgaaattaaatagacgaataagtacattgctaatgctggtcttcagagagtgcgatggtttgtttcatatgattcactatgatgcttgtatcatatataattaattcatgttccgcattcagtgacagattattgggatgatgccacaaactcctaatttctgttacaccggatacttctgttcccatttgtttgctgaaagacagcttgccccggttgcaattaagttcattgctttaaatctgcagaactgagggtactgtacaaaacgaggacgatgtagctgcccagttcttcgaggacgctgatttcttgtttaacgccgatgcctccattaatccgcatcacgtcgatcataacaactctagcgagtcaaattatttgtttgtttgtttgtttgtttgatcttttattataaaagacgacgaagagagaagaagaaaacgccagcaccatttgtaatctcgatccccgccgcacaagcttgatcggacggtcggacaccagacagtctgtcagagacaccaacgcccgggtccgctgccacggtgccaccgctgtttcccatgccggtcggcggtcgccgctccagttgaatttgaaggagcctgacggatcgatggcggccgcggcggaggtgtaccggcgggtgctgaaggcggtgcagaagcacgtcggtaggggcgccaccaagcagcgcttcctcgacttcggggcggccgagttccgtgcccccgtcggcacggaggccgacgctagggcgaggctgcggctcgccggggactacgcctacctcctcaccagcgtccaccaccacaaggatctgctgctctcgtacaatatagctgtggatcgatctgatgaaacgaagaagatactgaacaaatctgccgccagttggaggtctggagctagaatctgataattcaacattcaaattgcgtactgcatagtagctggg

SEQ ID NO: 199081 - DNA, 4228 bp, Zea Mays
gaagaatacatttttatattatatattgttaagtagtagctagtagatatagagatatataagaatatagttatagatacatatagggatacagaagaacagatagaggtaagaaggatagatacagatgcgaacatagaaatatagatagatatagaagagagtgactggccagcaacctatcgggttcactttgtttatatagctgggcccatgcacgaagcatgcgccgcaacacatcattcaaaaagcactgacgggagaagcttgagctagctacgccaatggctatagggcacaagaacaccaccaaagtggcgctcctagttctgctgctgtcattgatgctctctttgacagcgtcagtggcgcgcaatctccaatggcgactgtccgtcgctacggctgtggaggtgtgcgtgaaggctgctgtcggggctcctgacaagcttggcgactgtcccttctcacaaagggtgctgctcactctggaggagaagaaggtcccttaccggatgaggctcattgacctcagtaacaagcctggatggtccgtctcgtttacttttcctgtttattttccagagcagtatcctgtagggtctgacgactaagttgacaaagtactactgggggtcgtgtcttattttctacactcaagttgttctgggcagagatttctctggtgtagttttcatagtttcattgatggactggtagtagagaccaggaaggcaggagcaatatgagacagaatattttgctttctgcttgttttgctttggaggttttagatatatttagtggattcgttggatgtggcagatttccttggtttaactgaactgtattcctggaactggcatttgaaataaacactgcttagtgttggattctatactaatcaattcatatatcgttcagaattcttctctagctttgaggaacaagctgtagcccactagacttgtgttgaaatatttgtgcatatttcttttggggcttaaagaggggctgtcaaagaagataaacctcataccgttagagttcaacgtcgaacattcagtgtcttccctggtagagttgcatatgtcttcttgaatggattgggttctgatgtacttggatcacagccagttgagaggcattggacaaggcctttgtgtgagtgaagcccacttggagtctgggccaggttttgtctgtatgtgatgatcctcacatctaaatctaacccactgaaaaaagacctttttcaggtttctgaagatcagcccagagggcaaggtgcccgtgtacaacagcggcgatggcaaatggattgctaattctgatgtgatcacccaagtcatcgaggagaagtacccagccccgtctctggcgacgcctccagaatacgcatcagtgggatcgaagattttcccatccttcgtcaagttcttgatgagcaaggatgccagcgacgacggttcggaagaggcacttgtgcgtgagctgcaggcgctggaggagcatctcaaagcccacgtaataagcctgacctcttctgactgactatgtttgtttcacggacggaccctgcttcgtcctacactctcaatgatgctgtgtgcaggggcgtccctacatcagcggggagagagtaacagccgccgacctcagcctggcgccgaagctcttccacctggtggtggcgctggagcatttcaagggctggaaggtgccagaaagcatgtccagcgtccacgcctacacccaggtagtagcatttccagagcgcttgctcatcgagatacatcccgtatgagtatgacctgccctgccccacgatcgtcttttgtgccgcaggctatgttcagccgcgaatctttcatcaagactaagcccaccaaggagcacttgatcgcgggatgggcggcgaaggtgcccaagccgcccaacctcgtcgtgccttgctggctcatctgatcagtcgcagtcggtggtgcgttgctggttcattatgattgggttgggatacaacaataatgcagcgtgccatgttccgatcacttcccagttgtggtggccatgtttctatatcacctaacgctgccggttaggttcgggaccgtgggcatctgcatcgatctttttcttttcttttcttttaagattacacaccataacatggccttgtgcatctgcactcgtgatgggcatatttgtgacgtggaaatatcttctttcttaagcgcgcgctagtgagaatgttgggcgcaaagtaggcgcgcattacatggtgtggtcgtttgtgcgcacgatgtgttccgattccgatctctcgtggtggtaatgcgatgcagatattattctgtctgtcagtttatatatttgctgtttttttctaataaaagaaagtttaattggttcaccgtggagccttagcgcgtgttcatgagaacggaagggtcgatcgtgttgggtgtgctaaattgccaaccgtcatccccctcgtcagaagaagaaagccattagacgatggttgatggaatggacgaacaaatattgttactcgtagtcgtagacgatggaagagctgccttgtgctgcggcttcccagttcgggcgggattccgcgcgcacaaaacgcctgatccaaactaaattatctcatctcatctcagaaaccacccacccagtccaagctctatcttacggtaacagaatactcctaaataactgcgcgcagattcagattagccacggttactcgccgtcatccatcccattccatcccgttatataaataggcgccgcccgtcgcctgatcacaaacacccacttcacctccgaccacttcacctccgatcccgccaccactacccaccctttcctttgacgtcccgatggcacctgtagatctaacccccaagcagcccaggaaggcctacggcggcgacggcggcgcctactacgagtggagccccgccgacctgcccatgctcggcgtcgcctccatcggcgcagccaagctctcgctcgccgccggcgggctcgcgctccccagctactccgactcagccaaggtcgcctacgtcctccaaggcacgggcacctgcggcatcgtcctcccagaggcgacgaaggagaaggtggtggccgtgaaggagggcgacgcgctggcgctgcccttcggcgtggtgacgtggtggcacaacggccccgccgcgccgaccccgctcacggtgctcttcctcggcgacacctccaagggccacaggccggggcaattcaccaacttccagctgacgggcgcgaccggcatcttcacgggcttctccaccgagttcgtgtcgcgcgcgtgggaccttccggaggcggacgcggcggcgctggtgtcgagccagccggcctcgggcatcgtccgggcgtcctcgtccccgctgccggcgccgtcgccgcgggaccgcgagggggtggcgctcaactgcctggaggcgccgctggacgtggacatcccgggcgggggccgcgtcgtggtgctcaacacggccaacctgccgctggtcaaggaggtcgggctgggcgccgacctggtccgcatcgacgcccactccatgtgctccccgggcttctcgtgcgactcggcgtaccaggtcacctacatcgtccgcggcagcggccgcgtccaggtggtcgggcccgacggggtgcgcgtcctggagacgcgcgtcgagggcggcttcctcttcatcgtgccccgcttccacgtcgtctccaagatcgccgacgcgtccggcatggagtggttctccatcatcaccacccccaacccgatcttcagccacctggccgggaagacgtcggtgtggaaggccatctcggcggaggtgctgcaggcgtcgttcaacaccacgccggagatggagaagctgttccggtccaagaggctcgactcggagatcttcttcgctcccccatccaactgagaaaataggccggaagccccacggtggagtcctctcgttaggtcgtcgtgcttagattaggttagctagcttgcctttaataaaaagagagtggtggtcgtcggcgtcggcttcggcggtctgcttcttcttcattcagtgcgtcggtcggtttagagtctgtcacgtgtcccgtcattgaactgcagtttttgttaataaagtattgttattattaggtattattattctcgccctctgaattgttgttattatcc

SEQ ID NO: 199082 - DNA, 1661 bp, Zea Mays
gtgacgtcacctcttctaaggcccctgtggtgccaattcagatgggctccaggatgaggccaggcccatgggggcacgattcggccttttcttgtcttgctcgtcaaaagaataaaatcccaacccataggaaagcgtagcatagcaggggaggccgggaggggagaaaggcgaactcgaattgggggaagagagcgagagacgaatcgcatcgagccggagaggaagtcagagacagggaggagggcggcggaatcggcgccggcgggaggcaggcatggaggacctgagcgtggaggagctcgcctccaacctctccacctacaaagagcagctacgcgaggtcaagaagcttatcaaggagaagaaggatgatgctggaatttctgaatatattgatatggagaaggagcttcaagaggagccatgcccagcaaggtagcatgaaaaggccgcttgcaacagaagatttgttttggggaatttagatttttgtaaccttgaaaggtcataacgttaaccgaagagattttggcaactgcaaagcaaactgagagtgcccagaatgttgcaggtctatcaccgccaagctattcagctggagtgcagtctgagggactggatgacctttcacattcccataagtttgccgttggtactagagttcaagctgtgtggagtgaagatggagaatggtataatgcaaccgttgaagctttgacaccaaatggatactatgtagcctacgatggctggggaaacagtgaagaggtggacccagataatgtgaggctgcttgaggaagaagcagctgatgccttgggacaagctgaaaaggaagctgaagctacaaaaatggcaataaagaggaaaattgaacaagcagcaacatctgattttcaggcgcgtagcttgccggccaaacttcgtatcgaaccaagtgaccctgaggatgttaaagctgcaaagcgtaagaaaatacatgctttcaaatcaaaatcccgctttgagcagcttgaatttgcccaaaacaaaaggcagaatgcatggcagcagtttcaaaccaaggggaaagccaaaaaggtggggttcttctccggtcgcaagaaggagagcatcttcaagtcaccggacgaccacagaggtaaggtgggtgtcactgggagtggcaagggcctgaccgacttccagaggagggagaagcatctgcaccttaaaggtgggtccggggatgcagcggatgatgacgaggagtaaactgaagaaccgagcctctgtttgtatcccgccgaacagacatttccatacctgttctttagcgccgacatggcctcgaggggactcttgacttaaaccagaaaatttcaatgtttgtcccattctcattgttgaatgtcgctgccgttttggagctgcattctggtggcgaggtcacgctgctagaggagggcgtcctgagcgtacagatcgacttgtcttgctagtctgtagtgaagtattaatccttaaacgtttactaaaattgtcaccggcctaagtacagatcctttgccccaaccaagtccattgaagaagatcaataaactcgctactgctgagtgtactctacaaaccgcgtaacaagtgtttctgtgcttgacaaaagacatcgaaaattctgg

SEQ ID NO: 199083 - DNA, 1819 bp, Zea Mays
gtgacgtcacctcttctaaggcccctgtggtgccaattcagatgggctccaggatgaggccaggcccatgggggcacgattcggccttttcttgtcttgctcgtcaaaagaataaaatcccaacccataggaaagcgtagcatagcaggggaggccgggaggggagaaaggcgaactcgaattgggggaagagagcgagagacgaatcgcatcgagccggagaggaagtcagagacagggaggagggcggcggaatcggcgccggcgggaggcaggcatggaggacctgagcgtggaggagctcgcctccaacctctccacctacaaagagcagctacgcgaggtcaagaagcttatcaaggagaagaaggatgatgctggaatttctgaatatattgatatggagaaggagcttcaagaggagccatgcccagcaaggtagcatgaaaaggccgcttgcaacagaagatttgttttggggaatttagatttttgtaaccttgaaaggtgagaaggttaattatggcaatggtttgtactactacaaatttcggtgttgctgctgctgttctaagttggatcttgaaatatgggcacatgtttaatactactgggaggttgcttgtgtttatgatgcttaatatcattttttgtgtttgctgcaggtcataacgttaaccgaagagattttggcaactgcaaagcaaactgagagtgcccagaatgttgcaggtctatcaccgccaagctattcagctggagtgcagtctgagggactggatgacctttcacattcccataagtttgccgttggtactagagttcaagctgtgtggagtgaagatggagaatggtataatgcaaccgttgaagctttgacaccaaatggatactatgtagcctacgatggctggggaaacagtgaagaggtggacccagataatgtgaggctgcttgaggaagaagcagctgatgccttgggacaagctgaaaaggaagctgaagctacaaaaatggcaataaagaggaaaattgaacaagcagcaacatctgattttcaggcgcgtagcttgccggccaaacttcgtatcgaaccaagtgaccctgaggatgttaaagctgcaaagcgtaagaaaatacatgctttcaaatcaaaatcccgctttgagcagcttgaatttgcccaaaacaaaaggcagaatgcatggcagcagtttcaaaccaaggggaaagccaaaaaggtggggttcttctccggtcgcaagaaggagagcatcttcaagtcaccggacgaccacagaggtaaggtgggtgtcactgggagtggcaagggcctgaccgacttccagaggagggagaagcatctgcaccttaaaggtgggtccggggatgcagcggatgatgacgaggagtaaactgaagaaccgagcctctgtttgtatcccgccgaacagacatttccatacctgttctttagcgccgacatggcctcgaggggactcttgacttaaaccagaaaatttcaatgtttgtcccattctcattgttgaatgtcgctgccgttttggagctgcattctggtggcgaggtcacgctgctagaggagggcgtcctgagcgtacagatcgacttgtcttgctagtctgtagtgaagtattaatccttaaacgtttactaaaattgtcaccggcctaagtacagatcctttgccccaaccaagtccattgaagaagatcaataaactcgctactgctgagtgtactctacaaaccgcgtaacaagtgtttctgtgcttgacaaaagacatcgaaaattctgg

SEQ ID NO: 199084 - DNA, 2308 bp, Zea Mays
gtgacgtcacctcttctaaggcccctgtggtgccaattcagatgggctccaggatgaggccaggcccatgggggcacgattcggccttttcttgtcttgctcgtcaaaagaataaaatcccaacccataggaaagcgtagcatagcaggggaggccgggaggggagaaaggcgaactcgaattgggggaagagagcgagagacgaatcgcatcgagccggagaggaagtcagagacagggaggagggcggcggaatcggcgccggcgggaggcaggcatggaggacctgagcgtggaggagctcgcctccaacctctccacctacaaagagcagctacgcgaggtcaagaagcttatcaaggagaagaaggatgatgctggaatttctgaatatattgatatggagaaggagcttcaagaggtcagttcatttcttattttatcctgtaatgtgatccctcatgctcgtgtagctacacgtcagatacatcggattaatgattttcacaaatggatgcttgatttctcctctgatttttggggcatgttgctatcgattcctctcttctttgttacaaggagccatgcccagcaaggtagcatgaaaaggccgcttgcaacagaagatttgttttggggaatttagatttttgtaaccttgaaaggtgagaaggttaattatggcaatggtagggactgtccgagcaaccatattaataataatgaacaatatgtaaaaattcagtggcttcaaagttgtccattaccctttatcttgatttattgcaggtttgtactactacaaatttcggtgttgctgctgctgttctaagttggatcttgaaatatgggcacatgtttaatactactgggaggttgcttgtgtttatgatgcttaatatcattttttgtgtttgctgcaggtcataacgttaaccgaagagattttggcaactgcaaagcaaactgagagtgcccagaatgttgcaggtctatcaccgccaagctattcagctggagtgcagtctgagggactggatgacctttcacattcccataagtttgccgttggtactagagttcaagctgtgtggagtgaagatggagaatgctgaattgccaggtataatgcaaccgttgaagctttgacaccaaatggatactatgtagcctacgatggctggggaaacagtgaagaggtggacccagataatgtgaggctgcttgaggaagaagcagctgatgccttgggacaagctgaaaaggaagctgaagctacaaaaatggcaataaagaggaaaattgaacaagcagcaacatctgattttcaggcgcgtagcttgccggccaaacttcgtatcgaaccaagtgaccctgaggatgttaaagctgcaaagcgtaagaaaatacatgctttcaaatcaaaatcccgctttgagcagcttgaatttgcccaaaacaaaaggcagaatgcatggcagcagtttcaaaccaaggggaaagccaaaaaggtagcttcttggcccccacgtaatttttttttgctttcttaaaaatggctaggcactcttccattgagttggaattctgaatctcaaggtactacatatggccatcctcagcattcatgttatgatggaggaccaaaatggaacaaattgtctgacctttcccagcattccagttagtcgagaaacagattgtgtgaatttcgatggtttgtttgccaggtggggttcttctccggtcgcaagaaggagagcatcttcaagtcaccggacgaccacagaggtaaggtgggtgtcactgggagtggcaagggcctgaccgacttccagaggagggagaagcatctgcaccttaaaggtgggtccggggatgcagcggatgatgacgaggagtaaactgaagaaccgagcctctgtttgtatcccgccgaacagacatttccatacctgttctttagcgccgacatggcctcgaggggactcttgacttaaaccagaaaatttcaatgtttgtcccattctcattgttgaatgtcgctgccgttttggagctgcattctggtggcgaggtcacgctgctagaggagggcgtcctgagcgtacagatcgacttgtcttgctagtctgtagtgaagtattaatccttaaacgtttactaaaattgtcaccggcctaagtacagatcctttgccccaaccaagtccattgaagaagatcaataaactcgctactgctgagtgtactctacaaaccgcgtaacaagtgtttctgtgcttgacaaaagacatcgaaaattctgg

SEQ ID NO: 199085 - DNA, 1807 bp, Zea Mays
gtgacgtcacctcttctaaggcccctgtggtgccaattcagatgggctccaggatgaggccaggcccatgggggcacgattcggccttttcttgtcttgctcgtcaaaagaataaaatcccaacccataggaaagcgtagcatagcaggggaggccgggaggggagaaaggcgaactcgaattgggggaagagagcgagagacgaatcgcatcgagccggagaggaagtcagagacagggaggagggcggcggaatcggcgccggcgggaggcaggcatggaggacctgagcgtggaggagctcgcctccaacctctccacctacaaagagcagctacgcgaggtcaagaagcttatcaaggagaagaaggatgatgctggaatttctgaatatattgatatggagaaggagcttcaagaggagccatgcccagcaaggtagcatgaaaaggccgcttgcaacagaagatttgttttggggaatttagatttttgtaaccttgaaaggtttgtactactacaaatttcggtgttgctgctgctgttctaagttggatcttgaaatatgggcacatgtttaatactactgggaggttgcttgtgtttatgatgcttaatatcattttttgtgtttgctgcaggtcataacgttaaccgaagagattttggcaactgcaaagcaaactgagagtgcccagaatgttgcaggtctatcaccgccaagctattcagctggagtgcagtctgagggactggatgacctttcacattcccataagtttgccgttggtactagagttcaagctgtgtggagtgaagatggagaatgctgaattgccaggtataatgcaaccgttgaagctttgacaccaaatggatactatgtagcctacgatggctggggaaacagtgaagaggtggacccagataatgtgaggctgcttgaggaagaagcagctgatgccttgggacaagctgaaaaggaagctgaagctacaaaaatggcaataaagaggaaaattgaacaagcagcaacatctgattttcaggcgcgtagcttgccggccaaacttcgtatcgaaccaagtgaccctgaggatgttaaagctgcaaagcgtaagaaaatacatgctttcaaatcaaaatcccgctttgagcagcttgaatttgcccaaaacaaaaggcagaatgcatggcagcagtttcaaaccaaggggaaagccaaaaaggtggggttcttctccggtcgcaagaaggagagcatcttcaagtcaccggacgaccacagaggtaaggtgggtgtcactgggagtggcaagggcctgaccgacttccagaggagggagaagcatctgcaccttaaaggtgggtccggggatgcagcggatgatgacgaggagtaaactgaagaaccgagcctctgtttgtatcccgccgaacagacatttccatacctgttctttagcgccgacatggcctcgaggggactcttgacttaaaccagaaaatttcaatgtttgtcccattctcattgttgaatgtcgctgccgttttggagctgcattctggtggcgaggtcacgctgctagaggagggcgtcctgagcgtacagatcgacttgtcttgctagtctgtagtgaagtattaatccttaaacgtttactaaaattgtcaccggcctaagtacagatcctttgccccaaccaagtccattgaagaagatcaataaactcgctactgctgagtgtactctacaaaccgcgtaacaagtgtttctgtgcttgacaaaagacatcgaaaattctgg

SEQ ID NO: 199086 - DNA, 1680 bp, Zea Mays
atatgatataagtatacacatgcatatccgtatttgtatagatatctcaacggcccgtttggatgctttcatttggttggaactggaatctgctccataaattggtcaagaagcttatcaaggagaagaaggatgatgctggaatttctgaatatattgatatggagaaggagcttcaagaggagccatgcccagcaaggtagcatgaaaaggccgcttgcaacagaagatttgttttggggaatttagatttttgtaaccttgaaaggtgagaaggttaattatggcaatggtagggactgtccgagcaaccatattaataataatgaacaatatgtaaaaattcagtggcttcaaagttgtccattaccctttatcttgatttattgcaggtttgtactactacaaatttcggtgttgctgctgctgttctaagttggatcttgaaatatgggcacatgtttaatactactgggaggttgcttgtgtttatgatgcttaatatcattttttgtgtttgctgcaggtcataacgttaaccgaagagattttggcaactgcaaagcaaactgagagtgcccagaatgttgcaggtctatcaccgccaagctattcagctggagtgcagtctgagggactggatgacctttcacattcccataagtttgccgttggtactagagttcaagctgtgtggagtgaagatggagaatggtataatgcaaccgttgaagctttgacaccaaatggatactatgtagcctacgatggctggggaaacagtgaagaggtggacccagataatgtgaggctgcttgaggaagaagcagctgatgccttgggacaagctgaaaaggaagctgaagctacaaaaatggcaataaagaggaaaattgaacaagcagcaacatctgattttcaggcgcgtagcttgccggccaaacttcgtatcgaaccaagtgaccctgaggatgttaaagctgcaaagcgtaagaaaatacatgctttcaaatcaaaatcccgctttgagcagcttgaatttgcccaaaacaaaaggcagaatgcatggcagcagtttcaaaccaaggggaaagccaaaaaggtggggttcttctccggtcgcaagaaggagagcatcttcaagtcaccggacgaccacagaggtaaggtgggtgtcactgggagtggcaagggcctgaccgacttccagaggagggagaagcatctgcaccttaaaggtgggtccggggatgcagcggatgatgacgaggagtaaactgaagaaccgagcctctgtttgtatcccgccgaacagacatttccatacctgttctttagcgccgacatggcctcgaggggactcttgacttaaaccagaaaatttcaatgtttgtcccattctcattgttgaatgtcgctgccgttttggagctgcattctggtggcgaggtcacgctgctagaggagggcgtcctgagcgtacagatcgacttgtcttgctagtctgtagtgaagtattaatccttaaacgtttactaaaattgtcaccggcctaagtacagatcctttgccccaaccaagtccattgaagaagatcaataaactcgctactgctgagtgtactctacaaaccgcgtaacaagtgtttctgtgcttgacaaaagacatcgaaaattctgg

SEQ ID NO: 199087 - DNA, 1992 bp, Zea Mays
ctttcatttggttggaactggaatctgctccataaattggtcaagaagcttatcaaggagaagaaggatgatgctggaatttctgaatatattgatatggagaaggagcttcaagaggtcagttcatttcttattttatcctgtaatgtgatccctcatgctcgtgtagctacacgtcagatacatcggattaatgattttcacaaatggatgcttgatttctcctctgatttttggggcatgttgctatcgattcctctcttctttgttacaaggagccatgcccagcaaggtagcatgaaaaggccgcttgcaacagaagatttgttttggggaatttagatttttgtaaccttgaaaggtgagaaggttaattatggcaatggtagggactgtccgagcaaccatattaataataatgaacaatatgtaaaaattcagtggcttcaaagttgtccattaccctttatcttgatttattgcaggtttgtactactacaaatttcggtgttgctgctgctgttctaagttggatcttgaaatatgggcacatgtttaatactactgggaggttgcttgtgtttatgatgcttaatatcattttttgtgtttgctgcaggtcataacgttaaccgaagagattttggcaactgcaaagcaaactgagagtgcccagaatgttgcaggtctatcaccgccaagctattcagctggagtgcagtctgagggactggatgacctttcacattcccataagtttgccgttggtactagagttcaagctgtgtggagtgaagatggagaatggtataatgcaaccgttgaagctttgacaccaaatggatactatgtagcctacgatggctggggaaacagtgaagaggtggacccagataatgtgaggctgcttgaggaagaagcagctgatgccttgggacaagctgaaaaggaagctgaagctacaaaaatggcaataaagaggaaaattgaacaagcagcaacatctgattttcaggcgcgtagcttgccggccaaacttcgtatcgaaccaagtgaccctgaggatgttaaagctgcaaagcgtaagaaaatacatgctttcaaatcaaaatcccgctttgagcagcttgaatttgcccaaaacaaaaggcagaatgcatggcagcagtttcaaaccaaggggaaagccaaaaaggtagcttcttggcccccacgtaatttttttttgctttcttaaaaatggctaggcactcttccattgagttggaattctgaatctcaaggtactacatatggccatcctcagcattcatgttatgatggaggaccaaaatggaacaaattgtctgacctttcccagcattccagttagtcgagaaacagattgtgtgaatttcgatggtttgtttgccaggtggggttcttctccggtcgcaagaaggagagcatcttcaagtcaccggacgaccacagaggtaaggtgggtgtcactgggagtggcaagggcctgaccgacttccagaggagggagaagcatctgcaccttaaaggtgggtccggggatgcagcggatgatgacgaggagtaaactgaagaaccgagcctctgtttgtatcccgccgaacagacatttccatacctgttctttagcgccgacatggcctcgaggggactcttgacttaaaccagaaaatttcaatgtttgtcccattctcattgttgaatgtcgctgccgttttggagctgcattctggtggcgaggtcacgctgctagaggagggcgtcctgagcgtacagatcgacttgtcttgctagtctgtagtgaagtattaatccttaaacgtttactaaaattgtcaccggcctaagtacagatcctttgccccaaccaagtccattgaagaagatcaataaactcgctactgctgagtgtactctacaaaccgcgtaacaagtgtttctgtgcttgacaaaagacatcgaaaattctgg

SEQ ID NO: 199088 - DNA, 1263 bp, Zea Mays
tggttggaactggaatctgctccataaattggtcaagaagcttatcaaggagaagaaggatgatgctggaatttctgaatatattgatatggagaaggagcttcaagaggtcataacgttaaccgaagagattttggcaactgcaaagcaaactgagagtgcccagaatgttgcaggtctatcaccgccaagctattcagctggagtgcagtctgagggactggatgacctttcacattcccataagtttgccgttggtactagagttcaagctgtgtggagtgaagatggagaatggtataatgcaaccgttgaagctttgacaccaaatggatactatgtagcctacgatggctggggaaacagtgaagaggtggacccagataatgtgaggctgcttgaggaagaagcagctgatgccttgggacaagctgaaaaggaagctgaagctacaaaaatggcaataaagaggaaaattgaacaagcagcaacatctgattttcaggcgcgtagcttgccggccaaacttcgtatcgaaccaagtgaccctgaggatgttaaagctgcaaagcgtaagaaaatacatgctttcaaatcaaaatcccgctttgagcagcttgaatttgcccaaaacaaaaggcagaatgcatggcagcagtttcaaaccaaggggaaagccaaaaaggtggggttcttctccggtcgcaagaaggagagcatcttcaagtcaccggacgaccacagaggtaaggtgggtgtcactgggagtggcaagggcctgaccgacttccagaggagggagaagcatctgcaccttaaaggtgggtccggggatgcagcggatgatgacgaggagtaaactgaagaaccgagcctctgtttgtatcccgccgaacagacatttccatacctgttctttagcgccgacatggcctcgaggggactcttgacttaaaccagaaaatttcaatgtttgtcccattctcattgttgaatgtcgctgccgttttggagctgcattctggtggcgaggtcacgctgctagaggagggcgtcctgagcgtacagatcgacttgtcttgctagtctgtagtgaagtattaatccttaaacgtttactaaaattgtcaccggcctaagtacagatcctttgccccaaccaagtccattgaagaagatcaataaactcgctactgctgagtgtactctacaaaccgcgtaacaagtgtttctgtgcttgacaaaagacatcgaaaattctgg

SEQ ID NO: 199089 - DNA, 1344 bp, Zea Mays
ggaactggaatctgctccataaattggtcaagaagcttatcaaggagaagaaggatgatgctggaatttctgaatatattgatatggagaaggagcttcaagaggagccatgcccagcaaggtagcatgaaaaggccgcttgcaacagaagatttgttttggggaatttagatttttgtaaccttgaaaggtcataacgttaaccgaagagattttggcaactgcaaagcaaactgagagtgcccagaatgttgcaggtctatcaccgccaagctattcagctggagtgcagtctgagggactggatgacctttcacattcccataagtttgccgttggtactagagttcaagctgtgtggagtgaagatggagaatggtataatgcaaccgttgaagctttgacaccaaatggatactatgtagcctacgatggctggggaaacagtgaagaggtggacccagataatgtgaggctgcttgaggaagaagcagctgatgccttgggacaagctgaaaaggaagctgaagctacaaaaatggcaataaagaggaaaattgaacaagcagcaacatctgattttcaggcgcgtagcttgccggccaaacttcgtatcgaaccaagtgaccctgaggatgttaaagctgcaaagcgtaagaaaatacatgctttcaaatcaaaatcccgctttgagcagcttgaatttgcccaaaacaaaaggcagaatgcatggcagcagtttcaaaccaaggggaaagccaaaaaggtggggttcttctccggtcgcaagaaggagagcatcttcaagtcaccggacgaccacagaggtaaggtgggtgtcactgggagtggcaagggcctgaccgacttccagaggagggagaagcatctgcaccttaaaggtgggtccggggatgcagcggatgatgacgaggagtaaactgaagaaccgagcctctgtttgtatcccgccgaacagacatttccatacctgttctttagcgccgacatggcctcgaggggactcttgacttaaaccagaaaatttcaatgtttgtcccattctcattgttgaatgtcgctgccgttttggagctgcattctggtggcgaggtcacgctgctagaggagggcgtcctgagcgtacagatcgacttgtcttgctagtctgtagtgaagtattaatccttaaacgtttactaaaattgtcaccggcctaagtacagatcctttgccccaaccaagtccattgaagaagatcaataaactcgctactgctgagtgtactctacaaaccgcgtaacaagtgtttctgtgcttgacaaaagacatcgaaaattctgg

SEQ ID NO: 199090 - DNA, 1833 bp, Zea Mays
ggaactggaatctgctccataaattggtcaagaagcttatcaaggagaagaaggatgatgctggaatttctgaatatattgatatggagaaggagcttcaagaggagccatgcccagcaaggtagcatgaaaaggccgcttgcaacagaagatttgttttggggaatttagatttttgtaaccttgaaaggtgagaaggttaattatggcaatggtagggactgtccgagcaaccatattaataataatgaacaatatgtaaaaattcagtggcttcaaagttgtccattaccctttatcttgatttattgcaggtttgtactactacaaatttcggtgttgctgctgctgttctaagttggatcttgaaatatgggcacatgtttaatactactgggaggttgcttgtgtttatgatgcttaatatcattttttgtgtttgctgcaggtcataacgttaaccgaagagattttggcaactgcaaagcaaactgagagtgcccagaatgttgcaggtctatcaccgccaagctattcagctggagtgcagtctgagggactggatgacctttcacattcccataagtttgccgttggtactagagttcaagctgtgtggagtgaagatggagaatgctgaattgccaggtataatgcaaccgttgaagctttgacaccaaatggatactatgtagcctacgatggctggggaaacagtgaagaggtggacccagataatgtgaggctgcttgaggaagaagcagctgatgccttgggacaagctgaaaaggaagctgaagctacaaaaatggcaataaagaggaaaattgaacaagcagcaacatctgattttcaggcgcgtagcttgccggccaaacttcgtatcgaaccaagtgaccctgaggatgttaaagctgcaaagcgtaagaaaatacatgctttcaaatcaaaatcccgctttgagcagcttgaatttgcccaaaacaaaaggcagaatgcatggcagcagtttcaaaccaaggggaaagccaaaaaggtagcttcttggcccccacgtaatttttttttgctttcttaaaaatggctaggcactcttccattgagttggaattctgaatctcaaggtactacatatggccatcctcagcattcatgttatgatggaggaccaaaatggaacaaattgtctgacctttcccagcattccagttagtcgagaaacagattgtgtgaatttcgatggtttgtttgccaggtggggttcttctccggtcgcaagaaggagagcatcttcaagtcaccggacgaccacagaggtaaggtgggtgtcactgggagtggcaagggcctgaccgacttccagaggagggagaagcatctgcaccttaaaggtgggtccggggatgcagcggatgatgacgaggagtaaactgaagaaccgagcctctgtttgtatcccgccgaacagacatttccatacctgttctttagcgccgacatggcctcgaggggactcttgacttaaaccagaaaatttcaatgtttgtcccattctcattgttgaatgtcgctgccgttttggagctgcattctggtggcgaggtcacgctgctagaggagggcgtcctgagcgtacagatcgacttgtcttgctagtctgtagtgaagtattaatccttaaacgtttactaaaattgtcaccggcctaagtacagatcctttgccccaaccaagtccattgaagaagatcaataaactcgctactgctgagtgtactctacaaaccgcgtaacaagtgtttctgtgcttgacaaaagacatcgaaaattctgg

SEQ ID NO: 199091 - DNA, 1608 bp, Zea Mays
aaaaccaaacgctttctaaaccaaacactccttgtcggtcgccgctagctcctccaacctcgttggccgttgccgtctccgtctcgcccgcccatctacgcggcgagatctgctcgcgccgcgccgagggttttgtcccgggatgtcgtcgtcggggaagatggaggggccgtctgccccggtggtgcgtcgggatccctacgaggtgctcagcgttcccagagattcctccgaccaggagatcaagtccgcctaccggaagctcgcactcaagtaccaccctgacaagaatgctagcaacccagaagcatcggaactcttcaaagaagttgcatattcttatagcatcttgtcagatcctgagaaaagaaggcagtatgatactgctggttttgaggagttagaaaatgaaggaatggatatggaaattgatttgtccaatcttggaactgtgaacacaatgtttgcagcactttttagcaagcttggtgttcctatcaagaccacaatatctcctactgtgctggaagaggccatgaatggcacagttacagtgagaccactccctgttggaacatcagctacgggaaaggttgataagcaatgcgctcatttttttggcgtaacaataagtgaagagcaagctcattctggaatggttgtcagagtgacttcacctgctcaaagtaaatttaagcttctttacttcgagcaagaagttaatggaggttatggacttgctttgcagatagtcaaaagactggcaaggtaacatcagcaggcatgtatttcttgcatttccaggtgtatcgtatggactcaacagcgaatgcgttggcaatggccaaagatcctgaagctgccttctttaaaaggttggaaggtctccaaccctgcgaagtttcagctctcaaatctggaacccatatatttgctgtatatggtgacaattttttcaagccagctagctatatgattgaagcgatgtgcgcaaagagttatgaagacacaacagagaggctgaaagagatagaatctaaaattctagctaagcgaaatgatctgcgtcaatttgaaactgagtacagaaaagctttggcacgatttcaagaagtcaccaacagatatacacaagagagagaagcggttgatgatatgctgagagagagggacaatatccattgctcgttcacaactgaacgaactttggcaaaccctgttggtgtcggtagtagcagtaggtataccatcgagcagagcattcctgagagccctgagaatggtagcgtagatggcagagacaaatctggcaaaaagaagtggtttaatctaaaccttaataggtccgacaagaaagcctgatgaatcttttgtcagggaacgtcatgtgttttcactttgttgtacattttggaatccctattgtattcatgccgtatgagttctttggttcccagttctctgggagttttgtagcatatagcagttttgggtacaactttctattctcatgtatgtattatcctaagtgactgcattgaccccatgcatcccaggcgaagttgaatcgcccgaccaagttattttatcgttataatttcttctatc

SEQ ID NO: 199092 - DNA, 2262 bp, Zea Mays
ggcagactatgctaataattctagattattgtctggtttgtgataccagctataaagtattcctctgctgagcacaacaataacattctggtgctcatagttcttgctcagtatcttccaagattgtatctcatattccccttaacttatgaaattgtcaaagctactggagttgttgcaaagactgcttgggaaggagctgcatacaacatggtgctctatctgatagctagtcatgtgctaggtgcactgtggtatttgctatctgttgatcgccagacattctgctggaagacgaactgcctgaatgaaactggttgtgatcttaagtacctagattgtgacacgacaccaaatgctacatgggcgaatacgactgctgtcttcagtaattgtaatgctagcgataccaatataagttttgattttggcatgttcgagcctgcattgtctaatcaagcccctgctcaaagttttgcgatgaagtatttctattccctctggtggggattgcagaatttaagctgctacggtcagactcttactgtgagcacctatcttggcgagacgctgtattgtatattcttggcggtacttggtcttgtcttgtttgcgcatttgattggaaatgtgcagacctacctgcaatctattactgtgagggttgaggaatggagattaaagcaaagagatactgaggaatggatgagacatcgtcagcttccttgtgaactgcgggaaagggtgagacgatttatccagtacaagtggcttgcaacaagaggagtgaacgaagagtcaatattgcatgctctgcctgcagaccttcgacgtgacattaagcgccacctttgcctgggtcttgttcgacgggttccttttttctcccagatggatgatcagcttcttgatgccatctgtgagcgtcttgtatcatcactgtgcacaaaaggcacatacattgtccgtgagggtgatccggtgacagagatgctcttcatcatccgtggaaaactggaaagctccacaacaaatggtggccgcactggcttcttcaattcaatcaccctgaaacccggtgatttctgtggcgaggagcttcttggatgggctcttgtccccaggcctactacaaatttgccgtcatccactcggacagtgaaggcactgatagaagtagaggcctttgcgctccaggcggaggatctcaagtttgttgccagccagttcaggcggctgcacagcaagaaactgcagcacactttccggtactactcgcaccactggaggacgtgggcctcatgcttcatccaagctgcctggagacggtacaagcgaaggaagatggcaaaggacctgagtatgagggagtcattcaactccgttagattagacgaagtggataacgaagatgacgattctccgcccaagaatagccttgctctaaaattcatagctaggactagaaaagtgcctcagaacatgaaagagttgccgaagataacgaagccagacgagccagatttctcagctgaacccgaagactaaagttgtctttgcttatgctatcatgtacagtggtcatagctgactattgtgaattgctagtcctatttggttcgtgatggaggttacaagccaactaggtatggtgggtgaattgaacttgggttgacggtgccatctgtggatgtgaggaaggtaactcagaatatcaatgaaagcgtaatgaagcttctgactggtatatagactgaatggttgtaagttaactagttgctacgttcatgttgtatattcagacatctctgtgcctatagatttcttgaaaaaaaaaggaaagaaaaaacaagaatacatcattacatagactgtaatcttaaacatctgacataagggtgtggctacgttgtccgtggccgtggaggactgtaaatcatgagggtgtggcttctggtaaaatggctagcaccacgcagtgatgagagatatctcgttgagtcatcagggcgcagattcgaacaggggcggagctaggccgcggattcgaacaggcgcagagctaggcctgtttatcggtgtcagctgacaccggcggctttttgcaaaatcaatgagaaatatttgatatgcgttgtttatccatagagctgatatcagtgtctagtggaatcggctccttcagctggcttcgctccgcatttgtgagacaaaggtttatctttttaaaaatgccatgtacaattgcacctgtggctgctt

SEQ ID NO: 199093 - DNA, 1454 bp, Zea Mays
atttttttcaagtacaccactcaaatgttgctgagaatccagagtaacatattttagcaatacaagttccttttttctcccagatggatgatcagcttcttgatgccatctgtgagcgtcttgtatcatcactgtgcacaaaaggcacatacattgtccgtgagggtgatccggtgacagagatgctcttcatcatccgtggaaaactggaaagctccacaacaaatggtggccgcactggcttcttcaattcaatcaccctgaaacccggtgatttctgtggcgaggagcttcttggatgggctcttgtccccaggcctactacaaatttgccgtcatccactcggacagtgaaggcactgatagaagtagaggcctttgcgctccaggcggaggatctcaagtttgttgccagccagttcaggcggctgcacagcaagaaactgcagcacactttccggtactactcgcaccactggaggacgtgggcctcatgcttcatccaagctgcctggagacggtacaagcgaaggaagatggcaaaggacctgagtatgagggagtcattcaactccgttagattagacgaagtggataacgaagatgacgattctccgcccaagaatagccttgctctaaaattcatagctaggactagaaaagtgcctcagaacatgaaagagttgccgaagataacgaagccagacgagccagatttctcagctgaacccgaagactaaagttgtctttgcttatgctatcatgtacagtggtcatagctgactattgtgaattgctagtcctatttggttcgtgatggaggttacaagccaactaggtatggtgggtgaattgaacttgggttgacggtgccatctgtggatgtgaggaaggtaactcagaatatcaatgaaagcgtaatgaagcttctgactggtatatagactgaatggttgtaagttaactagttgctacgttcatgttgtatattcagacatctctgtgcctatagatttcttgaaaaaaaaaggaaagaaaaaacaagaatacatcattacatagactgtaatcttaaacatctgacataagggtgtggctacgttgtccgtggccgtggaggactgtaaatcatgagggtgtggcttctggtaaaatggctagcaccacgcagtgatgagagatatctcgttgagtcatcagggcgcagattcgaacaggggcggagctaggccgcggattcgaacaggcgcagagctaggcctgtttatcggtgtcagctgacaccggcggctttttgcaaaatcaatgagaaatatttgatatgcgttgtttatccatagagctgatatcagtgtctagtggaatcggctccttcagctggcttcgctccgcatttgtgagacaaaggtttatctttttaaaaatgccatgtacaattgcacctgtggctgctt

SEQ ID NO: 199094 - DNA, 931 bp, Zea Mays
ccgatccatgtcatgtcgcagataccccacgccacgcgctgttgtgcatgtcttcctccgatccccgcccccgggatcattgatcgccagctgcatgcgttggcatccttccttcgtcatcatgctgctctgagtctgctcccctctgctttctttttcccttctctgcgccaccggcttcaccatatagctcggagagctcagccctggctgttagtgcctctgcttcatcgtgcgagcgagggcatttggattcggattcgaggcggtgcactgaagtgcctagctagtgcagggagaagcagcaaagctctctctctctctctcccttatatgggagcaaggccggacggggcgccgggggctgtggagtgctgcggccgcagacgcgttccggagcagcgagaggaggatccccaaggggcccgacccgattcacaacaggcgtgccgggaagacgacgaccgcgccgcgccggagagactagctagccggaggccggccgggggcggcggcggcggcggcaacagaagctaccactgccggtgctcatcgtcctgcacctgaagcagcagcagcagctgatctgatcgacatacagttcgtgttcggcagctagcccctagccatgctcggagaggtttaattaattacgcagcggactccttcgatgggggtggatttttggtgatcattctgggggtatgtataaacctgcaacctacccttgcaaggattagtttttcttcttctgtttttcttctttcaagtttcaccgaggtggagtggaggttgaccgacattctgttcttcccgcatattcttgtgagattttgattccaatcagtgtctatcaattcaatttcgatctccctctctgtaaccacatgtcgtgtggcgtgcgtgcgtgtaaaaaatcgagaaaaccgag

SEQ ID NO: 199095 - DNA, 1665 bp, Zea Mays
catgtaccctgttcatgtatgctgccttttttaacaacacaatctacaataaagaatgttgaaggccatcttatcaagagagttggaagatattgcatctattgaagacaagttaggaaggtcacttacaaccatggagaaagatagaattggagtgggtaacttaagattatatttggaagagttgctgcagaagaggtacattaagagtgttccattaatcattccacttcttgagaagcaacatcgaaatacaacaagtaaattgcgtgaaatcagtcatgaactcagtgatctggatgaaaccaaactgaaggagaaagctcagctattccatgacacatttttgaccaagttatctttgctattgaaaggcatggtggtggcacctcctgataaatttggagaaactttagtcaacgagaggattaatggaggaacatttactggaagtgagaatttccagctcccgaacaagatgatgccaaatggtggcatgcgtctttatggtggtgcacaataccatcgggcaatggctgaatttcgtctggtagttggtagtaccaggtgccctccaataactagggatgaaattgtcaatgcttgtggtgttgaggatattcatgatggtacaaactactccaggactgcttgtgtaattgccgtggcaaaagcacgtgacacgtttgagccattccttgatcagttgggttttaggcttttgtacatactgaagaggctgatcccaatctctgtttatctgttggagaaagatggtgagcactttagtagccatgaagtgctcataaggcgtgtccaggaagcattcaagaggtttgttgaatccactgagcaatcatgtcgtcaaaggtgtatggaagatttggagagtaccactcgttatgtcacttggtcccttcacaacaagaaccgtgctggattgagacatttcctcgattcatttgttgcaccggagcaactatcagtaaatacattgaacgagcggttttctgggttgaatgataacaaacaggataaggcaaagggtgactcgaagtcaaaccattctccagacacaaattcgtccactgctatgccagagacaaggctggttgacctattggatagcacactctggaacagacgcctggttccctcatctgaaaggcttgtttatgcgctggttcaccagatttttcatggaatcaaagagcattttcttgtcaccactgaactgaagttcaattgctttctcctcatgccgattgttgacaaactaccagcacttctaagacaagaccttgagtcagctttcgaagaggaacttgatagcatctttgatgtcactcagctgcgccagtcacttgggcagaagaagcgcgagctggagatcgaactgaagcggatcaagcgcttaaaggaaaagtttggagagataaataagaagctcaattctcttcaggttaggcagtaggccaggctcaaaatttagcagtagcttggtagtctaggactccaggtagagtgtttcaatgctgtaataaaataattggtcatctagagtgacttcttgttgtatcctatcagttgtaaatatgaagtattcctatgtcttaacgtatgttgttgctacacgggttttcggagtcttttttcccttgcatg

SEQ ID NO: 199096 - DNA, 2387 bp, Zea Mays
gccgccgccgccctgggcggcgcggcggcggcgccggcggtcgtggtcgtcggccaccagacggacggcaagagcgcgctggtcgaggcgctcatggggttccagttcaaccacgtcggcggtggcaccaagacgcggcgccccgtcgcgctccacctccgcttcaacccgcgctgcgacgagccccagtgccgcctcctctctgcaaccggcgatgccgaagagcatgacgaagccggggttgccgcccgccccatgccgctcgccgacatccaggcatatattgaagctgaaaacttgaggttggagaatgacccttgccaattttcagagaaggaaatcataattaaggtagaatacaagcattcccccaatctcaccattattgacactccaggcctcatccttccagctcctggccgtaaaaacagagttttgcagagccaggcttctgctgttgagagccttgttcgtgctaaaatccagcataaagagaccattatactgtgccttgaagattgtagtgattggagtaatgcaactacacggagagtagtgatgcaggtcgatcctgatcttgcaaggactgttctagtctccacaaaactggacacaaaaataccacaatttgcccgtccctctgatgttgaagtgtttcttcacccaccaaattgtgtgctagatgtttccttattgggagattctccctttttcacatcagtaccttctggtagagttggctcttgccatgaagctgtgttcaggtcaaatggagagtttaagaaggccatcttatcaagagagttggaagatattgcatctattgaagacaagttaggaaggtcacttacaaccatggagaaagatagaattggagtgggtaacttaagattatatttggaagagttgctgcagaagaggtacattaagagtgttccattaatcattccacttcttgagaagcaacatcgaaatacaacaagtaaattgcgtgaaatcagtcatgaactcagtgatctggatgaaaccaaactgaaggagaaagctcagctattccatgacacatttttgaccaagttatctttgctattgaaaggcatggtggtggcacctcctgataaatttggagaaactttagtcaacgagaggattaatggaggaacatttactggaagtgagaatttccagctcccgaacaagatgatgccaaatggtggcatgcgtctttatggtggtgcacaataccatcgggcaatggctgaatttcgtctggtagttggtagtaccaggtgccctccaataactagggatgaaattgtcaatgcttgtggtgttgaggatattcatgatggtacaaactactccaggactgcttgtgtaattgccgtggcaaaagcacgtgacacgtttgagccattccttgatcagttgggttttaggcttttgtacatactgaagaggctgatcccaatctctgtttatctgttggagaaagatggtgagcactttagtagccatgaagtgctcataaggcgtgtccaggaagcattcaagaggtttgttgaatccactgagcaatcatgtcgtcaaaggtgtatggaagatttggagagtaccactcgttatgtcacttggtcccttcacaacaagaaccgtgctggattgagacatttcctcgattcatttgttgcaccggagcaactatcagtaaatacattgaacgagcggttttctgggttgaatgataacaaacaggataaggcaaagggtgactcgaagtcaaaccattctccagacacaaattcgtccactgctatgccagagacaaggctggttgacctattggatagcacactctggaacagacgcctggttccctcatctgaaaggcttgtttatgcgctggttcaccagatttttcatggaatcaaagagcattttcttgtcaccactgaactgaagttcaattgctttctcctcatgccgattgttgacaaactaccagcacttctaagacaagaccttgagtcagctttcgaagaggaacttgatagcatctttgatgtcactcagctgcgccagtcacttgggcagaagaagcgcgagctggagatcgaactgaagcggatcaagcgcttaaaggaaaagtttggagagataaataagaagctcaattctcttcaggttaggcagtaggccaggctcaaaatttagcagtagcttggtagtctaggactccaggtagagtgtttcaatgctgtaataaaataattggtcatctagagtgacttcttgttgtatcctatcagttgtaaatatgaagtattcctatgtcttaacgtatgttgttgctacacgggttttcggagtcttttttcccttgcatg

SEQ ID NO: 199097 - DNA, 911 bp, Zea Mays
gtgctgcctgtctccattgtcgttatggagcattggccgatattttcctgagaagcacggagctaatgaaggatgctcgagggattgcatcactgagtggtatcgttcctcctctggttccattcgctcagacgttcgcggcagtcatcactgcagccctcacaggaaccctctactacgtcgccacaactccgaaaggctccagctagaccctacgtatgtggtgacaccagcgatgcgttcgcgcacagggcgtgagaacctcaagaaactatttgcagcttggtacgagaggaggcaaatgaggaagatatactcgccgcttctggaaggaatcttggctttctaccttggcttcgaatggatccagaccgacaatatcctggcacctatgatcacccacggcatatactccaccgttgttcttggccatgggctctggaagatccacgaccaccggagaaggctacggcagcggattcagaaggtcaggagtgaagggagtagctctgcagacgacacattgtaactgcagcatatgtagatcggcgtggtctactgctggatagctagctgctgattgcacgcacgtactgggtgatcgatcgatctaccgatcagtcagaagaccagaggcgtacgtctcacaagttttgatctacttaattaatatcaacaaggtaggtataagattgggcaaaaatatatatataatgcatgtagtcatgtaatgtagatacaatgtgtacatatatggataaatatatgcaggctgtaatcaatataggaagtatatagtgtacgattgcgacatccaagtatgttataatcctagtatcacgtatgcatgcaaggaatataccagccacatcctttctttctcgtccctctcccacacttgcaatgttaca

SEQ ID NO: 199098 - DNA, 1485 bp, Zea Mays
gcgccgacgtggcccgctttccattcacaggcatatagcatagccccaccaaccggaagccgatagatgcccgaccaatctaatagcgccgcaacgcgaagcgcgaagccgcgaagcctcgcctgtctggtcagttccttcgcgcaccggcaccgcggcggcagttcagcatggtggcagcatccgtagccgagcgggcctatgaggcggcgacgcggtccgcgctggtggcgctggagcgcaacctcatcccggacgcggtgacccggcgcctgacgcggctcctgctagcgcagcgcctccgccagggctacctcccctccgcgccgctccagctgcagcagctcctccagttcgtccactctcttgaagagatgcccattgccattgaaacagacaaagctaaagcccaacactatgagttgccaactacatttttcaagctagtgctgggaaagaatctcaaatacagttcctgctatttccctggtgattcaagcaccctagaagatgctgaggttgcgatgatggatctgtattgtgagaggtcgaaactacaagatggccaaagtatcctagatgttggatgtggatggggatccctttcactgtacattgcaaagaaatataggaactgcagtgtaacagggatatgcaactctactacacagaaggcttttatagaagagcaatgtagggataacgagctgtcaaatattgagataatcgtagccgacatcagcaagtttgagatggagcgctcttttgacaggatcgtatctatagagatgtttgaggataaaaacgatgatgactggatcacgaggtatttcttcactggaggaacaatgccatctgcaaacctacttctatactttcaggaggatgtatctgtggtagatcattggcttgtcagtggcacgcattatgctagaactagcgaggagtggctaaaacgtatggacaagagcatcacttcaataaggctgatcttcgaggaaacttatgggaaggaatcgactaccaaatggatagcttattggcggacgttcttcatctcggtagctgaactttttggatacaacaatggagatgaatggatggttgcccattacttgttccgaaagaagtagaggctactgcttggaagtacccaatcaaaaatcaatgttttcagtaattttgtcatgtacatcgacgaacaactccttttctggcacgtagttgtatctcgtaccgacttcgtagtggtttcaaaaacaaaatctggaatccctgttgtgaaatttcatcttggacagcgcctgcatatgctttgcagagttaggctaattcttgcaactatgccttcagatgtttgtagagttaggctcattcttgaaagaaaacaaaggattgtttttttagataataatggaattaaggttctggcttcagccctcttcaaagaagaggcatcagtccatacttattacaaaataaaaa

SEQ ID NO: 199099 - DNA, 565 bp, Zea Mays
tccctctgaatttctctcgcgctttaaggtcgtgttcccgagcttcggcgagcgctacctctcatcggtgctgttccagtccatcaagaaggaagcggagagcatggtggtcgagccctagagcacaaaattctgggcttctggcaaactatttcctgagacgttcaccatttccatcacagaaaaataaagctcgggtgccttctgttgatttcgacgtacatttccctgccgatggtgtccagcccactgttgtcgctggagaacacgtcgtttttagacttgtgatattttactactgttttgacactcgttgtatttctgtatatcgcgtcagactgtgaaataaaagcagtacagtgtgtttcttgcatggatggtttgctgtgggggttatatatatatatatatatatatatatatatatatatatatatatatatatatatatgtatgtatatgccgtcagagaattgcattgaagaatggccagtgacgctcacgcggagctgaactgagcagcactgatgtgcttggtcattgacttgctgcagcaaaaaaaaaa

SEQ ID NO: 199100 - DNA, 1106 bp, Zea Mays
aaaggcctaggaggaagaagataagggtgcccgtttctctcctcgacgacgacattctcaactctgaaacggcgatgtcacggctactcccgcccgtgctctctcctttaccggcgttctcgctgccgccgccgcttcttcctcgcatccacatccgcacgtcggcggtgagaggcggtgcggcggagaacgcgatggcgtccgggacgacggcgagggagcggcgcctggtcaaggtgcgggaggagcgccgccgccgcgagtacgaccgggagcacacctaccccggatgggccaaggtactggagaacgcctgcagggatgatgaagagctccgcgccattcttggtgatagcatcggcaacccggagctcatgaagcaacggatccaggaaagggtgcgcaagaaaggcagggcccaattcaataaatccaagacaggctccattgttgcttttaaagtcagctttcgagactttaacccattgaattctttcatttggtttgagctctttggagaaccaacagatcgagatgttgacctgcttggtggtgtaaagtggcattgtacaatttcattggattctccttattcagaaaacaacatactgtcttgacgtgaagtgttctttacaggtagtccaagcttggtatgtcatgggaaggctaggagcttacaattcttcaaatttgcagctggccaactcaatgatggactacgacccttcatatgattctgaagaagcttccacagtaatgccatcatctttccatgatatcagtgatgttgagttccaagacaattgggccagggtttgggtggaccttggaacctcggattaccttggcttggatgtattactaaactgcttaacacagttgagctcagagcacttgggtatcaaacaagtggtttttggaggcaagaaaatgggtgactgggaagagggcatgacgagctctgattatggatacaagcacttcaagatatgataaatttacaggtgacaagcaacggtggtgatgcaaggctggccgagaaatttgatcaagactgcatgcatctcgatgtgcccttcacctatcaggacaaaggtgacatgatg

SEQ ID NO: 199101 - DNA, 1760 bp, Zea Mays
gaagataagggtgcccgtttctctcctcgacgacgacattctcaactctgaaacggcgatgtcacggctactcccgcccgtgctctctcctttaccggcgttctcgctgccgccgccgcttcttcctcgcatccacatccgcacgtcggcggtgagaggcggtgcggcggagaacgcgatggcgtccgggacgacggcgagggagcggcgcctggtcaaggtgcgggaggagcgccgccgccgcgagtacgaccgggagcacacctaccccggatgggccaaggtactggagaacgcctgcagggatgatgaagagctccgcgccattcttggtgatagcatcggcaacccggagctcatgaagcaacggatccaggaaagggtgcgcaagaaaggcagggcccaattcaataaatccaagacaggctccattgttgcttttaaagtcagctttcgagactttaacccattgaattctttcatttggtttgagctctttggagaaccaacagatcgagatgttgacctgcttggtggtgtagtccaagcttggtatgtcatgggaaggctaggagcttacaattcttcaaatttgcagtttcaatgtcagctggccaactcaatgatggactacgacccttcatatgattctgaagaagcttccacagtaatgccatcatctttccatgatatcagtgatgttgagttccaagacaattgggccagggtttgggtggaccttggaacctcggattaccttggcttggatgtattactaaactgcttaacacagttgagctcagagcacttgggtatcaaacaagtggtttttggaggcaagaaaatgggtgactgggaagagggcatgacgagctctgattatggatacaagcacttcaagatatgataaatttacaggtgacaagcaacggtggtgatgcaaggctggccgagaaatttgatcaagactgcatgcatctcgatgtgcccttgtatgtaaataaataaattgtcatgggttttattttatcgtcgtgatagcagtgaattttaactaacagctcaaggcaggctagcagaatagaaaaatataatatggatgcatgtcttgtttcagacacgtctgtttcttgatgatgatgatgataatgatgatgattcttgcaacgtcaggaaaacttgacgagtcaatcaggtgttttttttacgtattgattaggagaaagacgaagtaaacaaggtgtcacagttgatcacattcttaaacttgggaacaagtagcagacaaactaactagtagcatggtgaaaggcattggcacctgcatttttcatagtattccacaagctgatactaacatgaggtcacaagtacaccgctcatcccatccatgcatatttgccgccgccacacccacataatagatcagctctcgtggaaccctaaatgttgcacaactctacaaagaaaacatacaagttcagcctatacaccacttcccaaatcaacgaaacaagatgccgatccttgcatcctcgctagctactggtcctctccatgctgttggtcctagcattctctcgcatcttctccacgatgtgcctccctttctcttcgatggtccgcctcttctcctccagcttgtcccccatcctcttcccgaaatccatcatccgagctcgcctcccgctttttcgcttcgcgtcctctccaatgggtgatgctgacacctgcggctgctcccctgctggtatcaccgc

SEQ ID NO: 199102 - DNA, 2771 bp, Zea Mays
gtgaagcccccgcgcctttgcgcggaatcgtggactctgacgggaattgtctggcggcttttgcggggtggaggcatcgacaaaccatcttgccgagcatcagggcacgcccctctacaacctgccatggaagataccctgcaagctcatgaacatggagctgaaggctgagccggatactgatgaggtgtacgcccaactcaccctgctccctgataagaagcaagatgagaatacatctgcaagagtggagaatgaggaggcagaggaggaggtggtgcctcatgtgccaccagccacaagtgaggggcttcgcatccattccttctgcaagacattgactgcctcagacacaagcacacatggtggtttctcagtgttgcgccggcatgcagatgagtgcctcccaccactggatatgagtcaacatcccccaaatcaagaattggtggccaaggacctgcatggggttgagtggcggttccgtcacatctttcgaggtcagccacggagacacctccttcagagtggttggagtgtttttgttagtgccaagcgtcttgttgcgggggatgcattcatatttctcagaggtgagaatggggagttacgtgttggagttcggcgtgcactgaggcaccaaaccactatcccatcttcagtcatatcaagccacagtatgcatcttggtgttcttgcaacagcatggcatgcagtgaacactgggagtatgttcactgtctactacaaaccaaggactagtccagctgaatttgtggtttcacgagctaggtactgtgaatcactgaaacgaaattattcaatagggatgaggtttaggatgagatttgaaggtgaagaagcggcagagcaaagattcactggcacaatagttggaatatgtgtttctgatccatctggctgggctgactcgaaatggcgttcccttaaggtgagatgggatgaagcttcttctgttcctcgtcctgaaagagtttctccttggcaaatagaacctgctgttagcccatctcctgtgaaccctcttccagtcagattcaagaggtctcgttcaagtgttaacgcctcaccatctgatgtgtctactgtaaacagagaagttgcttctaaagtcatggtagagtcgcaacagaataatctcccaagggccttgcacaatcaaggaaggacacaattgacaggtcgataccgtgatagcactgatgtgaagactgctcaggatcttaccatgtggtcttcaggaactgagcaacagagaaacaatattgctgcccagacaaaacgatgtctggagggttggacgcaatctagaactccagaaggttacaatcaactgttctcggcatttcaaccactgaaggatgcacataatccacttcgtccttttcctaataaaatatctgggactcgctcaagtacctgggtcacagccgatgcccgttatccagctcaacaagccaatcacaacatgttacatggcacattgtcttttatgcctcatagcagtggttttaggatgattcaacagaataatctagtgacacctgaagctgcaaattttactgggaaatcagctttcacttcacttcagggccatgtcactgatcagtgctccacaggctggtttggatctattgagtcaaattcccacacagaccatgcatcgtcaagtttgatcaggtcccagcctttggttattggaaatgatgttcagaaaaccaaaggcacttcattcaaactatttgggattcctcttggcagtccagaaaaatctgaacctctggtatccccaccaagtgtcgcatatgacgggaaacttcaaacttctccaacagacaacaatgagccttgttcagaagctacccagaatatccagaacaaagtgcaaagtagttcaaccagaagctgcaagaaggtccataagcaaggcagcgccctcgggagatcgatcgatctaacaaagttcgcttgctacgatgagctgattgccgaactagaccagatgtttgacttcgatggtgagctgaagagtccttgcaggaactggttggtcgtctacactgacaacgaaggcgacatgatgctggtcggcgacgacccctggaatgagttctgtgacatggtccacaagatcttcatctacacaagggaggaagtggagaggatgaacccaggcgccctaaacgcgaggctcgaagactgcctgtctgactcgctgggaagagggctggcttccaaagagccccggagcggcccctcgacttcggctgtcgattctgagaaccgcgctaacttgtccacccttttgaaagtggtgaagcagacaaaaggccacgtgtcagagtgaccggaagaacgagaaaggggtgtgtttcagtggtgtgtagtaggtaggtaattttgtgtgtatgcctccgggtaaaagccccgcggtacccagtttgtagatggtgcttctcctggtgctagtttcccgtcgtaagctggatttttttggggggtgtgtgccctgctctgtgtgctgacccgcctgggggtaagttgtagcagagcaggagaaagcaggcaagaaaccgctggtgcgcctgcttggccaatccttttccttgcggagcgctgtaaatagccttggatctgaagcgtagtaatgtattgtcatggtactcgaagtcatgctccagtttgtgttgggtatgacctgcaactgtcggttcgatgggtgcggatgtcgaagggtttgcatggttgag

SEQ ID NO: 199103 - DNA, 2836 bp, Zea Mays
gtcccggattccaaatcctcgtcgtccgcagcttggggtggaggcatcgacaaaccatcttgccgagcatcagggcacgcccctctacaacctgccatggaagataccctgcaagctcatgaacatggagctgaaggctgagccggatactgatgaggtgtacgcccaactcaccctgctccctgataagaagcaagatgagaatacatctgcaagagtggagaatgaggaggcagaggaggaggtggtgcctcatgtgccaccagccacaagtgaggggcttcgcatccattccttctgcaagacattgactgcctcagacacaagcacacatggtggtttctcagtgttgcgccggcatgcagatgagtgcctcccaccactggatatgagtcaacatcccccaaatcaagaattggtggccaaggacctgcatggggttgagtggcggttccgtcacatctttcgaggtcagccacggagacacctccttcagagtggttggagtgtttttgttagtgccaagcgtcttgttgcgggggatgcattcatatttctcagaggtgagaatggggagttacgtgttggagttcggcgtgcactgaggcaccaaaccactatcccatcttcagtcatatcaagccacagtatgcatcttggtgttcttgcaacagcatggcatgcagtgaacactgggagtatgttcactgtctactacaaaccaaggactagtccagctgaatttgtggtttcacgagctaggtactgtgaatcactgaaacgaaattattcaatagggatgaggtttaggatgagatttgaaggtgaagaagcggcagagcaaagattcactggcacaatagttggaatatgtgtttctgatccatctggctgggctgactcgaaatggcgttcccttaaggtgagatgggatgaagcttcttctgttcctcgtcctgaaagagtttctccttggcaaatagaacctgctgttagcccatctcctgtgaaccctcttccagtcagattcaagaggtctcgttcaagtgttaacgcctcaccatctgatgtgtctactgtaaacagagaagttgcttctaaagtcatggtagagtcgcaacagaataatctcccaagggccttgcacaatcaaggaaggacacaattgacaggtcgataccgtgatagcactgatgtgaagactgctcaggatcttaccatgtggtcttcaggaactgagcaacagagaaacaatattgctgcccagacaaaacgatgtctggagggttggacgcaatctagaactccagaaggttacaatcaactgttctcggcatttcaaccactgaaggatgcacataatccacttcgtccttttcctaataaaatatctgggactcgctcaagtacctgggtcacagccgatgcccgttatccagctcaacaagccaatcacaacatgttacatggcacattgtcttttatgcctcatagcagtggttttaggatgattcaacagaataatctagtgacacctgaagctgcaaattttactgggaaatcagctttcacttcacttcagggccatgtcactgatcagtgctccacaggctggtttggatctattgagtcaaattcccacacagaccatgcatcgtcaagtttgatcaggtcccagcctttggttattggaaatgatgttcagaaaaccaaaggcacttcattcaaactatttgggattcctcttggcagtccagaaaaatctgaacctctggtatccccaccaagtgtcgcatatgacgggaaacttcaaacttctccaacagacaacaatgagccttgttcagaagctacccagaatatccagaacaaagtgcaaagtagttcaaccagaagctgcaagaaggtccataagcaaggcagcgccctcgggagatcgatcgatctaacaaagttcgcttgctacgatgagctgattgccgaactagaccagatgtttgacttcgatggtgagctgaagagtccttgcaggaactggttggtcgtctacactgacaacgaaggcgacatgatgctggtcggcgacgacccctggaatgagttctgtgacatggtccacaagatcttcatctacacaagggaggaagtggagaggatgaacccaggcgccctaaacgcgaggctcgaagactgcctgtctgactcgctgggaagagggctggcttccaaagagccccggagcggcccctcgacttcggctgtcgattctgagaaccgcgctaacttgtccagtcagtgaggcagcttcagcagcaatgtctagccttggctgcacggaagaactactgaccctaagctaatcttgtgtgtgtttcacttcttgcagcccttttgaaagtggtgaagcagacaaaaggccacgtgtcagagtgaccggaagaacgagaaaggggtgtgtttcagtggtgtgtagtaggtaggtaattttgtgtgtatgcctccgggtaaaagccccgcggtacccagtttgtagatggtgcttctcctggtgctagtttcccgtcgtaagctggatttttttggggggtgtgtgccctgctctgtgtgctgacccgcctgggggtaagttgtagcagagcaggagaaagcaggcaagaaaccgctggtgcgcctgcttggccaatccttttccttgcggagcgctgtaaatagccttggatctgaagcgtagtaatgtattgtcatggtactcgaagtcatgctccagtttgtgttgggtatgacctgcaactgtcggttcgatgggtgcggatgtcgaagggtttgcatggttgag

SEQ ID NO: 199104 - DNA, 2984 bp, Zea Mays
gcgtctgtgtcgctcgctgctggttgcggcgcttgagcgccgacgcgggatgcggaggcggaggcggaggcggagggaaggacgcgctgttcgtggagctgtggaaggcctgcgcggggccgctgtccagcgtgccgctactcggggagaaggtctactacttcccgcagggccacatcgagcaggtggaggcatcgacaaaccatcttgccgagcatcagggcacgcccctctacaacctgccatggaagataccctgcaagctcatgaacatggagctgaaggctgagccggatactgatgaggtgtacgcccaactcaccctgctccctgataagaagcaagatgagaatacatctgcaagagtggagaatgaggaggcagaggaggaggtggtgcctcatgtgccaccagccacaagtgaggggcttcgcatccattccttctgcaagacattgactgcctcagacacaagcacacatggtggtttctcagtgttgcgccggcatgcagatgagtgcctcccaccactggatatgagtcaacatcccccaaatcaagaattggtggccaaggacctgcatggggttgagtggcggttccgtcacatctttcgaggtcagccacggagacacctccttcagagtggttggagtgtttttgttagtgccaagcgtcttgttgcgggggatgcattcatatttctcagaggtgagaatggggagttacgtgttggagttcggcgtgcactgaggcaccaaaccactatcccatcttcagtcatatcaagccacagtatgcatcttggtgttcttgcaacagcatggcatgcagtgaacactgggagtatgttcactgtctactacaaaccaaggactagtccagctgaatttgtggtttcacgagctaggtactgtgaatcactgaaacgaaattattcaatagggatgaggtttaggatgagatttgaaggtgaagaagcggcagagcaaagattcactggcacaatagttggaatatgtgtttctgatccatctggctgggctgactcgaaatggcgttcccttaaggtgagatgggatgaagcttcttctgttcctcgtcctgaaagagtttctccttggcaaatagaacctgctgttagcccatctcctgtgaaccctcttccagtcagattcaagaggtctcgttcaagtgttaacgcctcaccatctgatgtgtctactgtaaacagagaagttgcttctaaagtcatggtagagtcgcaacagaataatctcccaagggccttgcacaatcaaggaaggacacaattgacaggtcgataccgtgatagcactgatgtgaagactgctcaggatcttaccatgtggtcttcaggaactgagcaacagagaaacaatattgctgcccagacaaaacgatgtctggagggttggacgcaatctagaactccagaaggttacaatcaactgttctcggcatttcaaccactgaaggatgcacataatccacttcgtccttttcctaataaaatatctgggactcgctcaagtacctgggtcacagccgatgcccgttatccagctcaacaagccaatcacaacatgttacatggcacattgtcttttatgcctcatagcagtggttttaggatgattcaacagaataatctagtgacacctgaagctgcaaattttactgggaaatcagctttcacttcacttcagggccatgtcactgatcagtgctccacaggctggtttggatctattgagtcaaattcccacacagaccatgcatcgtcaagtttgatcaggtcccagcctttggttattggaaatgatgttcagaaaaccaaaggcacttcattcaaactatttgggattcctcttggcagtccagaaaaatctgaacctctggtatccccaccaagtgtcgcatatgacgggaaacttcaaacttctccaacagacaacaatgagccttgttcagaagctacccagaatatccagaacaaagtgcaaagtagttcaaccagaagctgcaagaaggtccataagcaaggcagcgccctcgggagatcgatcgatctaacaaagttcgcttgctacgatgagctgattgccgaactagaccagatgtttgacttcgatggtgagctgaagagtccttgcaggaactggttggtcgtctacactgacaacgaaggcgacatgatgctggtcggcgacgacccctggaatgagttctgtgacatggtccacaagatcttcatctacacaagggaggaagtggagaggatgaacccaggcgccctaaacgcgaggctcgaagactgcctgtctgactcgctgggaagagggctggcttccaaagagccccggagcggcccctcgacttcggctgtcgattctgagaaccgcgctaacttgtccagtcagtgaggcagcttcagcagcaatgtctagccttggctgcacggaagaactactgaccctaagctaatcttgtgtgtgtttcacttcttgcagcccttttgaaagtggtgaagcagacaaaaggccacgtgtcagagtgaccggaagaacgagaaaggggtgtgtttcagtggtgtgtagtaggtaggtaattttgtgtgtatgcctccgggtaaaagccccgcggtacccagtttgtagatggtgcttctcctggtgctagtttcccgtcgtaagctggatttttttggggggtgtgtgccctgctctgtgtgctgacccgcctgggggtaagttgtagcagagcaggagaaagcaggcaagaaaccgctggtgcgcctgcttggccaatccttttccttgcggagcgctgtaaatagccttggatctgaagcgtagtaatgtattgtcatggtactcgaagtcatgctccagtttgtgttgggtatgacctgcaactgtcggttcgatgggtgcggatgtcgaagggtttgcatggttgag

SEQ ID NO: 199105 - DNA, 401 bp, Zea Mays
caaaaattaggaaaataacaaagcacggttgggatggggatgggacgattctgatatgaatgattgaattgccgctcatcttacctgacagatcgtctactagctattgctgaggagaccttggcagagtttctgtcgaaagcaacaggaactgctgtcgattgggtgcaaatggttgggatgaagcttggtccggattccattggaatcatcgctgtttcgtacaattgcagtggcgtagcagcccaagcagatcaaggtctggttccagaaccgcaggttgttgcccatttcggagcatcatggtgtgtgatgtccctgtccatgaactacaagtttgaggagctggcgcagacccaccccgaggtcttgttcctctacgtggacgtcgacgatgtcca

SEQ ID NO: 199106 - DNA, 152 bp, Zea Mays
gttggggggaaaatagtagcctgatggcaggttgttgcccatttcggagcatcatggtgtgtgatgtccctgtccatgaactacaagtttgaggagctggcgcagacccaccccgaggtcttgttcctctacgtggacgtcgacgatgtcca

SEQ ID NO: 199107 - DNA, 2014 bp, Zea Mays
gtaccggcgtacggcgtaccgccaccggagtgtctggttggagacaagcccgaaccactcgggcggccagttcccactatccgggcgggcacgaagcgaagggaccagccagcgagcggctcgccggcgacgaccctctccccgccccaccccgcccacggaagcacggagaagatgtccgccgcataccctcgtctcctcctctgtctcctgaccctagccctggctctcgcaggggtcgccgcgggcaagatctcggccccccgcaccccgatctcgcgcgacatctaccactccagtgactctcttctgcgtgaaatcaaggctttggttgctcggcattccagcaaattgagtatggacactatcaaaacaagcaacaaaggctattctgcagagctgtttgtagttacatttaatcatgtgaaggagcgcatggataatggctcaaaagttcatatccttctgagctttgggcagcatggcagagaacttatcacctccgaagttgcattacgtcttctctatgttttaacggagaagcccaagatcgctggtgtggatatttcatcctttgagaaactgctggagaaccttgtgatcaaagttgtgccgatggaaaatatgaatggtcgcaaacgtgtcgaagaaggggagctttgtgataggagaaatggaagaggagttgatctcaacagaaattggagtgttgactggggaaagaaagaaaaagactacgacccatacgaggagaatcctggtattgctccttttagcgaacctgaggcccagatcatgagggaattatcaaggtcgtttaaacctcatatttgggtgaacgtgcattctggaatggaggccttatttatgccatatgatcacaagaataccacaccaaatggagcatctgcacattcgatgcggtcagtcttagagaatttgaaccgtcgccatttccaagatagctgcctagttgggtcaggtggtggatctgttggatatcttgcacatggtacaacaactgattacatgtatgacattgcaaaggtgccaatgccgttcacctttgagatatatggagatgagaaagcatcttccgatgactgcttcaaaatgttcaatcctgttgacaagaaaacattcgacagagttgttaacaagtggtgcatggcatttctcattctcttcgaggaaggcctgcgaaacctgcgagacgcgcagatagtgtcgcaaggcacgctggaaaactgggtcccaattggaggagacatcgtcgagataaatgtggagcggaagagcagcatccgtgagaggaggaagctggaaggcctcgaccttggaatgcaggagctaaggacatatttccggctattcttgctgtcaacattcctgttgatgttcatgttctgcgcgcggatatcaaagaacagaaaccgagactcaggtaacttgtttgacccttgaatgaagtaccaaagagagcatcggtgggggggggcctcctccgagctgaacttcgggtgcaaagagcgatcccctcagatcagacgaacaaagcgatctgaaacattcagagctggaatacagctctgccttcgcaccctggtattcggagctggacgtcccgtatactttggacacgaaggatggtggcaggcagtgtctgtttaggttacagcagagacgccagacgatgtggctaactgtttaacaaaattgtagctgtaaaaatcgcccatgtcagtttttttttggtgatgcataggttttactactacattttgatggaaggttgttagtgcacccaacacttggtacggtgccatcagttgatgtaacatctcactgatcgagcggtttatgtggaattgtgttggctcgaatttcttctgggttctcaaattcatttcgtaactttcaaagtttaaatatttatatgtatacatatatttaaggtcgtgtatgtatataggaccttgtatgagtgtggagggatggaccgtccgctccgcta

SEQ ID NO: 199108 - DNA, 591 bp, Zea Mays
gagtccgtctgccacgttctccccctatcctccctgctggttgaaagaacttcaccaaaagtgtcccaaggaaatggatgaatatgctggttgcatgtattactacaccaacgaattcgacttctgccgtaaggagcagcaagcttttgaggaagcctgccccatttccgagtagatcttgagagttttacttgcagtggtcttcgcaaataagggaaaaaaggcagaaaaacagcgttcatgatatcccatgtttgttgtcctcatggaatttgtactggtgaatgaatagcacagcctggagctattcaccccatttgccgcccctcaggattttagagcaggcgaatgctctaaaatggtgatgatggtgttttctctttatggttcacaaattacatttggcggactcgctgttatttctgtctgtcccgagtgtgttaacccgctaatctgatcttctgctctggacttccacaaggctatggcacaactacaatgtactcctacatcatatcgtctcaaatctgaatagtctgtactctgtacagactacagaaaaaaaacattcattgccttctttatcagttc

SEQ ID NO: 199109 - DNA, 612 bp, Zea Mays
tcacagctccatttcttctagtagaaggctaagaacctccctactttgttgatcttccatgttgaaagaacttcaccaaaagtgtcccaaggaaatggatgaatatgctggttgcatgtattactacaccaacgaattcgacttctgccgtaaggagcagcaagcttttgaggaagcctgccccatttccgagtagatcttgagagttttacttgcagtggtcttcgcaaataagggaaaaaaggcagaaaaacagcgttcatgatatcccatgtttgttgtcctcatggaatttgtactggtgaatgaatagcacagcctggagctattcaccccatttgccgcccctcaggattttagagcaggcgaatgctctaaaatggtgatgatggtgttttctctttatggttcacaaattacatttggcggactcgctgttatttctgtctgtcccgagtgtgttaacccgctaatctgatcttctgctctggacttccacaaggctatggcacaactacaatgtactcctacatcatatcgtctcaaatctgaatagtctgtactctgtacagactacagaaaaaaaacattcattgccttctttatcagttc

SEQ ID NO: 199110 - DNA, 607 bp, Zea Mays
agaatatgaaaaaaaaaacacctgttgaggctgacatgtgtattctgtgccacatgttgaaagaacttcaccaaaagtgtcccaaggaaatggatgaatatgctggttgcatgtattactacaccaacgaattcgacttctgccgtaaggagcagcaagcttttgaggaagcctgccccatttccgagtagatcttgagagttttacttgcagtggtcttcgcaaataagggaaaaaaggcagaaaaacagcgttcatgatatcccatgtttgttgtcctcatggaatttgtactggtgaatgaatagcacagcctggagctattcaccccatttgccgcccctcaggattttagagcaggcgaatgctctaaaatggtgatgatggtgttttctctttatggttcacaaattacatttggcggactcgctgttatttctgtctgtcccgagtgtgttaacccgctaatctgatcttctgctctggacttccacaaggctatggcacaactacaatgtactcctacatcatatcgtctcaaatctgaatagtctgtactctgtacagactacagaaaaaaaacattcattgccttctttatcagttc

SEQ ID NO: 199111 - DNA, 3518 bp, Zea Mays
cttggcccgtctcagggctcgcagaacagggagcgtagggtaatactttgcgtggcggccgctgcgctcctcccctccaccctcctatccccccacctcactccgcttgtgcggccgcgtggtggtgcctcccgcggcgctgcggctgctctccgatcccgagcgagcacatatcctcgccaccttatcacgaggccctcgcaccgcgccgacgcgatcagcgcgtcgagccaccggagtctccccttgcgggattgcatctcaagaatatggggagaaagaagaaccccattgtctttctggatgtatccgtaggtgacgagccagatgaaagaatgatctttgagttgtttgctgatgttgcaccccttacaactgagaacttcagagctttatgcacaggtgagctgggaattggacagaagactaagaagcccttatgttacaagggaacattgttccaccgcgtgatcaaggggtttatggcacaaggaggtgacattgcaaaagaaaatgggtctggtggtgaaaacatatatagtggaaaatttacagatgaaacttgtgttctacttcatgatgatcgtggcctcttgacaacagcagatactggattcaaacctagtggctcccagttctgcattactttcaagcctaattctcatcttgacaggaagcacacagtttttggcaagcttgttgttggaagtgatgttctgaagaggatcgagcaagtagatgtgcaatcccctgattcaactcctgttattccagttactatagtaaattgtggagagctcattgaacgcaaagatattggctctatgtcaatagaaattgataaaaaaagggctgccaaatcaaagttgacaagggatataacttctgacgaggaaagtaatgaaggacaacacaagagacgtcgtaacaaatcttcaaaaaggagaaggaagaagaggagatattcttattcggaatcagatagctcttctgagtcagagactgaatcatctgattatgagagcgattctgatacttactctagtgactcatctgatgtcagcagctcaagtgatgacaggcgaaggcgcagaaagagacactcgaagaaaaataaacgcaagcattcaagaagaaagcgtgaccataggcgcgaaagaaggcgtaggaagcgtggtaggaaatcaaaacagaagtcaaaaaggatagtaaagggtgatagtgaagctgaaagtacgggcgatagcagttctgaagatgctagaagcaagagacaccgccgtgggcggaagttcaaggcatcatctcaagtttctgaggaaaatcttgctggagtggctgctttgaaggatgccacctcacctcaacaaaagagtggaatacagaggagtccagcacaagatgtctcctccctgcaaaatggggaagtccatacaaatggtgttaatgactcaaaaattgaaagaaatgccgctgtcatgcctgttttaactggcaatcgaagcaaatctaggagccagagcatgagtgttaatcactcaatgagcaagagtatgagtatcagtccaagaagaagcccaatgaaaaggtcaagtaccagcccgaagaggtcacttagcaggagccctgttgacaataatcacagtagaagccctatccgtactcccaaaagaagcgtgagcaggagtccagccaggcggcagatcatgagcaggagccctgctaggagcccacccagaaattcaagcagaagccttcacataagcaggagtcctgttaaagcccacagaagaagcattagcaggagctcagctaggtccatgcaacagagaagtccaagcaggagtctggagagaactcatgtacgaaaaagtatcagtccaagcccacctttggagaagggaagaagcattacccgtacctctgtggtatctccattgcgaagtgttagtcggagcccagcaaggatttcaaggagcccacataggccttctaggagaagccctatgagaagtccacgatggaacatacgcagaagcctcagcaggagccctgcaagaatacctagaagaagtgtgagcagaagcccagtaagaggtggtcgacctcgcaggaacattagcagaagtcccagtccacatcgcagggtagtaacaccaccaaacaatggaagaagcccatccaggagtggttctcctgatgggtcaccaaaacgcataagacgtggacggggttttactcagaggtactcatacgcaagacaatatcgctcaccttctgctgatcgctcacatcgttatggtggaagaaatgaccgtgacagatacatgggttaccggggttcccgccatcgatcacctcctagacggtatagaagcccacccagaggaagagtgtcatcgccaaggtaaataaactgtttatatgtgatatttttctatgtgtatcagcttgtattatcatttgtgatgctatgtcatggaactaactctgaataggcatagatttttgtttgctatacttgctcccctcagtttaaatttataagccattttaacattttcggtacatcaattttactatgtatctagatataacatatctagatacataacaaaattgatgtatcacagaagtcaaagcgacttataatttggaatggagtattatttttctgaagttattatttgcaaatgattgaagcaattttatttcgagttttttctcaatcggtatgcatagctgattcttgtggttggttctttgtcatgatttcttttattttggtacttgaggcgtggtaggtacaggaggaggagccgaagcgcctcacgcagccctgtctacagggaaagaggaaggggaggtggatacagcaaaagccctatacggagcagttcaccccctgccaggaaaccaaggtcacatggtgaccgtgcacggtcagtttcaagaagccacctttctgggtcagtatcaaggtctcctccagtgcatcatccctctccacctgattccccatcagtgaagcatgcaagtgatgagaaatctcagtccgcgtccccagctctgtcactgtctggtagccctaatcgtggaggcaagaaaggtttggtttcctacggggatggctcacctgattcagctgggaagtaggtttccaccggggcattgaaatgtatcttacaccgttagccattggctgttgatcaggtccatcaatactttttgttatatttctactgtaagaagcggtttggtccttgagctgcccagctgttacatatgttgtttgggatgatcggctatgtcctttggttatcacaagagtcgtaatttgagcttaggttttgctgttgctaaacatgtagcacagattcagtgtgggattttgatgttatataagcttcaacgcaaagaatcattacaatgttttgacctcggatgcctaagtacgattcacaatttatttcttttgcatattcaattctaatgtttatgcatctattcaacaatta

SEQ ID NO: 199112 - DNA, 2156 bp, Zea Mays
gcgtggtggtgcctcccgcggcgctgcggctgctctccgatcccgagcgagcacatatcctcgccaccttatcacgaggccctcgcaccgcgccgacgcgatcagcgcgtcgagccaccggagtctccccttgcgggattgcatctcaagaatatggggagaaagaagaaccccattgtctttctggatgtatccgtaggtgacgagccagatgaaagaatgatctttgagttgtttgctgatgttgcaccccttacaactgagaacttcagagctttatgcacaggtgagctgggaattggacagaagactaagaagcccttatgttacaagggaacattgttccaccgcgtgatcaaggggtttatggcacaagatgccacctcacctcaacaaaagagtggaatacagaggagtccagcacaagatgtctcctccctgcaaaatggggaagtccatacaaatggtgttaatgactcaaaaattgaaagaaatgccgctgtcatgcctgttttaactggcaatcgaagcaaatctaggagccagagcatgagtgttaatcactcaatgagcaagagtatgagtatcagtccaagaagaagcccaatgaaaaggtcaagtaccagcccgaagaggtcacttagcaggagccctgttgacaataatcacagtagaagccctatccgtactcccaaaagaagcgtgagcaggagtccagccaggcggcagatcatgagcaggagccctgctaggagcccacccagaaattcaagcagaagccttcacataagcaggagtcctgttaaagcccacagaagaagcattagcaggagctcagctaggtccatgcaacagagaagtccaagcaggagtctggagagaactcatgtacgaaaaagtatcagtccaagcccacctttggagaagggaagaagcattacccgtacctctgtggtatctccattgcgaagtgttagtcggagcccagcaaggatttcaaggagcccacataggccttctaggagaagccctatgagaagtccacgatggaacatacgcagaagcctcagcaggagccctgcaagaatacctagaagaagtgtgagcagaagcccagtaagaggtggtcgacctcgcaggaacattagcagaagtcccagtccacatcgcagggtagtaacaccaccaaacaatggaagaagcccatccaggagtggttctcctgatgggtcaccaaaacgcataagacgtggacggggttttactcagaggtactcatacgcaagacaatatcgctcaccttctgctgatcgctcacatcgttatggtggaagaaatgaccgtgacagatacatgggttaccggggttcccgccatcgatcacctcctagacggtatagaagcccacccagaggaagagtgtcatcgccaaggcgtggtaggtacaggaggaggagccgaagcgcctcacgcagccctgtctacagggaaagaggaaggggaggtggatacagcaaaagccctatacggagcagttcaccccctgccaggaaaccaaggtcacatggtgaccgtgcacggtcagtttcaagaagccacctttctgggtcagtatcaaggtctcctccagtgcatcatccctctccacctgattccccatcagtgaagcatgcaagtgatgagaaatctcagtccgcgtccccagctctgtcactgtctggtagccctaatcgtggaggcaagaaaggtttggtttcctacggggatggctcacctgattcagctgggaagtaggtttccaccggggcattgaaatgtatcttacaccgttagccattggctgttgatcaggtccatcaatactttttgttatatttctactgtaagaagcggtttggtccttgagctgcccagctgttacatatgttgtttgggatgatcggctatgtcctttggttatcacaagagtcgtaatttgagcttaggttttgctgttgctaaacatgtagcacagattcagtgtgggattttgatgttatataagcttcaacgcaaagaatcattacaatgttttgacctcggatgcctaagtacgattcacaatttatttcttttgcatattcaattctaatgtttatgcatctattcaacaatta

SEQ ID NO: 199113 - DNA, 2016 bp, Zea Mays
ataacataacagattaattgagattttgtcctcggagcaccgatcactgagaaagaagccaaggagctcaaggaaaagatagaggacgaataccgagtgaacatgatccttgacaacctcccgctagttgttcctgttacaaggcaagataagaacagtattgcttatcaaggtggatatcatgttggtgccaaaggcctgtattctggaacaaaggatgagaaatacttcatacacaaccatttgtcatttacggtgaagtatcacaaggacgataatttggaacattctagaatagtgggatttgaggtcaacccacacagtgtcaagcaccaggttgacgataaatggaatggtgtagacacccgcttgagcacttgtgatcctcatgcgagcaaatttgtaataaactctgattctcctcaggaagttgaagttggcaaggaaatcatattcacatatgatgttcgctttgaggagagtgagatcaagtgggcgtcacgctgggacacctacctgttgatgaccgatgatcagattcactggttttctattgtgaactctctcatgatcgtgcttttcctatcaggcatggttgccatgataatgcttcgcactctctacagagacatttctagatacaatcagcttgaaactcaagaagaagcacaagaggaaacaggctggaagcttgttcatggggatgtgttccgtcctccaacctactctgacttgctctgtgtttatgttggcactggcgtccaattctttggcatgctcgtagttacaatgatctttgctgtgttgggtttcctttctccatcaaaccggggaggactcatgactgcaatgcttctagtctgggttttgatgggtctgcttgctggctactcttcttcccgcctttacaagatgttcaaaggttcagagtggaagaagataaccctgcaaacggctttcctatttccaggggttgcatttgttattttcttcatcttgaatgctcttatatggggggagaagtcatctggtgctgttcctttcaccacaatgtttgccttggtcctcctttggtttggcatctcagtaccccttgtcttcgttgggagttatcttgggttcaagaaacctgccatggaacctccagtcaagacaaacaagattccacgtcagatccctgagcaggcttggtacatgaatccgcttttcaccattctgattggcggtgtccttccatttggagcagttttcattgaactcttcttcatcctcacctccatctggctgcaccagttctactacatatttggcttcctcttccttgtgtttgtgatcctgatcatcacctgcgccgagatcacaatcgtgctctgctatttccagctctgcagtgaggactacatgtggtggtggaggtcttaccttacctcaggatcctccgccctgtatctcttcctgtacgctggtttctacttcttcacgaaactgcagatcactaagctggtgtctggcatcttgtacttcggctacatgcttctcgcctcatatgccttcttcgtgctgactggcacaattggtttctgcgcctgcttctggttcactaggttgatttactcttcagtgaagatcgattaggtgccaagatgacagaacagcacatgtttcaatggagtcaagataattgtatgattaatgtggattggggaattaccccccctcctttttttgaaggttttcaggaaaattttactgtttaggatttagtttacagatggtttatgttttgttattgtcaggttatacactttagtgatttggaactgaaaaatataagggtaaacacattatgatgaggctgtaccttgtgacaaatttttttgtggggctctatataaattaaattcattgtgacaggtatatgcttgtaccggtgaattactgtagggctccaagaccagtatgaaatccaccgtttggatcctggaattgaatagtaaatttagatatagattaatt

SEQ ID NO: 199114 - DNA, 2119 bp, Zea Mays
gatctagctggctcttgtgcaattggtatgccacagctgctcttctcaccgtgtgaggacgagcacagtaaaagctaagcatttcttgattcatcctcccagcttcgttaattactatcaatgatgttgctgcatatttctttggcatcttctttgggaaaacaccgctgatcaagctctctccaaagaaaacgtgggaaggctttataggtgcatcaatgacaacattgctttctgcatttgtgctactcctgctgaaaatgtactaaccacaccttccatggtggagtgcagggcctccctgttggggcacgagatcgcccacccgtcgtctacaccagattatttctatcataccatcagatagtggatggacaaccaagcgtgcaccgtttcatcatttctgattctttcttagatgactaagataagtgtgaggtctgtactcatattctttccttttcttttcaatgcaggtatgatcttatacgagtggagattggcaacaaagatataaagcttgaatacttagtggaggcatttacaacttcaaatgacgtagcctcctcgacaccttctgcttctgctaactccggtgcaaggtagatccttgctatacttgacaaactaaaggaggaaagggagcaacaagaaggaaaatatggggaggaagatgtggatggttcatgtatatcagaagaagaagatggtgactgggatgtagatgagccagatgaggaggacatcatttacgtaaaatagcccattgtcttctaggaacttggtcatcattcatccagaacacagcaggtgtgcttctactgatcgaaaatacatcttccaaataactatgaggacttaaccaagcaccattcaatcttcatttgcttctatagtttgggttgcgttctgcatacataatattgcctatcaagcctgttctagggagaaagattaactggatgaagacagggatcgttgagagtgatctggttctaacagttagtccacattatgttaaggaactcacttatggcccagataaaggtgttgagttggatggtgtccttcgcacaaagcctcttgaaattggaattgtaaatggcatggatgtttatgaatgggatccttcaacagataagtacaccagcgtgaaatatgatgcaacaacggtaactgaagcaaaggctctcaataaagagaggttgcaagctgaagttggattgcctgtggactcgagcatccctgttatagtttttgtcgggcgtcttgaagaacagaaagggtctgacatactcattgcagccattccagagttcgtgggcgagaatgttcagataatcgttcttattcccatctgttcatcacctggaggacttgttgacacggttgaggaggggtgtcaccggattccacatgggttctttcaatgtcgagtgtgaaactgtagacctagctgacgtgacggcagtagcgtcaaccatcacacgggcctagaacagtacggcaccccggcgttccaagaaatggttcagaactgcatggcgcaaaacctatcctggaaggggcctgcgaagaagtgggaggaggtgcttctgggccttggagtcgaggggagtcaagctggcatcgacgacgcagaggagatcgctccacttgccaaggaaaacgtagctactccatgacgcttggtgcctcggaaacacgcgttggtgataggaagcatcttctaggatcctcctggccttgtggctggagtgagttgttcagtcagacacagtttcgcctctacaacatcttcctcctcctggtggtggtccgaactccgaagcaaattccagtgataaaggatgaactaagaggtccatgtttctattgctagaccttttgcctcctaaatagacgatgtactgcgcttgtaacaagaacctcactttcgtgtcaagtaatatcaacaggtttcataatggtagtgaactgcactggaaaaacctgtaaacaatgcaaacaggattcaaaactaaaacaaatctgctattaaaagctgttattcaaaattgaaaaaaacaaaacctgttaattcagtattataactcagcaaacataaataaaaaaaaca

SEQ ID NO: 199115 - DNA, 2547 bp, Zea Mays
acaggttgtggtggaaaacactcgtgtgggatctagctggctcttgtgcaattggtatgccacagctgctcttctcaccgtgtgaggacgagcacagtaaaagctaagcatttcttgattcatcctcccagcttcgttaattactatcaatgatgttgctgcatatttctttggcatcttctttgggaaaacaccgctgatcaagctctctccaaagaaaacgtgggaaggctttataggtgcatcaatgacaacattgctttctgcatttgtgctactcctgctgaaaatgtactaaccacaccttccatggtggagtgcagggcctccctgttggggcacgagatcgcccacccgtcgtctacaccagattatttctatcataccatcagatagtggatggacaaccaagcgtgcaccgtttcatcatttctgattctttcttagatgactaagataagtgtgaggtctgtactcatattctttccttttcttttcaatgcaggtatgatcttatacgagtggagattggcaacaaagatataaagcttgaatacttagtggaggcatttacaacttcaaatgagtaacattccttgatctgaaatgtgtacaataatcctgatgaactactaaaacacttgccttaatctgaaatgagtacaataaaacatatataaggaaactcaaataagtaaagtcttgcttgtccctcacaccataacatgactgatgaactactaaaacacctgcgaggtctgtcagcgtagcctcctcgacaccttctgcttctgctaactccggtgcaagatccttgctatacttgacaaactaaaggaggaaagggagcaacaagaaggaaaatatggggaggaagatgtggatggttcatgtatatcagaagaagaagatggtgactgggatgtagatgagccagatgaggaggacatcatttacgtaaaatagcccattgtcttctaggaacttggtcatcattcatccagaacacagcaggttgcgttctgcatacataatattgcctatcaaggtagatttgccagagcagacttcgatcttcttaatctacctgacagtttcttaccatcatttgattttattgatggacatgttaagcctgttctagggagaaagattaactggatgaagacagggatcgttgagagtgatctggttctaacagttagtccacattatgttaaggaactcacttatggcccagataaaggtgttgagttggatggtgtccttcgcacaaagcctcttgaaattggaattgtaaatggcatggatgtttatgaatgggatccttcaacagataagtacaccagcgtgaaatatgatgcaacaacggtaactgaagcaaaggctctcaataaagagaggttgcaagctgaagttggattgcctgtggactcgagcatccctgttatagtttttgtcgggcgtcttgaagaacagaaagggtctgacatactcattgcagccattccagagttcgtgggcgagaatgttcagataatcgttcttgtatgtttcaatttagaagtgatttctattctttcgcatgacacagttcacaatctgatagttgctgagagaaaaaaaattgttcttcagggcacgggaaagaagaaaatggaggaggaattaatgcagctggaagtgaaatatccaaacattgctagaggcatagcgaaattcaatgttccattggcacatatgatgtttgctgggtctgacttcattattgtcccaaattcccatctgttcatcacctggaggacttgttgacacggttgaggaggggtgtcaccggattccacatgggttctttcaatgtcgagtgtgaaactgtagacctagctgacgtgacggcagtagcgtcaaccatcacacgggcctagaacagtacggcaccccggcgttccaagaaatggttcagaactgcatggcgcaaaacctatcctggaaggggcctgcgaagaagtgggaggaggtgcttctgggccttggagtcgaggggagtcaagctggcatcgacgacgcagaggagatcgctccacttgccaaggaaaacgtagctactccatgacgcttggtgcctcggaaacacgcgttggtgataggaagcatcttctaggatcctcctggccttgtggctggagtgagttgttcagtcagacacagtttcgcctctacaacatcttcctcctcctggtggtggtccgaactccgaagcaaattccagtgataaaggatgaactaagaggtccatgtttctattgctagaccttttgcctcctaaatagacgatgtactgcgcttgtaacaagaacctcactttcgtgtcaagtaatatcaacaggtttcataatggtagtgaactgcactggaaaaacctgtaaacaatgcaaacaggattcaaaactaaaacaaatctgctattaaaagctgttattcaaaattgaaaaaaacaaaacctgttaattcagtattataactcagcaaacataaataaaaaaaaca

SEQ ID NO: 199116 - DNA, 3215 bp, Zea Mays
gccagcgccagcgcagcattgttcgtagaggttgtggtggaaaacactcgtgtgggatctagctggctcttgtgcaattggtatgccacagctgctcttctcaccgtgtgaggacgagcacagtaaaagctaagcatttcttgattcatcctcccagcttcgttaattactatcaatgatgttgctgcatatttctttggcatcttctttgggaaaacaccgctgatcaagctctctccaaagaaaacgtgggaaggctttatagttaactatcttctgaagcatttccctatgtttagctactcctgctgaaaatgtactaaccacaccttccatggtggagtgcagggcctccctgttggggcacgagatcgcccacccgtcgtctacaccagattatttctatcataccatcagatagtggatggacaaccaagcgtgcaccgtttcatcatttctgattctttcttagatgactaagataagtgtgaggtctgtactcatattctttccttttcttttcaatgcaggtatgatcttatacgagtggagattggcaacaaagatataaagcttgaatacttagtggaggcatttacaacttcaaatgagtaacattccttgatctgaaatgtgtacaataatcctgatgaactactaaaacacttgccttaatctgaaatgagtacaataaaacatatataaggaaactcaaataagtaaagtcttgcttgtccctcacaccataacatgactgatgaactactaaaacacctgcgaggtctgtcagcgtagcctcctcgacaccttctgcttctgctaactccggtgcaaggtacgccgctgccatcccaatccctacccccaggcaagctttgttgattgctttctggttgttgatttctgagctagctatttagaagtcaaaaattgggtgaaatctgattaaccaaactacctggttagaaatcaaattggatgaaatctaattaattttgatatgtgtctcctgagttcaaggatgtcttctacaataattcagccaagaacaagaagcgctaattggaatccaaattgtttgatgtggtgatatgatctggaacttggaccatctttatgctttatggggctaagaagcataagacctgtccgaggcaattgtatctcaacataatcagtttgatgggctccaggagttatatcatcagaaatgtttttttagtatttctatgtaccagcaaaatattgactgaatatttctaaccaggtagatccttgctatacttgacaaactaaaggaggaaagggagcaacaagaaggaaaatatggggaggaagatgtggatggttcatgtatatcagaagaagaagatggtgactgggatgtagatgagccagatgaggaggacatcatttacgtaaaatagcccattgtcttctaggaacttggtcatcattcatccagaacacagcaggtgtgcttctactgatcgaaaatacatcttccaaataactatgaggacttaaccaagcaccattcaatcttcatttgcttctatagtttgggtacagtctctctctctttttctaagccattgtgtaatagagtagcattagtacgatttaatgatacaatgtcactttctcatatgttctaacagaaatgatcagtggaagatgttgtcttcgtagccaatgattggcacactgctattttgccatgttatctaaagagcatgtataagtcaaatggaatttataaaaatgctaaggttgcgttctgcatacataatattgcctatcaaggtagatttgccagagcagacttcgatcttcttaatctacctgacagtttcttaccatcatttgattttattgatggacatgttaagcctgttctagggagaaagattaactggatgaagacagggatcgttgagagtgatctggttctaacagttagtccacattatgttaaggaactcacttatggcccagataaaggtgttgagttggatggtgtccttcgcacaaagcctcttgaaattggaattgtaaatggcatggatgtttatgaatgggatccttcaacagataagtacaccagcgtgaaatatgatgcaacaacggtaactgaagcaaaggctctcaataaagagaggttgcaagctgaagttggattgcctgtggactcgagcatccctgttatagtttttgtcgggcgtcttgaagaacagaaagggtctgacatactcattgcagccattccagagttcgtgggcgagaatgttcagataatcgttcttggcacgggaaagaagaaaatggaggaggaattaatgcagctggaagtgaaatatccaaacattgctagaggcatagcgaaattcaatgttccattggcacatatgatgtttgctgggtctgacttcattattgtcccaaattcccatctgttcatcacctggaggacttgttgacacggttgaggaggggtgtcaccggattccacatgggttctttcaatgtcgagtgtgaaactgtagacctagctgacgtgacggcagtagcgtcaaccatcacacgggcctagaacagtacggcaccccggcgttccaagaaatggttcagaactgcatggcgcaaaacctatcctggaaggggcctgcgaagaagtgggaggaggtgcttctgggccttggagtcgaggggagtcaagctggcatcgacgacgcagaggagatcgctccacttgccaaggaaaacgtagctactccatgacgcttggtgcctcggaaacacgcgttggtgataggaagcatcttctaggatcctcctggccttgtggctggagtgagttgttcagtcagacacagtttcgcctctacaacatcttcctcctcctggtggtggtccgaactccgaagcaaattccagtgataaaggatgaactaagaggtccatgtttctattgctagaccttttgcctcctaaatagacgatgtactgcgcttgtaacaagaacctcactttcgtgtcaagtaatatcaacaggtttcataatggtagtgaactgcactggaaaaacctgtaaacaatgcaaacaggattcaaaactaaaacaaatctgctattaaaagctgttattcaaaattgaaaaaaacaaaacctgttaattcagtattataactcagcaaacataaataaaaaaaaca

SEQ ID NO: 199117 - DNA, 3746 bp, Zea Mays
cgcgatgcgctcgcacgtgccaccgccccccggcccgcgataccgtgcctccgctcgacgcctgcccccgatccctgcgattccagcgccgtcgccgcgcgcgatgcccgtgcacgcacccccaccccaatccccgcctcagcgccgctcccccgcccccacccccgtcctcgccgccccgctccacgctcgcgtggcgtcgtcatcgctgcgctctgcgcccgctccgcccccacccccacacgcgcacacacacctcaccccgcgtcgtcatccacagcccctgcatcgccaccatggactcggggttgaactggtagcccgagggcgcgggaggtgccgccggcggcggaggatgaggcaggcagggcgagggcggcgacgccggaagctcctggaaatggctgcgcgcgcggtggtggtgagaccgctggtccgtgccgggaagcgagaggctgagcaaggtgagcgggtcctcctcctgcggacggctcatggcagtctgccggctcgaacccgccggagcgcgccacggggcggtaaatctggccggacccggagccggcgccgtggctgctgaggtcgctacggtgtatggttggaccccgaccacgaccccgataggctgtcgggcgagaggctcatcatcagcttgcccgggcgcgcctcggtctcggtggcgtcagtgggaaccggcgaaccggacacgacggcccaccgcctccctctgcttcctcccgtcgaagccctccacctctgacacggcgaccgaccactcctccgactccgactttgccaccacgaacagcaacgaggacactgccatcctcggcatgacgggcgacggggcattcgcaatctccttcgccgatcgcttcaccgccagcgccagcgcagcattgttcgtagagaagaggatggttcatggtagcaaaagtatggcggtaccagaacaagggattccccctaatgttgttgaggatggggaacccttcaggcacaccagtgtgggcacttacagaggagcagatgttctttagaggcatgttgtgttgtactcttccacccactctctgccagtctctacacaggttgtggtggaaaacactcgtgtgggatctagctggctcttgtgcaattggtatgccacagctgctcttctcaccgtgtgaggacgagcacagtaaaagctaagcatttcttgattcatcctcccagcttcgttaattactatcaatgatgttgctgcatatttctttggcatcttctttgggaaaacaccgctgatcaagctctctccaaagaaaacgtgggaaggctttataggtgcatcaatgacaacattgctttctgcatttgtgctactcctgctgaaaatgtactaaccacaccttccatggtggagtgcagggcctccctgttggggcacgagatcgcccacccgtcgtctacaccagattatttctatcataccatcagatagtggatggacaaccaagcgtgcaccgtttcatcatttctgattctttcttagatgactaagataagtgtgaggtctgtactcatattctttccttttcttttcaatgcaggtatgatcttatacgagtggagattggcaacaaagatataaagcttgaatacttagtggaggcatttacaacttcaaatgagtaacattccttgatctgaaatgtgtacaataatcctgatgaactactaaaacacttgccttaatctgaaatgagtacaataaaacatatataaggaaactcaaataagtaaagtcttgcttgtccctcacaccataacatgactgatgaactactaaaacacctgcgaggtctgtcagcgtagcctcctcgacaccttctgcttctgctaactccggtgcaagatccttgctatacttgacaaactaaaggaggaaagggagcaacaagaaggaaaatatggggaggaagatgtggatggttcatgtatatcagaagaagaagatggtgactgggatgtagatgagccagatgaggaggacatcatttacgtaaaatagcccattgtcttctaggaacttggtcatcattcatccagaacacagcaggtgtgcttctactgatcgaaaatacatcttccaaataactatgaggacttaaccaagcaccattcaatcttcatttgcttctatagtttggaaatgatcagtggaagatgttgtcttcgtagccaatgattggcacactgctattttgccatgttatctaaagagcatgtataagtcaaatggaatttataaaaatgctaaggttgcgttctgcatacataatattgcctatcaaggtagatttgccagagcagacttcgatcttcttaatctacctgacagtttcttaccatcatttgattttattgatggacatgttaagcctgttctagggagaaagattaactggatgaagacagggatcgttgagagtgatctggttctaacagttagtccacattatgttaaggaactcacttatggcccagataaaggtgttgagttggatggtgtccttcgcacaaagcctcttgaaattggaattgtaaatggcatggatgtttatgaatgggatccttcaacagataagtacaccagcgtgaaatatgatgcaacaacggtaactgaagcaaaggctctcaataaagagaggttgcaagctgaagttggattgcctgtggactcgagcatccctgttatagtttttgtcgggcgtcttgaagaacagaaagggtctgacatactcattgcagccattccagagttcgtgggcgagaatgttcagataatcgttcttggcacgggaaagaagaaaatggaggaggaattaatgcagctggaagtgaaatatccaaacattgctagaggcatagcgaaattcaatgttccattggcacatatgatgtttgctgggtctgacttcattattgtcccaaattcccatctgttcatcacctggaggacttgttgacacggttgaggaggggtgtcaccggattccacatgggttctttcaatgtcgagtgtgaaactgtagacctagctgacgtgacggcagtagcgtcaaccatcacacgggcctagaacagtacggcaccccggcgttccaagaaatggttcagaactgcatggcgcaaaacctatcctggaaggggcctgcgaagaagtgggaggaggtgcttctgggccttggagtcgaggggagtcaagctggcatcgacgacgcagaggagatcgctccacttgccaaggaaaacgtagctactccatgacgcttggtgcctcggaaacacgcgttggtgataggaagcatcttctaggatcctcctggccttgtggctggagtgagttgttcagtcagacacagtttcgcctctacaacatcttcctcctcctggtggtggtccgaactccgaagcaaattccagtgataaaggatgaactaagaggtccatgtttctattgctagaccttttgcctcctaaatagacgatgtactgcgcttgtaacaagaacctcactttcgtgtcaagtaatatcaacaggtttcataatggtagtgaactgcactggaaaaacctgtaaacaatgcaaacaggattcaaaactaaaacaaatctgctattaaaagctgttattcaaaattgaaaaaaacaaaacctgttaattcagtattataactcagcaaacataaataaaaaaaaca

SEQ ID NO: 199118 - DNA, 4003 bp, Zea Mays
cgcgatgcgctcgcacgtgccaccgccccccggcccgcgataccgtgcctccgctcgacgcctgcccccgatccctgcgattccagcgccgtcgccgcgcgcgatgcccgtgcacgcacccccaccccaatccccgcctcagcgccgctcccccgcccccacccccgtcctcgccgccccgctccacgctcgcgtggcgtcgtcatcgctgcgctctgcgcccgctccgcccccacccccacacgcgcacacacacctcaccccgcgtcgtcatccacagcccctgcatcgccaccatggactcggggttgaactggtagcccgagggcgcgggaggtgccgccggcggcggaggatgaggcaggcagggcgagggcggcgacgccggaagctcctggaaatggctgcgcgcgcggtggtggtgagaccgctggtccgtgccgggaagcgagaggctgagcaaggtgagcgggtcctcctcctgcggacggctcatggcagtctgccggctcgaacccgccggagcgcgccacggggcggtaaatctggccggacccggagccggcgccgtggctgctgaggtcgctacggtgtatggttggaccccgaccacgaccccgataggctgtcgggcgagaggctcatcatcagcttgcccgggcgcgcctcggtctcggtggcgtcagtgggaaccggcgaaccggacacgacggcccaccgcctccctctgcttcctcccgtcgaagccctccacctctgacacggcgaccgaccactcctccgactccgactttgccaccacgaacagcaacgaggacactgccatcctcggcatgacgggcgacggggcattcgcaatctccttcgccgatcgcttcaccgccagcgccagcgcagcattgttcgtagagaagaggatggttcatggtagcaaaagtatggcggtaccagaacaagggattccccctaatgttgttgaggatggggaacccttcaggcacaccagtgtgggcacttacagaggagcagatgttctttagaggcatgttgtgttgtactcttccacccactctctgccaggttgtggtggaaaacactcgtgtgggatctagctggctcttgtgcaattggtatgccacagctgctcttctcaccgtgtgaggacgagcacagtaaaagctaagcatttcttgattcatcctcccagcttcgttaattactatcaatgatgttgctgcatatttctttggcatcttctttgggaaaacaccgctgatcaagctctctccaaagaaaacgtgggaaggctttataggtgcatcaatgacaacattgctttctgcatttgtgttaactatcttctgaagcatttccctatgtttagctactcctgctgaaaatgtactaaccacaccttccatggtggagtgcagggcctccctgttggggcacgagatcgcccacccgtcgtctacaccagattatttctatcataccatcagatagtggatggacaaccaagcgtgcaccgtttcatcatttctgattctttcttagatgactaagataagtgtgaggtctgtactcatattctttccttttcttttcaatgcaggtatgatcttatacgagtggagattggcaacaaagatataaagcttgaatacttagtggaggcatttacaacttcaaatgagtaacattccttgatctgaaatgtgtacaataatcctgatgaactactaaaacacttgccttaatctgaaatgagtacaataaaacatatataaggaaactcaaataagtaaagtcttgcttgtccctcacaccataacatgactgatgaactactaaaacacctgcgaggtctgtcagcgtagcctcctcgacaccttctgcttctgctaactccggtgcaaggtacgccgctgccatcccaatccctacccccaggcaagctttgttgattgctttctggttgttgatttctgagctagctatttagaagtcaaaaattgggtgaaatctgattaaccaaactacctggttagaaatcaaattggatgaaatctaattaattttgatatgtgtctcctgagttcaaggatgtcttctacaataattcagccaagaacaagaagcgctaattggaatccaaattgtttgatgtggtgatatgatctggaacttggaccatctttatgctttatggggctaagaagcataagacctgtccgaggcaattgtatctcaacataatcagtttgatgggctccaggagttatatcatcagaaatgtttttttagtatttctatgtaccagcaaaatattgactgaatatttctaaccaggtagatccttgctatacttgacaaactaaaggaggaaagggagcaacaagaaggaaaatatggggaggaagatgtggatggttcatgtatatcagaagaagaagatggtgactgggatgtagatgagccagatgaggaggacatcatttacgtaaaatagcccattgtcttctaggaacttggtcatcattcatccagaacacagcaggttgcgttctgcatacataatattgcctatcaaggtagatttgccagagcagacttcgatcttcttaatctacctgacagtttcttaccatcatttgattttattgatggacatgttaagcctgttctagggagaaagattaactggatgaagacagggatcgttgagagtgatctggttctaacagttagtccacattatgttaaggaactcacttatggcccagataaaggtgttgagttggatggtgtccttcgcacaaagcctcttgaaattggaattgtaaatggcatggatgtttatgaatgggatccttcaacagataagtacaccagcgtgaaatatgatgcaacaacggtaactgaagcaaaggctctcaataaagagaggttgcaagctgaagttggattgcctgtggactcgagcatccctgttatagtttttgtcgggcgtcttgaagaacagaaagggtctgacatactcattgcagccattccagagttcgtgggcgagaatgttcagataatcgttcttggcacgggaaagaagaaaatggaggaggaattaatgcagctggaagtgaaatatccaaacattgctagaggcatagcgaaattcaatgttccattggcacatatgatgtttgctgggtctgacttcattattgtcccaaattcccatctgttcatcacctggaggacttgttgacacggttgaggaggggtgtcaccggattccacatgggttctttcaatgtcgagtgtgaaactgtagacctagctgacgtgacggcagtagcgtcaaccatcacacgggcctagaacagtacggcaccccggcgttccaagaaatggttcagaactgcatggcgcaaaacctatcctggaaggggcctgcgaagaagtgggaggaggtgcttctgggccttggagtcgaggggagtcaagctggcatcgacgacgcagaggagatcgctccacttgccaaggaaaacgtagctactccatgacgcttggtgcctcggaaacacgcgttggtgataggaagcatcttctaggatcctcctggccttgtggctggagtgagttgttcagtcagacacagtttcgcctctacaacatcttcctcctcctggtggtggtccgaactccgaagcaaattccagtgataaaggatgaactaagaggtccatgtttctattgctagaccttttgcctcctaaatagacgatgtactgcgcttgtaacaagaacctcactttcgtgtcaagtaatatcaacaggtttcataatggtagtgaactgcactggaaaaacctgtaaacaatgcaaacaggattcaaaactaaaacaaatctgctattaaaagctgttattcaaaattgaaaaaaacaaaacctgttaattcagtattataactcagcaaacataaataaaaaaaaca

SEQ ID NO: 199119 - DNA, 2315 bp, Zea Mays
aaaagaccttctttgcctacacactcattgcattagcgcctacgcctaccgcaagtggaagcctatggatctcaagcaagccttctctggtacaatcttctgccttctgcttctattctgcgtgggctgcagatgtcggactttggaaatagaggccacccagacagcagccctcaaggttgatgcctcgccacagcttgcccggaagatccctgaaacactgtttgggatattttttgaggagatcaaccatgcaggagctggtggcatatgggcagagcttgtcagtaacagaggtttcgaagctggaggctctcatactccatcaaacatcgacccgtggtccatcattggagatgactcctccgtgttcgtggcgactgatcgtacatcatgtttcagtcgaaacattgttgctctgaggatggaggtcctctgtgatgactgtccagctggtggtgttggtgtttataacccaggtttttggggcatgaacatagaagatgggaaggcctacaatctcgttatgtatgttcagtccccagaaacaaaggatctaacagtttcattaacaagctctgatgggttgcaaaacttggcttcagctacaataacagtttctggcacatcaaattggacaaaagtggagcagaagctggttgctaaaggaaccaatagaacatcaaggcttcaaataacaacgaacaaaaaaggagttgtttggcttgatcaagtatcactcatgcctgaagacacatacaagggacatggtttccgcacagaacttatatccatgcttttggatttgaaaccacgattcttgagatttcctggaggttgttttgtagaaggtgactggctaagaaatgcattcagatggagagaatcaattggtccatgggaagagaggcctggacacttcggggatgtttggcattactggactgatgatgggcttggatattatgagttccttcagcttgcggaggacctgggtgctgccccaatatgggtattcaacaatggaataagccacaatgatgaagttgatactgtagctattgccccttttgtaaaggatgtattggacagtctggaatttgcaagggggagtgcagattcaacatggggctctgttagggctgcaatggggcaccctgaacctttcctggtcaaacatgtcgcaattggaaatgaagattgcgggaaaaagttctaccgtggtaattacctcaaattctacaatgctataagagaggcctatccagacattcagatgatttcaaactgtgatggttcatctagaccacttgaccatcctgcggatttgtatgatttccatgtctatactgattctaagactttgtttaacatgaggagcacatttgacagaacatctcgtagtggacctaaggcttttgtgagcgagtacgctgtctggagaagtgacgcgggtagaggcagtcttcttgcttcgttggctgaagctgctttcctcactggtctggagaagaacagtgatatcgttcagatggcaagttacgctccactcttcgtgaacgacaatgaccaaacgtggaacccggacgctatcgtcttcaactcctggcagcactatggaactcctagctactggatgcagacgattttccgcgagtcaagcggtgccatgatccatccggttaatatcagttcccggtactcgagttcgctggccgcgtctgcgatcacgtggcaggatgcagagaatagcttcctgagagtgaaggtcgtgaacttcgggtcggacaccgttaacctcacggtctccacgagcggactcggggccagcgtcaacgcgctgggatcaaccgccaccgtcctcacgtctggcaacgtcatggacgagaactccttcagtaacccgaacaaggttgcgccggtgaaaagccagctgagcaacgccgcggagcagatgcaggtcacgctggctcctcactccttcaccgccttcgatctggcgctggctgagcccaagcttgtggcggagatatgatgtgtgtgctgttagcgatcttgatcgataaaaaggctttgtactggtgtaccatgatacaggataacgtactacgtactgttgcttcatgaaataaaaaccacatcaggtttttgcttggtgttggttggtttcctttctcctgtacgtgtttgctttgcatgttcatcaccatctactgtacgggatgatggtacattgatggtgagaacgacagcctcctgtggattaaacaaattgtcgatggatgccttcatggtaaacaactttatcatgaatc

SEQ ID NO: 199120 - DNA, 576 bp, Zea Mays
atttgcttgctggatttggcatcggcttcagctcatcggtggtaggctacgatatgctgactccgcctgatcttgaaagagagttcggcctaacagggggaaacattttccacggcgcaatgggcttggattctctcttcctcatgaggcctgccaagggatggtcggattacagaactcctgtgaaggggctgtacctctgcgggagtggcgcacacccaggtggcggggtgatgggcgcgccaggacgcaacgccgccgccgttgttttggaggaccacgtgaagacaaagtaggtgtagtgtagctcgctggaaaccaagatggcatttttatcatcaggagaaaatctttgatgccatggtgctgttttagtgcctttcttttcttttcctttttggagaattattgtcgcaatccatagtcggagaacttatatcatgtgaagactcgtgtaacaaatcctcactaacatttctgtccctgtccggcgggaaattggaactgtggtaaaatgtggacccatctctttgaaccacaaaggccctatgggcttattttgtgatgaaacaacca

SEQ ID NO: 199121 - DNA, 2148 bp, Zea Mays
cggacataaaaaccagaaaaggggcgtcgaacctagggtttcgtctgtctcccgacgccgccgctaggctttgcgcctttgcctgcatcactcgctcattcggagcccctctcttcgccggcgtcgtaagaagagatggcagagcgtttgacccgtatcgccatagttagcgaggacaagtgcaagcccaagaagtgccgccaggagtgcaagaagagctgccccgtcgtcaagactgggaagctttgcattgaagtgacttcggcgtcgaaactcgctttcatttctgaggaactgtgcatcggttgtggtatctgtgtaaagaaatgcccatttgatgccattgaaatcatcaaccttccaaaagacttggaaaaggataccactcaccggtatgggcctaataccttcaagctgcacaggttgcctgtcccgagacctggtcaggttttgggccttgttggaacaaatggaattggaaagtcgacagctcttaaagtgttggctggcaagctgaaacctaacttggggcgcttcaaaaacccgcctgattggcaggaaattcttacatacttccgtgggtctgaacttcagaactacttcacacgcatattggaagataacttgaaggcaatcatcaaaccgcagtatgttgaccacatcccaaaggctgttcaagggaatgtaggacaagtgcttgaacagaaggacgagagggatatgaaagctgaactgtgtgttgatcttgaattaaaccaagttattgaccgaaatgtaggagatctttctggcggtgagctccagagatttgcaatagcagttgttgcagtgcaaaatgcggaaatctacatgttcgatgagccatcaagttaccttgatgtgaagcagaggctgaaagctgcacaagtcatcaggtccttgcttaggcccaacaggtgcttatggtgtggttaccttgccattctcggtccgagagggtatcaatattttcttggctggatttgttccaacagaaaatcttcggttccgagacgaatctcttacatttaagattgcagagactcaagaaagtgctgaggagattgagacatatcagcggtataagtaccctactatgagcaaaacacaggggaatttcaagcttactgttgttgagggtgaatttaccgattctcagattgttgttatgcttggtgaaaacgggacagggaaaactaccttcattagaatgctggctgggttgttgaagccagacacagtggaaggaactgatattgaaattcctgaattcaatgtgtcttacaagccccaaaagattagcccgaaattcaagaacaccgtgaggcatttgctacaccagaaaattcgggattcctatatgcaccctcagtttgtgtctgatgtaatgaagccactgcaaattgaacaactcatggaccaggaggttgttaatttatctggtggagagctccaaagagttgctatatgcctctgccttggaaagcctgcagatatctatctgattgatgaaccaagtgcttatcttgattcggagcagcgtattgtggcctcaaaggttatcaagagattcattcttcacgctaagaaaactgcatttattgttgagcatgatttcatcatggcaacatacttggctgacaaggtcattgtttatgaggggcgaccttctattgactgttctgccaatgcaccacagtctttagtatccgggatgaataaattcttatcgcatcttgacattacttttagaagagacccgaccaactataggccacgtataaacaagttggactctacaaaggacagggaacagaagtcggccgggtcctactactacctcgatgactaatgaggaagcacagattcttcttggagagccatatggcgcatagtctttcgagggcgcggagagtgcggaaacgagaagctactatgaagctaccacactacatggcatgagacttggttgcaggagtagagtgcgccggttataacttataaagcagagcatgctgtgttgatactggttttttttccctttttggcttgacctatatgaagaaaaggattggcgttaaaatggcaaagaagagaagcagcaacgaggcgaagaagggatacgtgcac

SEQ ID NO: 199122 - DNA, 2027 bp, Zea Mays
cgcaacgcaaggcatcgcatcgcatgtccaaggcaaggcatcgcattggtagcaaaggcagcaaccaaccaagcgggagcggccccttgcttggcaaccgcccgcgtgcctgcgtgcggggccgcgggatcgcagcgcaacgcgggcggcaccacctgcccaccacaccaccatccctccggactcccgtcgccgcgccgtacgtacgtgctgggtggcggcggctgttggctgttgccgccgctgccaccaccgccgccgcggcgccgtgctgtagctagcgatcgagcgagcaacgtagtaggcaggccgggcgcggctgtggccgtgcgtgacgacgaaggaagcaagatgaagcccggcggcggcggcggcggcggcaacggcgtgaccgcgacgacgacggcgatcccgccggacgacctccgctcgcggcgccgcctggccgcgctgctggcgccactcctgctcttcctggcggccgcgctctccttcccctccacgctccacctggccgccgtcccgctcccaacgccgccgatgacgacggtgccgcgccggaccacgcccccgcgggtcgccgtctgcctcgtgggcggcgcgcggcggttcgagctcacggggccctccatcgcgcgccacgtcctgcgcggcggcgcgttcgcggtccccgcggaccgccgcgacgccggccaggcggccgccaccacctcggtggacgtggacgtgttcctgcacgctccgctggacgccgacgcgtacaagctgcccctcctcctggcgcctgcagcgggggcgggcggcggcagcggcaccaccagcaggaatagcaacaacgtcgtcagcctcgccgccgtgcgcgtgttccggccggtgtacctcgatgagacgacgccggcggcgcgcgcgcaggtgctcaccgccgacaactcgcccaacggcatccagtacttccgtctggtggaagggtgcctggacatgatccgcgaccgcgagtcgcgaggcaacttcacctacgccgccgtgctgcgcacccgcctggacggcttctggacggcgccgttccgcctcgacgacgacgaccaactcctgtccgggtccgcctacgtcgtcccggagggctcgcgcttcggcgggctcaacgaccggctgggctacggcgggcggcgcgccacggaggcggcgctggcccggctgtcggcgctcccgcggctggccgccgccggccacgcggggctgaactcggaggcggcgttcgcggcgcagctggagctgtcgggcgtggcggcccgcgagcggcgcctcccgttctgcgtcctcagcgaccgcgcctacgcgttcccgccggcgcccgggtacggcgtgcccgtggcggcgctgggcagcgccggcccgctcagcggcgccaagtgccggccgtgccgccccgcctgcgccggcgcgtgcgcccagcgcagcgtcgcgcggctcgagcccgcgtggagctggaccggcggcgccctggagctgtgcgacgcgtcgggcccctgggagccggggtgggaggcgctgttcgacgccgccgccggccgcgacgccgccagggccaggcgggccgtggcgcggatgggcgccggagagtgcgtcgcccggatggaggcgttcagggccctcgcggaccggtgggacgcgcccagccccgccgagatgtgccggatcgggctccgatcccggtcgtcggcgtcgtcggcgccgcctgcgacggtcagtagtagtgacagcagtgcccactggcacgtaccgtcgttgccgaggcagagcaggcaaccatgagtccatatattgcacgcagacgcagcttcgcgatgcaaagattgttttactgttagttaattagctagctaggaacacgaattgaaggaaggggcaatacataggaacactccgctaggcgctagcaatcgtattagttcaatgtatactttatataagtcgtgttggcagactagatagatacacagtgaataaataatacatgcagttgaaat

SEQ ID NO: 199123 - DNA, 1084 bp, Zea Mays
cgcgcgggctggctgtcgggcgcgcggatgcgccggccgcggcgggcggtgacagaagagagtgagcacacggccgggcggaacggcaccggcggatggtgccgtcgcggacgcgtgctcactgctctatctgtcatccactctctcccccgctccgctccggtcgctttgccgccgatctgtcgaagcaccgcagctgactagccgccgtgatcaccgcgcgcaccggccggcgccgcgcttctggcactagtagctagctaggtggtgcaccgctccacacgcccatcttcttgttcgcgtcattgtatgccgcggaaccaccgcgcgctaggcgttggtgcccggcggtacgtcgtcgtcccgtctcccgtccgcaggaatttctatttctgggcggttcgtacgtacggatggtctccccctggatgctggatctgagctttttgggcgcgcgggtgtacctcctcgcacggatttgcccccctccccctgtcgcctggtacggaaggggatccacctgcgccccctgccaacttctcgggaaggtaaaaatcggtatgtttggtcgtcggtgtggaatgtgaattcttcgatgttcatcgtttggaagtctccagattctggatgtcgtcgccgccatggcagaaaggaattccaaaggctccaagagcacgccgccagcctgtcgactcttccatctcagttctcagatctgctcatcatcatcatcgtcatcattcactcctttctcctttgtcagatcctgttcatacagtccgtccctgtgtggtatagatggtcggcagcagccattatatttgtgatgtcacgtttctgctcgagcctctacagaatggcagggagtagggactaggtcgctatcgagacgacactgttccattcgtgacgtctcgtgcttatctcttcaatgagatctgccctgttcgtcttcagtcaatttttcgctcttggtgaagattcttgtagtccttgataacagctgtgtcgtctgcgtagaacgttgtatgtgtttcatcaacattttaatatacaatatatatatagagaaagattgtatatt

SEQ ID NO: 199124 - DNA, 1686 bp, Zea Mays
ccgagcgctacttcggccgtctttgttaacaccagagattaaaagatagcgccgtagcgcaatgaaggcaccatcgctactggttcggtgtttccctggcttgcttcccagcaaggacactagttgtgtgccaattgtgtccgagaaggatctgcagctaccatcactagccgttgaaataattccctcaaaggtacaacaccccctccctccccccacaggcccacacccaatttttggttattatttgtatattggactctgaaaggagatatatttttttttcttcttttgcagaaatcgtgttagtgctagtttaggaaccacaatttcccgagagtgctcacccgtacaaatatgctggagagaaggttgatgtgcaaggttttgatattttcaagggtaaagttagtgtagcagatatgatatccttctcaccttctgaagtagcatcatcaaaatatgatggagctctgaaaagctgggagaattctattactcttgtcaacattattcgaaatgagatccgtgatggccagttgagcttcaggggcaagcgggttctagagcttggatgtggatctggcgtctccgggattttttcatgcttgaagggtgcatccaccgttcactttcaggacatgaacgcagaaaccatacggtgcagaacaatacccaatgttcttgcaaacctcgagcaggctcgggacaggcagaacagaccatcagaagagagccccgtgacgccatcccggcagctcttggatccaaacgtgcatttctatgccggagagtgggatgaactcccgacagttctctcggctgtgccgccacccgcggcgccagcagacctcagcttctccgaagacgatttcatggatggcggcagcagtagtcatgatggaagcagtgtagtcgtcggccaggactactgccccagaagatctaggaagctctccggtagccgccgcgcgtgggagagggctaataacgagaccgaccaggcagatggcggctacgatgtgattttggtctccgatgtcccctacgcagctaactctctgaagaagctccatgcgcttatttcaaagtgcctacgccctccgtacggagtcatgtactacgtggcatcgaagaagagctcggttgggtccaacggtggcgccaggcagctccgagctctgatggaagagggaggcgtccttggcggccacttgttgaccgaggtgtgtgacagggagatatggaagttcttcttcaagtgagcagatccagggactgggagtgggaacggcaggggaaatggatccttcctgacgttgaaatgaaacccagttttttttttggtttctatctgcagcgatgtacatacataccgcgaggcgtatagtacgtagttccattaattctttggcagcagcagcagcaacgttgaagcttcaagaatcaaatacctgtagctgagcttgcacgaatccttcgccgcctttgtagagatctgtctgctatgtgctgtgctagtgtcgttctgttaaagtacagagagcaaattgtagtgacctttttgtgtatatcgaatacacggtgatggcaattcggccggtgcatggtatgtgtgagaaactcgcgcacaatttctacatgcatctttctacacgtcgtaccatgtgtgttgttggattggct

SEQ ID NO: 199125 - DNA, 2219 bp, Zea Mays
ataatttgagcaagttggacaaaactaccaaagtttatgtactcgctctggcagatacggcgtttagacgacccagttccggccgccgcggtgctccgagcctccgacggccgctgtggccctgtggcgggcggaagcaccctcgggcactagccttctgtttctcctcttcgcggctgacctgcaaagaatccccgaaaaagagttgaggagagtgtacgagttgggtaaagcagaggaagagatggtctgggtgttggaccccgtcgacacagtgcgcgggattcagaagcgttacatcttcgctgccgggacgtacaaggtcggccgcaaagattgtgatgtcattgttcaaactgacacatctatatcccgagtccatgcggagattgcaattgaaaagatggttgcctgggatccacattctggtgcacctgccagtccatcatttgttcgtgtaatcgaccgatcaaagtatggcacatttgtcaacaaagtacatggaacccagggcagccgtctgcataaagatgaagatatgatgcttactgatggggatgctgtgacgtttggaactggttgtcatttgttcccatagtggttttttttcatggcgcaaaatcgacacgaattgatccatcattacatgcagtcatgaaatctattggtgcatatgctactcgtaagtggagcaatgaatgtacacatgttcttgttgacggatcatgttcgttgacacctgagctcctcgatgcagttatggcaaagaagcagatcatgttgggagactggtttgaggcaatggctgaaaagaacatacacacagagatcccttcttgtacacagactcagcagctggagacactgatcatcaaattcttgtagttcctgcacgatatccattggaattcagcaagatacgtgtgctgtttactttgtcaaagatcagtgatattaagctatttgcagctatattgtctggccgcctggaagcaacttctattgaaccacctgctttcatcgttacatcctcgaattccacggatgccactattgtggcggattcggatgttgaaatggagacagcaacttctaatcctactggtgctgccaacaagtctcaacatcacaccgagaatatctctgacgatgaaaaacaaaccacaaatataaccaacgaagttgcaaggaagggtaacgttattcacccaaaacacccagagagcgttgaagatttgaaaccgatggaggaggatgtgaaggtcatagagaaaacagcaacgtacaggtccacgggtagagacgaggatgctcgcattctaagcaaggcgccaaaggatgaaaaattagacaccagcagggatggggcttctgatgtcatatttagtcagaatctggtcgtcagaagaagcctcccccagtcagctcctgccgcaccagcagaaatcggaggcgttaacttcaagcgcttcaggaagagggaaatggtgtctggaaacagcttcaaggacctcattccgtttgcgcgggaaccatacagagagtcggaccacgaacgtggcagcacgatgaccgatttcatgcgggaggagaagcggcagaaacaaatggaggccattgcggaggatctcttcaacaacgcaaagtccaagaaaagagcagccgctggaagttcgattcacaccctactcaccggccacagatgatgagagccaggcaggcagcaggagatcacctctatatgcgatctgcatgctcatctgttagccacggcgttagaagccgaattagtgtaggacggctgtcggatatggattgtacctgaggtcatgttagatatgaatggttctgagggaaatattagctgtgattttggcattacgcgtcgggcaagtttagcgttagtctagaatttgaccaaacaagaggattttctccggttggatgttgcgagcacgagggttttcttgggttgaatgttgcatggttagttcaccaagggctagtttgacaaccccattttacaacggaacgctacacctacgagattatgatgtttgatgtgttcagcagcctatcactatcagtgaccctcaatcctgttgttaccttgatgccaaacgatacgttcaaccgacgagacaatgtgcgcatccagttctcatggacttgggaggaccgatgatgctttgcctcagcttggcgtgtagctgcaaaac

SEQ ID NO: 199126 - DNA, 1240 bp, Zea Mays
caggcgccgtcggtctctgcctgtcttccacttccgtcgctcgcagtctctctcgcagaacagaaccagcaggcggcggcacacagcaagcagtcaagcaccagccgccaccgcccaccgccggtcgccagtcgccactgctccatggcgtgcccccaaatcccgtgacgggctgacggcgtgactcatcttcctcctctcctctctgtaacagtaaaaactgtgatccgctgtaatggctagtgaaggtgaagcttcacctccacgaaagcgtatgttgttggagttacctagtgaacatcaaagtcagaacttgacatcctcacctcatgcaaatacaactcaaccttttggtgtgtctgcatcatcatcaacacctgctgcaacatctcatgaacaaggtgcaaatccagaagaaggaattaatttggatgaggatgatccttcaaaattgaagcaagcaaagaagtccacttcaaatgtttggcagtattttgaaaagtatgaggttgtcgtagaggagaatggcaaatctgtgaagcaagtttgggccaaatgcaagtatccgggatgcaaaaacaagactagcaaagctagggctgaaagtagtagaggaacaactgcattttggtctcatttgaaaaattatcataagattgtgaaggggcaacaagagctcaaggcagaaaaggatcatggcacagtgcgggtggtcgtgtacttgatccatttcgtactcgccttgaccctaccatggtagaagcgcttgtctgcaccaaagattggataactggagcaagaaaaggttccaaggctaagagtgttgctattcctaatatggatgaagacctagatgatgatcatgatgatggaccagaggcatcgttgtaagcttgttgatgaagacctagatgatgataatgcaacatgaatgctctgaatgtttttattgtacttgttgcgtaatgctttgtgatcttgcgaacttgggacttgtggacttgtggctgtgtactttgtgatctgtgtgatgaacttgttatattgtgaacttgtgatctgtgtgatccacttattatattgtgaacttgtgatcaacttgttatattgtgaacttgtgatctgtgtgatccacttattatattgtgaacttgtgatcaacttgttatattgtgaacttgtgatattgaaaattgtgaacttgtgtttttgtgatatttgtaaactttgttgtattgtg

SEQ ID NO: 199127 - DNA, 1213 bp, Zea Mays
cacaaccacaagccatagtcaccaggtaaaaactgtgatccgctgtaatggctagtgaaggtgaagcttcacctccacgaaagcgtatgttgttggagttacctagtgaacatcaaagtcagaacttgacatcctcacctcatgcaaatacaactcaaccttttggtgtgtctgcatcatcatcaacacctgctgcaacatctcatgaacaaggtgcaaatccagaagaaggaattaatttggatgaggatgatccttcaaaattgaagcaagcaaagaagtccacttcaaatgtttggcagtattttgaaaagtatgaggttgtcgtagaggagaatggcaaatctgtgaagcaagtttgggccaaatgcaagtatccgggatgcaaaaacaagactagcaaagctagggctgaaagtagtagaggaacaactgcattttggtctcatttgaaaaattatcataagattgtgaaggggcaacaagagctcaaggcagaaaaggatcatggcacaggtatatgcattgtccagccatataaatatgatgaagaaaccagtttgagaaagttttatacagctattatcatgcatgagtatccatttaacattgctgagcatgaatactttgtggaattcattaaatcattaactttttaattgcatgaatgcttttagtgcgggtggtcgtgtacttgatccatttcgtactcgccttgaccctaccatggtagaagcgcttgtctgcaccaaagattggataactggagcaagaaaaggttccaaggctaagagtgttgctattcctaatatggatgaagacctagatgatgatcatgatgatggaccagaggcatcgttgtaagcttgttgatgaagacctagatgatgataatgcaacatgaatgctctgaatgtttttattgtacttgttgcgtaatgctttgtgatcttgcgaacttgggacttgtggacttgtggctgtgtactttgtgatctgtgtgatgaacttgttatattgtgaacttgtgatctgtgtgatccacttattatattgtgaacttgtgatcaacttgttatattgtgaacttgtgatctgtgtgatccacttattatattgtgaacttgtgatcaacttgttatattgtgaacttgtgatattgaaaattgtgaacttgtgtttttgtgatatttgtaaactttgttgtattgtg

SEQ ID NO: 199128 - DNA, 1702 bp, Zea Mays
tagcaacgtcacattcgcatggagatgtggtcatgtggagccgacagatgatggcctcggcaccggcggcgccggcgacatcgaccgatctcctcgtcgtcggccagtaacacgcattctctctccctgcccagctactgatttcccaaaaggcccaagcttcgttcttatcccctcagtcagctggacagctgtgtgcatggcaggctgtagtagtgtccaagcaaaacaggcacaggttcaggttctgcaaatttggatggagggaagggagggtattgcagttggccgcgaatccggccacggcagcatgttcagagcagcagacatcgccatggcggaggcgcaagaagcagcagcgaaaggctaccagtcctctccatcctcgccgtcgacgtcccccacgccgtcgccgccagcggctgcggctggccacgccggggacgccgccgcgactccgcttgcctggagcttgggcggcgagacgccgagtggggccgtggtggtggacaacggcacgcaaacggccgggcagagcgagcacgccagcctgagctccgggcgccgccggggccggccgcgcggttccgggaggcgccagatcctagccactctaggggaatggtacgcgctgtcagccggcgggagcttcacgcctcatgtcatcatcgtgggtactggggaggatgtggcggcgcgcatcatgtcgttttctcagaagggtccacgctcggtctgcatcctctctgccaacgggtcaatctctaatgtaacactgaggcagccggatgcatctgggagcaccttcacctacgagggccgtttcgagatcctgcagctgatgggctccttcacaatggccgaggaaggccggaggagaaccggcgggctgagcgtctctcttgctggccctgacggccgcgtagtcggcggcgtagtggctgggatgctgcgtgctgcaagtcctatacaggtgatcgtcggaagcttcctgcccaacagcctgaagcagcaccagaggaggaggatgagcatgcagcagccttcccccgttccggcgttaccagcacccgtggcacccccgccgccggtgcttaccgcggccaccccgatctcgcaggcaggtcccgggaacgggttccacgcaccgccgccgccgcactccgcagcacctccccagccccacgccaacgccatgaacctgaacgcgacgacgacgggcttcaccatggtcggctggcctgcaagctcgccgcagcccatggcgtacagggcttcacctgacatcaacgtcagcttgactccccaggagtaggatcgctgggctcgtcttcttcctttttctttcttttttttttctttccctgggctgacacgttttgggtgggagagaggaaacagagcgtggctgatgctctgaatgagattatggactaatctggtgttaattttagggtagggcgtgccaacttgtttgggttgctgctttcggccgtcatggctgtggatgttgatttagttctagttctagtcagtcagtcctattcagtttctgtctttctgcgctgcagctatttagcatgtcctgttattggtgaatcttttctgatgatagagggaggaatcatcttctgatgacagaggaatcagttctgttatttgtgaaaccgaagaagacgtgcgtcgtgaaaatgttgatttc

SEQ ID NO: 199129 - DNA, 1206 bp, Zea Mays
ttcgcatggagatgtggtcatgtggagccgacagatgatggcctcggcaccggcggcgccggcgacatcgaccgatctcctcgtcgtcggccagtaacacgcattctctctccctgcccaggggaatggtacgcgctgtcagccggcgggagcttcacgcctcatgtcatcatcgtgggtactggggaggatgtggcggcgcgcatcatgtcgttttctcagaagggtccacgctcggtctgcatcctctctgccaacgggtcaatctctaatgtaacactgaggcagccggatgcatctgggagcaccttcacctacgagggccgtttcgagatcctgcagctgatgggctccttcacaatggccgaggaaggccggaggagaaccggcgggctgagcgtctctcttgctggccctgacggccgcgtagtcggcggcgtagtggctgggatgctgcgtgctgcaagtcctatacaggtgatcgtcggaagcttcctgcccaacagcctgaagcagcaccagaggaggaggatgagcatgcagcagccttcccccgttccggcgttaccagcacccgtggcacccccgccgccggtgcttaccgcggccaccccgatctcgcaggcaggtcccgggaacgggttccacgcaccgccgccgccgcactccgcagcacctccccagccccacgccaacgccatgaacctgaacgcgacgacgacgggcttcaccatggtcggctggcctgcaagctcgccgcagcccatggcgtacagggcttcacctgacatcaacgtcagcttgactccccaggagtaggatcgctgggctcgtcttcttcctttttctttcttttttttttctttccctgggctgacacgttttgggtgggagagaggaaacagagcgtggctgatgctctgaatgagattatggactaatctggtgttaattttagggtagggcgtgccaacttgtttgggttgctgctttcggccgtcatggctgtggatgttgatttagttctagttctagtcagtcagtcctattcagtttctgtctttctgcgctgcagctatttagcatgtcctgttattggtgaatcttttctgatgatagagggaggaatcatcttctgatgacagaggaatcagttctgttatttgtgaaaccgaagaagacgtgcgtcgtgaaaatgttgatttc

SEQ ID NO: 199130 - DNA, 911 bp, Zea Mays
taacactacacagaaaatcggcaaagggccgtttcgagatcctgcagctgatgggctccttcacaatggccgaggaaggccggaggagaaccggcgggctgagcgtctctcttgctggccctgacggccgcgtagtcggcggcgtagtggctgggatgctgcgtgctgcaagtcctatacaggtgatcgtcggaagcttcctgcccaacagcctgaagcagcaccagaggaggaggatgagcatgcagcagccttcccccgttccggcgttaccagcacccgtggcacccccgccgccggtgcttaccgcggccaccccgatctcgcaggcaggtcccgggaacgggttccacgcaccgccgccgccgcactccgcagcacctccccagccccacgccaacgccatgaacctgaacgcgacgacgacgggcttcaccatggtcggctggcctgcaagctcgccgcagcccatggcgtacagggcttcacctgacatcaacgtcagcttgactccccaggagtaggatcgctgggctcgtcttcttcctttttctttcttttttttttctttccctgggctgacacgttttgggtgggagagaggaaacagagcgtggctgatgctctgaatgagattatggactaatctggtgttaattttagggtagggcgtgccaacttgtttgggttgctgctttcggccgtcatggctgtggatgttgatttagttctagttctagtcagtcagtcctattcagtttctgtctttctgcgctgcagctatttagcatgtcctgttattggtgaatcttttctgatgatagagggaggaatcatcttctgatgacagaggaatcagttctgttatttgtgaaaccgaagaagacgtgcgtcgtgaaaatgttgatttc

SEQ ID NO: 199131 - DNA, 3178 bp, Zea Mays
ctcatcgctgggccccgcgatactggaccggccgagccgagcccacgcgcagtggcagcagatcgagccccagttccagcagagtcccactccgccacgggaaaaactcgctttcgaaatctctcctctcctgtccaaacccaacgaaatctgcgcgattcataacgaatcgccatagttaatcgaagcattaaactggggaaaaacagagggagaagagaagataggggagagagggagagggagagggagagggagggaggaggccatcgcatccgccggctggtcctgatcccggtcccgggtcgtatttgggcgccgccgcacgcagcaggaggaagacatcagcgcggggcgaagcgtcgagcccatctccgccgcgggaaccactggcatttaggatggtggacaagaatgatgggtcagagggtattaaattcaacacatcaaacctcattcaaacaaccgaagaggttgcaagagcgtttatcgctgcggcctcggctgccactgcacagtctgcacggacatctgtagtgtattcatccaaagatgagagtggcagcccaatgcagaagcttcagcagcatttttcgaaaatcatgaaagggttttcgtccgcaccagacctgtcaggaacttacaatccggaagtccttacaacgcaaaagcggcagtggtcgaggtaccagatgaagtcattgggtgataggtgcatcagagaaccatcacatctgttcgagagcatagtgattgttgggcttccacctcacgcagatatccaggagctggaaaacattgcattagggagaaatgatgaagatggaaaaagatcaaaaaatttatttggcaatagtcaccaccaagttcacgcaataacaaatttggaaccacaggttctttttgcataccctccagagaagcctcttccactcaagtacaaggataccctctctttctgccttcccggaggtgtacaggttcatgctgtcgaacgtactccttcgttcagtgagctgaatgaaattctcctgggacaggaacagcttaaagaaagcaaccaatcatttgtgttccgcctacaggtggctgataactctgcattatatggatgctgtgtgcttgttgaagagatcgtacagagaccatcaaagttggtatcgatgctcatgaatgaaaaacccgtctttccacgccggagtcgatatgtgataactacgccccggtgttattgcatcctatccaggcttccattctttgaactacattttggggtgttgcagagtattcttatggaagaacgtcttgaatggctcacagatggtgttagcatgctaacttccttatcgcttgaggaatcctgtgagaacgatatctgtgaaggaactgcagttacagcacagaaacattatttagatagcaacacaactgatgtggataaatcatctgaatctagcaatggagtttcgtcaacggagctgtctgatactgacagcagttctgggtgtagagaaaaccagcttgactttgtttctaaagaacaacagcaaaatagttcttgtgaagaacagagtaattttaaaagagaaatagtcacttgttctgatgcttccgaagtgtctgatcattttgttccagaagatacatcatctgatcagtctggagttaagcaccatgaacttcattctgcaccaagtatcccggatgaatctggtgcaaggaactgtgatgattccccgaaggaaaatgtggatgatgaggagcttgatctcttcattatagatactattttaccacttatgcgatctcgcctttgtgaagattgtgaatcatctccaagttcacagggttctccttctgaaggcagaaattttgacacccaagaatcggattcagaggagccatcttccattggtgatggagacttagttaaacacaacaacatgggcagtggcatccatttgtggatgcctcaggttggaacatgtaatgacactttttgctgccgcactcctggagaaacagattgttattgtctgttctaatctgggaatgttatcggcttcagttttgtccatcttacctctaatacgaccgtatcagtggcagagtctcctcatgacggttttgcctaatgacatgatggattttctggatgccccagttccatacatagtgggcgtacaaaacaagacatctgatgtgctcaaccggctaacaaatgccgtagtcattgatgccaacaggaatcagattaagtcctcttcagtcccacaactaccacagcacagagagttgctttctgccttgcgcccgtatcattcaatacttgttggcgaaagttatcttgcaagaaaacgccctgtttatgaatgcacagatgcccaggtggaaggggctaaaggtttcttggcagtgcttagagactaccttgacacactatgctcgaacttgagatctcatacaattaccaatgtgcaatctaacaatgacaaggtttccttacttttaaaagagagctttattggttctttcccaagccgggataggccttttatgaagctttttgtggacacccagttgttctcagtacatacagacctagttctctctttttatcagaaggactaagtgtctggcagacttgaatgtctgcctcgtcttgccaagcctttagatgttgagctaaactgtacatatcggcagctcagtgtttgtgcaaagagctcgaaggagaagccatataccgtcagaaaaaagtggtagattgccaggatccagttatgggtattgaagaagaatgcttgtagctgcttaagttagtctggtgcggtaatccaaggttttgttggctgtagttggtgcccccataagaagccttgtatggattgttcctgcaaatgcctgtgctgtaacggaaccgtgtctgtggcaaaatctccgaacatgaatgcgtccatttggcaaatctaagcgtgcaatgggacatcgaagaaaatgtaataattcgtggtactccctccaggccgaatcagttgacgctatggtatttaataacggtcgagctttcttattttaaactggatttgtagaaatattaacaatatttgtattattagaaaagtttattactaaaacagattcagagatttatataacaatactagttatgtgcttt

SEQ ID NO: 199132 - DNA, 3422 bp, Zea Mays
ctcatcgctgggccccgcgatactggaccggccgagccgagcccacgcgcagtggcagcagatcgagccccagttccagcagagtcccactccgccacgggaaaaactcgctttcgaaatctctcctctcctgtccaaacccaacgaaatctgcgcgattcataacgaatcgccatagttaatcgaagcattaaactggggaaaaacagagggagaagagaagataggggagagagggagagggagagggagagggagggaggaggccatcgcatccgccggctggtcctgatcccggtcccgggtcgtatttgggcgccgccgcacgcagcaggaggaagacatcagcgcggggcgaagcgtcgagcccatctccgccgcgggaaccactggcatttaggatggtggacaagaatgatgggtcagagggtattaaattcaacacatcaaacctcattcaaacaaccgaagaggttgcaagagcgtttatcgctgcggcctcggctgccactgcacagtctgcacggacatctgtagtgtattcatccaaagatgagagtggcagcccaatgcagaagcttcagcagcatttttcgaaaatcatgaaagggttttcgtccgcaccagacctgtcaggaacttacaatccggaagtccttacaacgcaaaagcggcagtggtcgagggtgataggtgcatcagagaaccatcacatctgttcgagagcatagtgattgttgggcttccacctcacgcagatatccaggagctggaaaacattgcattagggagaaatgatgaagatggaaaaagatcaaaaaatttatttggcaatagtcaccaccaagttcacgcaataacaaatttggaaccacaggttctttttgcataccctccagagaagcctcttccactcaagtacaaggataccctctctttctgccttcccggaggtgtacaggttcatgctgtcgaacgtactccttcgttcagtgagctgaatgaaattctcctgggacaggaacagcttaaagaaagcaaccaatcatttgtgttccgcctacaggtggctgataactctgcattatatggatgctgtgtgcttgttgaagagatcgtacagagaccatcaaagttggtatcgatgctcatgaatgaaaaacccgtctttccacgccggagtcgatatgtgataactacgccccggtgttattgcatcctatccaggcttccattctttgaactacattttggggtgttgcagagtattcttatggaagaacgtcttgaatggctcacagatggtgttagcatgctaacttccttatcgcttgaggaatcctgtgagaacgatatctgtgaaggaactgcagttacagcacagaaacattatttagatagcaacacaactgatgtggataaatcatctgaatctagcaatggagtttcgtcaacggagctgtctgatactgacagcagttctgggtgtagagaaaaccagcttgactttgtttctaaagaacaacagcaaaatagttcttgtgaagaacagagtaattttaaaagagaaatagtcacttgttctgatgcttccgaagtgtctgatcattttgttccagaagatacatcatctgatcagtctggagttaagcaccatgaacttcattctgcaccaagtatcccggatgaatctggtgcaaggaactgtgatgattccccgaaggaaaatgtggatgatgaggagcttgatctcttcattatagatactattttaccacttatgcgatctcgcctttgtgaagattgtgaatcatctccaagttcacagggttctccttctgaaggcagaaattttgacacccaagaatcggattcagaggagccatcttccattggtgatggagacttagttaaacacaacaacatactgcagtgggctaaggcaaaaaaatatggttctttgcaagttgtctgtcaatactaccagttacagtgtcctgctaggggttcaacacttgcttttcatcccttggagcatttgcattctttgagttttcaccggcctggtgaaacagttcttcacattgctggttctactattgagcttaggtcacgtgatacaagcttagaggttgctgagatgcgcaatgcactctttgctgaggaggaatcgactgctttgtccacatgggcagtggcatccatttgtggatgcctcaggttggaacatgtaatgacactttttgctgccgcactcctggagaaacagattgttattgtctgttctaatctgggaatgttatcggcttcagttttgtccatcttacctctaatacgaccgtatcagtggcagagtctcctcatgacggttttgcctaatgacatgatggattttctggatgccccagttccatacatagtgggcgtacaaaacaagacatctgatgtgctcaaccggctaacaaatgccgtagtcattgatgccaacaggaatcagattaagtcctcttcagtcccacaactaccacagcacagagagttgctttctgccttgcgcccgtatcattcaatacttgttggcgaaagttatcttgcaagaaaacgccctgtttatgaatgcacagatgcccaggtggaaggggctaaaggtttcttggcagtgcttagagactaccttgacacactatgctcgaacttgagatctcatacaattaccaatgtgcaatctaacaatgacaaggtttccttacttttaaaagagagctttattggttctttcccaagccgggataggccttttatgaagctttttgtggacacccagttgttctcagtacatacagacctagttctctctttttatcagaaggactaagtgtctggcagacttgaatgtctgcctcgtcttgccaagcctttagatgttgagctaaactgtacatatcggcagctcagtgtttgtgcaaagagctcgaaggagaagccatataccgtcagaaaaaagtggtagattgccaggatccagttatgggtattgaagaagaatgcttgtagctgcttaagttagtctggtgcggtaatccaaggttttgttggctgtagttggtgcccccataagaagccttgtatggattgttcctgcaaatgcctgtgctgtaacggaaccgtgtctgtggcaaaatctccgaacatgaatgcgtccatttggcaaatctaagcgtgcaatgggacatcgaagaaaatgtaataattcgtggtactccctccaggccgaatcagttgacgctatggtatttaataacggtcgagctttcttattttaaactggatttgtagaaatattaacaatatttgtattattagaaaagtttattactaaaacagattcagagatttatataacaatactagttatgtgcttt

SEQ ID NO: 199133 - DNA, 2751 bp, Zea Mays
gttacttttaaccccttccatatgaaaccgttggatctggattagatgctctggatagtttgattgcacgcttgcaccaaaatgagtgattgcacagaatatgtcctccttataaggccttgttcggttattcctattatacatagatttgatgggactgaaaaaaatttaaaagaacttttacttatttgggatttaaacccatcaaatctcactcaatccacatggattgagccagagaccttatgccaatgccatgcgcgcactgccatgcccactgaagcaacgagcctctctaactcccagcccgtcgccggcgctgccttcctctaccgtctctctcatccatccctctctgccctcctcctatgcccccctccccaatgcctccgcggcggagctccgccaagcgacaagatttgtcccccctcccctgccaacgcctccgttgagcatcggacgcgaatctcctcaccgtccgcagcttgttcggccgtcgactacgtcccctcccgggactcatactagtggggaaatcatgatgtccgaactactagtcggtggctaaatgttgtgtgatcatcttgttttgtattgatcagtgcaatggagaccttaaagtttgggattagtagatggtttggtccttaagcaagatgtcctcggtcaataccgatggaaactctggttcctacagcagcaaatcagcctaccaaactttttcttggggactatcaaatttgcccccaggagaagaacttgatcgcatgtttggacaggaccccctggttcttccggctattgagggaagacagtgtgggatggatcctggatgactagcattacatctatcatacatttgtccagttctctggagttttttatcctttgttttgtaccttcctatgtttctccatttgtcaaggcctaaattccatctttagttacttctggaaatttttctcccatttatttgattccgatttctggataaaagttgctccttggtaatcatgaggagggctctgaaaagatccttgctcagatggtcgccaaggattgtacaatctcaagaattttgtcagtgcttatggttgatttgggctcttctaccagggggtagttgcagcagtcgctagccaagaagatcattatagtttgctgctttataaggtgacacaagggttcctgggtttctcagtctttgactgagagcttctttgtgcaataccatggtgcggtttttcctcaccggccgagtatctgtttttgaaggtagggtttgtacttttcttcttttttaacaaagagataaattgctcgcctttgtgttccagaagaaaaatctcagcaattgtcaaacttcagtttttagttaaggttaatagataccaaacaaaggatactatactattgtttaatacatcgtatattatttggctagtgccagcctttgggctatagaatcctctaccaaataagtagcagatttatttggatggaaggagtgtatctcttattaaatacatacgacaaacatttaaggaacgaacgtcacaaggttatcaatagtaagcttgactgaccttgagttgaacaaaaactttcatgaagacgtatctttggcaatgaattggacaggtaaggttcaagaacacttcagctaaataaatgagtagagttaacatatatctttctcaagggatgggggactaggggagtcactagcattgattgtgcaccttgaatccctttcttttcttatataaggaggtatcctctacactaaactacgaacaagtatcagagacactctctgtcaggtgtctgcaatggacaacctcaaaacccattctgaatatgccgatcaacctcaggggccacaagcaaatgccgtttctttcgctttaccaacaggtcaggtcttagacttagatagtcatatgattggccaacagcacacgaatctgtcatcattctggttctcccttgagcagcacaggctgcagttggatcaggcccttcaactccataaccaacagttgcaggtgtcactgcagcagcaaatatctatgcagaactcaactctactgaaccttgtggaatctatgacaagagatgtgctgatgcaaaagaatgatgagatagccagcctgcgagtagagttgcagaggaaccaagaggatctagaaacaacactgcatgacagagatgagtggatgaaggtcgctatggccgcttatgaaattaatcagacacttatccgcatgcttcgtaccgtgcagctggaagcgaattctcatgtttcatctaatgatctagatgctccaagttatagtgaagcatcgagcatggcgaggacagcattggagacagcacagcccaatctgatctgcaaggtctgcaactctggtaatgccggcgtacttatgttgccatgccaacacctctgtgcatgtaagccgtgcgtagcctggcttgcgacatgtcctatctgtggtgctgtgaagactgatgctatcgaggctcgatttgtttataagaagtaaaaacgccaaagcagcaatccgaattcgtttataagagcatgtcagctttcctttttttcgtgttaggtgttataggctgtagccttgttctgttatgcattctggtataatgttctggtagtcttcatgccgatgccatgtttctggattctcaaaatgttttgatatagttgccatgttgtcttcggttactatatttttc

SEQ ID NO: 199134 - DNA, 3611 bp, Zea Mays
gttacttttaaccccttccatatgaaaccgttggatctggattagatgctctggatagtttgattgcacgcttgcaccaaaatgagtgattgcacagaatatgtcctccttataaggccttgttcggttattcctattatacatagatttgatgggactgaaaaaaatttaaaagaacttttacttatttgggatttaaacccatcaaatctcactcaatccacatggattgagccagagaccttatgccaatgccatgcgcgcactgccatgcccactgaagcaacgagcctctctaactcccagcccgtcgccggcgctgccttcctctaccgtctctctcatccatccctctctgccctcctcctatgcccccctccccaatgcctccgcggcggagctccgccaagcgacaagatttgtcccccctcccctgccaacgcctccgttgagcatcggacgcgaatctcctcaccgtccgcagcttgttcggccgtcgactacgtcccctcccgggactcatactagtggggaaatcatgatgtccgaactactagtcggtggctaaatgttgtgtgatcatcttgttttgtattgatcagggtgtctgacgatgtatttgaagcacctcaacaaaagctggagtgaatttgaaccactaaataattagaaaggtcaccctgctgcttgatgtctccctcatgtaacaccttaacgtttcttctttgcccctcccctgttttcttttgcttcccctgcaacctgtcagacaccgatcaagcaggtagcatgtagcctatgtaatccctggtcttttaggtctggcaccattcataccctttcccaaacgtaaaataaggtgggattgcacttgcacctaggagtggtaatgacctctaaattttatactataaaatttaagaatcggatcgggctctatttctattcatttttgaactaaaactaattaagggctcaaacaaattgtgaaggaacatgtggatcattcatttgagggctcaaacaaaaaatcatttgggatccaagtttttatttctctgggtcattcatttgacacaaatacctgtattttggagcaagaaaacgtggaacaaaaatgataacctactagaattacctaatgtgtacccacattcacctctactatcatatcgtcagtggagtgcaacatggttgtgtgttccgttctgcggtttaaacatagattgagtttcacttaatggttcatgattctagttgtcatgtggaattcggcgcctaagcagttcatgtcttgctcttctctactatgtactctagtacttgtcatggaacataactaatcaatctttattaaaatgttgtgaccaatatatattttaattaagttgggtttgctactttatattttgattgacaccttattcgtggttggatggctgatatgagggcgcctttacagtgcaatggagaccttaaagtttgggattagtagatggtttggtccttaagcaagatgtcctcggtcaataccgatggaaactctggttcctacagcagcaaatcagcctaccaaactttttcttggggactatcaaatttgcccccaggagaagaacttgatcgcatgtttggacaggaccccctggttcttccggctattgagggaagacagtgtgggatggatcctggatgactagcattacatctatcatacatttgtccagttctctggagttttttatcctttgttttgtaccttcctatgtttctccatttgtcaaggcctaaattccatctttagttacttctggaaatttttctcccatttatttgattccgatttctggataaaagttgctccttggtaatcatgaggagggctctgaaaagatccttgctcagatggtcgccaaggattgtacaatctcaagaattttgtcagtgcttatggttgatttgggctcttctaccagggggtagttgcagcagtcgctagccaagaagatcattatagtttgctgctttataaggtgacacaagggttcctgggtttctcagtctttgactgagagcttctttgtgcaataccatggtgcggtttttcctcaccggccgagtatctgtttttgaaggtagggtttgtacttttcttcttttttaacaaagagataaattgctcgcctttgtgttccagaagaaaaatctcagcaattgtcaaacttcagtttttagttaaggttaatagataccaaacaaaggatactatactattgtttaatacatcgtatattatttggctagtgccagcctttgggctatagaatcctctaccaaataagtagcagatttatttggatggaaggagtgtatctcttattaaatacatacgacaaacatttaaggaacgaacgtcacaaggttatcaatagtaagcttgactgaccttgagttgaacaaaaactttcatgaagacgtatctttggcaatgaattggacaggtaaggttcaagaacacttcagctaaataaatgagtagagttaacatatatctttctcaagggatgggggactaggggagtcactagcattgattgtgcaccttgaatccctttcttttcttatataaggaggtatcctctacactaaactacgaacaagtatcagagacactctctgtcaggtgtctgcaatggacaacctcaaaacccattctgaatatgccgatcaacctcaggggccacaagcaaatgccgtttctttcgctttaccaacaggtcaggtcttagacttagatagtcatatgattggccaacagcacacgaatctgtcatcattctggttctcccttgagcagcacaggctgcagttggatcaggcccttcaactccataaccaacagttgcaggtgtcactgcagcagcaaatatctatgcagaactcaactctactgaaccttgtggaatctatgacaagagatgtgctgatgcaaaagaatgatgagatagccagcctgcgagtagagttgcagaggaaccaagaggatctagaaacaacactgcatgacagagatgagtggatgaaggtcgctatggccgcttatgaaattaatcagacacttatccgcatgcttcgtaccgtgcagctggaagcgaattctcatgtttcatctaatgatctagatgctccaagttatagtgaagcatcgagcatggcgaggacagcattggagacagcacagcccaatctgatctgcaaggtctgcaactctggtaatgccggcgtacttatgttgccatgccaacacctctgtgcatgtaagccgtgcgtagcctggcttgcgacatgtcctatctgtggtgctgtgaagactgatgctatcgaggctcgatttgtttataagaagtaaaaacgccaaagcagcaatccgaattcgtttataagagcatgtcagctttcctttttttcgtgttaggtgttataggctgtagccttgttctgttatgcattctggtataatgttctggtagtcttcatgccgatgccatgtttctggattctcaaaatgttttgatatagttgccatgttgtcttcggttactatatttttc

SEQ ID NO: 199135 - DNA, 2246 bp, Zea Mays
attgcatttgcattcacccggacgtggggaaatcatgatgtccgaactactagtcggtggctaaatgttgtgtgatcatcttgttttgtattgatcagaaattgctatcctggcttacagttctgttttgaaaatgaaatgagaatgtgatctgaatgttaatagtttgctgtgggacactcctttttttgcggaattttctcaagaacactgttatagtgtaaattggccatcaaacacagtacattcgatcagtgtcatacaacaaataaaatagatttttggaagttttactataggacaccaataatattctgaaccataacagtgtctttaagtaacagccattgtttatataagtgtcccactgtaaattttgccttgttaaaataattatattggtgggctgtggttaccacaatttgtttgcgacataactgagatcactatttgttctctaacttttctccagcttcactagcctgtttggaaaaatgttattattctggttgtggtctaaattttatgcatcatattccataacttaccaatttgtgatcaaggaacaacttcaacaatatattgggacagttgttaaatattattgtccactccataaaatattacattgaaactgtgaacatcagtttaataacactgaaaagaactctttcttctgagttctgattgtatagtctttggataattatgcccctgggtattcttacctacaccctcgtctctccacatcaccttacccatggaaggagggaagtagagactttaagctcaagaggggatgcttatgttctctattaacctgtttttcatatctaatgtaattgtgtgttagtattttttgtggatgatgacagggtgtctgacgatgtatttgaagcacctcaacaaaagctggagtgaatttgaaccactaaataattagaaaggtcaccctgctgcttgatgtctccctcatgtaacaccttaacgtttcttctttgcccctcccctgttttcttttgcttcccctgcaacctgtcagacaccgatcaagcaggtagcatgtagcctatgtaatccctggtcttttaggtctggcaccattcataccctttcccaaacgtaaaataaggtgggattgcacttgcacctaggagtggtaatgacctctaaattttatactataaaatttaagaatcggatcgggctctatttctattcatttttgaactaaaactaattaagggctcaaacaaattgtgaaggaacatgtggatcattcatttgagggctcaaacaaaaaatcatttgggatccaagtttttatttctctgggtcattcatttgacacaaatacctgtattttggagcaagaaaacgtggaacaaaaatgataacctactagaattacctaatgtgtacccacattcacctctactatcatatcgtcagtggagtgcaacatggttgtgtgttccgttctgcggtttaaacatagattgagtttcacttaatggttcatgattctagttgtcatgtggaattcggcgcctaagcagttcatgtcttgctcttctctactatgtactctagtacttgtcatggaacataactaatcaatctttattaaaatgttgtgaccaatatatattttaattaagttgggtttgctactttatattttgattgacaccttattcgtggttggatggctgatatgagggcgcctttacagtgcaatggagaccttaaagtttgggattagtagatggtttggtccttaagcaagatgtcctcggtcaataccgatggaaactctggttcctacagcagcaaatcagcctaccaaactttttcttggggactatcaaatttgcccccaggagaagaacttgatcgcatgtttggacaggaccccctggttcttccggctattgagggaagacagtgtgggatggatcctggatgactagcattacatctatcatacatttgtccagttctctggagttttttatcctttgttttgtaccttcctatgtttctccatttgtcaaggcctaaattccatctttagttacttctggaaatttttctcccatttatttgattccgatttctggataaaagttgctccttggtaatcatgaggagggctctgaaaagatccttgctcagatggtcgccaaggattgtacaatctcaagaattttgtcagtgcttatggttgatttgggctcttctac

SEQ ID NO: 199136 - DNA, 2144 bp, Zea Mays
gaggtttcctccaatcgatctgtacgccctccccaccggccggtcgcgcacctccaccaacctgctcgctccgtccgtcgccgtcgccgacccgccaccatctccgccctccaaaaccctactacccctgtagcctgcagccccgtgcccgccatggctaccaacggcagctccgtgagggttcgggacacggagagcagcctggagaaggtgaagcggcagctgtcgtcggggtccgggaggtacctgctgcaagggcccctgctcaagcgatctgagacgagggatgccaaaatacgatggctgctgcttctacattgggactcctcaaaagaaggaatactttctttgcgctgaaactcctggtgctgcaaaagcttgggtatctacattacagtaagctttctgacccctgaccagttagtacattccacagttttgcttgtttcgcacttctgtctcttgtatattgataggcagagtacctagcaaacctttatctcagtgcaagaatgcagactccaatacgagagtggagtgttatccatttgagctactcaatgttgagttatatccctgttgctgcatcctgactatagttttgtgtgctttgctgctatgcgcaactcagttagtcttacgagctcataaagaggcagtaaattctttggctgggaatggctctccagctacattaggcacagttgctactgcagttgctaatgctaatgcaacagccatggaggctaccaaggagatagaagctgcactaaaggtttcaatgagggcagcccttgggttgggtacaaataactccaacgatggccaacttgatgacctaacaatcatgaaggagactctacgagtgaaagatgaggaattgcaacatttggccaaggatatacgttctcgagatgctacaataaatgaaatagcagacaaactaacagaaaccgcagaggctgcagaagctgctgcttcggcagctctcacaatggatgaacagaggcgacttttgtgtttggagattgagcgactaaaacaagccttggaaagacaagtagaacaatcaatgctgaagcttagacagtccgaagagaaggtcatcagcctgagcaaagagaaggagcagttgatgaaggaaagagacgctgcgtttcaagaggctcatatgtggcgcgtcgaactaggaaaagccagggagcaagcagtgatacaggaagcaactattgcccggaccgaggagaaggcaagagtctccgaagcagatgctgcagctcggattaaggaagctgctgaaaaactgcgtactgttgagaaagaaaaggaggagcttctagccctggttggtgttctccagtcacaagtccagagagagcagagcagcacaaagcaagtgtgtggggagaggtctgagtcgtgttcaggcgccgacagcccccctcccctgacaaagcatgttgatgcatcggacgatgacgtggacaaagcctgcgtgagtgactctagatcagtgctggtgtcgagcgacagcactgaggtccagctggctgtggacggggtggacatccgtcctgtcggcgacgcagagtggggtggcttccagcagtcagatgcgctgatcgctgatgtccgtgaggtctccccagaggcagatggaggcagcttggacattcctgtggtcaaccctccaccgatcagtgatcatgttcagggaggcgcaactcatccctgaaggcctgaggttgctggcttgctgctgccttccgagattggtgtggttgctgggaaaccgatagggatgtctaaatctggagagtcgccgttgagggtgcatattgcatcgatgcgattgtatgtccattgaggtatacgattgaataaaaaggtagtaactgtgtctggctgtgggattgtaaatattcgcctcattcccttttgctacggctattcacgtgtgatattttagctcaggtggatggattgtgtgatatcctggtcaagatttaataaaattaatagagtatttatactaataagatatatcttttttaagcatgtctcgaaaaaatctctaagttaaacctctaagttaaacgtgttttggaataagtgattaatcggaaagtttaccttggaaagtt

SEQ ID NO: 199137 - DNA, 3024 bp, Zea Mays
agggaagagcgccagggtggtgaactgcgtcctcgcgctgaagtcatactgtgactggaagcaatgcggtggcaccgggccgtggaagtacggggggaatcttaagccatcagtgtccggcaagtccttcgggaggaagaactctgagccgttccagaggagccaatcgatcaatgaaggtgaagtgccctatgaggaagctgggttcaatggctacgctcattttgattccagcgacatgtcaacatggcgcccccttaaaatgttggtcagtgcagttttgtccgacaaaaggccagatgaagttccacaggtatactaatttgcttcactactttttgtaagttacctgttcaatggacttatataatcgcttttattgttttttatcctatgggattaccagttccatgatgtttttattctgttgtttgtatgcagctcttggagtccatgctgagcaaacttgttgaagaatttgaaaatcgtctaaacagccaaaatgaactggtcaaagcggctctaaaaaatggtattgataacaccagatccttttcaaaatcaaaggttctggttgagaccactcctaatactagtgggagaaagatggatacagcagatatttactgtaaccataaacaaacaaaaaaagtagcatcaagtgaattggcactgaagcaatattcaattctacaacaacagtcaaagaatgttgaggaacttaagagtgatttaataaatacaagggatggtatggagtatatgcaaatgaagtacgctgaggatctcaaccttcttggcacctgtttagcttggctcatgctgcttctggttatcacaaagttcttgaagaaaatagaaaactatacaaccaggtgcaggatcttaaaggaagtattagggtatattgtagggtgcgtccctttttgccgggacaagcaagtccgtccactgtggcttccattgacgagggcaacataacccttgtcatcccttccaagtctggaaaggaagtacggaaaacttttagcttcaataaggtttttggctcatcagcgacacaagatgaggtgttcttggatactcaaccccttattcgctcggttcttgatggatacaatgtatgtatctttgcatatggccaaactggatcagggaagacatacacgatgagtgggcccaaaaacatgactgagcaaacccaaggtgtcaactatcgggcacttggtgatctatttaagcttgctgaacaaaggaagagaaccttcatttatgatattgctgtgcaaatgattgagatttacaatgaacaagtcagggacctccttgtcactgacggtctcaacaaaaaattagagattcggaataactctcaaaatgggctaaatgtgccagatgcaagtcttgttcgtgtggcatcaacaatggatgtcatggaattgatgaatgttgggcacaagaatcgtgctgttggtgccactgcactaaatgacaggagtagtcgttcccacagttgtttaactgttcatgttaagggaagggatctgacatcagggacaatccttcgcggttgcatgcatttagttgatcttgctggcagtgaacgggttgataaatcagaggtcactggagaaaggttaaaagaagcacagcatataaacaaatcattgtcagccttaggggatgtaattgcttcgcttgcccaaaagaattcacatgtaccttacaggaatagtaaattaacacaacttctccaagattcacttggaggtcaggccaaaaccttgatgtttgttcatataagcccagaaagtgatgctgtaggagaaaccatcagcaccttgaagtttgccgagcgtgtgtcaactgttgaacttggtgctgctcaactaaataaagaatctggagaagttagagagcttaaggcgcagattgctcaacttaaatcagcattagctgcaaaagatttaggatcggagcaaatcatcagtcatgacactgaggcatttaacataaagatgccttcgcctggtttttcaattaagcgacagggtagctgtgatctactgtctacccaaactaacttcagacaaccattggatgctgttggaaacatagaggctagagccaatcctacactgaggcaaaagaaaccaagctttgacctccaggatttattaacagcaaatgattctccttcatggccagatagcaatttgagggtaaattttcagacgggagatgaaagagaagtaattggtggggactggatagataaggttgtagtgaacaacaataattcagtcggtgactgggagggtgacaatgcagctttacctgacttcttttaccagagatatcattcaggtatgagggagaagcagtaccagaggaataacacaagacaaaaggatgaccatgagtatgaagagcaaaggtctcgattttactctaccaatactgatgattctgatgacattgacatggcaacaagtgattcctcagaatcagatgcgctatggcagcagctcaatgtccaaagcatggataactctattagtttgagcggttcaaaggttaagaaaccacaaataaagcttagagatggttcagatgccaggacaccaatccattctcaaataccatcagcgtcaagaaaagttgcaaacggttcaaacagatctgttaggcagcctttaagcagaagcgacagcagaaggctttcatcaaatggaagacaatctggtgcaaagtagggacttacaatgatcgtgtgcattttttgcctttttctcagtgtttgtcacgagagattgtgaggatgttcttgagtacagcaatgagtgacaataaacccgattgattgtgtcagtgtggtgagttgtgatctcaacaactggtgtgtgaggccattaacctttttttttccttattggccttcaggctatgttgagttatagctagttctttgtatctgttcataatataaatttatataatgaaaagaaagcaaatcgattgatc

SEQ ID NO: 199138 - DNA, 1078 bp, Zea Mays
aaatatctgcgaaattctttaaagaaataaaaaaagaatcttcttctccatccctataccctatctaccaccgccctctacccctaatttttctccagccgccgcgctcctgatccttatctctgcgcgcgctgcatcggcgcccgccgggaggcggatcccgcccgcctcgtccatgttgtgggtccgcaatatccgccgcttcgtcgacacgggcgccggcctcggatccgaggccatcatgggtcagtgcctctcgcctctgttcctcccttagcccccaacctccgctctaggctcggtcggagttgcacgctttggattagggtttacgtgcgccccagtttggaatgcgtgcggtaggaggatgagatctgtgcaccatagggtgtatggtgatgtaatgcagtcctactacgggtacctgaaaaagttggatgctgatttgcagctgttgattttggtggagattcacttgggaagaaaatggtgatttctgaagagaactggagactaaaaggatattgcttgagattttcaaggagcggcagcggaagagtgccgaggctggttccatcccaagtttttacaagaaacctgaagaaggatccattagctctagagttcaaaggttggccaagtacaggtttctaaagaaacaatcagagcttctgctgaatgctgatgatcttgatgccatgtgggtttgtctcagagaaaattgtgttattgatgatgctactggtgctgaaaagatgaattatgaagatttctgccatatcgccacagtctgcactgagtagattggtcagaaatgcaaacgatttttcagcccttcaaacttcatgaagtctgcacggagcacttgcacagattgtttggctaattacaagattatctcagtgttttggtttgaatttagagtatacttatgtatgaaatattgattggtactcatttatattatattaattatattattattaaatatatgtatgtgtatttctctttcaaattattataatgtggtatctcaaatgaatataaattgaagaatatatcgttatttaagtcaatt

SEQ ID NO: 199139 - DNA, 1738 bp, Zea Mays
gttcagtgagtactcacatgtaggtgcatgctcttcaaaaaccttactggctgctatcccaagcaggattttcaacgaccaaggctttggaggcctactcttgtcaggagcttgttggagtttttccgcaacaggtgctatggaaggaataaacaaaataaagacaggctctctggtcagtctttctgaacaggaactaattgactgtgacagatcttataatagtggctgtggtggtggcctcatggattatgcttataagtttgtgataaaaaatggtggaattgacacagaggaggactacccctatcgtgaagcagatgggacatgtaacaagaacaagctgaaaaagcgagttgtgactattgatggttacactgatgtaccttccaacaaagaagatttgttacttcaggctgttgcccagcaacctgttagtgtaggaatatgtggtagcgctagagcatttcagttatactaccagggtatctttgatggtccatgtccgacatctcttgatcatgctgtgttaatcgttggctatggttctgaaggtggcaaggattactggattgtgaaaaactcttggggtgaaagttggggaatgaagggctatatgcatatgcatcgaaacactggtgattccaagggtgtctgcggtataaacatgatggcatcatttcctaccaaaacaagcccgaatcctcctccttcaccaggcccaggtcctaccaaatgcagtctgctcacatactgtcctgagggatccacctgttgttgctcatggcgtgtcttgggcttttgcctttcctggagctgttgcgaactggacaatgcagtttgctgcaaggataaccggtactgctgccctcatgactatcctgtttgtgatacaggtcgcgggcagtgtctcaaggccagcggcaacttctctgctatagaaggaatcaggaggaaacagtctttctctaaagctccctcgtggactggctggctggagttgatggaccaatgagcgtataatcagacatggatagtagcttcatgcaagttgtgcgatccgtaggtcggtcattggccttgttccagtgccctgccacattcctgtacgcctactgcccgctgcgttgcaccgagatgcccttattttctctttattattgaaccctatggtgtaaagtttcacgattgtacatgtatgtcacacttgtattggcctatgcattagacgtctccattagtttacctatatgatcatctaaaatattgttttgcagtttttatactgtagagtgaagtttgaatataaaaatgaggatggtgctggatatagccttataggcgcgccctgcagattatttgccgcggttgagcttttgagggccaggccgcatatatattaatagaggactttgtgtaatgtttcatggctatatggtacagaaggatgcatctagcgcaggtcaatgtggtagtatcatacgctgttttggtacgacgagcaactaggaattcgttttcgtgtacacgttaaacatacttatattgtatcataaacaggcgagtaaggcgtaggcatagggcggcctagacatgttggtttttacaatgataattaattttagtgacttgggaagtggagatgctcttaagcttatttggaagcacctgtttttttttttaaaaaaatctggtttatgaaagtagagagattccaaacataacattttaatttacg

SEQ ID NO: 199140 - DNA, 1403 bp, Zea Mays
taagttggttaggatccctcgtacttccaaggagcttgttggagtttttccgcaacaggtgctatggaaggaataaacaaaataaagacaggctctctgaggaggactacccctatcgtgaagcagatgggacatgtaacaagaacaagggtatctttgatggtccatgtccgacatctcttgatcatgctgtgttaatcgttggctatggttctgaaggtggcaaggattactggattgtgaaaaactcttggggtgaaagttggggaatgaagggctatatgcatatgcatcgaaacactggtgattccaagggtgtctgcggtataaacatgatggcatcatttcctaccaaaacaagcccgaatcctcctccttcaccaggcccaggtcctaccaaatgcagtctgctcacatactgtcctgagggatccacctgttgttgctcatggcgtgtcttgggcttttgcctttcctggagctgttgcgaactggacaatgcagtttgctgcaaggataaccggtactgctgccctcatgactatcctgtttgtgatacaggtcgcgggcagtgtctcaaggccagcggcaacttctctgctatagaaggaatcaggaggaaacagtctttctctaaagctccctcgtggactggctggctggagttgatggaccaatgagcgtataatcagacatggatagtagcttcatgcaagttgtgcgatccgtaggtcggtcattggccttgttccagtgccctgccacattcctgtacgcctactgcccgctgcgttgcaccgagatgcccttattttctctttattattgaaccctatggtgtaaagtttcacgattgtacatgtatgtcacacttgtattggcctatgcattagacgtctccattagtttacctatatgatcatctaaaatattgttttgcagtttttatactgtagagtgaagtttgaatataaaaatgaggatggtgctggatatagccttataggcgcgccctgcagattatttgccgcggttgagcttttgagggccaggccgcatatatattaatagaggactttgtgtaatgtttcatggctatatggtacagaaggatgcatctagcgcaggtcaatgtggtagtatcatacgctgttttggtacgacgagcaactaggaattcgttttcgtgtacacgttaaacatacttatattgtatcataaacaggcgagtaaggcgtaggcatagggcggcctagacatgttggtttttacaatgataattaattttagtgacttgggaagtggagatgctcttaagcttatttggaagcacctgtttttttttttaaaaaaatctggtttatgaaagtagagagattccaaacataacattttaatttacg

SEQ ID NO: 199141 - DNA, 4374 bp, Zea Mays
gtcagagggacacgagaatagctcgtcaattcgtcatcgctcgatgctcgatgcctcgatctcggccactcggctgctctccacacacggccgggtgacaagtgacgctcccctccatcgcttccacttcgaaacatttcgaattcctcaacccccgaaagggcgaaaaccccaacgcctccaaaagtttcccgcccgagcccctcgaaccctagtaccatcaccgactggcgacgcctcgccggcggccggcgagatgcacatcaaggaggtaactctcgaggggttcaagtcgtacgcgggacggactgtggtgccggggttcgacccgctgttcaacgccatcaccgggctcaacggttccggcaagtccaacatcctcgactccatctgcttcgtgctcggcatcacagatctccgtcaggtacgcgctgcctcgctccaggagctcgtctacaagcaaggccaggccggggtcaccaaggctaccgtgtccatcgtcttcgacaattccgaccgctcccgctccccgctcggctacgaggactccccggagatcactgtcacgcgccagattgttgttggtggaaggaacaaataccttatcaatggccatcttgcacaaccttcccgggtgcagacccttttccactcagtgcagcttaatgtaaacaatcctcattttctaattatgcaagggcgcataacaaaagtgctgaacatgaagcctccagaaattttgtcaatgttagaagaggcagcaggtacaagaatgtacgaaatgaagaaagaatctgctcttaagacacttgaaaagaagcagaataaagttgatgagattaataaactccttgatgttgaaatcctccctgcactagagaaacttagaaaagagcggtgtcaatacatgaaatgggccaatggcaatgctgaactggataggctcaaaagattttgtattgcctatgactttgttcaggctgagagagtgcgagatggcgcactgaatgatgtcaaacaaattaaaacaaagattgttgagctggatgaaactacagaaaacataaaagcagctatacaagaaatggacaataacatttctaccttggctgctgaaaaagaagctaaagtaggtggtgaaatgaaggttctgtcagacaaagtggataaactatcacatgtacttatcaaggaaacttctgtgatgaataatcaagaggaaaccctgaagtctgaggaaaagggtgctgagaagattctcacaaacattgaggacataaaaaggtctatactcgagagagatgctgctgtaaaaaatgtagagaatgaggcttctgacatgaaaagaagagcagaggatctcacaaaggagttggacgagaaggagaaagaataccagggtgtgctagcaggaaaaagcagtgcaaatgagaagaaatgccttgaagatcaactgagagatgcaaaagctgcagttggagatgcagaatctggactaaagcagctagctacaaaaataaagcattctgaaaaggagttgaaggagaagaaaactctattagtatccaagcgtgatgaggctattgctgctgagaatgagctgaaaacaaggacaaaagacttagaaggtatcaaggcatccatgggatctattaattatgacgagggtcagatggaagctttgcaaaaggaccgttctgcagagttagaaattattcaaaaattaaaggatcgtgttcgtaacctttctggtgagcttgctaatgttcacttcagttatcgagaccctgaaagaaattttgacagatcaaaagtcaaaggggttgttgcacgtcttattaggattaaggacagctcaacagcaacagcactggaggttgctgcaggtgggaggttattcaatgtggttgttgacactgaagaaactggaaagcaacttttaaaaaatggggatctacgaagtagagtaaccatcatacctttgaacaaaatccaaacttacatgatacctgacagagttcagcagacagctcgtagactggttggtcctgacaatgtaacattagctctagaattggttggatatggtgaggaagtaaagaatgccgtggcttttgtctttggctcaacatttgtgtgtcgtaatatggatgcggcaaaagaggttgcgtttaataggcaaattagcagtactagtgtgactcttgagggtgacacttatcagccaagtggtcttttgactggaggtagtaaagggggtagagggaacttgctaaggaaactcgacgaactagctaaagctgaggctgatctatctgatcatgagaaaaagctctttgtcattgaacagcagattggagcccttttaccattgcagaaaaggcacactgagttgaaatctcagtttgaactgaagtcatatgatctctcgctgtttcagaacagagttgagcaaaatgaacatcacaagttaggtgagctcgtaaagaaaattgaacaagagcttcaagaatctaaacaagagttgacagaaaagcaagtgcagcatgaaaaatgtgtgtccacagtttctgagttagagaaaactatcaaaacttatggcacggaacgagagggcaaactcaaagcgctggaaaaaagaatcaaatcaattaaatcagagatgcagtcgatgtcgaagcaactaaaggcttatgaaagtgacagggagaggctgatcatggagaaagatgcggttgttggtgagcttgctacactggaagagcagctaacgacttcaaaagctcagattacttctctgtctgaaaccttggaaaaacagaaggacaaggttacatccataaagcaagattatgatcaagctgaaagtgagctcaacgttgggcgttctaaactgaaggaatgtgactcacagataaaccgtatggccaaggaacagcagaaacttcaacagaagttaagtgattcaaatgttgagaggaagaaaatggaaaatgaggttaagaggatggagatagagcagaaggattgctcttcaatagttgataagctagtcgagaaatataattggattgcaactgagaaacaattgtttgggaaaagtggtacagattatgattttgaatcttgtgaaccacataaagcccgagaggaacttgaaaatcttcaagctcaacaatccagtcttgagaagagggtcaataagaaagtaatggcaatgtttgagaaggcggaggatgagtacaatgatttgatgtcaaagaaaaacatcatcgagaatgacaaggcaaaaatcaagaaagtgatagaggagttggatgagaagaagaaggaaacattgaaggtcacttggctcaaagtaaacaaggatttcgggtctatattcagtactcttttacctggtacaatggcaaaacttgatcctccagaaggtggtacttttttggatggtcttgaagttcgtgtggcatttgggacagtttggaagcagtctctgtctgaacttagtggaggacaacgatcccttcttgctcttagtcttatcctggctctgcttctttttaaacctgcaccactttacatattggacgaggttgatgctgctcttgatctgagccacactcaaaacattggtagaatgatcaaggctcattttccgcactctcagttcatagttgtctctttaaaagagggtatgttcaacaacgccaatgtgatatttcgaacaaaatttgttgatggtgtgtccaccgtgacacgaacagtgccttcgaaacagagatgaccagtttacacatcatgcatcttctgaaccaaaactaggcatacaattccaaaactgtcattttaaggagctgctataatcaaacattttcgctgtttattcagccatgtttattcagccaggaaaattattccatgaaagctgaaccccacaattacttgacgctgatgcctcaagcccctcgcttgtcaggcaatgacatcaaaataggtgctgtaactgtaatctcatggcgtgacgttcatgatgacctcgactggcttctacattatgcgctttcttctgacctgatgtgtaattagcggttgaactattttgtgttgaaggtcgaccgtgtagcatgtatgtaacagccatttataaccaaggtcatgtataattctgacttgcaaatttaccctatgttgatttaccttttattacttagaacaaaaatctcatcatagttttagaaagtcaatgctctaaacacttcataatattattgactatcgtgtgcattgccgagaatgatttggtcattgttagtttctacgtcactgctcatggattttgtggcgttttttttttctgaaagcattgaagataag

SEQ ID NO: 199142 - DNA, 4345 bp, Zea Mays
catcgctcgatgctcgatgcctcgatctcggccactcggctgctctccacacacggccgggtgacaagtgacgctcccctccatcgcttccacttcgaaacatttcgaattcctcaacccccgaaagggcgaaaaccccaacgcctccaaaagtttcccgcccgagcccctcgaaccctagtaccatcaccgactggcgacgcctcgccggcggccggcgagatgcacatcaaggaggtaactctcgaggggttcaagtcgtacgcgggacggactgtggtgccggggttcgacccgctgttcaacgccatcaccgggctcaacggttccggcaagtccaacatcctcgactccatctgcttcgtgctcggcatcacagatctccgtcaggtacgcgctgcctcgctccaggagctcgtctacaagcaaggccaggccggggtcaccaaggctaccgtgtccatcgtcttcgacaattccgaccgctcccgctccccgctcggctacgaggactccccggagatcactgtcacgcgccagattgttgttggtggaaggaacaaataccttatcaatggccatcttgcacaaccttcccgggtgcagacccttttccactcagtgcagcttaatgtaaacaatcctcattttctaattatgcaagggcgcataacaaaagtgctgaacatgaagcctccagaaattttgtcaatgttagaagaggcagcaggtacaagaatgtacgaaatgaagaaagaatctgctcttaagacacttgaaaagaagcagaataaagttgatgagattaataaactccttgatgttgaaatcctccctgcactagagaaacttagaaaagagcggtgtcaatacatgaaatgggccaatggcaatgctgaactggataggctcaaaagattttgtattgcctatgactttgttcaggctgagagagtgcgagatggcgcactgaatgatgtcaaacaaattaaaacaaagattgttgagctggatgaaactacagaaaacataaaagcagctatacaagaaatggacaataacatttctaccttggctgctgaaaaagaagctaaagtaggtggtgaaatgaaggttctgtcagacaaagtggataaactatcacatgtacttatcaaggaaacttctgtgatgaataatcaagaggaaaccctgaagtctgaggaaaagggtgctgagaagattctcacaaacattgaggacataaaaaggtctatactcgagagagatgctgctgtaaaaaatgtagagaatgaggcttctgacatgaaaagaagagcagaggatctcacaaaggagttggacgagaaggagaaagaataccagggtgtgctagcaggaaaaagcagtgcaaatgagaagaaatgccttgaagatcaactgagagatgcaaaagctgcagttggagatgcagaatctggactaaagcagctagctacaaaaataaagcattctgaaaaggagttgaaggagaagaaaactctattagtatccaagcgtgatgaggctattgctgctgagaatgagctgaaaacaaggacaaaagacttagaaggtatcaaggcatccatgggatctattaattatgacgagggtcagatggaagctttgcaaaaggaccgttctgcagagttagaaattattcaaaaattaaaggatcgtgttcgtaacctttctggtgagcttgctaatgttcacttcagttatcgagaccctgaaagaaattttgacagatcaaaagtcaaaggggttgttgcacgtcttattaggattaaggacagctcaacagcaacagcactggagtgcaggttgctgcaggtgggaggttattcaatgtggttgttgacactgaagaaactggaaagcaacttttaaaaaatggggatctacgaagtagagtaaccatcatacctttgaacaaaatccaaacttacatgatacctgacagagttcagcagacagctcgtagactggttggtcctgacaatgtaacattagctctagaattggttggatatggtgaggaagtaaagaatgccgtggcttttgtctttggctcaacatttgtgtgtcgtaatatggatgcggcaaaagaggttgcgtttaataggcaaattagcagtactagtgtgactcttgagggtgacacttatcagccaagtggtcttttgactggaggtagtaaagggggtagagggaacttgctaaggaaactcgacgaactagctaaagctgaggctgatctatctgatcatgagaaaaagctctttgtcattgaacagcagattggagcccttttaccattgcagaaaaggcacactgagttgaaatctcagtttgaactgaagtcatatgatctctcgctgtttcagaacagagttgagcaaaatgaacatcacaagttaggtgagctcgtaaagaaaattgaacaagagcttcaagaatctaaacaagagttgacagaaaagcaagtgcagcatgaaaaatgtgtgtccacagtttctgagttagagaaaactatcaaaacttatggcacggaacgagagggcaaactcaaagcgctggaaaaaagaatcaaatcaattaaatcagagatgcagtcgatgtcgaagcaactaaaggcttatgaaagtgacagggagaggctgatcatggagaaagatgcggttgttggtgagcttgctacactggaagagcagctaacgacttcaaaagctcagattacttctctgtctgaaaccttggaaaaacagaaggacaaggttacatccataaagcaagattatgatcaagctgaaagtgagctcaacgttgggcgttctaaactgaaggaatgtgactcacagataaaccgtatggccaaggaacagcagaaacttcaacagaagttaagtgattcaaatgttgagaggaagaaaatggaaaatgaggttaagaggatggagatagagcagaaggattgctcttcaatagttgataagctagtcgagaaatataattggattgcaactgagaaacaattgtttgggaaaagtggtacagattatgattttgaatcttgtgaaccacataaagcccgagaggaacttgaaaatcttcaagctcaacaatccagtcttgagaagagggtcaataagaaagtaatggcaatgtttgagaaggcggaggatgagtacaatgatttgatgtcaaagaaaaacatcatcgagaatgacaaggcaaaaatcaagaaagtgatagaggagttggatgagaagaagaaggaaacattgaaggtcacttggctcaaagtaaacaaggatttcgggtctatattcagtactcttttacctggtacaatggcaaaacttgatcctccagaaggtggtacttttttggatggtcttgaagttcgtgtggcatttgggacagtttggaagcagtctctgtctgaacttagtggaggacaacgatcccttcttgctcttagtcttatcctggctctgcttctttttaaacctgcaccactttacatattggacgaggttgatgctgctcttgatctgagccacactcaaaacattggtagaatgatcaaggctcattttccgcactctcagttcatagttgtctctttaaaagagggtatgttcaacaacgccaatgtgatatttcgaacaaaatttgttgatggtgtgtccaccgtgacacgaacagtgccttcgaaacagagatgaccagtttacacatcatgcatcttctgaaccaaaactaggcatacaattccaaaactgtcattttaaggagctgctataatcaaacattttcgctgtttattcagccatgtttattcagccaggaaaattattccatgaaagctgaaccccacaattacttgacgctgatgcctcaagcccctcgcttgtcaggcaatgacatcaaaataggtgctgtaactgtaatctcatggcgtgacgttcatgatgacctcgactggcttctacattatgcgctttcttctgacctgatgtgtaattagcggttgaactattttgtgttgaaggtcgaccgtgtagcatgtatgtaacagccatttataaccaaggtcatgtataattctgacttgcaaatttaccctatgttgatttaccttttattacttagaacaaaaatctcatcatagttttagaaagtcaatgctctaaacacttcataatattattgactatcgtgtgcattgccgagaatgatttggtcattgttagtttctacgtcactgctcatggattttgtggcgttttttttttctgaaagcattgaagataag

SEQ ID NO: 199143 - DNA, 4586 bp, Zea Mays
catcgctcgatgctcgatgcctcgatctcggccactcggctgctctccacacacggccgggtgacaagtgacgctcccctccatcgcttccacttcgaaacatttcgaattcctcaacccccgaaagggcgaaaaccccaacgcctccaaaagtttcccgcccgagcccctcgaaccctagtaccatcaccgactggcgacgcctcgccggcggccggcgagatgcacatcaaggaggtaactctcgaggggttcaagtcgtacgcgggacggactgtggtgccggggttcgacccgctgttcaacgccatcaccgggctcaacggttccggcaagtccaacatcctcgactccatctgcttcgtgctcggcatcacagatctccgtcaggtacgcgctgcctcgctccaggagctcgtctacaagcaaggccaggccggggtcaccaaggctaccgtgtccatcgtcttcgacaattccgaccgctcccgctccccgctcggctacgaggactccccggagatcactgtcacgcgccagattgttgttggtggaaggaacaaataccttatcaatggccatcttgcacaaccttcccgggtgcagacccttttccactcagtgcagcttaatgtaaacaatcctcattttctaattatgcaagggcgcataacaaaagtgctgaacatgaagcctccagaaattttgtcaatgttagaagaggcagcaggtacaagaatgtacgaaatgaagaaagaatctgctcttaagacacttgaaaagaagcagaataaagttgatgagattaataaactccttgatgttgaaatcctccctgcactagagaaacttagaaaagagcggtgtcaatacatgaaatgggccaatggcaatgctgaactggataggctcaaaagattttgtattgcctatgactttgttcaggctgagagagtgcgagatggcgcactgaatgatgtcaaacaaattaaaacaaagattgttgagctggatgaaactacagaaaacataaaagcagctatacaagaaatggacaataacatttctaccttggctgctgaaaaagaagctaaagtaggtggtgaaatgaaggttctgtcagacaaagtggataaactatcacatgtacttatcaaggaaacttctgtgatgaataatcaagaggaaaccctgaagtctgaggaaaagggtgctgagaagattctcacaaacattgaggacataaaaaggtctatactcgagagagatgctgctgtaaaaaatgtagagaatgaggcttctgacatgaaaagaagagcagaggatctcacaaaggagttggacgagaaggagaaagaataccagggtgtgctagcaggaaaaagcagtgcaaatgagaagaaatgccttgaagatcaactgagagatgcaaaagctgcagttggagatgcagaatctggactaaagcagctagctacaaaaataaagcattctgaaaaggagttgaaggagaagaaaactctattagtatccaagcgtgatgaggctattgctgctgagaatgagctgaaaacaaggacaaaagacttagaaggtatcaaggcatccatgggatctattaattatgacgagggtcagatggaagctttgcaaaaggaccgttctgcagagttagaaattattcaaaaattaaaggatcgtgttcgtaacctttctggtgagcttgctaatgttcacttcagttatcgagaccctgaaagaaattttgacagatcaaaagtcaaaggggttgttgcacgtcttattaggattaaggacagctcaacagcaacagcactggaggttgctgcaggtgggaggttattcaatgtggttgttgacactgaagaaactggaaagcaacttttaaaaaatggggatctacgaagtagagtaaccatcatacctttgaacaaaatccaaacttacatgatacctgacagagttcagcagacagctcgtagactggttggtcctgacaatgtaacattagctctagaattggttggatatggtgaggaagtaaagaatgccgtggcttttgtctttggctcaacatttgtgtgtcgtaatatggatgcggcaaaagaggttgcgtttaataggcaaattagcagtactagtgtgactcttgagggtgacacttatcagccaagtggtcttttgactggaggtagtaaagggggtagagggaacttgctaaggaaactcgacgaactagctaaagctgaggctgatctatctgatcatgagaaaaagctctttgtcattgaacagcagattggagcccttttaccattgcagaaaaggcacactgagttgaaatctcagtttgaactgaagtcatatgatctctcgctgtttcagaacagagttgagcaaaatgaacatcacaagttaggtgagctcgtaaagaaaattgaacaagagcttcaagaatctaaacaagagttgacagaaaagcaagtgcagcatgaaaaatgtgtgtccacagtttctgagttagagaaaactatcaaaacttatggcacggaacgagagggcaaactcaaagcgctggaaaaaagaatcaaatcaattaaatcagagatgcagtcgatgtcgaagcaactaaagttgcggaagaattctggatgttgaccctggacctagttggtatgacttaggagtcatgattgactacggcactggctatgcaggcataaaagaaactggggcaaatggtcaatctgattgcttaaatgcaaaatactgctagtctccccctacattgagttagtctggcagtaaataactcaatcggatggggctcaagccccctactgtctctgcaaccatggaacgcccccttgcaacttgcaagcttatgaaagtgacagggagaggctgatcatggagaaagatgcggttgttggtgagcttgctacactggaagagcagctaacgacttcaaaagctcagattacttctctgtctgaaaccttggaaaaacagaaggacaaggttacatccataaagcaagattatgatcaagctgaaagtgagctcaacgttgggcgttctaaactgaaggaatgtgactcacagataaaccgtatggccaaggaacagcagaaacttcaacagaagttaagtgattcaaatgttgagaggaagaaaatggaaaatgaggttaagaggatggagatagagcagaaggattgctcttcaatagttgataagctagtcgagaaatataattggattgcaactgagaaacaattgtttgggaaaagtggtacagattatgattttgaatcttgtgaaccacataaagcccgagaggaacttgaaaatcttcaagctcaacaatccagtcttgagaagagggtcaataagaaagtaatggcaatgtttgagaaggcggaggatgagtacaatgatttgatgtcaaagaaaaacatcatcgagaatgacaaggcaaaaatcaagaaagtgatagaggagttggatgagaagaagaaggaaacattgaaggtcacttggctcaaagtaaacaaggatttcgggtctatattcagtactcttttacctggtacaatggcaaaacttgatcctccagaaggtggtacttttttggatggtcttgaagttcgtgtggcatttgggacagtttggaagcagtctctgtctgaacttagtggaggacaacgatcccttcttgctcttagtcttatcctggctctgcttctttttaaacctgcaccactttacatattggacgaggttgatgctgctcttgatctgagccacactcaaaacattggtagaatgatcaaggctcattttccgcactctcagttcatagttgtctctttaaaagagggtatgttcaacaacgccaatgtgatatttcgaacaaaatttgttgatggtgtgtccaccgtgacacgaacagtgccttcgaaacagagatgaccagtttacacatcatgcatcttctgaaccaaaactaggcatacaattccaaaactgtcattttaaggagctgctataatcaaacattttcgctgtttattcagccatgtttattcagccaggaaaattattccatgaaagctgaaccccacaattacttgacgctgatgcctcaagcccctcgcttgtcaggcaatgacatcaaaataggtgctgtaactgtaatctcatggcgtgacgttcatgatgacctcgactggcttctacattatgcgctttcttctgacctgatgtgtaattagcggttgaactattttgtgttgaaggtcgaccgtgtagcatgtatgtaacagccatttataaccaaggtcatgtataattctgacttgcaaatttaccctatgttgatttaccttttattacttagaacaaaaatctcatcatagttttagaaagtcaatgctctaaacacttcataatattattgactatcgtgtgcattgccgagaatgatttggtcattgttagtttctacgtcactgctcatggattttgtggcgttttttttttctgaaagcattgaagataag

SEQ ID NO: 199144 - DNA, 1578 bp, Zea Mays
atagagttgttctacttctattctactggagtgcattaccacctgtctttttccttcctcttcaacgtctcgaacaagcaggaggaggtagaccgaacaactccaggtcgcgggagcggccatttctctggggcgggaccgcgggagagctctagctcttgcagcagtagaactctactgcagccagacactgcaaagggcgagaggtttgctttcgcgccctgggactttcaagaagcactcgttctagggtggtgcctcgcgtgcttttcgtgcgactcgtggtctgattccttagtagttccagtgctgcgggtcaacttttggacagcaatgattttggggaaggaggttgtagatgaatgaagcgcatagaatatacccttggaaacctacacacgccgtacagcagtgtgactataaaaaagactcgccatgatacacaaacgctgaaagaatttctgatggcagaactgagagagttaagagaaatggataaggatggcagctccgagagaagtcgcccagatcatggtgatgtgaagatgctcaagttcagaccaaaggtgcctcgacagaagcaaaagccaaagcaacaagaccctaagccaattgatgaagatgtgatgaagatattgaggactcgccaagtggctgcaaaaagtgcaccaaacacagaagatgagtgctcaccacagaagaccctctcgacgccaccttctgcagatgttgtttgcttgtcaccagcgcaactcggagtgcaaaaacaaaatcaattgccactccaaattcctagatccttccctgttcctgttaattcaggattggtttatgaagaagagagtagtgatgacgacgacgataatgatagtgacaatgttgggttgctggagactcagccagattcaattgaaagtgaagctttaacatgtccggctgaggagcttgatttgcttcaagaaggtagcaaagaaagaatgttcttcttccagttcccaaactctcttcctttacccaaaaggtcgtccagtgccggcaaggaggtgatggaaggatccaacctgcagcagctgcctcagggttatttgggcaaaatgctagtatacaagagcggcaagatcaaaatgaagttaggagacatcatctttgatgtgaacccaggagtagaaagtaggatgctgcagcgtgcagtagctctcaacactcgagacaaacactgttgcttgcttggagagattgagaatcgtcatgttattgtgactcccaatgttgattctttgttgaacgacaagtagggaccaactgtagcagctttgtcacagattgtgtgtagacctgtagatatgcagggttagtgacatctgtagaaattatatcagctctgtcaaatgatgtataggattttagttgtgtagtgttgtgaacgttttattgtgattgcagtgctatgttagttttagaactgcatgcagctccctgtggatgaatgtttgtaaggatcggtatttgaccttgattgtattggaaggcaaatataataaaaatcacgtcgttcttgtgggcaaggccttctgctag

SEQ ID NO: 199145 - DNA, 1388 bp, Zea Mays
atagagttgttctacttctattctactggagtgcattaccacctgtctttttccttcctcttcaacgtctcgaacaagcaggaggaggtagaccgaacaactccaggtcgcgggagcggccatttctctggggcgggaccgcgggagagctctagctcttgcagcagtagaactctactgcagccagctatttatgacagagttaagagaaatggataaggatggcagctccgagagaagtcgcccagatcatggtgatgtgaagatgctcaagttcagaccaaaggtgcctcgacagaagcaaaagccaaagcaacaagaccctaagccaattgatgaagatgtgatgaagatattgaggactcgccaagtggctgcaaaaagtgcaccaaacacagaagatgagtgctcaccacagaagaccctctcgacgccaccttctgcagatgttgtttgcttgtcaccagcgcaactcggagtgcaaaaacaaaatcaattgccactccaaattcctagatccttccctgttcctgttaattcaggtgaatgtgaagattcataagctcctttgttcttctgaacaatactttccactaagaatttttatcgaaatattcaactcttgacaggattggtttatgaagaagagagtagtgatgacgacgacgataatgatagtgacaatgttgggttgctggagactcagccagattcaattgaaagtgaagctttaacatgtccggctgaggagcttgatttgcttcagcaagaaggtagcaaagaaagaatgttcttcttccagttcccaaactctcttcctttacccaaaaggtcgtccagtgccggcaaggaggtgatggaaggatccaacctgcagcagctgcctcagggttatttgggcaaaatgctagtatacaagagcggcaagatcaaaatgaagttaggagacatcatctttgatgtgaacccaggagtagaaagtaggatgctgcagcgtgcagtagctctcaacactcgagacaaacactgttgcttgcttggagagattgagaatcgtcatgttattgtgactcccaatgttgattctttgttgaacgacaagtagggaccaactgtagcagctttgtcacagattgtgtgtagacctgtagatatgcagggttagtgacatctgtagaaattatatcagctctgtcaaatgatgtataggattttagttgtgtagtgttgtgaacgttttattgtgattgcagtgctatgttagttttagaactgcatgcagctccctgtggatgaatgtttgtaaggatcggtatttgaccttgattgtattggaaggcaaatataataaaaatcacgtcgttcttgtgggcaaggccttctgctag

SEQ ID NO: 199146 - DNA, 1375 bp, Zea Mays
atagagttgttctacttctattctactggagtgcattaccacctgtctttttccttcctcttcaacgtctcgaacaagcaggaggaggtagaccgaacaactccaggtcgcgggagcggccatttctctggggcgggaccgcgggagagctctagctcttgcagcagtagaactctactgcagccagttgtgctaggtggcatccaaaataccggctaaactttagtacgggatccaaacacccccccttaactgggctcttagctatttatgacagagttaagagaaatggataaggatggcagctccgagagaagtcgcccagatcatggtgatgtgaagatgctcaagttcagaccaaaggtgcctcgacagaagcaaaagccaaagcaacaagaccctaagccaattgatgaagatgtgatgaagatattgaggactcgccaagtggctgcaaaaagtgcaccaaacacagaagatgagtgctcaccacagaagaccctctcgacgccaccttctgcagatgttgtttgcttgtcaccagcgcaactcggagtgcaaaaacaaaatcaattgccactccaaattcctagatccttccctgttcctgttaattcaggattggtttatgaagaagagagtagtgatgacgacgacgataatgatagtgacaatgttgggttgctggagactcagccagattcaattgaaagtgaagctttaacatgtccggctgaggagcttgatttgcttcaagaaggtagcaaagaaagaatgttcttcttccagttcccaaactctcttcctttacccaaaaggtcgtccagtgccggcaaggaggtgatggaaggatccaacctgcagcagctgcctcagggttatttgggcaaaatgctagtatacaagagcggcaagatcaaaatgaagttaggagacatcatctttgatgtgaacccaggagtagaaagtaggatgctgcagcgtgcagtagctctcaacactcgagacaaacactgttgcttgcttggagagattgagaatcgtcatgttattgtgactcccaatgttgattctttgttgaacgacaagtagggaccaactgtagcagctttgtcacagattgtgtgtagacctgtagatatgcagggttagtgacatctgtagaaattatatcagctctgtcaaatgatgtataggattttagttgtgtagtgttgtgaacgttttattgtgattgcagtgctatgttagttttagaactgcatgcagctccctgtggatgaatgtttgtaaggatcggtatttgaccttgattgtattggaaggcaaatataataaaaatcacgtcgttcttgtgggcaaggccttctgctag

SEQ ID NO: 199147 - DNA, 1311 bp, Zea Mays
cgggaagcggctttgttgcattgcatcacaagttcacagctcgcccggacccagagggagcttgtacttccaaagttccacagttccactgcacagatcgtcggcggcggcgcaggcaaggccacaatgtctccggcgcccagcagcggcaagcgcgggagggttcccgacccggaggaggacgtctacgtcgacaacctccactcccacaagcgctacctcaccgagggatgagatgagtatgcagtactcacctatgtcagaagagtcagatgattataggtactatgacactcaagtaaacaccaatgggaatcaaacagatgtactgggtaatccctcaactagtctaatctcatctgcacaccgttttcagaggccacacacttggttctcttctgcaagtccataccctctcccaagctgctccctcccagcagtgatctgctcccctgctcgccgtggttgtggcactgaacaggaaggctggatcccatcctcacctaatgacatgtgctatggtggagatctgagacgaaccgcacttctgaggtcagttcaaatgaaggtgcagagcccccatccatgtgatgtgcatgaacgagaacaagggcgttctaatgtacatgctgacgagcttcaacaggatcagaaagaagctgtgggtgtacagctggaccaaaggcctctctcttgtccaaagtcaacccaggatgctaagtgccagagctctatacactgatgacgcggattttgttgaggatcagattacggtgtgaccagtcaaagtttgtcgaggatcatcacatatctggtaattttttgcgtagatttggatgaccataaataatactccctgtttcccaatatattgttcgtcctggcggatctattgacaccctaaaacgaatactattttgggttggagggagggagcatgttgcatggcccgttcgtaatttagtaaccattaacagtattctagtggtggcctgccccgttcgatgaacttatgtgacactaggttgtaagaagatgggacactaattaatcttgatcttagaaatgcaatgtgatgtagatgatatcagtgcttttattatgattagattaagaagttaagcagtctctgtcacttgcactttcaaggttcagatattgtttggatttgtttatcgttcggtgtctattttcattgttgaagctatgcatttgatgagggaaagagacaaaggggtgtgtatgattgtataattgtatatttgtatatcacatttgaatgattgccaggataatcttcggagattaggg

SEQ ID NO: 199148 - DNA, 1747 bp, Zea Mays
cgaaaggttatcccacctcttttctattcttttttccgcccgaagacaacgtaacaaaccaacgataatcctccctcttgctacaaaaaaggaaaaaaaaacatcaataataatccactgcggtcgctcgtcctcctcccaacctcctcccaagttgcctcgtgctctgcttcttcggttttcaggagcgtcggccattgctgctggaaaagcagaccattgggactccctcgtgcgttttccaaatcaggttgatggcgatggagggaccagttttatgccgccctgcaatgcaagccaaatcgcctgctgctgcgctggtcaacaactccctgaccagattcgggcagcttgggaccatttcaaaatacaggaacgtttcaagattcatttctcccatctctcagccatctacgaagaacataggtccatgctgtagcttcagctcgtcttctgatggcaatggatacatggctggaaactttagcgacagtgatgaagattatgttaattctactgtgctagaagcagttgaggtgagaagtggatcggaaggatatgtgataaagatgcgagatgggaaaaacttgcgttgtgtccataacaattctcaagggagaaatattccagagagtgcaccccaacctgctattgttttgaggattgaagatggaagcgaaactttacttccaatcattgttttggagatgccaagtgtacttctgatggcggctattcgtaatgtccacattgcacgaccaaccatatatcaagttgtcaaggaaatgattgataaaatgggctatgaggtaaaacttgttcgggtaaacaaaagaattcaagaagcgtactgtgctgaactttgtctaacaaagattgatgattctacagacagcatcaccttcgatcttcggccttcagatgccataaacattgctgttcgttgcaaggttcctgtacaagtccatagaagtcttgcatacagtgacggcatcagaccagtcgagccagcaagaatggcagtagcagctggcctatcagatgggttgttatttacagagcttgacagacccgatggacaggcatctgttgaggctcaagagtttggattggtgaagaacatgctcattgcagccgtagaagagagatacaaggatgctggtaatgatccattcttcttgtggattcattcaattcatctaggactccagattgagcatctggcaatgactccacccagtgttgtattaccaaaaccgtccgaatgctgaacaaaaatcacctctcttttactttgcaaccatgttctgcaaagaacaaaacaagattaatgtgcatcaccttgcgtgatacgcattgatcttcaatataattatgattagatgaaacctagatgtggtagttctattgaaggttgattgatttatctgttggcttcgacagcatcatggaaggacaaactgatgcggctgaggtctaagcggaagaactgggcctgacagcgttgcatgtctggatggtgtaaataaagatgatgcccagctgaattccagtacgcattccagataattgatgctgggttatggctatgtaactagctgtacatattgtatggacccgaggatggtcttctgtaaattcagactaagctttgaagtgaaacactaatccttcggagaaacttggtaccttgtccgtgttcacttgtggtatataatgttggaaattaacagggttaagattaatt

SEQ ID NO: 199149 - DNA, 1874 bp, Zea Mays
aggggaaaccgctgtagacagtcccgggcaactggtgggtgtcgtcctcctctttgcgcagcagagtaatggattaatgcattaagcaagtctcaaaagagcagagttttgggagcaatgtcatcctctttgcctattctgccaaatcctttgaaagggagcttctcaaggcctcataacccccagcatattcctatgttgaggcagctgcctgatgactctatgcccttgtgtattgacacacatcagtctgctagtttgcacccaagagctggtgttatcggggtaccatattcaggctacactgctagtccacttgattctgtgtctaaccttgatagccagacaatggctgcaccctttatttctcagtcatccaattttgaagctctccagtctctatctaataataccccagaaacacacactaaggcagcctggttcacatcttctatggatgtttcaccactcaacacagataatattgctgcttctgatgttaatcaaatccagagtatacgtcctgctatgacatctgatgagagtgctacacaaaacgattggtgggcagatataatgaatgatgattggaaagatattcttgacgcaacagctactgattcccactcaaaagccatgattcaaatttccaactcagctacatcactacctgcagtaaatcagtcagcttcatctcatagtagggagatttgtcctgttgctagtcctcccaatagcagcaatgcttcagttgccaaacaacggatgagatggaccccagaactccatgaatgttttgtagatgctgtaaatcagcttggcggtagcgaaaaagctactcctaagggtgtgctaaagcttatgaaagttgatggtttgactatatatcatgtcaaaagccacctgcagaagtaccgcacagcccgctataaaccagacctgtcagaaggtacatcggaaaaaaggacagccactgaagagctggtcctggacctgaaaacgagcatggatcttactgaagcactgcgccttcagatggaagtccagaaacggcttcatgaacagcttgagattcagcgaaaattgcagttgcggattgaagagcaaggaaagtatctgcagatgatgtttgaaaagcagagtcaatcgagcacggagaaagtccaggatccatcctcaagggatacaacagctaaaccgtcatctaatcagagccagtctacaaacaaggattgtggtgcaaccatggacccaaatggaacaggaggcatcgtacggactgcagaactgggagaacgttcgtctgaattaggtgtaaaacagaaactcgtagagatcgaagaatctggtaccgaagtagccacaggcgacagatctaagatctcccaagagaagcggcgcaaactgcaagatagttaacatatcggttgcactattcagacatagctgttcaaaccgtttgcttggtgaaaaattggtaatctgtgtgtcgaattcgactattgatccgtgagtccattggtgagttgtaccgctcttcagttagccatatatatttataaaggatccaaaggaggaccaaaggagaacttcctggcagccgtctttataacattagcaataagagctatccccgaagttatggggtaaaataaggtcttgaaatttagctttgtttctgaattcctccttttcttttgtttgggttgaagtggtcaccgagtcgatgtagatgaccacatgaatgaatttatcggaagcaagctagtgctgttccctattggcatagaaaccaaatattgaaacacgaacactgtttgatggtgcaaacttttagaatgtaattctgcatcgatttgtttggtggtgttggg

SEQ ID NO: 199150 - DNA, 2081 bp, Zea Mays
aggggaaaccgctgtagacagtcccgggcaactggtgggtgtcgtcctcctctttgcgcagcaggttctcgcctccccctccccgcagcttctctctctctctcccccccccccccccccccccccccccccccctccccgccccatcgtcggctaaaggcgatcgtcccacccagaatttcccccctcccccgcaccccccgcaaacatcctagcagccctatcatcgcgccggtcccggcggcctgccggcctcctcgcaccctcccagagtaatggattaatgcattaagcaagtctcaaaagagcagagttttgggagcaatgtcatcctctttgcctattctgccaaatcctttgaaagggagcttctcaaggcctcataacccccagcatattcctatgttgaggcagctgcctgatgactctatgcccttgtgtattgacacacatcagtctgctagtttgcacccaagagctggtgttatcggggtaccatattcaggctacactgctagtccacttgattctgtgtctaaccttgatagccagacaatggctgcaccctttatttctcagtcatccaattttgaagctctccagtctctatctaataataccccagaaacacacactaaggcagcctggttcacatcttctatggatgtttcaccactcaacacagataatattgctgcttctgatgttaatcaaatccagagtatacgtcctgctatgacatctgatgagagtgctacacaaaacgattggtgggcagatataatgaatgatgattggaaagatattcttgacgcaacagctactgattcccactcaaaagccatgattcaaatttccaactcagctacatcactacctgcagtaaatcagtcagcttcatctcatagtagggagatttgtcctgttgctagtcctcccaatagcagcaatgcttcagttgccaaacaacggatgagatggaccccagaactccatgaatgttttgtagatgctgtaaatcagcttggcggtagcgaaaaagctactcctaagggtgtgctaaagcttatgaaagttgatggtttgactatatatcatgtcaaaagccacctgcagaagtaccgcacagcccgctataaaccagacctgtcagaaggtacatcggaaaaaaggacagccactgaagagctggtcctggacctgaaaacgagcatggatcttactgaagcactgcgccttcagatggaagtccagaaacggcttcatgaacagcttgagattcagcgaaaattgcagttgcggattgaagagcaaggaaagtatctgcagatgatgtttgaaaagcagagtcaatcgagcacggagaaagtccaggatccatcctcaagggatacaacagctaaaccgtcatctaatcagagccagtctacaaacaaggattgtggtgcaaccatggacccaaatggaacaggaggcatcgtacggactgcagaactgggagaacgttcgtctgaattaggtgtaaaacagaaactcgtagagatcgaagaatctggtaccgaagtagccacaggcgacagatctaagatctcccaagagaagcggcgcaaactgcaagatagttaacatatcggttgcactattcagacatagctgttcaaaccgtttgcttggtgaaaaattggtaatctgtgtgtcgaattcgactattgatccgtgagtccattggtgagttgtaccgctcttcagttagccatatatatttataaaggatccaaaggaggaccaaaggagaacttcctggcagccgtctttataacattagcaataagagctatccccgaagttatggggtaaaataaggtcttgaaatttagctttgtttctgaattcctccttttcttttgtttgggttgaagtggtcaccgagtcgatgtagatgaccacatgaatgaatttatcggaagcaagctagtgctgttccctattggcatagaaaccaaatattgaaacacgaacactgtttgatggtgcaaacttttagaatgtaattctgcatcgatttgtttggtggtgttggg

SEQ ID NO: 199151 - DNA, 2400 bp, Zea Mays
aggggaaaccgctgtagacagtcccgggcaactggtgggtgtcgtcctcctctttgcgcagcaggaagctaaaccaaaaagctagctgtttgtttcagcttctggctttttacaccgagaagctggtgagaagctcaaacaaacagggaagaatctcctctgaggaagccgtgagtggagctgtatcaaactggcctttaggtgctgtggttggtcactgcacccaggaggctgggaaggaggaaagggataattgattcaatctctgtttggcttctaaaagtactattcctaggttggcaatgacatctgatgggaaataacaaacctccaaacttagccgtgaagccaaacaacatgctaccaagccaaaaaaaaattctaagcaaactgagatattcaagcatcacacctgtacttggccttatggctctgacgtacaggcttgcaccggggaacctggcctgcctcattgtggagactccacagttcacatgacagttgagagtaatggattaatgcattaagcaaggtaatgaaatgtaccaaaagtgacttatggaaaagaaacagagcttgttcactgctctgaatgaggaactttaatctgatgcagtctcaaaagagcagagttttgggagcaatgtcatcctctttgcctattctgccaaatcctttgaaagggagcttctcaaggcctcataacccccagcatattcctatgttgaggcagctgcctgatgactctatgcccttgtgtattgacacacatcagtctgctagtttgcacccaagagctggtgttatcggggtaccatattcaggctacactgctagtccacttgattctgtgtctaaccttgatagccagacaatggctgcaccctttatttctcagtcatccaattttgaagctctccagtctctatctaataataccccagaaacacacactaaggcagcctggttcacatcttctatggatgtttcaccactcaacacagataatattgctgcttctgatgttaatcaaatccagagtatacgtcctgctatgacatctgatgagagtgctacacaaaacgattggtgggcagatataatgaatgatgattggaaagatattcttgacgcaacagctactgattcccactcaaaagccatgattcaaatttccaactcagctacatcactacctgcagtaaatcagtcagcttcatctcatagtagggagatttgtcctgttgctagtcctcccaatagcagcaatgcttcagttgccaaacaacggatgagatggaccccagaactccatgaatgttttgtagatgctgtaaatcagcttggcggtagcgaaaaagctactcctaagggtgtgctaaagcttatgaaagttgatggtttgactatatatcatgtcaaaagccacctgcagaagtaccgcacagcccgctataaaccagacctgtcagaaggtacatcggaaaaaaggacagccactgaagagctggtcctggacctgaaaacgagcatggatcttactgaagcactgcgccttcagatggaagtccagaaacggcttcatgaacagcttgagattcagcgaaaattgcagttgcggattgaagagcaaggaaagtatctgcagatgatgtttgaaaagcagagtcaatcgagcacggagaaagtccaggatccatcctcaagggatacaacagctaaaccgtcatctaatcagagccagtctacaaacaaggattgtggtgcaaccatggacccaaatggaacaggaggcatcgtacggactgcagaactgggagaacgttcgtctgaattaggtgtaaaacagaaactcgtagagatcgaagaatctggtaccgaagtagccacaggcgacagatctaagatctcccaagagaagcggcgcaaactgcaagatagttaacatatcggttgcactattcagacatagctgttcaaaccgtttgcttggtgaaaaattggtaatctgtgtgtcgaattcgactattgatccgtgagtccattggtgagttgtaccgctcttcagttagccatatatatttataaaggatccaaaggaggaccaaaggagaacttcctggcagccgtctttataacattagcaataagagctatccccgaagttatggggtaaaataaggtcttgaaatttagctttgtttctgaattcctccttttcttttgtttgggttgaagtggtcaccgagtcgatgtagatgaccacatgaatgaatttatcggaagcaagctagtgctgttccctattggcatagaaaccaaatattgaaacacgaacactgtttgatggtgcaaacttttagaatgtaattctgcatcgatttgtttggtggtgttggg

SEQ ID NO: 199152 - DNA, 1874 bp, Zea Mays
ccacagttcacatgacagttgagagtaatggattaatgcattaagcaaggtaatgaaatgtaccaaaagtgacttatggaaaagaaacagagcttgttcactgctctgaatgaggaactttaatctgatgcagtctcaaaagagcagagttttgggagcaatgtcatcctctttgcctattctgccaaatcctttgaaagggagcttctcaaggcctcataacccccagcatattcctatgttgaggcagctgcctgatgactctatgcccttgtgtattgacacacatcagtctgctagtttgcacccaagagctggtgttatcggggtaccatattcaggctacactgctagtccacttgattctgtgtctaaccttgatagccagacaatggctgcaccctttatttctcagtcatccaattttgaagctctccagtctctatctaataataccccagaaacacacactaaggcagcctggttcacatcttctatggatgtttcaccactcaacacagataatattgctgcttctgatgttaatcaaatccagagtatacgtcctgctatgacatctgatgagagtgctacacaaaacgattggtgggcagatataatgaatgatgattggaaagatattcttgacgcaacagctactgattcccactcaaaataaatcagtcagcttcatctcatagtagggagatttgtcctgttgctagtcctcccaatagcagcaatgcttcagttgccaaacaacggatgagatggaccccagaactccatgaatgttttgtagatgctgtaaatcagcttggcggtagcgaaaaagctactcctaagggtgtgctaaagcttatgaaagttgatggtttgactatatatcatgtcaaaagccacctgcagaagtaccgcacagcccgctataaaccagacctgtcagaaggtacatcggaaaaaaggacagccactgaagagctggtcctggacctgaaaacgagcatggatcttactgaagcactgcgccttcagatggaagtccagaaacggcttcatgaacagcttgagattcagcgaaaattgcagttgcggattgaagagcaaggaaagtatctgcagatgatgtttgaaaagcagagtcaatcgagcacggagaaagtccaggatccatcctcaagggatacaacagctaaaccgtcatctaatcagagccagtctacaaacaaggattgtggtgcaaccatggacccaaatggaacaggaggcatcgtacggactgcagaactgggagaacgttcgtctgaattaggtgtaaaacagaaactcgtagagatcgaagaatctggtaccgaagtagccacaggcgacagatctaagatctcccaagagaagcggcgcaaactgcaagatagttaacatatcggttgcactattcagacatagctgttcaaaccgtttgcttggtgaaaaattggtaatctgtgtgtcgaattcgactattgatccgtgagtccattggtgagttgtaccgctcttcagttagccatatatatttataaaggatccaaaggaggaccaaaggagaacttcctggcagccgtctttataacattagcaataagagctatccccgaagttatggggtaaaataaggtcttgaaatttagctttgtttctgaattcctccttttcttttgtttgggttgaagtggtcaccgagtcgatgtagatgaccacatgaatgaatttatcggaagcaagctagtgctgttccctattggcatagaaaccaaatattgaaacacgaacactgtttgatggtgcaaacttttagaatgtaattctgcatcgatttgtttggtggtgttggg

SEQ ID NO: 199153 - DNA, 2268 bp, Zea Mays
ctctcatcccatggcctggcgccctggccgcacgtcctgacgatcgacgctagcgaacaagcggacgagtttcccgggtcacgcatgtctcgtcgtctcgttggaccacaaccgtcgccgggcaagcagtacaagtacgccccacatgcttctctctcggagttggggacaggacagcctaccgaaatctctctgctcggtcttccttcactctctctcatagtctcatgcatgcatggctcccactgcccatcatcaggcagcgcgggacgatgagctggagaagagccgccgcaagcccggcggcggcggcaaggcggcggcggtccggtgccacccggtcctggcggaggagcgcaaggcgtccatcaggggcgtggtgggcgacctgctggccatggcgggcggcggccggaggagcctcatctcgctcggcgtcggcgacgcgtcctcccacgcatgcttccgccgcggcggggagttcgccgccgaggccgtcgcccacgccgccttgtccggcgccttcgactgctatgcgccgtccttcggcttccccgacgcccgccgctgctgcgccgtctgccgtgccgaaccaaccgaccaaacaaacagcgcggtcgccgcccacctgtcgaccggcgcggtgcaccgcacgcacgaggccgacgtgttcatgacggcgggcggcacgggcgcgatcaccgccatcgccacggtgctcggcggcgcgccgggggccaacgtcctgctgccgcgcccgggcttcgcgccgtacgaggccgcctgcgaggtggccggcgccgagccccggttctacgacctgctgccgcggcgcggctgggaggccgacctcgccggcgtgcgcgcgctggccgacgccgccacggccgccctcgtcgtcatcaaccccaacaacccgtgcggcgccgtctactccgctcaccacctccgccagcttgctgaaaccgcaagagagttggggattcccatcgtagcagacgaggtgtacgcacacatggtcttcggcggcagcaggttcgtgcccatggcctccttggcgcacatcgcgccggtcgtcagcatcggagctctgtccaagaggttcatgctgccaggatggcgtctcggttggctggccttctgtgatcccaacggcgcgctcaagcatggctgcgaccgagatgctgctcaacgtgacttctggccctgcctccatagtccaggcggcggttcccaagatcctttcagctgaacaccatgagttccataggaatgttgttcacctgctcgagtctgcagctgatgctctgtacagaagagtgaaccaaatcgaagccctgcggtgctactccaagcctgaaggctcaatgtttatgatggttgagatcaacacttcaattctacatggcgtcgccaacgacatggactttgctcgtgagttgatcaaagaagaatgtgtcctggttctacctggttctgtcattgggttgaagaactgggttaggatatttttcggagcacctgttagtttaatactagaagcttgcgacaggattgagatgttctgccgaaggaggacgctcaagcaaaacaactgaagagctgaaaatgttttgaaaccaggaagtagggtttttgttagcccagtaacatatatatacagcttcgatttattttccaatgcacattctgaggtttgcatatagaaaactgagaacagatgcttgtctatagttaaaatatatgttatacataattccaggaaatggtgtaaacatttatcatttctttacttgtgccttctacttcacagatgcattaaggttattgtctttttattgaacagacagcaagcaaaagaagcaagctaacgctaaattcatatactgacagttttttatctgttcaatgcccctcaacttcaaacttcagaatagcacaagctccaaatgacatttgttgaaaactacagggaggtgaaaagatatactgctagttctgacattacagcgaagggtaatccaatcatttgtgacctaacattaccagtcaatgtactacagcagtctgacaaggccaaaaaaacacagaatctatgaaaaaaaaaagagttttttgaattgtgctaaaactgacaaatacaaattgccaactactctaaactctatgcaaatgaagtgagaatagaaatggttatacttcaaggaactacaaaacttccgattagtagcaatgatatactgtcagtttatactattactgtgtttt

SEQ ID NO: 199154 - DNA, 2684 bp, Zea Mays
aaaccatacccagccacgccctacaacgtctcatccctacaatctacgccgcctccctggctcctaaagaagaatacgaaggtcttgttccggacatttcggattccatgggctttgatgacaaggggagcttatctagttcagaaaatcataggaatatgtcatatgaagtcagtattttcttttatgttataatgattaggttcttgatctctgtgagccgttctttaccagcattattgcactgtacatgctaatgaaccagtgaaatgcctattgctttgctttcattactaactttaaaagatcatacttcttccacatttgttgaactccactttttacgtttacctatatgtttttacccattgcaggttattgatatgaaaagggggaaactagagccaaaggaaaaggtttgtgaagaacctgaaaaggcaattcattttacgaagttagacgagacaaatatcgcaacccaaaaggtttgggatcatgtattcaaccccttcagcaatttcttggctttgtacaggccagtgtgacacagggtgcatacagttagttcttaagaatttctagtgtattgtgacatcctgcattcccaggaaacatgttaactcatgttctctcagtgcggataaattgaagcatgtacaatggaggtgcttgaaaacaccttttttttttcttcaccaaccattagcacctgattcttaaaaggcggattcgatgctttttttcgaacaacgcaagagagttgcatgtcatttcattaagaaaagagaaccaaatacacagagaggaaagagacctcctgaacacacaacacactaacacaactcctctagagctaaaacaacaacatgaccatgaccacacactagttagcacccagctgagaggggtctgcacacttcttaagaggagctcttgctgaccggcggccccggctatgagttggatacgatgcttacgttagcatcaatgcttaatgtgtgttaacatattggtttaagcttatctaagaacctatttgcaactttgcattgtaggaatgaacttctctatcaatgcctagtgatatgacaacgttctctctccctaagcacctgtgtttaagcatcttgcattgtacatgcccttagagcaactccatccttgattccttggcagtgcctttgctttaaacttacagctagtgaaccaacttttgttatactatactggcatgatgatatgtatacacattcattcctaatcaaaaccctgttaatggaaggttcataaattgatttttttatttatttatctaaaacctctgttcgactgtcacctgattgctccctactaacttttgaggttctgaagggttctaaagataaaagaaaggaaacctttgcagaaggcaacactcaggaggaatgcaagtattattcaacacctggaggatgcaaattcggtaaaacttgcaaatacctccaccgtgagggaaatggagggaaaacagaggttgaaaaagctgagctaaactttctaggtcttccactgcgaccaggtgaaaaggagtgcccatactatatgcgcactgggagctgcaaatttgcgactaactgcaagtttcaccacccagatcctactaatgcatcttcaaaagaaccagggttggaacatgagaatggcgatgtaccactgcaaaatgtccaaggatcctctcagcctagccttcagatgtggcctgaccagagagcattgaatgaacagcatgttccttttcttgctccagcaccgtcatacagtggagggatggttccacctcaaggaatgtatccatcttctgattggagtgggtatcatcaggtacctttgaatccatattaccctcccggtgttcctttcccgcattttccagctgcccatatgaatcacccgatgtacaaggctgcagatataccaggacatcaaccaccaccatctgatgagtatcccgagagacctggccaacctgaatgccagcatttcgttaagagcggtttctgtaaatacaggatgaaatgcagatatcaccatccaaggtcgcgccagtctgcaccaccaccagcaggtcttagccccatcggcttgcctatcaaacctgatcaacctgtgtgcacttactatggacgctatggcttctgcaagtatgggccagcctgcatgttcaaccaccccttcaacttcgggcctcccgtgccggcagcaggaccacccctccctgggcagtaccctacgcatggaaacttcgcctagcaggcacgtgacgagcgattttctgagtcgccacgattgcttgtaataacctcctccacctgtaaagtagcgtagacaaaagctgtacgtggttggcagtagacatccagcatgtaggcgcaacgaagttgcatggagatgggtacgttacagttggtattgcaaactttacgctgtacaagttacagtccatacataagctgccatcgcatttaaaatcctggttgctgagtactccctcggtctgtctacatgatttagtcgttttagatttatcaactttgacagattatattgtatgtgttttatagtattttacaacataaacataaagacttgacttagggcaaacctagaacgaattaaatcatgtggatggagggagtatgtgcttt

SEQ ID NO: 199155 - DNA, 1710 bp, Zea Mays
cgaccgtgcggggtacacgcctctccgagctggcgcgccttccgttcaccttcacagtgcaggactacgccgaccgcttcaacgcagtgatgtgctactcccgcaacctcggcatcccagaaggccgagttgttcgtgggcgggctctgtctctcgccagcagccatgacatcttcaaaccatacccagccacgccctacaacgtctcatccctacaatctacgccgcctccctggctcctaaagaagaatacgaaggtcttgttccggacatttcggattccatggttattgatatgaaaagggggaaactagagccaaaggaaaaggtttgtgaagaacctgaaaaggcaattcattttacgaagttagacgagacaaatatcgcaacccaaaagggttctaaagataaaagaaaggaaacctttgcagaaggcaacactcaggaggaatgcaagtattattcaacacctggaggatgcaaattcggtaaaacttgcaaatacctccaccgtgagggaaatggagggaaaacagaggttgaaaaagctgagctaaactttctaggtcttccactgcgaccaggtgaaaaggagtgcccatactatatgcgcactgggagctgcaaatttgcgactaactgcaagtttcaccacccagatcctactaatgcatcttcaaaagaaccagggttggaacatgagaatggcgatgtaccactgcaaaatgtccaaggatcctctcagcctagccttcagatgtggcctgaccagagagcattgaatgaacagcatgttccttttcttgctccagcaccgtcatacagtggagggatggttccacctcaaggaatgtatccatcttctgattggagtgggtatcatcaggtacctttgaatccatattaccctcccggtgttcctttcccgcattttccagctgcccatatgaatcacccgatgtacaaggctgcagatataccaggacatcaaccaccaccatctgatgagtatcccgagagacctggccaacctgaatgccagcatttcgttaagagcggtttctgtaaatacaggatgaaatgcagatatcaccatccaaggtcgcgccagtctgcaccaccaccagcaggtcttagccccatcggcttgcctatcaaacctgatcaacctgtgtgcacttactatggacgctatggcttctgcaagtatgggccagcctgcatgttcaaccaccccttcaacttcgggcctcccgtgccggcagcaggaccacccctccctgggcagtaccctacgcatggaaacttcgcctagcaggcacgtgacgagcgattttctgagtcgccacgattgcttgtaataacctcctccacctgtaaagtagcgtagacaaaagctgtacgtggttggcagtagacatccagcatgtaggcgcaacgaagttgcatggagatgggtacgttacagttggtattgcaaactttacgctgtacaagttacagtccatacataagctgccatcgcatttaaaatcctggttgctgagtactccctcggtctgtctacatgatttagtcgttttagatttatcaactttgacagattatattgtatgtgttttatagtattttacaacataaacataaagacttgacttagggcaaacctagaacgaattaaatcatgtggatggagggagtatgtgcttt

SEQ ID NO: 199156 - DNA, 655 bp, Zea Mays
cgcagcgcgctccctcctggccgcctctcgagcgagtggcgacgacggcgccttcgctgcgcctcagtcttcttaggcggcgcccctacccctcgaagccttccgccccacctagctcccgtgctcgccagcgtccactgaccagcaggctcccagcccccagctcccaagcggccgcagtgcccctgcaggccgcggcctagcccttgcctgtttgcgtcttgctgctgcacagcaagctttgtttccttccattcacttcgttgtagtgtggagatcagactaaccaagggcaacccaaatttggggattctttaagtgaagcctctgtatagagatagtttgaagatgatgaaccagcacagggaggaggatgcattgagaggtcaagcagtcaaaaaccagaaggcgatatgggacaagaccctggaaatgagattcttgctgcagaaggcattttctacttccaacaagttgccccaggaacccatcagagcaaggttttgcaatcatgataagcagatagaacaagcctatgatgatctgttgaattcatcgaagcagactttgagcagcatgatggagctgcaggaggctatgctcgagagtaatcaggctacaaagggtgccaatggtattgctactctccacattg

SEQ ID NO: 199157 - DNA, 591 bp, Zea Mays
aagctggatcaccctgggttggcaaaactgatcgccgcacatgcacaccctccggcttacttgatgttctttgacttcttcgagcctccaaatcttgcagaaaagatacatgtcgaggaatggatcccttctatccagcaagtggttacgatggccagtgatctagcaaaggctctccaatacctacaaatccttggggtagtacacagagatataaaacctgcgaatattttgctagacaaagatctccatccatatctagcagattttggcttagccatgtttcaaaaggatattaagcgtgtctcagttgagaactggaaatcatctggcaagcctactggtggtttccataaaaagaatatggttgggacactaatttacatggcaccagaaattttgagaaaggatatacatacagaaaagtctgatgtgtatagctttgcaatatctatcaatgagcttcttactggtgtggtgccctatacagatctgagagcagaagcacagttggtggagcagatcagctgaacgtatccacgaagatgcccggaaggggtttaactctgtggtgattttaggagcttggag

SEQ ID NO: 199158 - DNA, 2643 bp, Zea Mays
caacgtcttctccacctgctctctctctcaggcgaagaacggcgaggaagccaggagaaaagccggggctgtttgcatggcctcttagatgcagcgagcatggcgccaaactgaaagtctgtttcgccattaatggcccagcacctcccttactggaacccgtagatacagatgcacaagagatcgagcccagggatacgtaatatatcatcagcaaggggctaggatgccattagattgatagaaagagatagactgatactacagaagagaaaaaggaggagctagcgagaaagagagagagagagagagagatcgaaggaggaaaggaagagcactagaacacaacaactagtcagtggtttgttagtattagatagctaggctccaagggccaccacaaatgactagcgtcctagaaagattgggtcatggggtggttcgctagtgtggagggatagaggtgttgcttggccgctagccctccctcccccccggcccggtccctagagtcaaaccgtatttctaggtctctggcagccggctcggcgatatatacacgtactacaccgcctgtgcgcgtatgctgtgtcggcgtgcgcctgcgcccgcaacagcctgtgcttgcagctagcgatccgtccgtcgaccggccggtgcatggtgagcggcggcagcaccaaggagcagcagcacgagatgaacatctccttcgggatgatgaaccagcaccatcagcctccgtcctcctcctcttcctcgtccatgcatgcggccgccgcgagcttcatgagcggcaaggaggcgtcaggggcgtatgaccatctgggcgagctggaccaggcgctgttcatgtacctggatcacggcagcagccatggcggcggcgccacgcagcaagagcgaaggcagacactcaacatcttcccttcccagcccatgcatgtggagccgtcgccgaagggggagattagtttagtcctgtccccggcgccggtgggatccaagcagcctaggtcaccggaccatcaccatcaccagcaggcggccatggaggagttggcggggagcaggaggcagcaggagcacctccacctgcagcaccaccaaccctttgctgccgctgctgagccagcagcacccgggatgatcaaagatgtcaagccactggccaaggatcacaggagaggcacatcgaccgctgaacgcgacccaaaaacgctgagaaggctggcccagaacagggaggctgcaaggaaaagcaggctaaggaagaaggcttacatccagcaactcgagtccagcaggatcagactagctcagctcgaacaagaactgcacactgcaagagctcagggagttttcttccccaacagtggcatcctcgctgaccaaggtgtcgccggcaaaggcgtccccatcggcggcatcgacggcctcagctcagaggcggcgatgttcgacgtggagtacgggcggtggcaggaggagcactaccggctgatgtacgagcttcgggcggcgctgcagcagcacctgccggagggggagctgcagatgtacgtggagagctgcctggctcaccacgacgagatggtgggcatcaaagagggcgccatcaagggcgacgtcttccacctcatctccggcgtctggcggagccccgccgagcgctgcttcctctggctcggcggcttccgcccctccgaagtcatcaagatgctgctgagccacgtagagcccctgaccgaacagcagatcgtgggcgtgtacgggctgcagcagtcggcgctggagacggaggaagcgctgagccagggcctggaggcgctctaccagtcgctgtctgacaccgtggtctccgacgcgctcagctgcccctcgaacgtctccaactacatgggtcagatggccgtcgccatgaacaagctctccacgctcgagggcttcgtcagacaagctgagaaccttcggcagcagacgctgcaccggctgcaccaggtcctgacgacgcggcagatggcgcggtcgctgctggccgtgtcggactacttccaccgcctccgcacgctgagctcgctctgggtcacacgccccagggcaccgcaggagcaataataggtccacagctggtgacggcggcgctgatgaatggcgtgatcgccggccgccgcatacaacggcacacgcgcatgtgtccattcatgcatatatgagtcgtgcatgggcgcatgcatggtgtgtcgttcgtcatcaagaacagagcttgcaggtagagccagttagggccggccgggggagagagagctagtgaggacgagaaaccaaccaaaggataatgttaatcttggcgacgattgtcgtgttggttgctttgtagctatagctaggtgtacttgatcgttcgatcgcgatctatcgatcgatcggctgctgctgtagtcgatgcggtggagtgatgatgttgttctaagttattagttatctctcatgatcaccggacgcatatgcttcgtagtcgtttaatttggagacgtgtgtggggttttaggcaaccgtcataaatctttgatagcatgtaacacatgctaatataagcttgctttgatggtagaagtcaagacggtgatgagtttctcatcc

SEQ ID NO: 199159 - DNA, 2250 bp, Zea Mays
accacacacacacagacacaccaccacacgccggtgagccggtctctctcgcccccgtgcccgtgcgcgccacctagccgttcgttcgcatccatccgtccatccgtcacacgcacaccaccaccaacccgcgcggccgtgtctatctgggtctgggatcgagtagcaagcaatggcgctggaggccgtggtgttctcccagccccaggcgggccacttcggctgcggccgcggggactcgccgtacgcggtgccgtggagcgacctgctgcagggaggaggaggaggagggtttggcgatgtctgcgccgcgggggagtgggtcgaccagcacgacctcgacacctgctgggccgcgcccaccgtgggggacgactgggactggggggaggcgctctcgcgggaccactcctcctcggacgccgcctccacggaccacggcagcaggaaggcggcgcccgagccggcggcggggaggaggaagcggaggcgcaccagggtcgtcaagaacaaggaggagatcgagagccagcggatcacccacattgccgtcgagcgcaaccgccggcgccagatgaacgagtacctcgccgtgctccgctccctcatgccgccgtcccacgcgcacaggggtgaccaagcatcgatcgtgggtggcgcgatcaactacgtgagggagctggagcagctgctccagtcgctggaggtccaaaagagcctgaagcagagccgggggcggcggccagcaggcggcggcgccagctgctcccccccgttcgccggcttcttcagcttcccgcagtactccaccgccccaagcaccacgagcagcagcggcggagagaaatgctgcggccacgacgccgcggccgcggacatcgaggtgacgatggtggaaggccacgccagcctcaaggtgctggcgcgccgccggcccaagcagctcctgaagctcgtcgccgggctgcaccagctgcgcgtcccgccgctccacctcaacgtcaccgccgccgtcgacgccatggtcctctacaccttcagcctcaaggtaatactgaattatacatattaaaaaaaatcaatactttactggctaaattaatacaacgacgcataaacacgaactttagtgctccggccggaactactccacactccagcaggttagtttaattaaagccggtagagacaaaacctggaaagtagattctcctccgtttccaatctatctatctatctatattagcgaagccggtggagggcgattataatggtggcttggctttcccgtttggacggcaggtggaggatgactccaagatgggctctgtcgaggacattgccaccgccgtgcacgagattctcggcagcatacagcggcagcagcaggaggaggaggaggaggagaccgccgccatgtgaaactctgcaccacctgcatgtccggcaggcacactgccatcctgccaatggaatccattgcctgtgcatgtgatgactgtgattgcgcccccttgctaggcacagacacctgagcctgccatgatgcagcaatactgtcccagtccggccgtggtcgcaaagaatatgctatgagaaatcttaggctagctgtaatctaagcaccacctcccttctggagtgagagcacttgtgtagattattgacagatacagctgatctgccctctcgagctacataccactgcgcgcttacatacgccgtcgttggcgttaacaggtctcgactctcgagcctgcctgccagacagaatgatggctcggcccgtgatctatatatgatgtgcttactgtgtatcagtagctgctagcccgctaccatatactactatatacacaccactacttcatccggacatgcgtgcgttaactacaccgcggcagtcgtctccttgttctgtctctcaccatgcaggatcaggaagaacgaatgtttcagtagcctgtagcacacacgtacgtcagtgaaaaatgcgtcggcgtacacggcggacagcatgaggtgagcctgtgctaggggcgaggccactggaggagattccattgacgaccatgaaacagcatgaccgaaggacccaaggacgacggcagtagtctcgtgtcgtcctcctcctcctcctcctcctcctcctactacagcctacacaggtggtgggatttcagaaacgtatgtgttcattttcacgcgcacggcctctcgggccatgcaagcaaaaaaaaatgtactgcc

SEQ ID NO: 199160 - DNA, 1482 bp, Zea Mays
acgttttagagaagtatgtggcgaacatgacattacagagaagccatcgtttcatagtgacaaaatagtaaaaagctcgtccctgtctcgggtatcgtcgctggtcgctgccgcagccttcgtcctccctctcccactcccgatcgcatccaccctggaaccctagcggcccagcccgcgaccatggcgcggcggtcgacccctctcctacgccgccttctcgccccgtcaccttccctccccactcccctagccgacgccgtatcccgccgcaccgtcacctacatgccccgcccgggggacggcgctccgcgcggcgtcaccctcatcccgggcgacggcatcgggcccctcgtcacgggcgccgtgcggcaggtgatggaggcgatgcacgcgccggtctatttcgagacgtacgaggtccacggcgacatgcccacggtccccgccgaggtcatcgagtccatccgccgcaacaaggtctgcctcaagggcggcctcgccacccccgtaggcggtggtgtgtcctccctcaacgtgcagctccggaaggagctcgacctctacgccgcgctcgtcaactgtttcaacctccctggcctgcctaccaggcacgacaacgtggacatcgtcgtcattcgggagaacagtgagggcgagtactcggggctcgagcatgaggtcgttcctggcgtcgtggagagtctcaagtgcataaagccaatatcatgaagcttgctgatggtttgttcttggagtcttgccgtgaggttgcaaagaagtaccctggaattaaatataatgaaatcattgtggacaactgttgtatgcagcttgttgcaaagcctgaacaatttgatgttatggtcaccccaaatctttatggcaatctggtggctaatgtagctgcaggtattgctggaggcactggtgtcatgcctggaggcaatgtgggtcaggaccatgctatcttcgagcaaggtgcttctgcaggaaatgttggaaatgagaaaattgtggagaagaagagagctaaccctgttgcgctgctgctatcttctgccatgatgttgaggcacttgcaatttccatcatttgctgaccgtttggagacggcagttaagcgtgtcatagcagaaggcaagtacagaaccaaagatttgggcggcaccagcacaacccaggaagtgatagatgctgtcattgccaaactgggttaaacacaaaccgtgtgtttaatacaatttttttcctcatggactaggtaactagtccttactaaatgtttgttcttggtataggtttagactttagaccaccattttgttcggcaaattcttgtacaatcttcaggtatcttgtttctggcctggtttgggtgtgtggtgtaactgagcaaactcgtattaatttttacgcaaatttttgtgaccttaattcttaactggaaataagagaaaaatatggaacagttctcctttc

SEQ ID NO: 199161 - DNA, 1958 bp, Zea Mays
ctcccatccagtgcctccacacgggagttttcaggagcgcgttgtctaggaacgaacccccggaaacattttcccttcagacggttcaggaagcaattaaacctcagaaggaaaccgtgttggttctagaggagaatcagtccttggaaaatgctcttcgaactttgctgcaggagcttgtgtcatctgcggtccaatcggataaaaagattatgcagtacgggaattctttggatagcggagaaagtaactgcctgataactcgccttcttgatattgtgctttacctttgcgaaagagggcatgttgaaggtggtatggtattccagctgttagaagacctaactgaaatgtcaacaatcaaagactgcaaagatatctttgggtatattgagagccagcaagatgtattggggaagcaagaactttttggacgtggcaaactagttatgctaaggacttgcaaccaacttcttcgcagactatcgaaggcaaatgatgtggtgttctgtgggcgcattattatgtttcttgcacattttttcccattatcggagcgttcagctctcaacattaaaggggttttcaatacatcaaatgtaacaaagtacgaaaaggatgctatggatggaatctctgttgatttcaacttctacaagaccctctggagtctacaggaacatttcagcaacccagctttgacttctacaaatccggcaaaatggcaaaagttctcttctaatctggcggttgtgttgaacacatttgaagctcaacctcttagcgatgatgatggaaaacttaacaatctgaacgaggaggaagatgctgctttcaatattaagtacctgactagcagtaaattaatgggtttggagttgaaggacccaagttttcgacgccacatccttgttcagtgtcttatattttttgactatctcaaggcacctgggaaaaatgacaaagaaggtccaacagggagcatgatagaggaaattaaatcttgtgaagagcatgttaagaagcttctggaaattattccccccaaagggaaggaatttctgaaaagcattgaacatattcttgagcgggagaaaaattgggtttggtggaagcgagatgggtgtctcgcatttgaaaagccaccctttgaaaagaaaccaggtcaggctggtgccagaaaacggaagccaaggtggagactgggaagcaaagagctcagccaactttggaaatgggcagaacaaaaccccaatgtcttgactgatcctgaccgtgtccgcatgccatcaattacagaatattggaaaccacttgcagaagatatggatccatctgctggaattgaagaggagtatcaccacaaaagtaatcgggtgtactgttggaaaggactacggttttcggccaggcaggacttggatggattcgcgcggttttcagactacgggatcgaaggggttgtaccttcagaactgctgccacctgaagtaaatgccaagttttcttctaaacccgccgagaaggttaagcggacgagaaaggaagattcaaaaagcgtgtcagctcatcagcccagagagcatcaggttgctgcgacacctgaaaccgacggcggtgtcgacccggaagaaggcgaaggcgcggcgccaatggattccgacaacggcgcggtgggggatagccagaaacggagcccgggggaggtctctggccctgaaagcgggcagtgcgagcctgaggcggacgctgatgataacgtgaggacggaaactaccagtagggatgctcgtgccggagagatgaaatgaaacagtggcatgaagaggaaccagattttgtcgactcactgacattgaaccagattttgaacagctgagatacattctcttgttggtgtgtactgtgtagtagacatcagtagccatccatttgaaggaaatgcttcccgctaggtc

SEQ ID NO: 199162 - DNA, 1333 bp, Zea Mays
caccaatgggcaatggcctcgcgccttctcgctccccgcaccctatcctctcctctcagctcccttcccggctgcgagcaatgctcctacctggctacctccatgccgcgcgcggctgaaggagaaactgggcaacgagccgtcatacaagcagctggcgcaatcgctgcggataccagctcctgagctgcgagcgaggatgcgcgagtcgtttcttgcgagggagatgctggcgatgagcaacacccgtctggtgatatccattgcccagaagtacgacaacctcggcgtcgagctgccagaccttattcagggtggtctgatagggctgctccgtgggatcgagaagtttgatgcctcaagggggtttaggatctccacctacgtgtattggtggatccgtcagggggtttcaagagcattggccgacaactcgagatcgttcaggctccctacttatttgcacgagaggttggtagccattcgcggcgcaaagtacgcgttagaagaccaaggaattgctccgacagtagagaacatagcggagtcgctcaacatatccgagaagaaagtgcacaacgctacagaggctgtgcacaaggttatttcactggatcaacaggcgttcccctccttaaacggcctacctggggatacactccatagttacatagaggatcaaaacgttgcaaatgatccgtggcacggatttgaggaaaggtacctcaaggaggaagttaacagtcttataaattcaactctcaacgagcgcgagagggacattattcgattatatcatggcataggaaagcagtgccatacatgggaggatatcagcagacaattcgggttgtcgagggagcgcgtgaggcaggtagggctcgttgcgatggagaagctgaagcatgctgcaaggagggaacatttggatgcgttgcttgaggaatactgagtgagatgttcttcgcttgagtcggttaattccaccgttgcagtggttgtatatactcggaaacataggggggcaggcacatcatccttgaaaggcttcactgccactcactcactctgcagataactatacatgtacatctgtgacgatcagtaggcatgcatagttaaagcatctgtggctgcaaaatcgtcaaggcgatccaacaaaaggagaaccttttttttggtcttggaagctttacaaagtgtgatgtggtatgtatatgcaaatgtaatgtatcagtaattcagtagagcaataacgtttatgtcctggatttgtattcttgtccagttacatagaaggaaaaaatgcttacaactgcagacaatttgcctt

SEQ ID NO: 199163 - DNA, 2519 bp, Zea Mays
ttttaagctcgatcgtccctctcgctgccgtctgctgttgtcttatacggattatagttttggcgcctcaatcgcgagggtagggtcaacgcgggaggggcccaatttcgtgtggacaggcacaggctgctgtgatcctttggtggatgggggcagcgcagctagccaccggaggttgcctagtttgaaatttaaccgcgttaccgaagtggtactccgtagttcttatggatcaacttgccctgcttgcgacggagctgggtgactcgtcagactttgaggtggagggcatccagaacctcactgagaacgatgtcagtgacgaggagattgagcccgaggacctggcgcggcgaatgtggaaggacagagtcaggctgaggaggatcaaggagcggcagcacaagcttgccctgcagcaggcagagctgcagaagttgaggcccaagcccatatccgaccaggccatgcgcaagaagatgtcaagggcacacgacgggatcctcaagtatatgctcaagctcatgcaggtgtgcaatgcacgcgggttcgtttatgggatcatcccggacaaggggaagcctgtcagtggcgcttccgataatatcagagcttggtggaaggagaaggtgaagtttgataagaacgggcctgcggcgattgagaaatacgagtctgacaacttagtatccgctactgcccagagtggtggaactaagagccagcacagcttgatggatctccaagatgccactcttggttcactgctttcctcattgatgcagcattgtgatccaccgcagcgcaagtacccattggagaagggtgcttcacccccgtggtggccttcagggaaggaggaatggtggaccgccctgggtcttccaagcggccaagttcctccttacaagaaaccacatgatcttaagaaggtctggaaggctggtgtgcttacaggtgtaatcaagcacatgtctcccaattttgataagataaggaatcatgtacggaaatcaaagtgtttgcaggataaaatgactgcaaaagaaagcctgatttggctgggagttctacagagagaagaaagccttgttcacagaatcgacaatggcgtatcggagattactcagcgcagtatgccagaggagaggattgcagacacaaatagcagcagtaatgagtatgatgtgtatggttttgaggatgctcctgtttctacatcatctaaagatgatgaacaagatctgtctccagttgcacaatctgctgtggagcatgttccgaaaagaggaagggaaagagcttacaataaacgccctaatcaaatcgttcctggtaaggcaaaagaaccaccaaagagaaaaagaacacgccacagctccactgttaccgagccagatgcacacagagttgttgatgcaccagaaaactcaagaaatttgatccctgatatgaatagattggatcaagtagaaatcccaggcacgtcaaaccagattgtcacctttgaccatgggggcaccacaactgaagctttacaacacagaggagatgctcaagtacaggtccatcctcctggtgctgaggttaatagcttctatagtgctccaactgcaaaccctactcctataagcatatatatgggtgaccagcctataccttatcaaaataatgacagcacaaggccgagatctgaaaatagttttcctgtagatgctcatactggtttaaataatcttcccagcagttatcagaacttacctccgaaacaatcactaccacttcccatgatggatcatcatgtggttcccatgggtatcagggcacctactgatagcattccttacggtgatcatatactaggtggtggaaattcaacttctgttcctggagatatgcagcaactcatagattttcctttctatgctgaacaagataagtttgttggcagttcctttgaggggttgcctttagactatatcagtatcagtagtccaatcccagatattgatgacttgctgcatgatgatgatttaatggaatacttgggaacataacattcggtaattccattacatatcctttttctttgctggttctttctttatgataatttagttcttttctcatttcgttttcaggtcaggatgagtctgctagcatttgttttcatccattttagtctcactggagtcatcatcctaacttaagtatggagggctaaacttctcattttgttgccggtcttgtcattggagaccaaccatctgttgtatgctgagtgatgacttgtattctttggcaataatgtgtcatacagtgacacaattgcacatgtggaaggaagtctgtcacatgcgcggcaggcctggagcatctcaagagatcgtcagggattcagagaattcagaaagactgggaccagacaaaaaaaaaaagagctctggcgagcagaatatctagctgtgactgtgaaacggggtgtcaggcacccgtttgacttttatcggcaaatgttg

SEQ ID NO: 199164 - DNA, 2534 bp, Zea Mays
gacacatatggtccaacacgaccgaacggagcagaggatccaccgaaacaccaaacggaggcctcgtgtctgctttcgcccatccctgctcttgccccgtttctcccttccatcgtgcttcctcctctctctctctctttttcgctcccgatttccaaatctcaaataataaataaccagaagggaagcgaatcttctccatcaacccagcaaatcgctcgttcgagcgtcccactcgacgagaaattctcacccatcacctccgcgtcgctccccccgttcgccgccaggggcccaatttcgtgtggacaggcacaggctgctgtgatcctttggtggatgggggcagcgcagctagccaccggaggttgcctagtttgaaatttaaccgcgttaccgaagtggtactccgtagttcttatggatcaacttgccctgcttgcgacggagctgggtgactcgtcagactttgaggtggagggcatccagaacctcactgagaacgatgtcagtgacgaggagattgagcccgaggacctggcgcggcgaatgtggaaggacagagggaagcctgtcagtggcgcttccgataatatcagagcttggtggaaggagaaggtgaagtttgataagaacgggcctgcggcgattgagaaatacgagtctgacaacttagtatccgctactgcccagagtggtggaactaagagccagcacagcttgatggatctccaagatgccactcttggttcactgctttcctcattgatgcagcattgtgatccaccgcagcgcaagtacccattggagaagggtgcttcacccccgtggtggccttcagggaaggaggaatggtggaccgccctgggtcttccaagcggccaagttcctccttacaagaaaccacatgatcttaagaaggtctggaaggctggtgtgcttacaggtgtaatcaagcacatgtctcccaattttgataagataaggaatcatgtacggaaatcaaagtgtttgcaggataaaatgactgcaaaagaaagcctgatttggctgggagttctacagagagaagaaagccttgttcacagaatcgacaatggcgtatcggagattactcagcgcagtatgccagaggagaggattgcagacacaaatagcagcagtaatgagtatgatgtgtatggttttgaggatgctcctgtttctacatcatctaaagatgatgaacaagatctgtctccagttgcacaatctgctgtggagcatgttccgaaaagaggaagggaaagagcttacaataaacgccctaatcaaatcgttcctggtaaggcaaaagaaccaccaaagagaaaaagaacacgccacagctccactgttaccgagccagatgcacacagagttgttgatgcaccagaaaactcaagaaatttgatccctgatatgaatagattggatcaagtagaaatcccaggcacgtcaaaccagattgtcacctttgaccatgggggcaccacaactgaagctttacaacacagaggagatgctcaagtacaggtccatcctcctggtgctgaggttaatagcttctatagtgctccaactgcaaaccctactcctataagcatatatatgggtgaccagcctataccttatcaaaataatgacagcacaaggccgagatctgaaaatagttttcctgtagatgctcatactggtttaaataatcttcccagcagttatcagaacttacctccgaaacaatcactaccacttcccatgatggatcatcatgtggttcccatgggtatcagggcacctactgatagcattccttacggtgatcatatactaggtggtggaaattcaacttctgttcctggagatatgcagcaactcatagattttcctttctatgctgaacaagataagtttgttggcagttcctttgaggggttgcctttagactatatcagtatcagtagtccaatcccagatattgatgacttgctgcatgatgatgatttaatggaatacttgggaacataacattcggtcaggatgagtctgctagcatttgttttcatccattttagtctcactggagtcatcatcctaacttaagtatggagggctaaacttctcattttgttgccggtcttgtcattggagaccaaccatctgttgtatgctgagtgatgacttgtattctttggcaataatgtgtcatacagtgacacaattgcacatgtggaaggtgaacatggcctaagttaaatatgatatctttctggagataatatctgttgaagaaagggctagatttttttttatagttttagaatccttgagatatgattgttttcctctgtcatcctatctttgtctatggcttttgccatctacaaaaacatcgggaatccaacactgtatatgcaataaagaaatgaaaaaaatgattttgccatcctctctgttgtgtttgttttttatttcaatgtcccctaagaatgctgttgttgcataacaaagtccac

SEQ ID NO: 199165 - DNA, 2525 bp, Zea Mays
tcacaattaactaattcagacctgggagcgaggagggctcgcggcagcggcagggtctccggtgtttttgttccagaatctgtagcaaatggctgacggcgaggacatccagccccttgtttgtgacaatggaactggcatggtcaaggctggttttgctggtgacgatgcgccaagggctgttttcccaagcattgttggacgcccacgtcacactggcgtgatggttggcatggggcagaaggatgcgtatgttggcgatgaggctcagtccaagaggggtatcctgactttgaagtacccgatcgaacatggcattgtcaacaactgggatgatatggagaagatctggcaccacaccttctataacgaactccgtgttgcgcctgaagagcaccctgtgctgctgaccgaagccccactcaacccaaaggctaacagggagaagatgacccaaatcatgtttgagactttcaatgttcctgccatgtatgtcgccatccaggctgtgctttccctgtacgccagtggacgtacaactggtattgtattggactctggtgatggtgtcagccacacagtgccaatctatgaaggttatgcccttcctcatgccatcctgcgccttgaccttgctgggcgtgacctgactgacagcctgatgaagatcctcactgagagaggttactccttcaccacctctgctgaacgcgaaattgtaagagacatcaaggaaaagcttgcatatgtggctcttgaatacgaccaggagctcgagaatgccaagagcagctcatctgtggagaagagctacgagctgcctgatggtcaggtgatcaccattggggcagagaggttcagatgccctgaggtcctcttccagccttccttcattggtatggaagctcctggcatccatgagaccacctacaactccatcatgaagtgcgatgtcgacatcaggaaggacttgtatggtaacattgtgctcagtggtggcacgaccatgttccctggtattgcggaccgtatgagcaaggagatcactgcccttgcgccgagcagcatgaaaatcaaggtggtggcaccgcctgagaggaaatacagtgtctggataggaggatccatccttgcctccctgagcaccttccaacagatgtggatctcaaaggctgagtatgacgagtcaggacctgggattgttcatcggaagtgcttctaagctctgggtcccccttcggctccattttatttattccttgagtgtttttcatataagctactatgtttgggattgcatgcctttgagcaggcaatgttgttgaatttatattttgggatttatattttgtggctcactacaatgcatacattgctccagctcctttccatgccaaatttgttgctagtggtgaaaacatcaaccacaaaaaagagaggatggaaattaataaagtacctaggatcatattataactgtacttgtcgagtaacactattggttctctttgtacatccatctctgagacatgcaattcatttgcgacgtgtttggtttgatgtagtgtaagggtataggacagttatctgataacgttacatgtgtttgttatgagttctattggaatcggatacattagaatcggataccacagtatagaaaactcaaaccctccaaccctagccggaatcaacgacccgattcactcgctcggcgccgctcgagccttcctcctcggacgccagtgccacgccgcgccgccacccagcctccctcctcctcggacgctagccgccggcgccaagtattcgccgccgtccagagtccgtttctccgtctctccgggtctggtggccacacctccgaaaccggctccttgttcctgtcgcctgccatcggcgacagatgcaacgagacgcagcgggatgctagctagagcgcgcgccaccactgtttccgtcccgctcagggccgtgacttgactgagcctcaagattgctgctgctggaatcattcacgggcttcggtctagatgatgactgatgagcgacgactgggacttgtgcgtgttcgccagatctagctagcatcccgttgtcagcctgttcctaatctaaacggagcagcaatggacagcattcttggacgacgacgtggggcacagtgggcagctctgtccatgtatttatctgactggaatagccaaagccagctctgtccatcagctctggatagctctgccatcagctctgtccatgtatttatcctcaagaactcatttgatattcagatttatcctcaaatctgaaaccgactgcagtgagcagccatgtcgtctgtttaatttatttgatgtgcacaatgatatccagatttatatgaaactcatttgttgacctccagatttattctcaagaactcgacgaaggaatatggcatttaggggtatcttgagttctctccttgtcacgtactattatgtctggttgctcatgggattagcatatagaagaaaatgtctgag

SEQ ID NO: 199166 - DNA, 1866 bp, Zea Mays
gttaaaaccacccacccttcttctccagttcctcatcaccactgagtcacgactccagatctcgcaccgctcgccatggacctcctcgacgcgaggcaccgccacacgccggatttgagctcctcccaagatgccgcctccaacatggggctcccgctcgccggtgccgcctaccagccctacgtttctgagcttctttccttctccatcgagcgcctccacaaggagccggagcttttgagggtcgacgcggagcgggtgcggcggcagatgcaggaggtggcggtggaaaactacgccgcgttcatcgccgcctctgaggcgctctccttcgtccgcgcgcagcttgagagcttcgacggccacctcgaggccatgatagaggagataccaaacttaacatctggctgcactgagtttgttgaatccgcacaacaaattttggaggagaggaagcttaatcaaacattactagccaaccacactacattgcttgacttgcttgaaattccacaattgatggacacgtgtatacggaatgggaactatgatgaagcacttgacctagaagcttttgtgagcaaaatctggaagttgcaccctgatttacctgttgtccaaggattagccactgaagtcaagaagacagtgcaatcattagtttcacagcttctccagaaacttcgatcaaatattcagttacctgagtgcctacgaattgtagcacatctgcgccgaattggagttttcagcgagtcagaattgcgcttacagggaagcttggctttctggaattcttgaagatctggaccaaaggaatgtttatgattacctgaaaggcatggtgacttgccacagggtacatctatttgatgttgttaatcaatatcgagcaatattcaacaatgataaatctggaaatgatgagaactatgacggcgggctgcttttcagctgggcaatgcaacaagttagtaatcacctcactactcttcaagttatgttaccaaacataacagaaggtggttctctgtccaacattcttgaacaatgcatgtattgtgcaatgggtcttggcttagtcggattggattttcgtggccttcttccaccgatctttgagaatgcggttctaaatttattctcaaagaatatgagtacggcggtcgaaaattttcaggtcattttggattcacactgttgggttccgatgccatctgttggttttgtagcaaatggtgttgtcgatgagacttctgatgatgtgactccaccttccgttttaatggagcatccacctcttgcagtgtttgtcaacggtgtttcagcagcaatgaatgagctaagaccgtgcgcaccattgagcttgaaagttgtccttgctcaggaggtggtcaagggactacatgcagtctctgactccctagtaagatacaaagctatgcggatgcttcgtggaaatgagtccgcccttttcctttcactatgccaggcattcatcgaggttgcatatccttattgtgccgcatgttttggccgatgctacccaaacggggcaacattgatctcagagcgtcaaggcacatttgacgctgtccgtcagctattgaccgtgccggcaagatctaacagttccagcatcgaaagaaggcagtcaggaggcatcgaaagaaggcagtcaggagccattgaaagaaagcagtctgttgagagcactgggatagcggtcactgataacgggctctcagccgatggacctgggctagagacgaacagttctgctgcaaccaccacctcaccggtagacgacggtccaccagcgactctagattaaattgagcagaaaaaggtgcaagctgagtatca

SEQ ID NO: 199167 - DNA, 2023 bp, Zea Mays
atcaccactgagtcacgactccagatctcgcaccgctcgccatggacctcctcgacgcgaggcaccgccacacgccggatttgagctcctcccaagatgccgcctccaacatggggctcccgctcgccggtgccgcctaccagccctacgtttctgagcttctttccttctccatcgagcgcctccacaaggagccggagcttttgagggtcgacgcggagcgggtgcggcggcagatgcaggaggtggcggtggaaaactacgccgcgttcatcgccgcctctgaggcgctctccttcgtccgcgcgcagcttgagagcttcgacggccacctcgaggccatggtgtatacggaatgggaactatgatgaagcacttgacctagaagcttttgtgagcaaaatctggaagttgcaccctgatttacctgttgtccaaggattagccactgaagtcaagaagacagtgcaatcattagtttcacagcttctccagaaacttcgatcaaatattcagttacctgagtgcctacgaattgtagcacatctgcgccgaattggagttttcagcgagtcagaattgcgcttacagggaagcttggctttctggaattcttgaagatctggaccaaaggaatgtttatgattacctgaaaggcatggtgacttgccacagggtacatctatttgatgttgttaatcaatatcgagcaatattcaacaatgataaatctggaaatgatgagaactatgacggcgggctgcttttcagctgggcaatgcaacaagttagtaatcacctcactactcttcaagttatgttaccaaacataacagaaggtggttctctgtccaacattcttgaacaatgcatgtattgtgcaatgggtcttggcttagtcggattggattttcgtggccttcttccaccgatctttgagaatgcggttctaaatttattctcaaagaatatgagtacggcggtcgaaaattttcaggtcattttggattcacactgttgggttccgatgccatctgttggttttgtagcaaatggtgttgtcgatgagacttctgatgatgtgactccaccttccgttttaatggagcatccacctcttgcagtgtttgtcaacggtgtttcagcagcaatgaatgagctaagaccgtgcgcaccattgagcttgaaagttgtccttgctcaggaggtggtcaagggactacatgcagtctctgactccctagtaagatacaaagctatgcggatgcttcgtggaaatgagtccgcccttttcctttcactatgccaggcattcatcgaggttgcatatccttattgtgccgcatgttttggccgatgctacccaaacggggcaacattgatctcagagcgtcaaggcacatttgacgctgtccgtcagctattgaccgtgccggcaagatctaacagttccagcatcgaaagaaggcagtcaggaggcatcgaaagaaggcagtcaggagccattgaaagaaagcagtctgttgagagcactgggatagcggtcactgataacgggctctcagccgatggacctgggctagagacgaacagttctgctgcaaccaccacctcaccggtagacgacggtccaccagcgagtaagtagcttggacctccgtttgaatcgtcaaagtccttcatcaaggcctggtttagtcaaccagagaaaaaattgctgcaaagttatattaatagagaattattcatagttttgttctcagtcttacagtgcacacaagatctcactggatatctgtatctcacttttttatcactcgaacaattaaacttctagctgttcattgttatactcgatacctagatgttgtagagtttccaaccggaacattcaataatctgattaagtgattagtacaaaccgtgttcaccgtgttgactacacttttgaagtcaaagaactgattcatgagtcatatatgtaatctaacactactggacatatttttctgtctgaatctat

SEQ ID NO: 199168 - DNA, 2206 bp, Zea Mays
gttaaaaccacccacccttcttctccagttcctcatcaccactgagtcacgactccagatctcgcaccgctcgccatggacctcctcgacgcgaggcaccgccacacgccggatttgagctcctcccaagatgccgcctccaacatggggctcccgctcgccggtgccgcctaccagccctacgtttctgagcttctttccttctccatcgagcgcctccacaaggagccggagcttttgagggtcgacgcggagcgggtgcggcggcagatgcaggaggtggcggtggaaaactacgccgcgttcatcgccgcctctgaggcgctctccttcgtccgcgcgcagcttgagagcttcgacggccacctcgaggccatgatagaggagataccaaacttaacatctggctgcactgagtttgttgaatccgcacaacaaattttggaggagaggaagcttaatcaaacattactagccaaccacactacattgcttgacttgcttgaaattccacaattgatggacacgtgtatacggaatgggaactatgatgaagcacttgacctagaagcttttgtgagcaaaatctggaagttgcaccctgatttacctgttgtccaaggattagccactgaagtcaagaagacagtgcaatcattagtttcacagcttctccagaaacttcgatcaaatattcagttacctgagtgcctacgaattgtagcacatctgcgccgaattggagttttcagcgagtcagaattgcgcttacagggaagcttggctttctggaattcttgaagatctggaccaaaggaatgtttatgattacctgaaaggcatggtgacttgccacagggtacatctatttgatgttgttaatcaatatcgagcaatattcaacaatgataaatctggaaatgatgagaactatgacggcgggctgcttttcagctgggcaatgcaacaagttagtaatcacctcactactcttcaagttatgttaccaaacataacagaaggtggttctctgtccaacattcttgaacaatgcatgtattgtgcaatgggtcttggcttagtcggattggattttcgtggccttcttccaccgatctttgagaatgcggttctaaatttattctcaaagaatatgagtacggcggtcgaaaattttcaggtcattttggattcacactgttgggttccgatgccatctgttggttttgtagcaaatggtgttgtcgatgagacttctgatgatgtgactccaccttccgttttaatggagcatccacctcttgcagtgtttgtcaacggtgtttcagcagcaatgaatgagctaagaccgtgcgcaccattgagcttgaaagttgtccttgctcaggaggtggtcaagggactacatgcagtctctgactccctagtaagatacaaagctatgcggatgcttcgtggaaatgagtccgcccttttcctttcactatgccaggcattcatcgaggttgcatatccttattgtgccgcatgttttggccgatgctacccaaacggggcaacattgatctcagagcgtcaaggcacatttgacgctgtccgtcagctattgaccgtgccggcaagatctaacagttccagcatcgaaagaaggcagtcaggaggcatcgaaagaaggcagtcaggagccattgaaagaaagcagtctgttgagagcactgggatagcggtcactgataacgggctctcagccgatggacctgggctagagacgaacagttctgctgcaaccaccacctcaccggtagacgacggtccaccagcgagtaagtagcttggacctccgtttgaatcgtcaaagtccttcatcaaggcctggtttagtcaaccagagaaaaaattgctgcaaagttatattaatagagaattattcatagttttgttctcagtcttacagtgcacacaagatctcactggatatctgtatctcacttttttatcactcgaacaattaaacttctagctgttcattgttatactcgatacctagatgttgtagagtttccaaccggaacattcaataatctgattaagtgattagtacaaaccgtgttcaccgtgttgactacacttttgaagtcaaagaactgattcatgagtcatatatgtaatctaacactactggacatatttttctgtctgaatctat

SEQ ID NO: 199169 - DNA, 1075 bp, Zea Mays
ctcgcctcgcaatcttttccacctctcgtcgccgtacggttccttgttttggccttcagcagctccgtctccgtgtgtatctgatcgggggattctttgcttgagaaactgctagcatgggcgcggtgcttggacggcatgacacgcacaagcggagttcccatggttcgaagctggaggtaaagatggtcgacgctatgcagcagagagcatcgcatggaacctcactgaaatcgttcgatagcattatcatgaagttccccaaaatagacgagagtttcagaaaatgcaagactatcttcgaacagtttgatgaagattcaaatggcgaaatagataaagaggaactgaaacattgttttcaaaagctggaaatctcattcacagaggaggagatatgtgatctctttgaagcttgcgatataaatgaagatatgggcatgaagttcaacgagttcattgtctttctgtgccttgtctatcttctcaatgaagcagctgtcttggaagcaaagataaagatgggactaggaaatcttgaggcaaccttcgagaccttggttgatgcgtttgtcttcttggataagaataaagatgggtatgtgagcaaggatgagatgatccaagcaataaacgagaccacgacaggagagcgctcttctgggcctatagccatgaaaagatttgaggaaatggactgggacaagaacggaatggtgacattcaaggagttcctgtttgccttcactcgctgggtaggaattgatgaaaatgaggatgaagatgacgatgaataaggactgtgaaggctggttattcttcaagggttagggccagatcagccttggagaagctggaaatggatggcggataaaagcagttgacgtttattggttgcttgttgatcgtaatattcatgccattgctaatagaatgtctcgacattatactcctagtagggtgacttgcatgtctgaacactggtatcaatgttacagttgctgtctactttcttccatgccattcagccattgttctactctgcgctagcccgcgccgatccatttcaatcgtg

SEQ ID NO: 199170 - DNA, 1844 bp, Zea Mays
gctggacccacctgccggcgtcccgaagagcggaacacctgaagccaacgccggccgtgctgcttccgctgcctcatcgcaccaagccaccagtccgcagcacgaaagcttccccccctctcttctcctgctggttggctcatcaggcctgcccgaataatcctcctgcggattcccctcacggcaggccaaaacccgcacctttcccccgtcgacagattctcaaacccggcgaactccgggcagggctcacgtcgccgatcccgctcccggattctctttgccgccgcgaggagacggcgtccagtccaggccttcagcagctccgtctccgtgtgtatctgatcgggggattctttgcttgagaaactgctagcatgggcgcggtgcttggacggcatgacacgcacaagcggagttcccatggttcgaagctggaggtaaagatggtcgacgctatgcagcagagagcatcgcatggaacctcactgaaatcgttcgatagcattatcatgaagttccccaaaatagacgagagtttcagaaaatgcaagactatcttcgaacagtttgattcaaatggcgaaatagataaagaggaactgaaacattgttttcaaaagctggaaatctcattcacagaggaggagatatgtgatctctttgaagcttgcgatataaatgaagatatgggcatgaagttcaacgagttcattgtctttctgtgccttgtctatcttctcaatgaagcagctgtcttggaagcagtatccttcataagtcatattaattcacatagtaacatcctgattgcattattagtgttattgtcacattgtgttgtgttgctacagaggtatgcaatgtaattttacttcacttacaaaaaggtaattttactttgataatttttcttaaatccattagcgaagtcttggtttctttatataattacacgtggttcttattggcaaatttattgtgttgatggagacaccaattttcatcctaacataagcttgccgcaattttgattggattatgaaggtttctagatttactgtgagaatttttttgcactcggtgttttagttctcttagatcgtctcagcagtctacccatagtttacccaaaagcattgttttgcactgttctgcattataaattacactgttcgcagagtggagtttgaatatgggtatggagatcggtaagctgctggagatagtcttatgccatttctgttaggagcgtccatgtttcctttacatacttcacagaagataaagatgggactaggaaatcttgaggcaaccttcgagaccttggttgatgcgtttgtcttcttggataagaataaagatgggtatgtgagcaaggatgagatgatccaagcaataaacgagaccacgacaggagagcgctcttctgggcctatagccatgaaaagatttgaggaaatggactgggacaagaacggaatggtgacattcaaggagttcctgtttgccttcactcgctgggtaggaattgatgaaaatgaggatgaagatgacgatgaataaggactgtgaaggctggttattcttcaagggttagggccagatcagccttggagaagctggaaatggatggcggataaaagcagttgacgtttattggttgcttgttgatcgtaatattcatgccattgctaatagaatgtctcgacattatactcctagtagggtgacttgcatgtctgaacactggtatcaatgttacagttgctgtctactttcttccatgccattcagccattgttctactctgcgctagcccgcgccgatccatttcaatcgtg

SEQ ID NO: 199171 - DNA, 3591 bp, Zea Mays
acccccggttgcccgcccttgacacccatcactcgaccccacccgaccgccctcgccgccgctccactccacaaggtgctccgccccagcaccggatccaacaagccagcctaggcactgctgctcgagccgactggccccgagacccgtggaggagaagaaagctgtggtagcagccagtgtgatgaatgatgtggcggcatgatccgaacggcttcttgttcttgtccttcccgggcgctgccactgccgctccttgtttgcatccttcctgcgcaagagcaagaagactggaagagtaatatctagcagtggtgaaatattagaagatgaaatgagccacaggggaggccttacttatggtaggattcccacctctagaaaggctttagccagcagttggatggatcagtctacccttgttggacgtgagtcacaaatgaatgaacttcgtaagtatcagaccacggcccgtttcaaagattggcaagtgatgtctgtgtggggaattgctggtgttggaaaatctgatcttgtcaaaaatttgtactatgaaaggatgcttaaagaggacccaatgtttgacaagtatggttgggtccacgtgtcccatccattcaatttgagggacttctctcggaacttacttttggattttcactcagatgccgtgggaatcagagaccctattcaggagtgtcataagcttctaaaagaacatcagtgtcttgttgttattgatgatctacagtctgtggaagaatgggacttaatacgacctgcacttgtatctagacattccaagagtgttatcatcgtcattacaacagatgaaaaaattgccacgtattgtgcagacgatgaagaggtcgtgtttaatgtgaaatgtctagaagctgaagcatcctttgatctctttaaaaaagaggtacaaaagaaaagccaaacatcccctctgatgaattcaaacaacaaggagctagaacaacttattctaaaatgtgggagacttcctaaagtgatagttgctgtagccaaatttttggcaccaaagacagttacatgtatggacagcacaaaaacactgaatcacagatttatgcaggagcttgagagcaaccctgagttcagtgttctgcaagatctgtttgcttggatgcattcttacttccgtgcttgcccggattttctaaggccgtgtatcttctatatgtcaatcttccctgggtcccaaatcattcgtcggaggcgtttagtgatgcgatgggttgcagagggctactccagggatacaaaagacatcactgcagaggagaaaggagagatgttcttctcaatgctcgtcaatctaagcatgattcagccgccaacatgcagggtcatcaccgacatgaaaatggtcctatgtcaagttagtgctttcttccatgaatacatcatttcacgtccagtggaagaaaatataatatttgcactcgaggtctttgcactgaaggggcgttgccttccaactaccggacgcacaggacggcaccttgtaatagagaggtgctgggacagggataggattgtgttcgagagcattgacttctcgcgcctgcggtctttaacagtgtttgggcagtgggaatcattcttcatctctaaaagtatgaaggtgcttcgggttcttgatctggagaatgccacaggtgtgacagataaagacctcgagcagatggtgaagcttcttcctcgcctcaagttcctatctttgcgaggaagtactggtatctgccaccttccgagttcattgggtgagctgcggcagcttgagactctggatattaggggtaccttcatagcaaaattgccagcatcgattaccaagctaaagaagctgcagtacatgcgtgctggtacaatatccctggcaaaggaatcatcaacatcttactcttcagcgtctaggttgccaaacctatgcaaatcttgtaaactagttggtgttgagatgccatcagggattgatgaactgacaccattgcacacgcttggtgttgtcaatgctggtattggagggggcaaggccactctaaaagagctgaagaagattacccaattgcgcaagcttggagtgtccggtgtcaacaagaaaaataacaaggaattctgtgctgccatctcatgtcatgtccgcctggaatccttgtcagtgtggcttagcaagggaaatcaaggtttgaatgaaatatcgtctcaggataagcctctgcaaaaccttcagagccttaagttatatggtcttggaagtgaggtgccagcttggatgaaagatcttcccaaactcacaaagttggatttgcatatgaccatatcagcagaagttgacataattaaagtccttggggaaataaaagaactatgcactctacgtctttgtgtcaagccccttcaagatggtgatggtaagcttgatttttgtgtttgggtgaatggaatacagcagcgctgttatttaaatctcaagatcctcgagattacttgcagttcaaagttaaatatatcctttggatcagaagctatgcaaaatcttgagctgctgagagctcgctgctgtagtggatcgacattgaagtttatggagataaagaatctctctaaacaaaaactcaaggaagttcagcttattggttcccatgacactgcactcaaggatgacatggagaagcaactgaaggaacatccaaggaaacctcctttgaagctggaggaaccggaaggatgctgatctcagtatttagcaatagtattattggcgctaatcctatgtgaaacatcttactctgcttcatttcttatcactaggagaagcaactgaaggaacatcttactctgcttcattcaagatgtcatgataattggcgctatcctatgtgaaacatccctaggagaagacattcagttcatttactccgtacatcaaacgccgagcttcagcttatgtaactccataaaggatgttcacttgtgtgcatgtttatggatttgacttatgcgttgatgtagtaatcgttttgtaattttgtgttagagtaatgttagggttttgaggttagccccttgtaattactgtcacacccttagagctgatttggtgaccggggatcccgagggaaagaaatcctcttgctattcaaaattgaattgcaagggaattcctcccccatggatcccctagggatccctaatcaccaaatcagtccttatgtaatggattaggcccaatatatatatatatatatatatatatcagtctcaatcctaattaggattagggttttattctacaacttggtactagagccgttacttgcgagatatccgggtgattgcatgtagaaatattccaggggtggtttctgtaatatagcagatcgaatcaaggagttgcggcggcccgtctataaagggcaaacgtccttccatcggaggtcacaagtgaatagcaaccgactcatccttttcttctcaattctctgcgtcgtcgcttctttgccctgccgtccctttgtctgccgtgcagcagatcaagggagagcggtgtctccg

SEQ ID NO: 199172 - DNA, 5026 bp, Zea Mays
tgttgctccacctaccaccgccggccccaaaatcccaaatccgtggcaccgccggcggccgcacccccggttgcccgcccttgacacccatcactcgaccccacccgaccgccctcgccgccgctccactccacaaggtgctccgccccagcaccggatccaacaagccagcctaggcactgctgctcgagccgactggccccgagacccgtggaggagaagaaagctgtggtagcagccagtgtgatgaatgatgtggcggcatgatccgaacggcttcttgttcttgtccttcccgggcgctgccactgccgctccttgtttgcatccttcctgcgcaagagcaatggatacatgggtgaggggagctgtgcttgaccaaagggtgtaaaatctggatcatgttttggacaaatgcatcgcttagatcaacaaattatactgtgttgagagtttttgtccgaagaaaatacccttgctggagagcaaatacagctgaacatatctgtaacagctggagctgtccttatcttcattagtcacatctctgggtactcaaaatatgcaattctactgcattagtagcatcacttggtagctgctacggcatcggcatagaagcacaaggagagagggaggggagagtaagagcgatgggggatcttgtcgtcggattggcaaagtcggtggtggagggggttctaacaaaggcccagtcagctattgaggaagagtcaaagctgcgtcagagtgcacagagggaccttgtgttcatcacaggtgaatttgagatgatgcactcctttctcaatgtcgccaatgaagagcgtgccaagaacaacgtggttaggacatgggtgaggcaggtccgtgacctagcctacgatgtagaggattgcattgaatttgttgttcacttggataaccggccccactggtggcgccgcttcataccatcatgtatgccagcatcggcactacccgtagatgcagtggtcgccgagatagagaagatcaaggtcagggttgaggatgtgagcaagaggaactcacgttacagcctcatcagtgactctggatccaagccagtaatgcagcaacaaccagctaccggccctgctattggcacaacaacgcttgacatgtttgttgagtcaagggacgccacgaaaaagcagcaaggcttaggggatatcacacagttgatcactaaagaaaacattgaccttggagtgatctcgttgtggggtacaggtggagatcttggtaagacatccatcataaggaaagcataccaggatcaagaaatctgcgaaaactttggatgtcgaggctggatcaagctaacatatcctttcaatccacataagttcctccagagcttggttactcagttctatacgaattcctgtctgcaacaaggaactactttagatgtagctcaactgaagaggatggtagcaaagcgaggaataattgaagaattcacgaagcaagtggatgggaagaggtacctactcgtcctggaaaacatgtgcacgatgggagagtgggacgctatcagggcatgcctgcctcacaggaataagggcaactggattatcgtgtccaccgagcaccatgaaatcgcaagtttgtgtgttggacattcataccaagtgttggagcttaaacagtattcagctgagtaccctgtatgcgtcttcttcaaggagagcaagaagactggaagagtaatatctagcagtggtgaaatattagaagatgaaatgagccacaggggaggccttacttatggtaggattcccacctctagaaaggctttagccagcagttggatggatcagtctacccttgttggacgtgagtcacaaatgaatgaacttcgtaagtatcagaccacggcccgtttcaaagattggcaagtgatgtctgtgtggggaattgctggtgttggaaaatctgatcttgtcaaaaatttgtactatgaaaggatgcttaaagaggacccaatgtttgacaagtatggttgggtccacgtgtcccatccattcaatttgagggacttctctcggaacttacttttggattttcactcagatgccgtgggaatcagagaccctattcaggagtgtcataagcttctaaaagaacatcagtgtcttgttgttattgatgatctacagtctgtggaagaatgggacttaatacgacctgcacttgtatctagacattccaagagtgttatcatcgtcattacaacagatgaaaaaattgccacgtattgtgcagacgatgaagaggtcgtgtttaatgtgaaatgtctagaagctgaagcatcctttgatctctttaaaaaagaggtacaaaagaaaagccaaacatcccctctgatgaattcaaacaacaaggagctagaacaacttattctaaaatgtgggagacttcctaaagtgatagttgctgtagccaaatttttggcaccaaagacagttacatgtatggacagcacaaaaacactgaatcacagatttatgcaggagcttgagagcaaccctgagttcagtgttctgcaagatctgtttgcttggatgcattcttacttccgtgcttgcccggattttctaaggccgtgtatcttctatatgtcaatcttccctgggtcccaaatcattcgtcggaggcgtttagtgatgcgatgggttgcagagggctactccagggatacaaaagacatcactgcagaggagaaaggagagatgttcttctcaatgctcgtcaatctaagcatgattcagccgccaacatgcagggtcatcaccgacatgaaaatggtcctatgtcaagttagtgctttcttccatgaatacatcatttcacgtccagtggaagaaaatataatatttgcactcgaggtctttgcactgaaggggcgttgccttccaactaccggacgcacaggacggcaccttgtaatagagaggtgctgggacagggataggattgtgttcgagagcattgacttctcgcgcctgcggtctttaacagtgtttgggcagtgggaatcattcttcatctctaaaagtatgaaggtgcttcgggttcttgatctggagaatgccacaggtgtgacagataaagacctcgagcagatggtgaagcttcttcctcgcctcaagttcctatctttgcgaggaagtactggtatctgccaccttccgagttcattgggtgagctgcggcagcttgagactctggatattaggggtaccttcatagcaaaattgccagcatcgattaccaagctaaagaagctgcagtacatgcgtgctggtacaatatccctggcaaaggaatcatcaacatcttactcttcagcgtctaggttgccaaacctatgcaaatcttgtaaactagttggtgttgagatgccatcagggattgatgaactgacaccattgcacacgcttggtgttgtcaatgctggtattggagggggcaaggccactctaaaagagctgaagaagattacccaattgcgcaagcttggagtgtccggtgtcaacaagaaaaataacaaggaattctgtgctgccatctcatgtcatgtccgcctggaatccttgtcagtgtggcttagcaagggaaatcaaggtttgaatgaaatatcgtctcaggataagcctctgcaaaaccttcagagccttaagttatatggtcttggaagtgaggtgccagcttggatgaaagatcttcccaaactcacaaagttggatttgcatatgaccatatcagcagaagttgacataattaaagtccttggggaaataaaagaactatgcactctacgtctttgtgtcaagccccttcaagatggtgatggtaagcttgatttttgtgtttgggtgaatggaatacagcagcgctgttatttaaatctcaagatcctcgagattacttgcagttcaaagttaaatatatcctttggatcagaagctatgcaaaatcttgagctgctgagagctcgctgctgtagtggatcgacattgaagtttatggagataaagaatctctctaaacaaaaactcaaggaagttcagcttattggttcccatgacactgcactcaaggatgacatggagaagcaactgaaggaacatccaaggaaacctcctttgaagctggaggaaccggaaggatgctgatctcagtatttagcaatagtattattggcgctaatcctatgtgaaacatcttactctgcttcatttcttatcactaggagaagcaactgaaggaacatcttactctgcttcattcaagatgtcatgataattggcgctatcctatgtgaaacatccctaggagaagacattcagttcatttactccgtacatcaaacgccgagcttcagcttatgtaactccataaaggatgttcacttgtgtgcatgtttatggatttgacttatgcgttgatgtagtaatcgttttgtaattttgtgttagagtaatgttagggttttgaggttagccccttgtaattactgtcacacccttagagctgatttggtgaccggggatcccgagggaaagaaatcctcttgctattcaaaattgaattgcaagggaattcctcccccatggatcccctagggatccctaatcaccaaatcagtccttatgtaatggattaggcccaatatatatatatatatatatatatatcagtctcaatcctaattaggattagggttttattctacaacttggtactagagccgttacttgcgagatatccgggtgattgcatgtagaaatattccaggggtggtttctgtaatatagcagatcgaatcaaggagttgcggcggcccgtctataaagggcaaacgtccttccatcggaggtcacaagtgaatagcaaccgactcatccttttcttctcaattctctgcgtcgtcgcttctttgccctgccgtccctttgtctgccgtgcagcagatcaagggagagcggtgtctccg

SEQ ID NO: 199173 - DNA, 4857 bp, Zea Mays
gtttgttgctccacctaccaccgccggccccaaaatcccaaatccgtggcaccgccggcggccgcacccccggttgcccgcccttgacacccatcactcgaccccacccgaccgccctcgccgccgctccactccacaaggtgctccgccccagcaccggatccaacaagccagcctaggcactgctgctcgagccgactggccccgagacccgtggaggagaagaaagctgtggtagcagccagtgtgatgaatgatgtggcggcatgatccgaacggcttcttgttcttgtccttcccgggcgctgccactgccgctccttgtttgcatccttcctgcgcaagctggagctgtccttatcttcattagtcacatctctgggtactcaaaatatgcaattctactgcattagtagcatcacttggtagctgctacggcatcggcatagaagcacaaggagagagggaggggagagtaagagcgatgggggatcttgtcgtcggattggcaaagtcggtggtggagggggttctaacaaaggcccagtcagctattgaggaagagtcaaagctgcgtcagagtgcacagagggaccttgtgttcatcacaggtgaatttgagatgatgcactcctttctcaatgtcgccaatgaagagcgtgccaagaacaacgtggttaggacatgggtgaggcaggtccgtgacctagcctacgatgtagaggattgcattgaatttgttgttcacttggataaccggccccactggtggcgccgcttcataccatcatgtatgccagcatcggcactacccgtagatgcagtggtcgccgagatagagaagatcaaggtcagggttgaggatgtgagcaagaggaactcacgttacagcctcatcagtgactctggatccaagccagtaatgcagcaacaaccagctaccggccctgctattggcacaacaacgcttgacatgtttgttgagtcaagggacgccacgaaaaagcagcaaggcttaggggatatcacacagttgatcactaaagaaaacattgaccttggagtgatctcgttgtggggtacaggtggagatcttggtaagacatccatcataaggaaagcataccaggatcaagaaatctgcgaaaactttggatgtcgaggctggatcaagctaacatatcctttcaatccacataagttcctccagagcttggttactcagttctatacgaattcctgtctgcaacaaggaactactttagatgtagctcaactgaagaggatggtagcaaagcgaggaataattgaagaattcacgaagcaagtggatgggaagaggtacctactcgtcctggaaaacatgtgcacgatgggagagtgggacgctatcagggcatgcctgcctcacaggaataagggcaactggattatcgtgtccaccgagcaccatgaaatcgcaagtttgtgtgttggacattcataccaagtgttggagcttaaacagtattcagctgagtaccctgtatgcgtcttcttcaaggagagcaagaagactggaagagtaatatctagcagtggtgaaatattagaagatgaaatgagccacaggggaggccttacttatggtaggattcccacctctagaaaggctttagccagcagttggatggatcagtctacccttgttggacgtgagtcacaaatgaatgaacttcgtaagtatcagaccacggcccgtttcaaagattggcaagtgatgtctgtgtggggaattgctggtgttggaaaatctgatcttgtcaaaaatttgtactatgaaaggatgcttaaagaggacccaatgtttgacaagtatggttgggtccacgtgtcccatccattcaatttgagggacttctctcggaacttacttttggattttcactcagatgccgtgggaatcagagaccctattcaggagtgtcataagcttctaaaagaacatcagtgtcttgttgttattgatgatctacagtctgtggaagaatgggacttaatacgacctgcacttgtatctagacattccaagagtgttatcatcgtcattacaacagatgaaaaaattgccacgtattgtgcagacgatgaagaggtcgtgtttaatgtgaaatgtctagaagctgaagcatcctttgatctctttaaaaaagaggtacaaaagaaaagccaaacatcccctctgatgaattcaaacaacaaggagctagaacaacttattctaaaatgtgggagacttcctaaagtgatagttgctgtagccaaatttttggcaccaaagacagttacatgtatggacagcacaaaaacactgaatcacagatttatgcaggagcttgagagcaaccctgagttcagtgttctgcaagatctgtttgcttggatgcattcttacttccgtgcttgcccggattttctaaggccgtgtatcttctatatgtcaatcttccctgggtcccaaatcattcgtcggaggcgtttagtgatgcgatgggttgcagagggctactccagggatacaaaagacatcactgcagaggagaaaggagagatgttcttctcaatgctcgtcaatctaagcatgattcagccgccaacatgcagggtcatcaccgacatgaaaatggtcctatgtcaagttagtgctttcttccatgaatacatcatttcacgtccagtggaagaaaatataatatttgcactcgaggtctttgcactgaaggggcgttgccttccaactaccggacgcacaggacggcaccttgtaatagagaggtgctgggacagggataggattgtgttcgagagcattgacttctcgcgcctgcggtctttaacagtgtttgggcagtgggaatcattcttcatctctaaaagtatgaaggtgcttcgggttcttgatctggagaatgccacaggtgtgacagataaagacctcgagcagatggtgaagcttcttcctcgcctcaagttcctatctttgcgaggaagtactggtatctgccaccttccgagttcattgggtgagctgcggcagcttgagactctggatattaggggtaccttcatagcaaaattgccagcatcgattaccaagctaaagaagctgcagtacatgcgtgctggtacaatatccctggcaaaggaatcatcaacatcttactcttcagcgtctaggttgccaaacctatgcaaatcttgtaaactagttggtgttgagatgccatcagggattgatgaactgacaccattgcacacgcttggtgttgtcaatgctggtattggagggggcaaggccactctaaaagagctgaagaagattacccaattgcgcaagcttggagtgtccggtgtcaacaagaaaaataacaaggaattctgtgctgccatctcatgtcatgtccgcctggaatccttgtcagtgtggcttagcaagggaaatcaaggtttgaatgaaatatcgtctcaggataagcctctgcaaaaccttcagagccttaagttatatggtcttggaagtgaggtgccagcttggatgaaagatcttcccaaactcacaaagttggatttgcatatgaccatatcagcagaagttgacataattaaagtccttggggaaataaaagaactatgcactctacgtctttgtgtcaagccccttcaagatggtgatggtaagcttgatttttgtgtttgggtgaatggaatacagcagcgctgttatttaaatctcaagatcctcgagattacttgcagttcaaagttaaatatatcctttggatcagaagctatgcaaaatcttgagctgctgagagctcgctgctgtagtggatcgacattgaagtttatggagataaagaatctctctaaacaaaaactcaaggaagttcagcttattggttcccatgacactgcactcaaggatgacatggagaagcaactgaaggaacatccaaggaaacctcctttgaagctggaggaaccggaaggatgctgatctcagtatttagcaatagtattattggcgctaatcctatgtgaaacatcttactctgcttcatttcttatcactaggagaagcaactgaaggaacatcttactctgcttcattcaagatgtcatgataattggcgctatcctatgtgaaacatccctaggagaagacattcagttcatttactccgtacatcaaacgccgagcttcagcttatgtaactccataaaggatgttcacttgtgtgcatgtttatggatttgacttatgcgttgatgtagtaatcgttttgtaattttgtgttagagtaatgttagggttttgaggttagccccttgtaattactgtcacacccttagagctgatttggtgaccggggatcccgagggaaagaaatcctcttgctattcaaaattgaattgcaagggaattcctcccccatggatcccctagggatccctaatcaccaaatcagtccttatgtaatggattaggcccaatatatatatatatatatatatatatcagtctcaatcctaattaggattagggttttattctacaacttggtactagagccgttacttgcgagatatccgggtgattgcatgtagaaatattccaggggtggtttctgtaatatagcagatcgaatcaaggagttgcggcggcccgtctataaagggcaaacgtccttccatcggaggtcacaagtgaatagcaaccgactcatccttttcttctcaattctctgcgtcgtcgcttctttgccctgccgtccctttgtctgccgtgcagcagatcaagggagagcggtgtctccg

SEQ ID NO: 199174 - DNA, 1996 bp, Zea Mays
cttcactgtaggcgtccacaggcttggttctgccatcgcgctccgtccgcgatcccctccccgcgcccgatcctccacgctcgatcctcgaatcccgcggcttccttcgatggcacgaccccatccatctcgccagtgtccgtggtcccctccccgcgctccccaccacgacgacacgaccccatccatctcgctgctgtccacgcccagtcgcgcctcccacgatcacgcccacggacgcaacctccctccctccccgtccccgttcatgtcgcccccgtccgtgatcccctccccgccctcctctccgcgaccccatccatcctgtcgccgtccacgcccagcagcgctcaaaagcaaaaaagggtacgaatacgaatcccaatccagggccggagggcgagcgaactcaaaagcaagctgttccagtccaatccgccccagtccaaatctaatcgccgggtttaggcagaaggggtgggacgcggcgaggtttaggcggggtttgttttgtccctttcgtgcgattctgctctccgcgcgggaggcaagtactgacggaagcgaagaccaaggcggaggagggggtccccggcggtggaagtggaacgcgccgatgcgcaagtttcaggactccatcaaggccctccaggccgacatcgatcatgccaatgcgatagcagggtgtcggaattcttgagggactacgatggctcggtcatccagatgcgggtggcgtacagcgccgtcgcgcatttcctcctgcagtggaccgactgcaagctcgccggcgcgctcggcctcctcaaggttatgctatacaaggtgtgcgcggacggctcgtcggcgcttcctgattgggacatggaggccagcatcagggagttttacggcgtcattttcccgttgttgctgcagcttccgagtggcatcaccgagctggacgacaggaagcagaggaagctctgcctcaagaaattcaggagcagggatgagcagctctgggaggtggacacggagagggagcttgagtgtgggatctgcctcgaggttagccccaaggaaatgacacctactctactccgcagcttaaaacctcaagatatgtcggtaatcaaacaagtacaagtttcaaggaaatgggaatttcatggaaatacagacattgggtccatattacacattgatatgattttggctgacaaagagcgctgtctgaggtgcgtggtcaagtcgaggcgaagatgagcaaggaggatgtgctcaaggtgcaggtcttggattcaacatagtactagcagtttggaatcacccgacggggatgctttccatgtaataaatatttttggaacgtttcggatttaacttatgttgtttctattgcaatcaacatggtgtcactatttggattcaccagtaagaatatttgccatttgggcttgttaattagggtgaaattttatataaaacatgcctcgttcacttgctttccagttcttgatttcagatctctgaagccaattacgtacacattttcctaccacgacttttattctgctttccgtttctcaacgtcttggacattgccggcgagcgcggtctcctcgacaacttctactgctaactcgggtgcaagatgcccagcaaacttcccaatccagctgccggcaaggagatgaggttcccgacggcgacaattttccactacacaaccggattcttcagcagcatatggatccgttgaagcgccgtgtgacaatgccaccaaagagcagcaacaaacaagctcaaagtctccgctaaccactaatctcataaagcttgaattttctcattgctatgtttccttctcctagcaaagttaagatgtttgcacatttctagcttattaggtccttgtgtggaatgtgtttgaacaatgatctcatttaaacaatatcaacatgtgtgatatataaaaaccgtagcaacgcacgggcacatacctagtaaataa

SEQ ID NO: 199175 - DNA, 2708 bp, Zea Mays
ccgtcgttgacaccagctagtagcagccagcactagtcgctactagctagatagccatatcaccagcatgtggaggctgacggtggccgagggcggcggcccgtggctgcgctcgacgaacggcttcgtggggcgggcggtgtgggagttcgaccctgacctcggtacgccggaggagcgcgacgaggtagagagggtacgccaggagttctccgaccaccgcttccagaggagagagtcggccgacctcctcatgcgcatgcagtgcgcaaagcagaacagatctcaacgtcgtgatctgccacgcatcaagcttggggaggatgagcacgtcactgaagaaattgtactgagctccttgaggtcggctctggaccagttctcttcactgcaagccagcgatgggcactggcctggtgatttcagcgggattatgttcatcatgcctggtttgatatttgccttgtatgtcactggatcactgaatgttgtcatatcaccagaacatcggcatgagatttgccgctacatctacaaccaccagaacgaagatggtggatggggcacacttatcctgggttcgagcaccatgtttggcacatgctcaaactacatcaccttgaggcttctcggtgaggagccatacgccaacaacagtgtgttggctaaagggcgtgcttggattctatcccatggtggtgcaaccttgattcctcagtggggaaaaatatggctttcggtacttggattgtttgattggtcaggaaataatccaattttccctgaactatggtccattccccagtttcttccatttcatccaggaggacctcatctgtccacgcacactgttgcagaatgttatttggacttcactttataggtgtgtggaaccagtattgagcagttggcctatcaacaagctgagagagagagctctgggaaacatcatggagcatatccattatgaagatgagaacacacaatacctatgcatatgtcctgtgaataaggctctaaacatggtctgctgctgggtagaagatccaaattcagatgcattcaagcgtcaccttgcaaggataccagacttcttgtggatttcagaagatggcatgaaggcacaggtatatgatggctgccagagctgggagacatcattcataattcaagcattttgcgctacagatcttgttaatgactatggttcaactcttcagagagcctatgagtttatgaaaaattcacaggtcatgaggaaccatcctggtgaccaacgttattggcatcgccatagatcgaagggttcatggacactttcatctgcagacaatggatgggctgtatctgacactacaggagaagcacttaaggctgtactgttgctgtcaaagatctcaaacaaaaacaaccttgttggggatccaatagaaagagaaaggttgcatgacgctattgattgccttctatcttttgcgaacaaagatggcaccttttctacatatgagtgcaaaagaacttattcttggttagagattctaagtccttgtgagactttcccaaacattgttgtcgattacccttacccagaatgcacttcatcagtgctccaagctctgatattgttcaaagacttatatcctggttaccgcacagaagagatagaagcattagttagaagtgcagcaacgtttattgagaccaaacaacaagaagacggttcatggttaggtaattggggtatatgtttcacctacggggccttcttttcgattaaaggtttagtcgcttctggaagaacgtacaagaacagcccttgcatacggaaagcatgccacttcatattgtcgaagcagctcagtactggtggatggggagaaagtcatatcgctattgaaactcaggtgtatgtaaatctcaaaggtgaccgtgctcacgctgtgaataccgcctgggcaatgctcgctttaatttatgctggacagtttgaacgagatccaacgccattacatcgtgctgcaaaggaattgatcaacatgcaactggagacaggagagtttcctcagcaagagcatgtaggatgcttcaactgcagcctctacttcaattacccaagctaccgcaacttgttccccatctgggctctcggtgagtaccatcgtggccttcgtgcaaagaaagacaattgagtccgtgtgtgtatatatatagtacgtatagcattgtgaggaataaaacaggttgcgtcggtggtgagtgcgcaaaaacaagatgtgcttttatgtaggtgtaccacagtgtacaatgttggtcgttgttagactgtaaggctatcatgacgtgtatattgtaatatatatactacgtgattggtgtcctgtatggtcacggccatactcgctgcgtgcgtagagcgcatgattggcttcctgcgcgcgtagaagctaggctgccacgcgccggtgcgatgtaggatattttttcattcatttgctgcatccatggagaagccagggagggacgtttcccacgggccaggatggcgcgcgcctggcgacggtgagcgcgcgaaccaatcacacgttatagtgttccatatgtttcaaattatataagacgttttatcttctctaatgaacgagcagtctcctttcccaaaatatgttggtgagcataccaaattcagagcacgtggtacgctaaatcgc

SEQ ID NO: 199176 - DNA, 2678 bp, Zea Mays
gtcgttgacaccagctagtagcagccagcactagtcgctactagctagatagccatatcaccagcatgtggaggctgacggtggccgagggcggcggcccgtggctgcgctcgacgaacggcttcgtggggcgggcggtgtgggagttcgaccctgacctcggtacgccggaggagcgcgacgaggtagagagggtacgccaggagttctccgaccaccgcttccagaggagagagtcggccgacctcctcatgcgcatgcagtgcgcaaagcagaacagatctcaacgtcgtgatctgccacgcatcaagcttggggaggatgagcacgtcactgaagaaattgtactgagctccttgaggtcggctctggaccagttctcttcactgcaagccagcgatgggcactggcctggtgatttcagcgggattatgttcatcatgcctggtttgatatttgccttgtatgtcactggatcactgaatgttgtcatatcaccagaacatcggcatgagatttgccgctacatctacaaccaccaggtacttggattgtttgattggtcaggaaataatccaattttccctgaactatggtccattccccagtttcttccatttcatccagggaaattctggtgctttgcccgtatggtatatctaccaatggcttatctttatggcaagaaatttgttggaccaattacaccaactatattggcactaagagaggaaatctatgacactccttatggaaagattgactggagtgatgctcgtagtaaatgcgcaaaggaggacctcatctgtccacgcacactgttgcagaatgttatttggacttcactttataggtgtgtggaaccagtattgagcagttggcctatcaacaagctgagagagagagctctgggaaacatcatggagcatatccattatgaagatgagaacacacaatacctatgcatatgtcctgtgaataaggctctaaacatggtctgctgctgggtagaagatccaaattcagatgcattcaagcgtcaccttgcaaggataccagacttcttgtggatttcagaagatggcatgaaggcacaggtatatgatggctgccagagctgggagacatcattcataattcaagcattttgcgctacagatcttgttaatgactatggttcaactcttcagagagcctatgagtttatgaaaaattcacaggtcatgaggaaccatcctggtgaccaacgttattggcatcgccatagatcgaagggttcatggacactttcatctgcagacaatggatgggctgtatctgacactacaggagaagcacttaaggctgtactgttgctgtcaaagatctcaaacaaaaacaaccttgttggggatccaatagaaagagaaaggttgcatgacgctattgattgccttctatcttttgcgaacaaagatggcaccttttctacatatgagtgcaaaagaacttattcttggttagagattctaagtccttgtgagactttcccaaacattgttgtcgattacccttacccagaatgcacttcatcagtgctccaagctctgatattgttcaaagacttatatcctggttaccgcacagaagagatagaagcattagttagaagtgcagcaacgtttattgagaccaaacaacaagaagacggttcatggttaggtaattggggtatatgtttcacctacggggccttcttttcgattaaaggtttagtcgcttctggaagaacgtacaagaacagcccttgcatacggaaagcatgccacttcatattgtcgaagcagctcagtactggtggatggggagaaagtcatatcgctattgaaactcaggtgtatgtaaatctcaaaggtgaccgtgctcacgctgtgaataccgcctgggcaatgctcgctttaatttatgctggacagtttgaacgagatccaacgccattacatcgtgctgcaaaggaattgatcaacatgcaactggagacaggagagtttcctcagcaagagcatgtaggatgcttcaactgcagcctctacttcaattacccaagctaccgcaacttgttccccatctgggctctcggtgagtaccatcgtggccttcgtgcaaagaaagacaattgagtccgtgtgtgtatatatatagtacgtatagcattgtgaggaataaaacaggttgcgtcggtggtgagtgcgcaaaaacaagatgtgcttttatgtaggtgtaccacagtgtacaatgttggtcgttgttagactgtaaggctatcatgacgtgtatattgtaatatatatactacgtgattggtgtcctgtatggtcacggccatactcgctgcgtgcgtagagcgcatgattggcttcctgcgcgcgtagaagctaggctgccacgcgccggtgcgatgtaggatattttttcattcatttgctgcatccatggagaagccagggagggacgtttcccacgggccaggatggcgcgcgcctggcgacggtgagcgcgcgaaccaatcacacgttatagtgttccatatgtttcaaattatataagacgttttatcttctctaatgaacgagcagtctcctttcccaaaatatgttggtgagcataccaaattcagagcacgtggtacgctaaatcgc

SEQ ID NO: 199177 - DNA, 2205 bp, Zea Mays
gcactagtcgctactagctagatagccatatcaccagcatgtggaggctgacggtggccgagggcggcggcccgtggctgcgctcgacgaacggcttcgtggggcgggcggtgtgggagttcgaccctgacctcggtacgccggaggagcgcgacgaggtagagagggtacgccaggagttctccgaccaccgcttccagaggagagagtcggccgacctcctcatgcgcatgcaggtacttggattgtttgattggtcaggaaataatccaattttccctgaactatggtccattccccagtttcttccatttcatccaggaggacctcatctgtccacgcacactgttgcagaatgttatttggacttcactttataggtgtgtggaaccagtattgagcagttggcctatcaacaagctgagagagagagctctgggaaacatcatggagcatatccattatgaagatgagaacacacaatacctatgcatatgtcctgtgaataaggctctaaacatggtctgctgctgggtagaagatccaaattcagatgcattcaagcgtcaccttgcaaggataccagacttcttgtggatttcagaagatggcatgaaggcacaggtatatgatggctgccagagctgggagacatcattcataattcaagcattttgcgctacagatcttgttaatgactatggttcaactcttcagagagcctatgagtttatgaaaaattcacaggtcatgaggaaccatcctggtgaccaacgttattggcatcgccatagatcgaagggttcatggacactttcatctgcagacaatggatgggctgtatctgacactacaggagaagcacttaaggctgtactgttgctgtcaaagatctcaaacaaaaacaaccttgttggggatccaatagaaagagaaaggttgcatgacgctattgattgccttctatcttttgcgaacaaagatggcaccttttctacatatgagtgcaaaagaacttattcttggttagagattctaagtccttgtgagactttcccaaacattgttgtcgattacccttacccagaatgcacttcatcagtgctccaagctctgatattgttcaaagacttatatcctggttaccgcacagaagagatagaagcattagttagaagtgcagcaacgtttattgagaccaaacaacaagaagacggttcatggttaggtaattggggtatatgtttcacctacggggccttcttttcgattaaaggtttagtcgcttctggaagaacgtacaagaacagcccttgcatacggaaagcatgccacttcatattgtcgaagcagctcagtactggtggatggggagaaagtcatatcgctattgaaactcaggtgtatgtaaatctcaaaggtgaccgtgctcacgctgtgaataccgcctgggcaatgctcgctttaatttatgctggacagtttgaacgagatccaacgccattacatcgtgctgcaaaggaattgatcaacatgcaactggagacaggagagtttcctcagcaagagcatgtaggatgcttcaactgcagcctctacttcaattacccaagctaccgcaacttgttccccatctgggctctcggtgagtaccatcgtggccttcgtgcaaagaaagacaattgagtccgtgtgtgtatatatatagtacgtatagcattgtgaggaataaaacaggttgcgtcggtggtgagtgcgcaaaaacaagatgtgcttttatgtaggtgtaccacagtgtacaatgttggtcgttgttagactgtaaggctatcatgacgtgtatattgtaatatatatactacgtgattggtgtcctgtatggtcacggccatactcgctgcgtgcgtagagcgcatgattggcttcctgcgcgcgtagaagctaggctgccacgcgccggtgcgatgtaggatattttttcattcatttgctgcatccatggagaagccagggagggacgtttcccacgggccaggatggcgcgcgcctggcgacggtgagcgcgcgaaccaatcacacgttatagtgttccatatgtttcaaattatataagacgttttatcttctctaatgaacgagcagtctcctttcccaaaatatgttggtgagcataccaaattcagagcacgtggtacgctaaatcgc

SEQ ID NO: 199178 - DNA, 2719 bp, Zea Mays
gccttgctgcgagcctgcgacagaggagacagcgttggcgatggcgtccacagtggcgggagcttcctggaagtggatggatgagagcgcaggaagttgaaaggccgattgcgcaaagcagaacagatctcaacgtcgtgatctgccacgcatcaagcttggggaggatgagcacgtcactgaagaaattgtactgagctccttgaggtcggctctggaccagttctcttcactgcaagccagcgatgggcactggcctggtgatttcagcgggattatgttcatcatgcctggtttgatatttgccttgtatgtcactggatcactgaatgttgtcatatcaccagaacatcggcatgagatttgccgctacatctacaaccaccagaacgaagatggtggatggggcacacttatcctgggttcgagcaccatgtttggcacatgctcaaactacatcaccttgaggcttctcggtgaggagccatacgccaacaacagtgtgttggctaaagggcgtgcttggattctatcccatggtggtgcaaccttgattcctcagtggggaaaaatatggctttcggtacttggattgtttgattggtcaggaaataatccaattttccctgaactatggtccattccccagtttcttccatttcatccagggaaattctggtgctttgcccgtatggtatatctaccaatggcttatctttatggcaagaaatttgttggaccaattacaccaactatattggcactaagagaggaaatctatgacactccttatggaaagattgactggagtgatgctcgtagtaaatgcgcaaaggaggacctcatctgtccacgcacactgttgcagaatgttatttggacttcactttataggtgtgtggaaccagtattgagcagttggcctatcaacaagctgagagagagagctctgggaaacatcatggagcatatccattatgaagatgagaacacacaatacctatgcatatgtcctgtgaataaggctctaaacatggtctgctgctgggtagaagatccaaattcagatgcattcaagcgtcaccttgcaaggataccagacttcttgtggatttcagaagatggcatgaaggcacaggtatatgatggctgccagagctgggagacatcattcataattcaagcattttgcgctacagatcttgttaatgactatggttcaactcttcagagagcctatgagtttatgaaaaattcacaggtcatgaggaaccatcctggtgaccaacgttattggcatcgccatagatcgaagggttcatggacactttcatctgcagacaatggatgggctgtatctgacactacaggagaagcacttaaggctgtactgttgctgtcaaagatctcaaacaaaaacaaccttgttggggatccaatagaaagagaaaggttgcatgacgctattgattgccttctatcttttgcgaacaaagatggcaccttttctacatatgagtgcaaaagaacttattcttggttagagattctaagtccttgtgagactttcccaaacattgttgtcgattacccttacccagaatgcacttcatcagtgctccaagctctgatattgttcaaagacttatatcctggttaccgcacagaagagatagaagcattagttagaagtgcagcaacgtttattgagaccaaacaacaagaagacggttcatggttaggtaattggggtatatgtttcacctacggggccttcttttcgattaaaggtttagtcgcttctggaagaacgtacaagaacagcccttgcatacggaaagcatgccacttcatattgtcgaagcagctcagtactggtggatggggagaaagtcatatcgctattgaaactcaggtgtatgtaaatctcaaaggtgaccgtgctcacgctgtgaataccgcctgggcaatgctcgctttaatttatgctggacagtttgaacgagatccaacgccattacatcgtgctgcaaaggaattgatcaacatgcaactggagacaggagagtttcctcagcaagagcatgtaggatgcttcaactgcagcctctacttcaattacccaagctaccgcaacttgttccccatctgggctctcggtgagtaccatcgtggccttcgtgcaaagaaagacaattgagtccgtgtgtgtatatatatagtacgtatagcattgtgaggaataaaacaggttgcgtcggtggtgagtgcgcaaaaacaagatgtgcttttatgtaggtgtaccacagtgtacaatgttggtcgttgttagactgtaaggctatcatgacgtgtatattgtaatatatatactacgtgattggtgtcctgtatggtcacggccatactcgctgcgtgcgtagagcgcatgattggcttcctgcgcgcgtagaagctaggctgccacgcgccggtgcgatgtaggatattttttcattcatttgctgcatccatggagaagccagggagggacgtttcccacgggccaggatggcgcgcgcctggcgacggtgagcgcgcgaaccaatcacacgttatagtgttccatatgtttcaaattatataagacgttttatcttctctaatgaacgagcagtctcctttcccaaaatatgttggtgagcataccaaattcagagcacgtggtacgctaaatcgc

SEQ ID NO: 199179 - DNA, 2552 bp, Zea Mays
ggatggatgagagcgcaggaagttgaaaggccgattgcgcaaagcagaacagatctcaacgtcgtgatctgccacgcatcaagcttggggaggatgagcacgtcactgaagaaattgtactgagctccttgaggtcggctctggaccagttctcttcactgcaagccagcgatgggcactggcctggtgatttcagcgggattatgttcatcatgcctggtttgatatttgccttgtatgtcactggatcactgaatgttgtcatatcaccagaacatcggcatgagatttgccgctacatctacaaccaccagaacgaagatggtggatggggcacacttatcctgggttcgagcaccatgtttggcacatgctcaaactacatcaccttgaggcttctcggtgaggagccatacgccaacaacagtgtgttggctaaagggcgtgcttggattctatcccatggtggtgcaaccttgattcctcagtggggaaaaatatggctttcggtacttggattgtttgattggtcaggaaataatccaattttccctgaactatggtccattccccagtttcttccatttcatccagggaaattctggtgctttgcccgtatggtatatctaccaatggcttatctttatggcaagaaatttgttggaccaattacaccaactatattggcactaagagaggaaatctatgacactccttatggaaagattgactggagtgatgctcgtagtaaatgcgcaaaggaggacctcatctgtccacgcacactgttgcagaatgttatttggacttcactttataggtgtgtggaaccagtattgagcagttggcctatcaacaagctgagagagagagctctgggaaacatcatggagcatatccattatgaagatgagaacacacaatacctatgcatatgtcctgtgaataaggctctaaacatggtctgctgctgggtagaagatccaaattcagatgcattcaagcgtcaccttgcaaggataccagacttcttgtggatttcagaagatggcatgaaggcacagagagcctatgagtttatgaaaaattcacaggtcatgaggaaccatcctggtgaccaacgttattggcatcgccatagatcgaagggttcatggacactttcatctgcagacaatggatgggctgtatctgacactacaggagaagcacttaaggctgtactgttgctgtcaaagatctcaaacaaaaacaaccttgttggggatccaatagaaagagaaaggttgcatgacgctattgattgccttctatcttttgcgaacaaagatggcaccttttctacatatgagtgcaaaagaacttattcttggttagagattctaagtccttgtgagactttcccaaacattgttgtcgattacccttacccagaatgcacttcatcagtgctccaagctctgatattgttcaaagacttatatcctggttaccgcacagaagagatagaagcattagttagaagtgcagcaacgtttattgagaccaaacaacaagaagacggttcatggttaggtaattggggtatatgtttcacctacggggccttcttttcgattaaaggtttagtcgcttctggaagaacgtacaagaacagcccttgcatacggaaagcatgccacttcatattgtcgaagcagctcagtactggtggatggggagaaagtcatatcgctattgaaactcaggtgtatgtaaatctcaaaggtgaccgtgctcacgctgtgaataccgcctgggcaatgctcgctttaatttatgctggacagtttgaacgagatccaacgccattacatcgtgctgcaaaggaattgatcaacatgcaactggagacaggagagtttcctcagcaagagcatgtaggatgcttcaactgcagcctctacttcaattacccaagctaccgcaacttgttccccatctgggctctcggtgagtaccatcgtggccttcgtgcaaagaaagacaattgagtccgtgtgtgtatatatatagtacgtatagcattgtgaggaataaaacaggttgcgtcggtggtgagtgcgcaaaaacaagatgtgcttttatgtaggtgtaccacagtgtacaatgttggtcgttgttagactgtaaggctatcatgacgtgtatattgtaatatatatactacgtgattggtgtcctgtatggtcacggccatactcgctgcgtgcgtagagcgcatgattggcttcctgcgcgcgtagaagctaggctgccacgcgccggtgcgatgtaggatattttttcattcatttgctgcatccatggagaagccagggagggacgtttcccacgggccaggatggcgcgcgcctggcgacggtgagcgcgcgaaccaatcacacgttatagtgttccatatgtttcaaattatataagacgttttatcttctctaatgaacgagcagtctcctttcccaaaatatgttggtgagcataccaaattcagagcacgtggtacgctaaatcgc

SEQ ID NO: 199180 - DNA, 1445 bp, Zea Mays
ttgaaggtcagctaccctttactatttttgtcaaacacgcagaggagctgcgtatcattatattaagaaagctactgatcatcattatattgagaagaaatgaaactaaggctgtactgttgctgtcaaagatctcaaacaaaaacaaccttgttggggatccaatagaaagagaaaggttgcatgacgctattgattgccttctatcttttgcgaacaaagatggcaccttttctacatatgagtgcaaaagaacttattcttggttagagattctaagtccttgtgagactttcccaaacattgttgtcgattacccttacccagaatgcacttcatcagtgctccaagctctgatattgttcaaagacttatatcctggttaccgcacagaagagatagaagcattagttagaagtgcagcaacgtttattgagaccaaacaacaagaagacggttcatggttaggtaattggggtatatgtttcacctacggggccttcttttcgattaaaggtttagtcgcttctggaagaacgtacaagaacagcccttgcatacggaaagcatgccacttcatattgtcgaagcagctcagtactggtggatggggagaaagtcatatcgctattgaaactcaggtgtatgtaaatctcaaaggtgaccgtgctcacgctgtgaataccgcctgggcaatgctcgctttaatttatgctggacagtttgaacgagatccaacgccattacatcgtgctgcaaaggaattgatcaacatgcaactggagacaggagagtttcctcagcaagagcatgtaggatgcttcaactgcagcctctacttcaattacccaagctaccgcaacttgttccccatctgggctctcggtgagtaccatcgtggccttcgtgcaaagaaagacaattgagtccgtgtgtgtatatatatagtacgtatagcattgtgaggaataaaacaggttgcgtcggtggtgagtgcgcaaaaacaagatgtgcttttatgtaggtgtaccacagtgtacaatgttggtcgttgttagactgtaaggctatcatgacgtgtatattgtaatatatatactacgtgattggtgtcctgtatggtcacggccatactcgctgcgtgcgtagagcgcatgattggcttcctgcgcgcgtagaagctaggctgccacgcgccggtgcgatgtaggatattttttcattcatttgctgcatccatggagaagccagggagggacgtttcccacgggccaggatggcgcgcgcctggcgacggtgagcgcgcgaaccaatcacacgttatagtgttccatatgtttcaaattatataagacgttttatcttctctaatgaacgagcagtctcctttcccaaaatatgttggtgagcataccaaattcagagcacgtggtacgctaaatcgc

SEQ ID NO: 199181 - DNA, 2837 bp, Zea Mays
cgccccacagtttctcacctatcgcaggaccagggcacgcgaagccagaaaaccccatacacggtagccgtccggtcgctgccggtgggtggctacccgtaacggcactccactccacttccgctcccactccaccgccgcctccttcgtcctctcgtcattcgctcccggcacgctgtacgccgagaaatctctccttcccagcttctgtcctgtgggaggcttctgagatcgcgcggaggtgcggaatggagagcagcagcggggaggagctggaggaggagttcccgggccacgagtggatcaccccgcagtcctccatcaacgccgcctaccagtctcagaccgagaagggtatcaggaaaatttgctccgatttgttggagttgaaggatgctattgaaaacctgtctgcaaataggcagtcaaagttcctggcttttctcagaatttctgaggaggttgttgaagcagaacaagagttaattgagctacaaaagcatgtgtcttcccaaggaattcttgtgcaggatctaatgagtggtgtgtgtcgtgagctcgacatttggcacaaatctagcaaggaagaagatgcaacaaaaaaagactctgaaactgaacttgatgaaattttgtctgatgatacccaggatcccagaactatttttctagataagttagacgttttgcttgcagagcacaaaatggaggaggctgttcttgctttggaagctgaagagaagaaatatttagttgcagatgaatctggtaaagaatcaaatgcagataatactgcctttaagacagcactggttaaaaggaaaacaattcttgaggatcagcttgttaggtattgtggacagccatctttatctatgaatgaactaaggaagtgtttgtctggtttaattaagataggcaaaagttctttagcccatcaagtacttctaaaagcttatggttcacgcctgcagaaaagtgtcgaggcatttcttcctaactgttcaatctacacggagacatactctgcaactttgtcacagcttgttttctcagctattgcaaaagcagcaaaagaaactaatacgctacttggagatagccccatgaatacaaaccggattatccaatgggctgaatatgaaatcgaaacctttgcgcgtttggttaaagaaaattctcctttgcctgagagtgtttctgcccttcgctctgcctgtatatgcatcgaaactagtctctttcattgctcttgtctagaatcccaaggtctgaaattctcaaaattacttatggtactattgcgcccttatattgaagaagttcttgatttgaattttagaagggtgaggagaaagattgtggatggggcaaggaatgatgatattctgcttctcacccctcaagaaggatcaccgctctctggtgcagtttcaccaaatgttatgcttacaagcagtggaaaaaagttcatgtccattgtcaatgatgttttggatcagatcctcccaatgaccatagttcactttggtggagcaattctgaataaatttatccagctttttgatagatatgtagaaacactgatcaaagtcttgcctgggccttctgaagatgataatctactggagtcaaaagagcctattgaacttaaagctgaaagtgatgcgcaacaacttacactaattggaacagcatacactgtagcagatgagttattgccagctgctgtatccaagttctttgacatacaagctgagaagaaaggagctggtggatcaagcgaaggccttggccctgggtccatatatgccatggaatacaaagagtggaaacgtaatttgcagcattcattggacaaactgagggatcacttctgccgacagtatgtcttatcttttatttacttggaagggaagtcacgtttggatgctaaaatgtacttgggacggaaagacgatgatcttttatttgatcctgatcccttgccttcattgcccttccaggttattgcattttttcgcaaccatgcctaaggcctaagcacattttcattaagagggcactgtttggaagattgcaacagctagctagtgtcgctggtgacgttctactgggaaaagataagatacaaaaggttttactctcaaggctaactgaaacagttatcatgtggctctccaatgagcaagagttctgggatatctttgacgaccgatctgtccaactccagccttcggggctgcagcagcttattcttgatatgcacttcattgtcgagattgctgtgtgtggaaggtttccatatagaccagttcagcagcttgtgtccacaatcataaccagagcagttgcagctttctcagcaaggggtgttgatccacaaagtgttcttcctgaggacgggtggtttgtcgacaccgccaaggccgcaatccacaagctcatgctgggggtttctgggtccgagtccgagcccgagcctgatgcggaagaacatattgctctgcatggtgaggtctcagattctgaggagagctcaggtgcatcgacagtaggatcagaagactcattcgcttctgcgaagaacgatgatctagaaagccccgtttacttcactgaccctgagagttgagaacttctcaggtcgtcgttgtagattcagttatcgtttatttgaagttttgtcatcctgcatagttggcagatttcagaaccgtggaacatcgttgcactcaagatgaaaacaaagaacccagaaatgccgtttgtaattatggtcgttgctattgtaccttgttgcttattgttagcgccgatttggacatcaatcattg

SEQ ID NO: 199182 - DNA, 1089 bp, Zea Mays
gcggggttctccgacgaccttttcatcgtccccccctccgcccctccccggttccgatcactctctcccagtcaacgcaccaccactaaataacgcactctctcccgagtccgatcccaactcaacccaaggcagtctcactgacagagtgtgtcgaccgacgacctgatctcggtcgatcgagacagagagagaacaacgacgagaatcatgcagagactgcccacggcaacggccgccggcgccggcatgacgtcgttgctggtggtgctgctgctcgtctcagtcttgccgggcgccagtggtgccgactctgggccgctcgacggcaggaagatggtgttcgccggggagaccgcaggagtacttgcccgctattccttcaacaaggacgcgaatgtcgaaacggcatcaccgccgccgccggcgttggccggttcggcggcgcagttccgtgggcaggcgcagctcccgcgcttcgccgcgccgcgccgctacgacctgcgcctgcgccccgacctcgtcacctgcacattctcgggcactgctgccgtcaccgtcgctgtctccgcgccaacccgcttcctcgtcctcaactctgctgacctctcaatcgacagcgcctccatccgtttccgggatttggcgcctaaggaggtggtgtttttcgcggacgacgagatcctggtgctcggattctccaaggacctggtgctcggtgagggcgtgctcagtatgaagttcaacggcacgctcaacgaccagatgagggggttctaccggagcaagtaccagtataagggaaagatgaagaatatggcagtgacacaatttgagtctgtggatgctcggcggtgcttcccatgctgggatgagcctgcattcaaggctaagttcaagctaacacttgaagtaaatgttgggatggtggcattgtccaatatgccaatagctaatcagacagttgctggtcctatcaggactgttcactatgtggaatcacctcttatgtctacttatttagtggctatagttattggtttgtttgaatatatagagggtgtaacaccagaaggtttgcaaagcgtg

SEQ ID NO: 199183 - DNA, 7854 bp, Zea Mays
caacgcaccaccactaaataacgcactctctcccgagtccgatcccaactcaacccaaggcagtctcactgacagagtgtgtcgaccgacgacctgatctcggtcgatcgagacagagagagaacaacgacgagaatcatgcagagactgcccacggcaacggccgccggcgccggcatgacgtcgttgctggtggtgctgctgctcgtctcagtcttgccgggcgccagtggtgccgactctgggccgctcgacggcaggaagatggtgttcgccggggagaccgcaggagtacttgcccgctattccttcaacaaggacgcgaatgtcgaaacggcatcaccgccgccgccggcgttggccggttcggcggcgcagttccgtgggcaggcgcagctcccgcgcttcgccgcgccgcgccgctacgacctgcgcctgcgccccgacctcgtcacctgcacattctcgggcactgctgccgtcaccgtcgctgtctccgcgccaacccgcttcctcgtcctcaactctgctgacctctcaatcgacagcgcctccatccgtttccgggtacgtacgcgctgaccttactatctcgaaggaagaaaaatgttgccatatatttgtccttgccttggcgccaaatatcatctcggatgccggttgccggtccggggccggtttttgaaggatttggcgcctaaggaggtggtgtttttcgcggacgacgagatcctggtgctcggattctccaaggacctggtgctcggtgagggcgtgctcagtatgaagttcaacggcacgctcaacgaccagatgagggggttctaccggagcaagtaccagtataagggaaagatgaagaatatggcagtgacacaatttgagtctgtggatgctcggcggtgcttcccatgctgggatgagcctgcattcaaggctaagttcaagctaacacttgaagtaaatgttgggatggtggcattgtccaatatgccaatagctaatcagacagttgctggtcctatcaggactgttcactatgtggaatcacctcttatgtctacttatttagtggctatagttattggtttgtttgaatatatagagggtgtaacaccagaagttgcaaagtcgtatgtggagcatgccttggtcgtgctagtgttgagcatgtcgtgctgcagtggtcggtaggtgtgtccatgccattgagtacaacatagttggtagacagtataacaacttgtactttataatacctttgggtacacccaccaccataggcgtgattacaatgacacctgcacctgcacatctaatatagtggtattggttcgcttgcgccacgagcattgatgccttttgaccataacatcgaccataacattgctttaaatatgatgtacaagagccttctctcaacagctaggagtcacgtgattgatcgggtcagagtcgcacgaggcaccggtgtcgtcacacgacactgggctgtacaacatgtggccttcctgcctcgtgggtgtcttggagagttggaggatcctggcgtgagggcctccggtcctgcagggctccaggatctgccgcttctagggcttggcctaatggtttccaagctacatgtccaatgatgttgagctagcactagtcggacccactacaggtcttccttcatgtggcaaaatttctcggaggacgttttgccagtattaggggattgaaggaccggtgaggcgactagagggggggggtggtgaatgggagcccctaaaaatttctcaatcaagagcttgtggcttgattccccgacccaatccaacctccggggacaccaaaaacacttctcaaaagaatagctcaaccgcgaattgattgattgctcctaccaagttccagagaggaataagagctcaaatggacaaaagaacttgatttggaacccaaactttcaaaagaaactccaaagaacaccctcaaggaccaccagaagttctgggaaaagtccgaaaaaatcgtcgagaagtagtgccgctcgacaaaattttgtcagaacgacttcaaattttgcaggcatcaagatacgagggagtagaggtgaaccgtgaagtttgagcaagaaaggatcaaagtaccttgcgcgacagtgcccgatagaggagcggcagcgccgcttgggcaaaaatgcttagaacctcttcaaactttacagacaatttgcgtagagggaaggaagtctatccgtgaagtatgaacgtgagctactcaaaacttcaagcgcagattcaaaatctcagttgtgattggggttttgttggggttttctcaaatgaactcaaactgaggaagaatgaaacttgcccatgatctgctcaaacctgagacttaaaatgatcaagggatggtcttccaacagttggtgtccccaaaacaaactcccaacacaaagggaaagaacacaagagcaaaatgactcagaaacttcatccaagacaaaaactgagattgagagccaacaaaacctgtgggcgggactggccaccctttatcagattaaacaatgaagattacaaaatcacagacgaagagttcaaatccctgtggacctctagctacaaagctagagctattctaggaattgaaaacaaatactgctaaaactctaagccaaagagatggttataataacagcccacccatctatttatagagggttattactacttcctaaactacccctagatacgtagtgcctatccatttagccggggcgaaatggaccaactcctgggatattgatctgacggctacgcgctccacacgaagttgcttctcctcgacgcaccctccgtgatgacgccacatgccgcctccgattcctgtcggaaccgccaccaccgagttttgaggccgatctcggtcgaaaacccgccgtccgtagcgctggttgttttttcgaggatcagccactaaaccaccgtgagtattgcaccgcgtgcgcgtcccccacgtcctggacacgtgtcccgtcagtcctcgaccgcgccggcaacacgacctgctccaccacgtcctcgcgcaagtgcgttctcaggtgtcagccaccatggctagtcacccgacaatcctggtccctcggtcaagtcctagcgcggcaacgctcgttcttcaccgctcctggtccatcaacacgaacccgcatgtccttcaccttcggcatcgaccactgtccctgtgctccacacctgcacaccacaaaccgaaagacatggttgcacacacataatcacgcctcgtgtagtccacgactcaacctgagacactacacgttgacaatcactcatcatcatagttgtcaaggcgtcgccttagcgtcgcctaagcgctaaggcgaggcttaggtccaaggcgtcctgctcgccttactttcttggctagggcgtcgccctagcgcttcataggaagacaaggcattgccctgcagacgcgtttggccggattgtaaagttttccactccccaaacccttatgttcgctgctgttagctgtccacgtactagactcgcggttagggcttcacgtgagattcgggcggcggcggcggccccctaccgcgagcccgcaacctctccctacccggcgaagtcctcttgccctgctccctggtgaggctccgccccctcccccttccgcggtgagctccccctccccctcagctgatctgctctctgcctctttatccagttcagttgtttagttgttcccaattacctttgtaggtcagtgatggagagcacaggctctgctctcgcttctgtgcctgtggattcaaacactgaccctatggcagatccaaagcgcagagcgaagtctaatgatcctagatggaactatggatattggatagagattgggaatcgagataaggtcacatgcaacctttgcaagaccgtgacaatgggaggaatcaagaggttaaaagaacatcttgctggtggttatgcggacacattaatgtgttctaagactacaactgagattagaaaagaagtgaaggcatatttggacaagaacaagaggactaggcctactttccttgatgatgatgatcatgatggtcaggggcagcaaggcgaagaggattccaccacatctatgcaacaacctagctcggggacaactgccaaaaggaagagagctgcatttcagtttagaacaactgcacagccacagacatcaaacaaggaaaagaaaaagggaaaattgcaaccatgcttcgaagaactactgaacaagttgtggatgagaggcgctcctcagggtcacaccaccaaaccaccatggaagcatgcactaagtctaaggctgacaaagattatgtcaacaagcaatgagctatgtagttctatgagtgtggtgtaccttttaatgccattaattctagacagtttcacattgcttgtgaggccactgctcaacatggtactgaatatgttcctcctagtattcatgaggttaaagagcctttacttgctgaatgtgtcaaagatgtgactaacttgagggtttatcatgagttagcttggaagacttatggttgcacacatatgtcaaatggatggactgacaggaggggacatcagttgatcaactttcttgtgaacaatcctgaggggacttacttcttagagtctgttgatgcttcaagtgaagcacatagtgctactatgcatggtgatttgcttgagaagaggattgataatattggcagagacaaagtggttcaagtagtgacagataatggcgccaattataaggctgcaggcaagattctcatggatcgaattccaacattgttttggagtccttgtgcagctcattgcttggatctaatgctagaagatattggaaagtagaaagatttcaaggaaacaattgctctagccaaacgagtcaccacttttatttataggcatggaaggatccttagtggaatgagggagcaaacaggtggcatggacctagttagacctggagccactaggtttgtcacttgcttccttactttgaagagcctacataagcatagaaatcatttgaagggtgggaagggatgcatggaagtcaaacaagtagtcaaaaacagaggctgggaagggagtttatgacattgttctagcctcaatgttttggagcacagttgaagattgccttagagcttcagcaccacttcttattgtccttagggcgatcgatggtgatgagaagcttgccatggtggaagttgcaacactaatggatagtgcaaaagagaggataaagcttagctttacataaaaaaaagcaagctttgctaaaaagagtcttgagtattgttgagcgtcgatgggtgtcgcaaatggaccatccattgtatggtgctgcattgtatttgaatccgggaaaattctttgccattaaaaacaaaggagatgatatgtatgttgcagagctaagtagctactttaatgatgtgcttgaaagaatggaaccggatgatgctattcggtctaagattgatgaatttgcaatgcattctgaggaacaatgtagccctatcttctcaagcaaattggcacttgcaaacattgaaacaaaaagccctcgtttgcaaagcgtgtggctagtctatgtgcttcatcacccagttgtgagaggagttggagtacctttgaatttatgcacacaaaaaggaggaatcgattgctaacaaaaggctaaatgacttagtctttgtatcatacaaccggaagatgcaaaataggttccaaaagaggagggagacgggtggcacaagttatgacccattagtgcttgacgattttgattgggacaatgagtgggtacactcatcggttgtacatgctggtagggatgatgatgagcataacttgacatgggaacaagttgatgaagccattagagcatctgagtcccttcgaggccgcaactttcaagacaagctcatgagtaatctagctgtaaattctttctttccgcaatggaatatctggacacaatttcttgatgacacaaccgctggtctcaaattggattcacttgaagagtctcaccctattgagaaagcgttggcttcatatataagaaaatttgcctactcaaatgctaaaaccgaggacctttgggctgttcttgaagagaattctggtgaacctatcaagaatatgatgactacatggacaaagcaacaagggtaccctgttattaatgcaaagcttcaagggaattatctggaacttgaacaggcacagtttttgttagatgggtcctctggccccagaatgtggattgttcctataactgcagactgtggttcatattatacacagaaaaaaattctactgaaaggcaaaagtgataggctggatataagagacattgcttcacagtgtggtaaccaagagaagggtggaaacttttggattaagttgaacattaatcaaacaggattttatagagtccaatatgacgataaacttgcagctgcacttcaaaatgcattgcaggccaagaagctgtctgtaatggataaaattggcattgtggaagattcactggccttatctatggcctgcaaacaaaccttaacatcgttgctacgtttactgtatgcttaccgcgaggaggctgattacagtgttctttcacacataaatactgcgagtttaagtattgctaaaatatcggttgatgctactcctggattggtcggtgacatcaaacaacttctgatcaagcttcttctgccacctgctgtaaaattaggttgggacctcaagaatggtgagagccacctggactcgttgcttagaccagtgctcttggttgctcttgtcaaacttgggcatgataagagtataaatgagggagctaggcgtttcagtatctttgtacatgatcggaacacttctcttcttcgtcctgataccagaaaggctgcatacctagctgcaatgcagaatgtaactgcttcatacagatctgcttataatgatcttctgaaagtctacagggagtcagatgaagcagaggaaagggggcgtgtcctaagcacactgtgcttttgtaaggacgagaatattgttcttgaatcactgaatcttctttttaccaatgagtttcgcaagcaagatgcatattatgtacttcaaggtcttgacgtggagacgcgtgataccgcatgggtgtggttgaaggataactgggatcgtgtgacaaggaaatacggggacacacaagcaggaggttttatcagatacgtcgtcacattgttcacctccaacgagaaggcagcagagttctcccgcttcttcgcaacccgcaagaagcctgaattcgagagaacactaaagcagagccttgagaacgtccggatcagcgcaaggtggatccagggcatcaagagcgaaccgaggctcgctcaaacggtgcaggagctgctgcgtagaccctgatctgccctcggttgagttgcaggtgtggccggaaataagctggtcgtagatgacatacgctttgtacattctcagtgtgtaaaaggttacctctcttagtgttcatggcagcatgcaaatgtaagctattgggttgaatttttagcccaagcatgtgctagcagtgatctcgtgtctaatttgagaagcgtagaggtttaaaagaagattaaagtgcatttccgattcttaaatttgtgcggctgtgttaatctgatctataaacttttaaaatatatctcttaaaggctcaatatttgttttggtgtttgttacgtgcaaacggacccaaacagatccg

SEQ ID NO: 199184 - DNA, 2038 bp, Zea Mays
aagggagaactatgggcttgttactttccgcgaagtggctttgctttttgatgaggagtcttcaatggaatccagcaaacagagtattgcaattactgtagcacatgagctggctcatcagtggtttggcaatcttgtaaccatggagtggtggacccacttgtggctaaatgaaggttttgctacatggatgagtaatctagctgtaaattctttctttccgcaatggaatatctggacacaatttcttgatgacacaaccgctggtctcaaattggattcacttgaagagtctcaccctattgagaagcgttggcttcatatataagaaaatttgcctactcaaatgctaaaaccgaggacctttgggctgttcttgaagagaattctggtgaacctatcaagaatatgatgactacatggacaaagcaacaagggtaccctgttattaatgcaaagcttcaagggaattatctggaacttgaacaggcacagtttttgttagatgggtcctctggccccagaatgtggattgttcctataactgcagactgtggttcatattatacacagaaaaaaattctactgaaaggcaaaagtgataggctggatataagagacattgcttcacagtgtggtaaccaagagaagggtggaaacttttggattaagttgaacattaatcaaacaggattttatagagtccaatatgacgataaacttgcagctgcacttcaaaatgcattgcaggccaagaagctgtctgtaatggataaaattggcattgtggaagattcactggccttatctatggcctgcaaacaaaccttaacatcgttgctacgtttactgtatgcttaccgcgaggaggctgattacagtgttctttcacacataaatactgcgagtttaagtattgctaaaatatcggttgatgctactcctggattggtcggtgacatcaaacaacttctgatcaagcttcttctgccacctgctgtaaaattaggttgggacctcaagaatggtgagagccacctggactcgttgcttagaccagtgctcttggttgctcttgtcaaacttgggcatgataagagtataaatgagggagctaggcgtttcagtatctttgtacatgatcggaacacttctcttcttcgtcctgataccagaaaggctgcatacctagctgcaatgcagaatgtaactgcttcatacagatctgcttataatgatcttctgaaagtctacagggagtcagatgaagcagaggaaagggggcgtgtcctaagcacactgtgcttttgtaaggacgagaatattgttcttgaatcactgaatcttctttttaccaatgagtttcgcaagcaagatgcatattatgtacttcaaggtcttgacgtggagacgcgtgataccgcatgggtgtggttgaaggataactgggatcgtgtgacaaggaaatacggggacacacaagcaggaggttttatcagatacgtcgtcacattgttcacctccaacgagaaggcagcagagttctcccgcttcttcgcaacccgcaagaagcctgaattcgagagaacactaaagcagagccttgagaacgtccggatcagcgcaaggtggatccagggcatcaagagcgaaccgaggctcgctcaaacggtgcaggagctgctgcgtagaccctgatctgccctcggttgagttgcaggtgtggccggaaataagctggtcgtagatgacatacgctttgtacattctcagtgtgtaaaaggttacctctcttagtgttcatggcagcatgcaaatgtaagctattgggttgaatttttagcccaagcatgtgctagcagtgatctcgtgtctaatttgagaagcgtagaggtttaaaagaagattaaagtgcatttccgattcttaaatttgtgcggctgtgttaatctgatctataaacttttaaaatatatctcttaaaggctcaatatttgttttggtgtttgttacgtgcaaacggacccaaacagatccg

SEQ ID NO: 199185 - DNA, 2037 bp, Zea Mays
aagggagaactatgggcttgttactttccgcgaagtggctttgctttttgatgaggagtcttcaatggaatccagcaaacagagtattgcaattactgtagcacatgagctggctcatcagtggtttggcaatcttgtaaccatggagtggtggacccacttgtggctaaatgaaggttttgctacatggatgagtaatctagctgtaaattctttctttccgcaatggaatatctggacacaatttcttgatgacacaaccgctggtctcaaattggattcacttgaagagtctcaccctattgagaaagcgttggcttcatatataagaaaatttgcctactcaaatgctaaaaccgaggacctttgggctgttcttgaagagaattctggtgaacctatcaagaatatgatgactacatggacaaagcaacaagggtaccctgttattaatgcaaagcttcaagggaattatctggaacttgaacaggcacagtttttgttagatgggtcctctggccccagaatgtggattgttcctataactgcagactgtggttcatattatacacagaaaaaaattctactgaaaggcaaaagtgataggctggatataagagacattgcttcacagtgtggtaaccaagagaagggtggaaacttttggattaagttgaacattaatcaaacaggattttatagagtccaatatgacgataaacttgcagctgcacttcaaaatgcattgcaggccaagaagctgtctgtaatggataaaattggtaagaaccacatgtgatactaataattttcttgtcactactttagtgacaagtatcataaaattaacattgcaggcattgtggaagattcactggccttatctatggcctgcaaacaaaccttaacatcgttgctacgtttactgtatgcttaccgcgaggaggctgattacagtgttctttcacacataaatactgcgagtttaagtattgctaaaatatcggttgatgctactcctggattggtcggtgacatcaaacaacttctgatcaagcttcttctgccacctgctgtaaaattaggttgggacctcaagaatggtgagagccacctggactcgttgcttagaccagtgctcttggttgctcttgtcaaacttgggcatgataagagtataaatgagggagctaggcgtttcagtatctttgtacatgatcggaacacttctcttcttcgtcctgataccagaaagggagtcagatgaagcagaggaaagggggcgtgtcctaagcacactgtgcttttgtaaggacgagaatattgttcttgaatcactgaatcttctttttaccaatgagtttcgcaagcaagatgcatattatgtacttcaaggtcttgacgtggagacgcgtgataccgcatgggtgtggttgaaggataactgggatcgtgtgacaaggaaatacggggacacacaagcaggaggttttatcagatacgtcgtcacattgttcacctccaacgagaaggcagcagagttctcccgcttcttcgcaacccgcaagaagcctgaattcgagagaacactaaagcagagccttgagaacgtccggatcagcgcaaggtggatccagggcatcaagagcgaaccgaggctcgctcaaacggtgcaggagctgctgcgtagaccctgatctgccctcggttgagttgcaggtgtggccggaaataagctggtcgtagatgacatacgctttgtacattctcagtgtgtaaaaggttacctctcttagtgttcatggcagcatgcaaatgtaagctattgggttgaatttttagcccaagcatgtgctagcagtgatctcgtgtctaatttgagaagcgtagaggtttaaaagaagattaaagtgcatttccgattcttaaatttgtgcggctgtgttaatctgatctataaacttttaaaatatatctcttaaaggctcaatatttgttttggtgtttgttacgtgcaaacggacccaaacagatccg

SEQ ID NO: 199186 - DNA, 2039 bp, Zea Mays
aagggagaactatgggcttgttactttccgcgaagtggctttgctttttgatgaggagtcttcaatggaatccagcaaacagagtattgcaattactgtagcacatgagctggctcatcagtggtttggcaatcttgtaaccatggagtggtggacccacttgtggctaaatgaaggttttgctacatggatgagtaatctagctgtaaattctttctttccgcaatggaatatctggacacaatttcttgatgacacaaccgctggtctcaaattggattcacttgaagagtctcaccctattgagaaagcgttggcttcatatataagaaaatttgcctactcaaatgctaaaaccgaggacctttgggctgttcttgaagagaattctggtgaacctatcaagaatatgatgactacatggacaaagcaacaagggtaccctgttattaatgcaaagcttcaagggaattatctggaacttgaacaggcacagtttttgttagatgggtcctctggccccagaatgtggattgttcctataactgcagactgtggttcatattatacacagaaaaaaattctactgaaaggcaaaagtgataggctggatataagagacattgcttcacagtgtggtaaccaagagaagggtggaaacttttggattaagttgaacattaatcaaacaggattttatagagtccaatatgacgataaacttgcagctgcacttcaaaatgcattgcaggccaagaagctgtctgtaatggataaaattggcattgtggaagattcactggccttatctatggcctgcaaacaaaccttaacatcgttgctacgtttactgtatgcttaccgcgaggaggctgattacagtgttctttcacacataaatactgcgagtttaagtattgctaaaatatcggttgatgctactcctggattggtcggtgacatcaaacaacttctgatcaagcttcttctgccacctgctgtaaaattaggttgggacctcaagaatggtgagagccacctggactcgttgcttagaccagtgctcttggttgctcttgtcaaacttgggcatgataagagtataaatgagggagctaggcgtttcagtatctttgtacatgatcggaacacttctcttcttcgtcctgataccagaaaggctgcatacctagctgcaatgcagaatgtaactgcttcatacagatctgcttataatgatcttctgaaagtctacagggagtcagatgaagcagaggaaagggggcgtgtcctaagcacactgtgcttttgtaaggacgagaatattgttcttgaatcactgaatcttctttttaccaatgagtttcgcaagcaagatgcatattatgtacttcaaggtcttgacgtggagacgcgtgataccgcatgggtgtggttgaaggataactgggatcgtgtgacaaggaaatacggggacacacaagcaggaggttttatcagatacgtcgtcacattgttcacctccaacgagaaggcagcagagttctcccgcttcttcgcaacccgcaagaagcctgaattcgagagaacactaaagcagagccttgagaacgtccggatcagcgcaaggtggatccagggcatcaagagcgaaccgaggctcgctcaaacggtgcaggagctgctgcgtagaccctgatctgccctcggttgagttgcaggtgtggccggaaataagctggtcgtagatgacatacgctttgtacattctcagtgtgtaaaaggttacctctcttagtgttcatggcagcatgcaaatgtaagctattgggttgaatttttagcccaagcatgtgctagcagtgatctcgtgtctaatttgagaagcgtagaggtttaaaagaagattaaagtgcatttccgattcttaaatttgtgcggctgtgttaatctgatctataaacttttaaaatatatctcttaaaggctcaatatttgttttggtgtttgttacgtgcaaacggacccaaacagatccg

SEQ ID NO: 199187 - DNA, 1843 bp, Zea Mays
cgtaacagagaatcgccgcccgccaggccaggcgatagctagcgcgcggcggccatcgccaacgcccggcccggccccgggcagctcggctcctcacgcgcgcgtttgcagcgtgatcgtcgagcgccgccacgtacatacacgcgcctcctcctccccgcctccaggctggttggctagctgcaaccactcgcgagctagagctagctaactggccagcagctccaggtcgaacgaagcttagctagctagctcaccggcaggagcggagctacccctcgagtactcgcgcgcgcatgggaaacgccctcgggtgcgcggggctcggcgagcggctggcggccggcgccagggacggcgacgcggcggaggtgcggcggctgctggacgccaacccggggctcgcccgctgcgccgccttcggcagcctcagctcgccgctccacctcgccgccgccaaaggccaccacgagatcgctgcgttgctgctggagaacggagcggacgtgaacggcaggaacatctacggccagacggcgctgatgcaggcgtgccggttcggccactgggaggtggttcagacgctgctgctgttcagatgcaacgtgtccaaggcggacagcctgagcggcaggacggcgctgcacgtggcggcggcgggcggccacgtcaggtgcgcgcgcctgctgctcgcgggcgccggcagcggcaggagcaagctcgtgaaccgggcggccagcggcggcggcggcggcgtgacggcgctgcacctggcggcgctgcacgggcacgccgactgcgtgcacctgctggtggacgagcgcgccgacgtcgccgcgcgcacgctgccctgcgccgcgccgcccatggcgtccgtcggcgccgggagcgcgccgctgcactacgcggccgccggcggcgaggtcaagtgctgccagatcctcgtgtcgcgcggggcggacagggccgccgtcaactgcaacggtcaggtggctcccggtggacgtggccaggacgtgggggtgccactggctggagcacgtcctgtcgcccaagtctctgctgcccatccccaggttcccgccctccgcatacctctcgtcgccgctcgccagcgtcatcaccctcgcgagggattgcggcctggctctgaacatgtcgtcgctgccaatggacaccatggacggcggcgccgacgacggcgacgcatgcgcagtctgcctcgaaagaccctgcaacgtcgctgccgaagtgtgcgggcacgagctgtgcgtcaagtgcgcgctggacctgtgctcggtgatcaggtcctacgacgcgccggggatcgccggcaccatcccgtgcccgctctgccggagcggcatcgcctcgttcaggagacgggccgcggcggccgaggccgagcctggcgccaatgccggcgaccggcaggcgtcgtccagcccacacaagaagcggagcacggagtccgaccaggacggcctccccctcgtctgcgctcctcccgccgtcatgtcgtcctgatcagcgctgcagacatagaaatagaagctgctgtgctgcatcgtctcttcgtcggtagaaatctgcagggtacagcagcagcatgggtggatcacaggatgcatagaagctagacagacagattgtttggttctgtttgctgatgctcgccttcggcatcggtggattttattttattttcattttattttttatggtgattcacatggcattagctagtctgctagtgtaacacgttgatttgctgtagaaaaagatggaacattcttttgctgtaaaaaaaatggggttggttggtttcgggcgttttgactca

SEQ ID NO: 199188 - DNA, 1349 bp, Zea Mays
cgtgcggatgcacttgtttgcgtcccgtgcgcgcgtgatctgatcagcgcgttcgcgtggctcggtcgccacccaactcgacaccgcccacctccacctcctccgcgtccgcttttttgtccgggcacaccccgcccgacgccgccggaaccagaccagagtccacaccacaccacaggagaggagaggagctctggcccgccaaaaaaaaatagcaggggcaggggccgcaggcgccgcgacccatgggcgtcaagcaggtcctcgtccgcccccgctacggcgacgaggatgtcgtcgaccagtcgccgccgccgcccatgtcgtcctcgccctgcggccgctacgtccaccaccgcgtctgcaggttcgacacgctcgccggcgtagccatcaagtacggcgtcgaggtggcggacgtgaagcgcgccaacggcctcaccaccgacctgcagatgttcgcgcacaagacgctgcgggtcccgctccacggcaggcacgcgccgtctcctccctcctcgtccccaagccacgccgccagagaatggactaaaaatgctgcttccctggacccgctccttaaacttaaaccaccacggagcacagtttcgccatccatgagccttctactacaggggtgccatggcctgacgccggctccaaagggggacctgaacctgaccgatgaatgcgctcaaggaaagccggaagcttatcgagcaccttgttgccgaggagagccgggcaagggctggccctgaggccaaagtctggcggtcgggcagacacgaacggcatccagcaggatctgttggctgcgtgggtgccctcgtacggggacgggttgcgcgcggtgaagagatcgtcgagcgctccggagttccaggattcggacagcgtcagcctcgcctcggcgtggctgaagagcaagtggaacctgaaaccggattatgccttcaccctggcgctgttcgacggcatctccaagcctctcctggacagcatccccaagcctctcctcgacaacatccccaactcgatcgttgcttggagaaacaaggcggccagagattagcagcttcgtttcgtctctttacagccaacaaaaaaaaaggcctcgaacggttggacacactgtgctgaaatggcgtgacggatacagtgacacattacttgcacatacatactgtgctgaatctattgtgccaaagcagcagcagcagcagattgggagctgggagatgagcctgggggtgtattcttttcatttttgtacgtacacatctaggaatgaaggcaaacgcctggcagcattcccatgacctaataaagaaatagcttgttcatcc

SEQ ID NO: 199189 - DNA, 1898 bp, Zea Mays
gatccgcgccgccgcatcctctctggtgccaagaatcgcggacgtcgcttcccacctcaccgaaccgtccgcaatctccgtctcctggccccgcgtcgttgcgtccgcgctctcctcctgccccgcgccgttgcgtccgtaatctcctcctccagccacgccgttgctctcgcgctccgctgctctcgcggaatcactcgcggaatcactgctccgctgctctatccgccatcagatttctggagtagtcatggaaggtgccgctcttgatttctaaacagtgcgccaccaatggcgcctgagcccccgccaccatttcatccccttcccgcccagtgtacacaccctacctcgccccgcgtctagatgcacgcgtgcccgcggatgtctctggtgcccccgctcccatcctcctcgcgtcccatccccgtcggcacgggcgcacgacccccatcctcgatgtcgtcctagctgctgcgtgtgcatctccacgcgaacccctaccatcctcgacgtcgtcccagttgcggctgtcgcatctccgtgtgcatctccacccaaacatgcaaggtcaccgggggcccaaacctcaggagcagcgccgcccgcggatcgtgtggattcctgtcgcgtctgcctcggcgaggcctgccgagggatacgacaacgaggattatccatgtcggggccggtcgctttgcctccctgctggccgtctctgccccgccagctccgccttaacgccggatttctccgtgtctgcctccgcatcagggcacgccacgcgcatcgcctcggcggtgggccgcgttgctctctctaccttgtcgcagcacccttggaggacggctacactggcatggaggttcatgtgcgtctgcttggtcgagcgagctccccatctttctccgtcaaccccgtcgtccattttgccccaccacgccacgcaatacgcagttgaagatgagacccaggtggtggcgctgaagcgactatcgcggcatcacggctcgaacgtgatgacgatttggcgttcttccctatgggccgatccctctggtcatcttctcgccgcactggcgatggagccgggcttgccgcgcctggtggttctcgtccgcccacggcccccgattagcatgagcctccgcgccagtatcattggtcttcctaatgttggcaagtcaaacctcttcaacgccattgttgtccgatgctttgaggatgacgatatagttcatgtcaatggaagggtcgagcccggatcagacattgatgtcattaacctagagctgatattttcagatctttaacaggtatcctacgatgattttgttgcagctggttttcttggagtagcaagggagaaaggactggtaaaaatactttatttgctacaccttacattcaatgttttgaaacatgtagttaaaaagatgttttttgcttattttttgctactcaacacttagtgttagtttaacattaaacttgcatattgttggtgctcttctaaagatggccattctattggttaaacactgatactgaatgccctagaaatgatgctgcaaagtatatattttatattactttgttacctttatgtttgagaggtttgcaagttactgaaatattattttgtaattgattagtgcaggccaaaaccttgatgtggttgcttgttattctatgggttttggtttggttttacaagtgttattagcattataccttgtgctcgtgctcatgtacaaatttctcaaattgtaaccccgtcgatactcgcactcaaatattttatgcagtaacatgtataccgttttgggccatcgttgcatgcagattttttcccttggagactcaatatatgctgctagcagctgcattacctcctt

SEQ ID NO: 199190 - DNA, 3115 bp, Zea Mays
gcagagtaatgtttccatgagtaatggtccaggaccgacagcagtggaggaaggtggtaattcaaggaagacaaaaacactaaagagtgtatggcggaaggggaaccctgtgccaactgtacgtaaggtcattagagagcaaccaagaactgaaacaaggagtcagtctatacctgtggctaaaccttcagtgtcatctgcatctaagcctttcccctctgctactatctaaaccttctgtagcacagcctcctcgtcggcctatcaagtctgatacatcaaatgagaaaaaaggacccatccttattgataaatttgcttccaagagggcagcagttgatccgattgtacctgaggaattgttagaccctctaaaaccagtacgaggcccaccagcaaaagtcagagttgatcgtcgtaaaaaaccagacacacaagctggttccagacgacgtatgtccaatgatgatggattagttgatgaggatactactgacgtgccaatttctggtgttccagtgcgcaagggtaggaggtggagcaaggcaaaacgccgcgctgcaaggctagaggctatgcaagctgaagagccagtcagagttgagatccttgaagttggtgaagaaggtatgctgattgaggacttggcatatgagttggcaattggtgaatcagaaattttacgattcttatcggtgagaggagttatgcttgacaatgttcagactctagataaagatttggttaagatggtttgcatggaatatgatgttgaagtactagaaagtggtcctgtgaaagtggaggaaatggctaagaagaaggagttccttgatgatgaagatttggataaattggaagtgaggcctcccattgtgactatcatgggccatgttgatcatgggaaggtactaagactgatgctaactcttggaactcacaacttttctaaagtattggttgtatgacactgctatttttgtttgcagacaactctgttggattatatacgcaagagcaagttggtggcatctgaagctggtggtataacacaagggattggagcatatcaggttcttttaccagtagatggaaaccatcaagcctgtgtttttctggatactccaggacatgaggcgtttggtgcaatgagagctcgaggagctagagtaaccgatatctgtattgttgttgttgctgcggatgatggtgttcggccacaaacaagtgaggcaattgcacatgcaagggcagcaggggtgccaattataatagcaataaacaagatagacaaggagggagctaatgcagaacgagttatgcaagaactttcccaaattgggataatgccagaaatgtggggtggtgataccccaatgatcgaggttgctgattgtgccaatttaaaacagtagctcaatagtatagcatcttattacctatttgaaccattttatttgatctctaccagataagtgctcttactggggataatgttgatgaacttctggaaactgtcatgcttgttgcagagttgcaagaattaaaggcaaatccacataggaatgcgaagggcactgttattgaagcatgccttgacaaggccaaagggcctcttgctaccttagttgttcagaatggaaccctaaacaaagctgatattattgtgtgtggtgaagcttatggaaagatccgtgcattgtatgatgactgtgggaagctcgttgacaaagcaggaccatccaatgcagtgcaggttattggcctcaataacgttccccttgccggtgatgaatttgaggttgttgacaaccttgatgttgcacgtgaaagggcgaatgggcgtgctgaagcactgcgcatagaaaggatatctgcaaaagctggggaaggaaaagtcacactctcagctattgcagcatcggtttcatctgcgaagcaagttggaattgatacacatgagctaaatgttatccttaaagttgattttcagggttcaatcgaggctattaggcaagccatccaaactcttccacaagaaaatgtctctctgagattcctccttcaaggtccaggagatgtgagtgttaatgatgttgatctggctgttgctttggaaggaattatatttggctttaatgtcagagcaccaggatcagttaaaaactatgctaagaagaaaggtgttgaaattcggatgtacaaagtgatatatgatttgattgatgatttacggaaggccatggaaggtcttctcgaacctgctgaggaggaagtaccaattggttcggcaaaagttcgagctgtctttagtagtggcagtggaaaggtggccggatgcatgattacaacaagaaaagttgttcaagattgtaatgtgcgggttcttcgtaaagggaaagaagtatatgtgtgttcgcttgattccttgagaagggtgaaagaaactgtgaaggaggttggtgctgggctagagtgtggtattggggtagatgacttcgatgaatgggaggaagggtgaaagaaactgtgaaggaggttggtgctgggctagagtgtggtattggggtagatgacttcgatgaatgggaggaaggtgacatcatagaggcattcaataccgtgaataaggcaagaaccctcgaggaggcctctgctaccgtgactgccgcactcaaggatgcaggggtccagctgtagaattggcaacacgctgatactcttttttattaatggtatgaaatgttaatttatatatactttgaagctgaatggtgagctgaagctattgtgctgaagctgttgtgagctggaccggtggaccgtttccctgattccttcggtggtggctgaagctgaatggtgagctgctggagagtggagacgtggagtggtggccggtgggcgcctgggcggtggctgccggctggtgcagactgtgcacttgtgcagtgcagtggcgctaatatattgtgtgtggctgtggaagatgcatgtgtggatcggctgtctgtagtgagatggaagatactgtatatagcatatcaaaccatatattcatcgtatatacattaattattgatattgaattttgtcggtcaagcgtatgggccgg

SEQ ID NO: 199191 - DNA, 2276 bp, Zea Mays
gacatgagttgagatccttgaagttggtgaagaaggtatgctgattgaggacttggcatatgagttggcaattggtgaatcagaaattttacgattcttatcggtgagaggagttatgcttgacaatgttcagactctagataaagatttggttaagatggtttgcatggaatatgatgttgaagtactagaaagtggtcctgtgaaagtggaggaaatggctaagaagaaggagttccttgatgatgaagatttggataaattggaagtgaggcctcccattgtgactatcatgggccatgttgatcatgggaagacaactctgttggattatatacgcaagagcaagttggtggcatctgaagctggtggtataacacaagggattggagcatatcaggttcttttaccagtagatggaaaccatcaagcctgtgtttttctggatactccaggacatgaggcgtttggtgcaatgagagctcgaggagctagagtaaccgatatctgtattgttgttgttgctgcggatgatggtgttcggccacaaacaagtgaggcaattgcacatgcaagggcagcaggggtgccaattataatagcaataaacaagatagacaaggagggagctaatgcagaacgagttatgcaagaactttcccaaattgggataatgccagaaatgtggggtggtgataccccaatggtcgagataagtgctcttactggggataatgttgatgaacttctggaaactgtcatgcttgttgcagagttgcaagaattaaaggcaaatccacataggaatgcgaagggcactgttattgaagcatgccttgacaaggccaaagggcctcttgctaccttagttgttcagaatggaaccctaaacaaagctgatattattgtgtgtggtgaagcttatggaaagatccgtgcattgtatgatgactgtgggaagctcgttgacaaagcaggaccatccaatgcagtgcaggttattggcctcaataacgttccccttgccggtgatgaatttgaggttgttgacaaccttgatgttgcacgtgaaagggcgaatgggcgtgctgaagcactgcgcatagaaaggatatctgcaaaagctggggaaggaaaagtcacactctcagctattgcagcatcggtttcatctgcgaagcaagttggaattgatacacatgagctaaatgttatccttaaagttgattttcagggttcaatcgaggctattaggcaagccatccaaactcttccacaagaaaatgtctctctgagattcctccttcaaggtccaggagatgtgagtgttagtgatgttgatctggctgttgcttcggaaggaattatatttggctttaatgtcagagcaccaggatcagttaaaaactatgctaagaagaaaggtgttgaaattcggatgtacaaagtgatctatgatttgattgatgatttacggaaggccatggaaggtcttctcgaacccgctgaggaggaagtaccaattggttcggcaaaagttcgagctgtctttagtagtggcagtggaaaggtggccggatgcatgattacaacaggaaaagttgttcaagattgtaatgtgcgggttcttcgtaaagggaaagaagtatatgtgggttcgcttgattccttgagaagggtgaaagaaactgtgaaggaggttggtgctgggctagagtgtggtattggggtagatgacttcgatgaatgggaggaaggtgacatcatagaggcattcaataccgtgaataaggcaagaaccctcgaggaggcctctgctaccgtgactgccgcactcaaggatgcaggggtccagctgtagaattggcaacacgctgatactcttttttattaatggtatgaaatgttaatttatatatactttgaagctgaatggtgagctgaagctattgtgctgaagctgttgtgagctggaccggtggaccgtttccctgattccttcggtggtggctgaagctgaatggtgagctgctggagagtggagacgtggagtggtggccggtgggcgcctgggcggtggctgccggctggtgcagactgtgcacttgtgcagtgcagtggcgctaatatattgtgtgtggctgtggaagatgcatgtgtggatcggctgtctgtagtgagatggaagatactgtatatagcatatcaaaccatatattcatcgtatatacattaattattgatattgaattttgtcggtcaagcgtatgggccgg

SEQ ID NO: 199192 - DNA, 3580 bp, Zea Mays
aaaaatccaggccaaaaagcgaccacggcggatatgccgagtggctctctctctccggcgtgccaaccttatcaccacccattcgagcttgctgcggctgcccgctgcccccacgatcccgatagttttccgaaaaaagacacttccccaatccgtagtggttcacgtcctggttcctcgccggcggcaaccgcgctggacgaggtttcatctgcgcttcgccggcggcaaccgcgctggacgaggtagcgctgctatcaaacaccttgtgctgtcaacatttatgagtgcaaggcagtattgctaagagtatcttgccatggcatctcctgcttccgtcaccaacctcggaagcaatgggaggtctggcccgctcccggctgcagctgcaaggagggcgcagttggtcacaaggatcagattcacggggttcgatggcataaggcgatggcagtatgagcctgggaggctttgcaggtgtatggtcgtcactaatctgattgaggagaaggttgttcagttctcgtcaagagggagtgtcagtgtgaaagctgatgatgacaatgatctgcttctgaagccgccacagaagccagtccggtcaaatggacccccggagagcatgaaaacagcatcactgccggatcagaagccagcaggggcaactttagacgacagagagaaggtcagagagtcactggacgctgtattggagaaagcagagaagcttgaggcctccagctttggtaatgcagatggtggcaaccttggttcaaggcagagtaatgtttccatgagtaatggtccaggaccgacagcagtggaggaaggtggtaattcaaggaagacaaaaacactaaagagtgtatggcggaaggggaaccctgtgccaactgtacgtaaggtcattagagagcaaccaagaactgaaacaaggagtcagtctatacctgtggctaaaccttcagtgtcatctgcatctaagccttcccctctgctactatctaaaccttctgtagcacagcctcctcgtcggcctatcaagtctgatacatcaaatgagaaaaaaggacccatccttattgataaatttgcttccaagagggcagcagttgatccgattgtacctgaggaattgttagaccctctaaaaccagtacgaggcccaccagcaaaagtcagagttgatcgtcgtaaaaaaccagacacacaagctggttccagacgacgtatgtccaatgatgatggattagttgatgaggatactactgacgtgccaatttctggtgttccagtgcgcaagggtaggaggtggagcaaggcaaaacgccgcgctgcaaggctagaggctatgcaagctgaagagccagtcagagttgagatccttgaagttggtgaagaaggtatgctgattgaggacttggcatatgagttggcaattggtgaatcagaaattttacgattcttatcggtgagaggagttatgcttgacaatgttcagactctagataaagatttggttaagatggtttgcatggaatatgatgttgaagtactagaaagtggtcctgtgaaagtggaggaaatggctaagaagaaggagttccttgatgatgaagatttggataaattggaagtgaggcctcccattgtgactatcatgggccatgttgatcatgggaagacaactctgttggattatatacgcaagagcaagttggtggcatctgaagctggtggtataacacaagggattggagcatatcaggttcttttaccagtagatggaaaccatcaagcctgtgtttttctggatactccaggacatgaggcgtttggtgcaatgagagctcgaggagctagagtaaccgatatctgtattgttgttgttgctgcggatgatggtgttcggccacaaacaagtgaggcaattgcacatgcaagggcagcaggggtgccaattataatagcaataaacaagatagacaaggagggagctaatgcagaacgagttatgcaagaactttcccaaattgggataatgccagaaatgtggggtggtgataccccaatggtcgagataagtgctcttactggggataatgttgatgaacttctggaaactgtcatgcttgttgcagagttgcaagaattaaaggcaaatccacataggaatgcgaagggcactgttattgaagcatgccttgacaaggccaaagggcctcttgctaccttagttgttcagaatggaaccctaaacaaagctgatattattgtgtgtggtgaagcttatggaaagatccgtgcattgtatgatgactgtgggaagctcgttgacaaagcaggaccatccaatgcagtgcaggttattggcctcaataacgttccccttgccggtgatgaatttgaggttgttgacaaccttgatgttgcacgtgaaagggcgaatgggcgtgctgaagcactgcgcatagaaaggatatctgcaaaagctggggaaggaaaagtcacactctcagctattgcagcatcggtttcatctgcgaagcaagttggaattgatacacatgagctaaatgttatccttaaagttgattttcagggttcaatcgaggctattaggcaagccatccaaactcttccacaagaaaatgtctctctgagattcctccttcaaggtccaggagatgtgagtgttagtgatgttgatctggctgttgcttcggaaggaattatatttggctttaatgtcagagcaccaggatcagttaaaaactatgctaagaagaaaggtgttgaaattcggatgtacaaagtgatctatgatttgattgatgatttacggaaggccatggaaggtcttctcgaacccgctgaggaggaagtaccaattggttcggcaaaagttcgagctgtctttagtagtggcagtggaaaggtggccggatgcatgattacaacaggaaaagttgttcaagattgtaatgtgcgggttcttcgtaaagggaaagaagtatatgtgggttcgcttgattccttgagaagggtgaaagaaactgtgaaggaggttggtgctgggctagagtgtggtattggggtagatgacttcgatgaatgggaggaaggtgacatcatagaggcattcaataccgtgaataaggcaagaaccctcgaggaggcctctgctaccgtgactgccgcactcaaggatgcaggggtccagctgtagaattggcaacacgctgatactcttttttattaatgctgttgtgagctggaccggtggaccgtttccctgattccttcggtggtggctgaagctgaatggtgagctgctggagagtggagacgtggagtggtggccggtgggcgcctgggcggtggctgccggctggtgcagactgtgcacttgtgcagtgcagtggcgctaatatattgtgtgtggctgtggaagatgcatgtgtggatcggctgtctgtagtgagatggaagatactgtatatagcatatcaaaccatatattcatcgtatatacattaattattgatattgaattttgtcggtcaagcgtatgggccgg

SEQ ID NO: 199193 - DNA, 500 bp, Zea Mays
ccttcctagagcgctcggcccatgtttaggagtgccgggcgtgcgcgcagcgtgcctcttcctaatccatcgcagagcgccgccggcgggtagcgctactgctagaggagaggaagcggaaagggcggcggcggcgcttgtggtcagtcaaagatccaacctccggactcgcgatggggcggcggatcctcaacgatgctctgcgcacgatggtcaacgcagaccggcgggggaacgcgtcggcgcttctccgacccatctccggcgtcatggtctccttcctcaacatcatgaagtaccgagggtatatcaaaaaatttgaggtcattgatgagaatagagttgggaaaattagagtggagcttgatggacgtcttaaagattgcaaagctctcacctacaggcaagacctcaaagctaaggagatagaacgatacagagttaggatgctcccaacacgccagtgtgctatccagtatgctaggtttgcatataatcct

SEQ ID NO: 199194 - DNA, 2070 bp, Zea Mays
gaaggagcccaagccttccgcttcctcaccccgctagtcccataccctagccagggggggatcgcacctcttccgacgatgtcgacccacgccgcctcccgccgctcctcctcctcgtccgcggtcgccaagcgccccgcgatagcggagggagctaccaaggcggcgggaccgggccccaccgccgcgcaggcgaagaagcgcaccgcgctcgtcaacatcaccaacgtcgccgctccgggggcgagggtcgccgccgttgggaaggtcgcgccaccggtcaccggcgcgaagttgaatccagctacctcaggtgcacccttaaagaagccatctttggcaaatgctcgcaccatccggggttctgctgcgaagtcggcttccatcaagccagctccaccagtatcacgccatgacagcagctcagagcagaagcataatgttcttgtgcctaccactgtccatgtgccaagtcgtgctcctgccttggtaccctacagcagtttcgtgtctcctggacgttcaagagattcagtttctactgatgagacgatgtcgacttgtgactccatgaaaagcccggacttcgagtacatagacaatgggggttgctcgatgctggcttcgttgcagcgacgggcggatgaacatctgcgtacatcagaggacagagacgttgaagaaaataagtggaagaaaaatggccctgccccaatggaaatcgacagcatctgtgaagttgacagtaacctcgaggatccacagttgtgcgccgctctggcttctgacatctacatgcatctgcgagaagctgagatgaagaaaagaccatcgactgatttcatgaagacgattcaaaaggatgtcaaccctagcatgagggcaattttgatagactggctcgtggaagttgctgaagaatatcgtcttgctcctgataccttgtacctgacagtcaactacatcgaccgttatctttctggcaacgagatcaatcgccaaaggctgcaattacttggtgttgcttgcatgcttatagcggcaaaatacgaggagatatgtgcaccccaggttgaagaattctgctacataacagacaatacatacttcagagacgagaaatggaagcttctgtgctgaactacttgaagtttgaaatgacagcgcctacggcaaagtgtttcttgaggagatttgctcgttctgcacaggcgtgtgatgaggatcctgctctgcatctggagttcctggccaattacatcgctgagctatccctgctggagtacagtcttctgtcttaccctccatcactaatcgctgcctcagctattttcttggcgagatttgtactccagccaacgaagtatccttggaactccacgcttgctcactacacgcagtacaagccgtccgaattgagcgagtgtgtaaagacactgcaccgcctttccagtgttggtcctgggagcaacctcccagcaatcagagaaaagtacagccagcacaaatacaaatttgtcgcgaagaagcagtgcccgccacaaatccctgccgaattcttcagggatgcggcatgctagacaatagaaagaagcccagcggttgcttacttgattgattcttctccctgatgtggccagttcctgtttgtggtcatgtatgttacaaatccagagagttcaatagcagcactccacggcatgcatatgtatctggaaccatgtttagctactacgctgatggaatctgcaagtcaagtgctgtgccttgagatagatatatgtaacgaacagctagttcgaccttggtacagaaaagcattcttccagcgccctgtacgtatatgcagctgggtctgatctgttgtatgcctgaactgcacaacaacagatgaagaaccaaatcatgatgactaaccaatttaatttaatttattagctgtttctgacctagctaatctgcgctttggagttggaaacacacagcatcatgctggctgctgactctataatagttttgttcttttttgttggtatatgcctgttcgtttcatctcagtatggctgtcta

SEQ ID NO: 199195 - DNA, 1438 bp, Zea Mays
taataaactatatcgttccttaaaccaaacacgctgtaaatacattgaaagcaataagtactctatactctctacttatcctatgtctctgcgtttgtgtctgaggctagaacggattatggatacaatacaaataagtaccgcaggtagaaatccgcgaggtgtgagcaaaccatgacgtaagttaggcttctagccacttgtcgcgttgggacaaaatgaaaagggaataaataaaaagagagaataactggctagttgtcgtctgcctctcgatttctgcgtgattcgcctgcctgccttccttcctgttggttgcttctttctactcgcgctcgcaccaaccagaggagcaaccgagcagtagcgactcctctgcgtgaggcctgccgtcatcccccgtgggccgtggccgtggccgtggccgtgcgcaaaaaaacaaaccatcctcgattcgaccggaggggaaggagacgcgccgggagaagggggaagagacgcggcgaccatgtctccgatctgggtgttcgggtacggctcgctgatctggaacccaggcttcgcctacgacgaccgcgtcgtcggctttgtcagggactaccgccgcgtcttctaccaagggagcacggaccacaggggcacgccgcagttccccgggaggaccgtcacgctcgagcaccagcccggagcgacttgctggggagttgcttacagaataaaggaggaagataaggagatagctttggagtatcttgaggtcagggagaagcaatatgatgagaaggtttaccttgacttgtatactgattcatcgcccaaagtaccagctgtcgaaaatgtgatggtatacttcgccaccagtaacaaggagaacaatcaaaactatcttggtcctgcacctctggaagaaatgaccaggcaaatttaccttgctcaaggcccatctggacctaacaaagagtatgtgttcaaactcgaggacgcgttacacaaattaggagttgtagaccaacatgtccaagaactggcaaatgctctgcgtgagtattctgacaccgagttatctaagtgaaagatcacatttaccccttgtttggaggcaatgagcaacaaaaaggcgaccaggaaaaaagatgaatggaccaaagaaacgatgggcaatctattatatgctaccaaaaaaaaagtttacatcattgtagactttccaggaatttctgacaaatgctaatatagagcaccgatgtctagtccccaatctcaatgtacaaattctctaaaatcctgtcacggagtacaagatcacgagaccaagtttccagtccatgcggaacctatctgttgcaaggagtcgcagatggccttggtgaaggtgatcttgccccggcgcaggtggtagaggacatgcatattctcctgctggaacaccatgtagttc

SEQ ID NO: 199196 - DNA, 612 bp, Zea Mays
cttttttattcacctatttgggggttaggtttctcaccaaaatttaccatccgaacattgacaagcttggtaggatatgcctcgacattcttaaggacaaatggagtcccgctcttcagatacgtacagttctgctcagcattcaggcacttctgagtgccccaaatccagatgatcctctctcagacaacattgcgaaacactggaaatcaaatgaagctgaagcttttgagacagcgaaggagtggactcgcctgtatgcaagtggggcattgtaaccaagtgttgtttcagatgtgatgttataacatttccatagtttggggccgactgaatacccctcttgcttgatgagagcaaatttgtgaaatgttgcaatggggtcaaaaaaaattgtctaatcgtgctttgtacttgtggctgtacctcctcgctgcagtgcccgtgagcatcaaagcaggtgttcctttgtatacccctatctgaccatcagttgcatgtgtttcttgtgctgtgctctgaggattcagatttatgctgccggaacgttgccggattgttcttagtttgcttctttactcgagagcgctgaaactgcctaggctacctcgg

SEQ ID NO: 199197 - DNA, 1639 bp, Zea Mays
ttttttcggagggccaaagtaaagtggcctcgcaacgcaacgcgcgcgatgtaacctatagaaacccccaagaagagaagggtgcgtttcattgcagaacccaaacgcacacgtcgcccccggcccagacgcacgaaatcgcgcgcgttatataataacatctatcatcatatacgttctgcaatggcggcgccgtatagtcgaccggcggcctgatggtgcacagtgagctgctcgtacgtgggcggactggaccgccgccggcggagagatactgctggagagcgtacagtctatagcagatcgatcgattggaggcggccagtacgtcagccctcgttgttgaggatggacgaagaggcaggcgtcgttaccgcggcggctcaagtgacgaggaaggtggaggagaaagacgcggagatggcggcgtggaaggcgcctgccgcgatgttgttggtgcagctgtccaacacgggtatggtgctgctttccaaggtggccatcgacggcggcatgttcgtcttggcacttctcacctaccgcagcctcttcggcgccgccatcatcctccccgtcgcgctcctccaagagagggggaagtggaaagagatggattggcacgccgccggatggatcttcctcaatgcgtttgtcggatacgccgtaccaatgagcatgtactactacggccttcaggacacaacggcgtcatacgccattatattcctcaacttaattccactgacaaccttcattctctcctttgctttcaggatggaggcattgcgaatcatgagcacgtcaggatcgctcaagattgcaggagttctggtgtccgtcgggggcacgatgatcatcagcctatacaggggaaaggtcctgcatctatggagcaaccatattcttcaccatcacaacgaagagcacgacgtcgccgtggatgctgcaagccatcatcggctacgtggaacaatcttgttggcaggcagcagcttcatgcttgcttgctggtacctgattcaggcgaaggttctcaacgtatatccgtacaaatattggtcgtccatggctacctgcttggttggagggtttcagacagcacttgctggagtcatacttcggagggacaagaatgcctggaagataggatgggatataaaccttgtgaccatcgtctactctggggcatttgcaacggcactaaaatacagcctcaactcgtgggctgtatctaggaaaggcccatcataccctgcaatgttcagcccattgtctgtggtgttcactgttgtgctgggctctatcttcatcggtgacaacatcacaatcggaagcctcgtcgggacggttatggtgattgttgggacctacaccttcctatgggccaaagcaaatgagctacatcaagagtgaatatgtcagggagcacatgtttagttcatagagatttccatggaactcagaatggagacacaaatagaggccaacttgtttaatatgtaaacattacaaatataaattaacaaatgatatataaagaaaatgacccatacattaaagcacagaaaaacgatgttcgttccaaacattttgtagcttaaagctatggatcatctcaaggtcatcttgccagttatta

SEQ ID NO: 199198 - DNA, 985 bp, Zea Mays
ctcctgtctggccacgacaaccccgctgcatcaccatcattcataggctgccttcctgcctgctgatctcgcacctcaaacccacacacagcagcataggttgagatagatggccagtctgtggaagaccaaggttctgcctggcctcaacaagatcttcgacaaggatggcaagaaggctgcagctgcaggcttcttcaagtccttcaacaaggaggagattggcaaggagattgaggagaagaaggcagaactggagcccaaggttgcggaggcttatgaagcatctcctcctgaggtcaaggctctgttcaaggataagaagccagtcaagatcagcaagaagaactcgactgcagttaccaagttcctcgatgagctggctaagattgacttccctggagccaaggtggtgagcgaggcggtggccaagtccggcgcctcgcccctgtctccggcgatcaccttcatcttggacaaggtcgcaccgtacatccccaaggaggagcccaaggcggaggacgcggtggctgaggccacttcccgggaagtcgccgtggaggtggaggatgccgagccggctatagctgatgcagcggccgagacaccatcggaggcgaagaagggagaggaggaaaagccggctgccgaggaggcggcgccaccggcagcggctgctactgaggagaagtaatactccgatccacagccatgcctctccctacgtagctgcagcagagtgaaaagtgattcagtcagtcagacatacacacttgcattggcacgcattattcatggacatgtacgttgctgcgccgtgtgtgcgtgtgcgtgtgcgtgtgtgtgggggttctttgttttttattttggggcgattgttacaaatgtgtaattatttatatcgatatgtttgtttcattgatggaccgcatttaataagacaattctttcttgtgtatataagtatttttttccttgcttcttg

SEQ ID NO: 199199 - DNA, 2217 bp, Zea Mays
aaacaagcaccagtttggctcgtctcggcctcggcgcgtgcccccgacccgttgctgaccccgctccccggtgatctgatgtcggcggcggcacgcgcgccaccgccgccgcgcgcactctacgcgccgtcgagaagagtccctttcggtgccgtgatcctatccgcgccgcgacccggggctagggttcgcgcggcgcggcctcgcgaggggaatgttcataaccattgcctgctgacatcgtctagtctgaattcaagttctttgctatgtcctccatgcaattgtgctcaaatggctttggccgacacaagaattgcttaccagcctgaagtcgacaagcatgctggagttctggcctatgaactggttcaagggaatctttggaattcatttatggacaaatcaatacctgatccaccaacagctgttcttcttcatggcatccttgggagcaggaaaaactggggatcttttgcgaagagattggctcaggaattcccaatgtggcagttcctcttggttgatttgcgctgccatggcgactcaacatcaattaagaagagtggaccacacactgttgcctcaactgctcttgatgttctaaagctggtttgtagctttttgcgtcagctatttatgtcttcgctctttggcttctcattcttttcaatcttcatttttatcaatagaactagaagtgtagcttgtttgaaaatgaactctatctgtgtccaacgtgcttgcacaatatctgcatattcatcttattgcaaatctagctttatgcatttggagacaagcctaactcttcatgttaggttacatgcatcagcgtcatatgacaaaatgcattatttgaggttcctgtaatctaatagtcatcactatgaagtaaatgacgaagtgatttggtggcatggcacacacctttttcaaaacttctttattatatttggtgctatttgttgtttcttggttgttcactcctttagctgacttatattttgctccatcaaaatccaacagataatgcagctcaggctaacccctcgggttttggttggtcacagctttggtggaaaaggtttttattaatatatgtctttaccgttttgaaatgttatgctttacaacaaaagtaattaaaatggatattggtactcacatatgagctttgcagtggccttgagtatggtagaacaagctgcaaaaccacttgctcgtcctgttagagtatgggttcttgatgctactcctggcaaagttcgggccgggggagatggtgaagatcaccctgctgaacttattgaatttctcagaagaatgcctgagcaggtttcttcaaaacaggaggttgttgatgctcttgttaaaggacaattttctatggacgttgcacggtgggtggctacaaatctacgtcgaaccagtccattgggtcagcgaccatcttcaagcttctcatggacttttgatctaaatggcatctctgagatgtacaagtcttatgaggatactaacttatggaggattgtagagaatgtaccaaggggtgttcatattaattttctaaaagctgaacgaagtttgcatagatgggctctcgaagacctccaaagaatttatactgcggaggaattagctgcagatgagggtggaggagttgaaatgcacgtgcttgaagacgctggacactgggttcatgcagacaacccagacggtctctttagaattctttcgtcaacctttcgaatcgaaactactataagaggaatgcaggactgaggatcaaacctttatcgatccaatgacaatagaggggaggcatttctgaatcgattctactgtaagaggaatgcaagaggatcaaaccttaattgatccagtgacaatctgagaggaggcgctgacactatcagaagatgtgtacattacaagcagggaggtacgttagacataccgcataaaggatgtgacgttcgagctaaaccacaagacgatgagttggtggacttatccagaagacaatggactgatcaagggtacgttcatcaagcgggtgtcgtctaaccaaaacactaatctaatgttggattccaggttgcaggagttgtttggaaataatcgctgcatttactcttgattacctttgtttgtctctacccttgtcacctgggtattttaagtacacttcaatgcttcggccagcttaga

SEQ ID NO: 199200 - DNA, 2928 bp, Zea Mays
caaaaaaactgaccattttttattgcaaggaaaacaagcaccagtttggctcgtctcggcctcggcgcgtgcccccgacccgttgctgaccccgctccccggtgatctgatgtcggcggcggcacgcgcgccaccgccgccgcgcgcactctacgcgccgtcgagaagagtccctttcggtgccgtgatcctatccgcgccgcgacccggggctagggttcgcgcggcgcggcctcgcgaggggaatgttcataaccattgcctgctgacatcgtctagtctgaattcaagttctttgctatgtcctccatgcaattgtgctcaaatggctttggccgacacaagaattgcttaccagcctgaagtcgacaagcatgctggagttctggcctatgaactggttcaagggaatcttgttcagtggaattcatttatggacaaatcaatacctgatccaccaacagctgttcttcttcatggcatccttgggagcaggaaaaactggggatcttttgcgaagagattggctcaggaattcccaatgtggcagttcctcttggttgatttgcgctgccatggcgactcaacatcaattaagaagagtggaccacacactgttgcctcaactgctcttgatgttctaaagctggtttgtagctttttgcgtcagctatttatgtcttcgctctttggcttctcattcttttcaatcttcatttttatcaatagaactagaagtgtagcttgtttgaaaatgaactctatctgtgtccaacgtgcttgcacaatatctgcatattcatcttattgcaaatctagctttatgcatttggagacaagcctaactcttcatgttaggttacatgcatcagcgtcatatgacaaaatgcattatttgaggttcctgtaatctaatagtcatcactatgaagtaaatgacgaagtgatttggtggcatggcacacacctttttcaaaacttctttattatatttggtgctatttgttgtttcttggttgttcactcctttagctgacttatattttgctccatcaaaatccaacagataatgcagctcaggctaacccctcgggttttggttggtcacagctttggtggaaaaggtttttattaatatatgtctttaccgttttgaaatgttatgctttacaacaaaagtaattaaaatggatattggtactcacatatgagctttgcagtggccttgagtatggtagaacaagctgcaaaaccacttgctcgtcctgttagagtatgggttcttgatgctactcctggcaaagttcgggccgggggagatggtgaagatcaccctgctgaacttattgaatttctcagaagaatgcctgagcaggtttcttcaaaacaggaggttgttgatgctcttgttaaaggacaattttctatggacgttgcacggtgggtggctacaaatctacgtcgaaccagtccattgggtcagcgaccatcttcaagcttctcatggacttttgatctaaatggcatctctgagatgtacaagtcttatgaggatactaacttatggaggattgtagagaatgtaccaaggggtgttcatattaattttctaaaagctgaacgaagtttgcatagatgggctctcgaagacctccaaagaatttatactgcggaggaattagctgcagatgagggtggaggagttgaaatgcacgtgcttgaagacgctggacactgggtattttggcacccgccttttttttctttttttttacaataaagctgcaaaccaaaatatttgattatttgcatgtttccttccaggttcatgcagacaacccagacggtctctttagaattctttcgtcaacctttcgaatcgaaactactataagaggaatgcaggactgaggatcaaacctttatcgatccaatgacaatagaggggaggcatttctgaatcgattctactgtaagaggaatgcaagaggatcaaaccttaattgatccagtgacaatctgagaggaggcgctgacactatcagaagatgtgtacattacaagcagggaggtggagccagcatttttctgaatgataggcgtctttgttcatttgttcattcttttttttacaaaaaaaaagagtatgtaacatgagttatacaactaggctgttcttcgagaaacaacctgtaactgtctgtcatatacttgacgaatgagaagcgttttcgtacctgttttagcctgaacggttcagttgtaagatctcgaattaaactgcctgatttgcagagtctagaaaaaaaatgttcctgatagttgcctagagagggagggggacggggttgaatagacgacagtacttgattcacttagaacaaaatgaacaattgtcaaaatataaaactaagatcttttcttgcagatgtgttgctttcaaataatgcagaataaacttatatggtgtttgaatgcactagagctaatagttggcggctatctaaaaagttgtagtcattttcctaatctttccaaaaagttatgaatcactctttttggtggtttaaatcttcggttatagatatttgaagtatggattctgaatctgtctaaatctagatagatacatctttttcgtgttgattgaccttgataggtacgttagacataccgcataaaggatgtgacgttcgagctaaaccacaagacgatgagttggtggacttatccagaagacaatggactgatcaagggtacgttcatcaagcgggtgtcgtctaaccaaaacactaatctaatgttggattccaggttgcaggagttgtttggaaataatcgctgcatttactcttgattacctttgtttgtctctacccttgtcacctgggtattttaagtacacttcaatgcttcggccagcttaga

SEQ ID NO: 199201 - DNA, 835 bp, Zea Mays
cattactttgacatatgtaacacttcctcttcttcaagcaagagatggagctttcattggtagggctccaaaatgctgggaaaacatcacttgtgaactccattgctactggaggttttagtgaggatatgatccctactgtaggattcaatatgagaaaggttaccaaagggaatgtgacgataaaattgtgggatattggaggccaacctagattccggagcatgtgggagagatactgccgtgcggtttctgcaattgtgtatgttgttgacgcggcagatcgtgaaaacatggccattgcaaaaggggagctccatgatctcttgagcaagccatctttgaccggaataccattactagtaattggcaacaaaattgacaagcctgaagctttccctaaacaaaccttcacagaaataatgggcctaaagacgatcactgaccgagaagtggcatgcttcatgacatcatgcaagaactcgaccaacattgattctgtcattgactggctggtgaagaactcgaaaaagaagaattgaacttaaatctgtactagctattaaagcgcacgccaatctctctatttttgcatgtcgcatagcattggagctgtaaattatgcaagaggtattaatcagggatgttgtgttcataattttgttaacctggtttagcagtatgttggtggacagcgtctggtattgtgcacgcccgtgctctgaggctgcctcctgtgttccactcaattttagctgtgcgatttgttctcttgtgttccactcaattttatctgcttgatttgtttcacattctttacgttaaatcaaacaaa

SEQ ID NO: 199202 - DNA, 3070 bp, Zea Mays
ctccctctctctctctcttggagttgctgtgaaaatacgacctatcggggacagctcgatctccctcccttggctggagcctggagccgacggagcagaacgacggttccttgcggcggcagcgacctcgagctgagggcggcgagaaggcgggaacaactcgatctccctttgctagctagctagtcccgatggagccgagggttccttgcggcgacggcggccccgaacctagggccgcgagaacgcatcgacgggagggcgagcgaaaccacgtcctcgatgcgcgaatcctggagcctcagcgacagagatcgaatccaatcaggaacatctttcatctattaactcaacgagaggtctcacctcgattgaaacaccatgctaaaagaatgtggaatgagtccccaaaatatgatcctgattcaattgagttaaggtctgcagatgctaaacttgatattttttcatgggcagaatcacagtccctgcatagctggtctgccaagtattgccctcttttgccacctcctaggtcaactattgcagctgctttcagtccagatggaaaaacacttgcgtccacacatggtgaccataccgtgaaaataattgactgccaaacagggaaatgtttgaaggttttgactggacatcgacgcactccttgggtggtcaggtatcatccattacattctgacatcctggctagcggaagtttggatcatgaagttcgtctatgggatgctaatacttcagactgtattgggtcacaagacttccatcggccaattgcttccattgcatttcatggaagtggggagattttggcagttgcatcaggtcacaaattgtacatatggaactacaataagagagatggcacttctgtaccagccatcatactaaaaacccgccgctcgctgagagctgttcattttcatccgcgtggggctccatatcttctaacagcagaggttaataatatagaatctgcagactcaccgctgactctggcaagatcctctggatatctaaattacccatcggccctgctggtgacaaacactaattctagattctgtacacttcctgagtccaatgtggtgtcaccttgcttactgtggcctgcatacctcagagatggtggaattttacatgtgctcggcaatgacagtagttcaaccattgtgcagcagagatcatcattagttcaaccttccacatcagatactgcaaatgtacagcttgaacagtttgctacccctatggatgtatgtccgggagagccaacttcatctaatgacatacccgatgcagtaactgttcctacttcaaatggaaatgaaatgcatggtgctggaggccagtctaactcaagactgcagggcagcagctctactagtaatcttgagaggttcagtgctagagatgatttgcaagtgtcttccctgagcaggactgacccaatcccattaacagcagggccttcaggatccgatttacaccgtgctatgccactaaatatgctcctcactggcggattagatgttcaaatgttcctaagaaatgtaggaagtggacagcaggatcattctctcttcggcgactcacgtaactgggaggtaccatttttgcagggtttcttgatggccccaaaccatgcaggtgcttcatcttcgattccccttaccactggcagttctaggggaccaaatcgacgctatgcttcacgctctgtacctggggttgggaatttgctcctaggtcctcaaattgacgaagctgaagctcatgctgtttcactaggtgctggttctgaaatcactgcgtccatgcttgctcctggtactgaattgccttgtacagtgaagctcagaatatggcggcacggtaccaatgaaccatgtgttcctttagaacctgaggcatgctgtctgacgatttctcatgccgttctctgcagtgaaatgggtgcccatttttccccatgtggacgatttctggtagcatgtgttgcgtgtttgttgccacaaacagaagacgaccgtggtagccaattgcctgtgtcttacgaaggggctggatcatcaccaactcgtcacccgcttccctctcatcgagttatttatgagctccgggtttattcccttgaggctgagacatttggggatattcttgcttccagagcaatacgggcagcacattgcttaacatccattcagttctcacctacatccgaacacatacttttggcatatggtcgtcgtcatagctcgctccttaggagcatagttgtggaaggcgaaaatggggttcccgtatatactattttggaggtatatagagtttcagatatggagcttgtgagagtgcttcctagcgctgaagatgaagttaatgttgcatgctttcatccttcaccaggaggtggccttgtttatggcactaaggaagggaagctcaggatccttcagcacaatggcgcagacatgacaaacatgggggtgggttgcttcattgaggaaaatatggttgagatccagaggtacgcattggaatgctgaagaagcttcaccacaccatgtgtttttaggcttacttccatggaatttttttctgcaggcttcatctgtgtgatccatccaaggggaaacattagatccatctctaactaagtgccttggggattggtctgtgcagaggtggtaggagatgtaaatctacatggccatcgtcgtggctgccataacgatgctgtaattataccgttgtacatgtatttccaattagcttaactcgattgctgttgtatttcagaaagttgacgatgctaatccttttaaagtcaaaagttactttttgttgtatacttcacctttccgtacaagctgtcgatgatgcaagaagttacacaggcgaatggaattgcctgggcttgcttttacacttgtgaaaatcgtgtattttattttcctgctctcgtctgagcgtatcttatgggcatgggcttgcacatctccaatcctgtcccttcaaccatgatcctatggtcattgttaacactttg

SEQ ID NO: 199203 - DNA, 3059 bp, Zea Mays
ctccctctctctctctcttggagttgctgtgaaaatacgacctatcggggacagctcgatctccctcccttggctggagcctggagccgacggagcagaacgacggttccttgcggcggcagcgacctcgagctgagggcggcgagaaggcgggaacaactcgatctccctttgctagctagctagtcccgatggagccgagggttccttgcggcgacggcggccccgaacctagggccgcgagaacgcatcgacgggagggcgagcgaaaccacgtcctcgatgcgcgaatcctggagcctcagcgacagagatcgaatccaatcaggaacatctttcatctattaactcaacgagaggtctcacctcgattgaaacaccatgctaaaagaatgtggaatgagtccccaaaatatgatcctgattcaattgagttaaggtctgcagatgctaaacttgatattttttcatgggcagaatcacagtccctgcatagctggtctgccaagtattgccctcttttgccacctcctaggtcaactattgcagctgctttcagtccagatggaaaaacacttgcgtccacacatggtgaccataccgtgaaaataattgactgccaaacagggaaatgtttgaaggttttgactggacatcgacgcactccttgggtggtcaggtatcatccattacattctgacatcctggctagcggaagtttggatcatgaagttcgtctatgggatgctaatacttcagactgtattgggtcacaagacttccatcggccaattgcttccattgcatttcatggaagtggggagattttggcagttgcatcaggtcacaaattgtacatatggaactacaataagagagatggcacttctgtaccagccatcatactaaaaacccgccgctcgctgagagctgttcattttcatccgcgtggggctccatatcttctaacagcagaggttaataatatagaatctgcagactcaccgctgactctggcaagatcctctggatatctaaattacccatcggccctgctggtgacaaacactaattctagattctgtacacttcctgagtccaatgtggtgtcaccttgcttactgtggcctgcatacctcagagatggtggaattttacatgtgctcggcaatgacagtagttcaaccattgtgcagcagagatcatcattagttcaaccttccacatcagatactgcaaatgtacagcttgaacagtttgctacccctatggatgtatgtccgggagagccaacttcatctaatgacatacccgatgcagtaactgttcctacttcaaatggaaatgaaatgcatggtgctggaggccagtctaactcaagactgcagggcagcagctctactagtaatcttgagaggttcagtgctagagatgatttgcaagtgtcttccctgagcaggactgacccaatcccattaacagcagggccttcaggatccgatttacaccgtgctatgccactaaatatgctcctcactggcggattagatgttcaaatgttcctaagaaatgtaggaagtggacagcaggatcattctctcttcggcgactcacgtaactgggaggtaccatttttgcagggtttcttgatggccccaaaccatgcaggtgcttcatcttcgattccccttaccactggcagttctaggggaccaaatcgacgctatgcttcacgctctgtacctggggttgggaatttgctcctaggtcctcaaattgacgaagctgaagctcatgctgtttcactaggtgctggttctgaaatcactgcgtccatgcttgctcctggtactgaattgccttgtacagtgaagctcagaatatggcggcacggtaccaatgaaccatgtgttcctttagaacctgaggcatgctgtctgacgatttctcatgccgttctctgcagtgaaatgggtgcccatttttccccatgtggacgatttctggtagcatgtgttgcgtgtttgttgccacaaacagaagacgaccgtggtagccaattgcctgtgtcttacgaaggggctggatcatcaccaactcgtcacccgcttccctctcatcgagttatttatgagctccgggtttattcccttgaggctgagacatttggggatattcttgcttccagagcaatacgggcagcacattgcttaacatccattcagttctcacctacatccgaacacatacttttggcatatggtcgtcgtcatagctcgctccttaggagcatagttgtggaaggcgaaaatggggttcccgtatatactattttggaggtatatagagtttcagatatggagcttgtgagagtgcttcctagcgctgaagatgaagttaatgttgcatgctttcatccttcaccaggaggtggccttgtttatggcactaaggaagggaagctcaggatccttcagcacaatggcgcagacatgacaaacatgggggtgggttgcttcattgaggaaaatatggttgagatccagaggtacgcattggaatgctgaagaagcttcaccacaccatgtgtttttaggcttacttccatggaatttttttctgcaggcttcatctgtgtgatccatccaaggggaaacattagatccatctctaactaagtgccttggggattggtctgtgcagaggtggtaggagatgtaaatctacatggccatcgtcgtggctgccataacgatgctgtaattataccgttgtacatgtatttccaattagcttaactcgattgctgttgtatttcagaaagttgacgatgctaatccttttaaagtcaaaagttactttttgttgtatacttcacctttccgtacaagctgtcgatgatgcaagaagttacacaggcgaatggaattgcctgggcttgcttttacacttgtgaaaatcgtgtattttattttcctgctctcgtctgagcatacggataccatgagaagtctacaagggctagaatgccgtgctattgtcatcaaagcttgttttat

SEQ ID NO: 199204 - DNA, 2962 bp, Zea Mays
ctccctctctctctctcttggagttgctgtgaaaatacgacctatcggggacagctcgatctccctcccttggctggagcctggagccgacggagcagaacgacggttccttgcggcggcagcgacctcgagctgagggcggcgagaaggcgggaacaactcgatctccctttgctagctagctagtcccgatggagccgagggttccttgcggcgacggcggccccgaacctagggccgcgagaacgcatcgacgggagggcgagcgaaaccacgtcctcgatgcgcgaatcctggagcctcagcgacagagatcgaatccaatcaggaacatctttcatctattaactcaacgagaggtctcacctcgattgaaacaccatgctaaaagaatgtggaatgagtccccaaaatatgatcctgattcaattgagttaaggtctgcagatgctaaacttgatattttttcatgggcagaatcacagtccctgcatagctggtctgccaagtattgccctcttttgccacctcctaggtcaactattgcagctgctttcagtccagatggaaaaacacttgcgtccacacatggtgaccataccgtgaaaataattgactgccaaacagggaaatgtttgaaggttttgactggacatcgacgcactccttgggtggtcaggtatcatccattacattctgacatcctggctagcggaagtttggatcatgaagttcgtctatgggatgctaatacttcagactgtattgggtcacaagacttccatcggccaattgcttccattgcatttcatggaagtggggagattttggcagttgcatcaggtcacaaattgtacatatggaactacaataagagagatggcacttctgtaccagccatcatactaaaaacccgccgctcgctgagagctgttcattttcatccgcgtggggctccatatcttctaacagcagaggttaataatatagaatctgcagactcaccgctgactctggcaagatcctctggatatctaaattacccatcggccctgctggtgacaaacactaattctagattctgtacacttcctgagtccaatgtggtgtcaccttgcttactgtggcctgcatacctcagagatggtggaattttacatgtgctcggcaatgacagtagttcaaccattgtgcagcagagatcatcattagttcaaccttccacatcagatactgcaaatgtacagcttgaacagtttgctacccctatggatgtatgtccgggagagccaacttcatctaatgacatacccgatgcagtaactgttcctacttcaaatggaaatgaaatgcatggtgctggaggccagtctaactcaagactgcagggcagcagctctactagtaatcttgagaggttcagtgctagagatgatttgcaagtgtcttccctgagcaggactgacccaatcccattaacagcagggccttcaggatccgatttacaccgtgctatgccactaaatatgctcctcactggcggattagatgttcaaatgttcctaagaaatgtaggaagtggacagcaggatcattctctcttcggcgactcacgtaactgggaggtaccatttttgcagggtttcttgatggccccaaaccatgcaggtgcttcatcttcgattccccttaccactggcagttctaggggaccaaatcgacgctatgcttcacgctctgtacctggggttgggaatttgctcctaggtcctcaaattgacgaagctgaagctcatgctgtttcactaggtgctggttctgaaatcactgcgtccatgcttgctcctggtactgaattgccttgtacagtgaagctcagaatatggcggcacggtaccaatgaaccatgtgttcctttagaacctgaggcatgctgtctgacgatttctcatgccgttctctgcagtgaaatgggtgcccatttttccccatgtggacgatttctggtagcatgtgttgcgtgtttgttgccacaaacagaagacgaccgtggtagccaattgcctgtgtcttacgaaggggctggatcatcaccaactcgtcacccgcttccctctcatcgagttatttatgagctccgggtttattcccttgaggctgagacatttggggatattcttgcttccagagcaatacgggcagcacattgcttaacatccattcaggtatatagagtttcagatatggagcttgtgagagtgcttcctagcgctgaagatgaagttaatgttgcatgctttcatccttcaccaggaggtggccttgtttatggcactaaggaagggaagctcaggatccttcagcacaatggcgcagacatgacaaacatgggggtgggttgcttcattgaggaaaatatggttgagatccagaggtacgcattggaatgctgaagaagcttcaccacaccatgtgtttttaggcttacttccatggaatttttttctgcaggcttcatctgtgtgatccatccaaggggaaacattagatccatctctaactaagtgccttggggattggtctgtgcagaggtggtaggagatgtaaatctacatggccatcgtcgtggctgccataacgatgctgtaattataccgttgtacatgtatttccaattagcttaactcgattgctgttgtatttcagaaagttgacgatgctaatccttttaaagtcaaaagttactttttgttgtatacttcacctttccgtacaagctgtcgatgatgcaagaagttacacaggcgaatggaattgcctgggcttgcttttacacttgtgaaaatcgtgtattttattttcctgctctcgtctgaggttagtgtaataattcaacgtttggagtttcttgttttaactgtattttacatgaaataccacctcaaaatcctgttgtggaatc

SEQ ID NO: 199205 - DNA, 3068 bp, Zea Mays
ctccctctctctctctcttggagttgctgtgaaaatacgacctatcggggacagctcgatctccctcccttggctggagcctggagccgacggagcagaacgacggttccttgcggcggcagcgacctcgagctgagggcggcgagaaggcgggaacaactcgatctccctttgctagctagctagtcccgatggagccgagggttccttgcggcgacggcggccccgaacctagggccgcgagaacgcatcgacgggagggcgagcgaaaccacgtcctcgatgcgcgaatcctggagcctcagcgacagagatcgaatccaatcaggaacatctttcatctattaactcaacgagaggtctcacctcgattgaaacaccatgctaaaagaatgtggaatgagtccccaaaatatgatcctgattcaattgagttaaggtctgcagatgctaaacttgatattttttcatgggcagaatcacagtccctgcatagctggtctgccaagtattgccctcttttgccacctcctaggtcaactattgcagctgctttcagtccagatggaaaaacacttgcgtccacacatggtgaccataccgtgaaaataattgactgccaaacagggaaatgtttgaaggttttgactggacatcgacgcactccttgggtggtcaggtatcatccattacattctgacatcctggctagcggaagtttggatcatgaagttcgtctatgggatgctaatacttcagactgtattgggtcacaagacttccatcggccaattgcttccattgcatttcatggaagtggggagattttggcagttgcatcaggtcacaaattgtacatatggaactacaataagagagatggcacttctgtaccagccatcatactaaaaacccgccgctcgctgagagctgttcattttcatccgcgtggggctccatatcttctaacagcagaggttaataatatagaatctgcagactcaccgctgactctggcaagatcctctggatatctaaattacccatcggccctgctggtgacaaacactaattctagattctgtacacttcctgagtccaatgtggtgtcaccttgcttactgtggcctgcatacctcagagatggtggaattttacatgtgctcggcaatgacagtagttcaaccattgtgcagcagagatcatcattagttcaaccttccacatcagatactgcaaatgtacagcttgaacagtttgctacccctatggatgtatgtccgggagagccaacttcatctaatgacatacccgatgcagtaactgttcctacttcaaatggaaatgaaatgcatggtgctggaggccagtctaactcaagactgcagggcagcagctctactagtaatcttgagaggttcagtgctagagatgatttgcaagtgtcttccctgagcaggactgacccaatcccattaacagcagggccttcaggatccgatttacaccgtgctatgccactaaatatgctcctcactggcggattagatgttcaaatgttcctaagaaatgtaggaagtggacagcaggatcattctctcttcggcgactcacgtaactgggaggtaccatttttgcagggtttcttgatggccccaaaccatgcaggtgcttcatcttcgattccccttaccactggcagttctaggggaccaaatcgacgctatgcttcacgctctgtacctggggttgggaatttgctcctaggtcctcaaattgacgaagctgaagctcatgctgtttcactaggtgctggttctgaaatcactgcgtccatgcttgctcctggtactgaattgccttgtacagtgaagctcagaatatggcggcacggtaccaatgaaccatgtgttcctttagaacctgaggcatgctgtctgacgatttctcatgccgttctctgcagtgaaatgggtgcccatttttccccatgtggacgatttctggtagcatgtgttgcgtgtttgttgccacaaacagaagacgaccgtggtagccaattgcctgtgtcttacgaaggggctggatcatcaccaactcgtcacccgcttccctctcatcgagttatttatgagctccgggtttattcccttgaggctgagacatttggggatattcttgcttccagagcaatacgggcagcacattgcttaacatccattcagttctcacctacatccgaacacatacttttggcatatggtcgtcgtcatagctcgctccttaggagcatagttgtggaaggcgaaaatggggttcccgtatatactattttggagagtttcagatatggagcttgtgagagtgcttcctagcgctgaagatgaagttaatgttgcatgctttcatccttcaccaggaggtggccttgtttatggcactaaggaagggaagctcaggatccttcagcacaatggcgcagacatgacaaacatgggggtgggttgcttcattgaggaaaatatggttgagatccagaggtacgcattggaatgctgaagaagcttcaccacaccatgtgtttttaggcttacttccatggaatttttttctgcaggcttcatctgtgtgatccatccaaggggaaacattagatccatctctaactaagtgccttggggattggtctgtgcagaggtggtaggagatgtaaatctacatggccatcgtcgtggctgccataacgatgctgtaattataccgttgtacatgtatttccaattagcttaactcgattgctgttgtatttcagaaagttgacgatgctaatccttttaaagtcaaaagttactttttgttgtatacttcacctttccgtacaagctgtcgatgatgcaagaagttacacaggcgaatggaattgcctgggcttgcttttacacttgtgaaaatcgtgtattttattttcctgctctcgtctgaggttagtgtaataattcaacgtttggagtttcttgttttaactgtattttacatgaaataccacctcaaaatcctgttgtggaatc

SEQ ID NO: 199206 - DNA, 755 bp, Zea Mays
catcaaaaaatcagagaaatggacaaacagcaagggacgctgaaattctgaagctgaagcagctcttagatgagaaggctgaaaaaaacaattctgcagctactgggtttccttgcctagcgcctgaagctgtcctagaaaattcaactccattgtcacctaaaagaaagacaccattttcccacggcaagctagaatgctccagaagacatacacgcatctcagggaataggacaacagagattcggagtgctcatatgctttctttgctgcttcaatctttagttcgcatgaagatctcggttacagtttcatcctcacctggctagaaacatctgatgaatggtcatataagctctcctcgttgggcacactggaaaggatagccgttgattggatgaggcaagacataagattcagcatgaaaatgtgccgcatgttctttgagcggatatcaagcatcataacaaaaggatgacgacatgctcttcgcttcagctagttatatcagtctgcctactgtacatggaagcatcctgatgtaaaaatgatttgatgcactatcttattgcagagctgtctttcatgctcatgccagtggtgtgtttggttgccggacatttagggacagccacgacagggaatccctgtcatcctctctcgttcctttaatttccctttaatttcgaggtataaccgaggacaagacattgaatcaaataatattattaaatcaagccaaaaaggattatcct

SEQ ID NO: 199207 - DNA, 745 bp, Zea Mays
ctgttgtctcgttctctctttccgcacgaccgcaccgtgtgagttcaaaaaacttacccccaaaaactgtcctcccttggttccttcccgctctccagccaaagtcgccgctcccgctcggacacgcgtctagaagcttctggatccgtccctgacgccgatggagcagctcgactacaagttccacgagaagtacactgctctgaagaagcggaagctactggacgaggggctggagcggaagcgggaggcggaactcaatgagctttacgatgccatgaaagattgggtcagcgaactcaggaaagacaatgcggaactcaacgagaagctggtggagaagcaggatgagctcgagaaggcccgtcaggaattccttgaagatattcgtacaagggacgctgaaattctgaagctgaagcagctcttagatgagaaggctgaaaaaaacaattctgcagctactgggtttccttgcctagcgcctgaagctgtcctagaaaattcaactccattgtcacctaaaagaaagacaccattttcccacggcaagcagctagaatgctccagaagacatacacgcatctcagggaataggacaacagagattcggagtgctcatatgctttctttgctgcttcaatctttagttcgcatgaagatctcggtaaatgatggaacagaaatattttcggtttcagtatctcatgaagctagtggatgtatattcatccttatagagttt

SEQ ID NO: 199208 - DNA, 731 bp, Zea Mays
gtgcattttagccaaccatatcggcacgttcaagctgactctgcaatttacagaagattaccccaacaaacctccgactgttcggtttgtttcgaggatgtttcacccaaacatttatgcggatggaagcatctgtttggacatcctacaaaaccagtggagtcctatatacgatgttgcggcaatattgacctctattcagtccctgctgtgtgacccaaacccaaattctcctgccaactctgaagcagccagaatgttcagcgagaacaagcgtgagtacaaccgcaaagttcgtgaggttgtggagcagagctggacagctgattaaaactttagagctggacagccgattaaaactttattggcttcaccagatggtgcagataagcatccacctttcctaggttcctaggtctgttttattgacttaaccgttaaaaatccccaggtatcgttgtgttcttgtggttcagtcccctgttgtattgctgcctgccggttttcctaatatagtggtgaacggtttcatgaacttggatattggtgtgtatgcaaaagatatagcaagtcaagttgttgctaggtttgcagaaaccgcatcctcctttctcgctgcacgaacggcctctcacgaggtgctctcctgtggaggctgttcatcctgtttctgtgcttctggtaactggtaagtcatgaatgaaagctttagcagttgtacgtgatcacga

SEQ ID NO: 199209 - DNA, 853 bp, Zea Mays
gtcgtgtcatctcttttataccatttaccaagtaagtaaaaagcttgatccgtaacgcctttattttgttctttaaatgctaatggttgtcacaagccaccaaagggaagcgtgtctgattggcatattgtttggtcaactctgggcacgttcaagctgactctgcaatttacagaagattaccccaacaaacctccgactgttcggtttgtttcgaggatgtttcacccaaacatttatgcggatggaagcatctgtttggacatcctacaaaaccagtggagtcctatatacgatgttgcggcaatattgacctctattcagtccctgctgtgtgacccaaacccaaattctcctgccaactctgaagcagccagaatgttcagcgagaacaagcgtgagtacaaccgcaaagttcgtgaggttgtggagcagagctggacagctgattaaaactttagagctggacagccgattaaaactttattggcttcaccagatggtgcagataagcatccacctttcctaggttcctaggtctgttttattgacttaaccgttaaaaatccccaggtatcgttgtgttcttgtggttcagtcccctgttgtattgctgcctgccggttttcctaatatagtggtgaacggtttcatgaacttggatattggtgtgtatgcaaaagatatagcaagtcaagttgttgctaggtttgcagaaaccgcatcctcctttctcgctgcacgaacggcctctcacgaggtgctctcctgtggaggctgttcatcctgtttctgtgcttctggtaactggtaagtcatgaatgaaagctttagcagttgtacgtgatcacga

SEQ ID NO: 199210 - DNA, 753 bp, Zea Mays
cctatttctgtgatgttaggccggatgacacgccgtgggacggaggcacgttcaagctgactctgcaatttacagaagattaccccaacaaacctccgactgttcggtttgtttcgaggatgtttcacccaaacatttatgcggatggaagcatctgtttggacatcctacaaaaccagtggagtcctatatacgatgttgcggcaatattgacctctattcagtccctgctgtgtgacccaaacccaaattctcctgccaactctgaagcagccagaatgttcagcgagaacaagcgtgagtacaaccgcaaagttcgtgaggttgtggagcagagctggacagctgattaaaactttagagctggacagccgattaaaactttattggcttcaccagatggtgcagataagcatccacctttcctaggttcctaggtctgttttattgacttaaccgttaaaaatccccaggtatcgttgtgttcttgtggttcagtcccctgttgtattgctgcctgccggttttcctaatatagtggtgaacggtttcatgaacttggatattggtgtgtatgcaaaagatatagcaagtcaagttgttgctaggtttgcagaaaccgcatcctcctttctcgctgcacgaacggcctctcacgaggtgctctcctgtggaggctgttcatcctgtttctgtgcttctggtaactggtaagtcatgaatgaaagctttagcagttgtacgtgatcacga

SEQ ID NO: 199211 - DNA, 1892 bp, Zea Mays
caatttctttccaaatttttcggaggcctgtccaccaccgaaccaccaccccgcgcgccgagctcaccccgatccagatccaccagtcgtccctccggtctgcgacgggcgccctcctcctcgtcctcacgcgcctccggaagccagtgcctgcgcagtgaagcatccatctgcctctcctctcgtcggatccggggccggccaggcggcggcagcatgaagcgggtgtcgtcgcacgtctccctcgcctccgaggcggagatcaacctcgatctgtcgcgcctcatcatcgacaagcccaggttcacgctggagcggaagcgctccttcgacgagcagtcgtggagcgagctctctcaccgccagaacgacggcttcgacagcgtgctgcagtcgccggcattcccctctggtgtctttgactcgcccttctccgtgggcacgcatttcggggggccgcacccgctggtcaatgaggcctgggaggcgctcaggaaatcggtcgtctacttccgggaacagcccgtcggtactattgctgccgtagaccatgcgtcggaggaagtgctcaactatgatcaggtttttgtgagggattttgttccgagtgcattggctttcctaatgaataatgagactgacatagtgaagaactttctcttgaaaactcttcaccttcagagctctgagaaaatggtagaccgattcaagcttggagcaggtgcgatgcctgcaagtttcaaggtggaccgtaataaaaacagaaacactgaaaccttagttgctgattttggtgagagtgcaatcggcagggtggcaccggttgactctggattttggtggatcattctccttcgggcatatacaaagtacaccggagatgttagtttgtcagaatcacctgaatgccagaagtgcatgaggctgatactgaatctctgcttatctgaaggatttgatacttttccaactctgctttgcacagatggctgttcaatgattgatcgtcgaatggctactttcttggcaacgtcagccctgctatgatggacttccggtggtttgcccttggtaattgcattgccattgtatcatctctagctaccccagaacagtcagttgctataatggatctgatcgaggaaaagtgggatgagctagttggtgagatgcctttgaagatatgctatcctgctctcgagaatcatgagtggagaataatcactggatgtgaccccaagaacacccggtggagttaccacaatggaggatcgtggccagttcttctgtggctgctgacagcagcctgcatcaagactggtcggccacagatggcaaaacgtgccattgagcttgctgagtcgaggctgctcaaggacggctggcccgagtactacgatggcaagcttggaagattcgttggtaagcaggccaggaagttccaaacctggtccattgctggttacctcgtggcccgcatgatgctggaggacccatcgacactgatgatgatctccatggaggaggaccggcctgtgaagccgaccatgcggcggtcagcatcatggaatgcctgaatgcgtggacagttgtttctgaattaaggaaatttagaagcaaaggttatacgtgagtttttttgggatcataaaagtttgatgtgattttgttgggaccggaatagttcaacgttcattatagttgagctctgtcaattaggacagaaattgtataccatagaggatcataggagttacacaggattttgtcacacctttttgttttgaatactaggatcctgttcagttgaaaccttgattttggaataacaaatcactatttatgcacacttttcactgtggcattactggtatctctgataactctggaat

SEQ ID NO: 199212 - DNA, 2085 bp, Zea Mays
caatttctttccaaatttttcggaggcctgtccaccaccgaaccaccaccccgcgcgccgagctcaccccgatccagatccaccagtcgtccctccggtctgcgacgggcgccctcctcctcgtcctcacgcgcctccggaagccagtgcctgcgcagtgaagcatccatctgcctctcctctcgtcggatccggggccggccaggcggcggcagcatgaagcgggtgtcgtcgcacgtctccctcgcctccgaggcggagatcaacctcgatctgtcgcgcctcatcatcgacaagcccaggttcacgctggagcggaagcgctccttcgacgagcagtcgtggagcgagctctctcaccgccagaacgacggcttcgacagcgtgctgcagtcgccggcattcccctctggtgtctttgactcgcccttctccgtgggcacgcatttcggggggccgcacccgctggtcaatgaggcctgggaggcgctcaggaaatcggtcgtctacttccgggaacagcccgtcggtactattgctgccgtagaccatgcgtcggaggaagtgctcaactatgatcagagctctgagaaaatggtagaccgattcaagcttggagcaggtgcgatgcctgcaagtttcaaggtggaccgtaataaaaacagaaacactgaaaccttagttgctgattttggtgagagtgcaatcggcagggtggcaccggttgactctggattttggtggatcattctccttcgggcatatacaaagtacaccggagatgttagtttgtcagaatcacctgaatgccagaagtgcatgaggctgatactgaatctctgcttatctgaaggatttgatacttttccaactctgctttgcacagatggctgttcaatgattgatcgtcgaatgggtatatatggttatcccattgaaatccaagccctattctacatggctttaagatgtgctctccaaatgctcaagccagagggtgaagggaaggatttcatagaaaagatagggcaacggctacatgcactaacttaccacatgaggaattacttctggctagattttcaccagctgaataacatatacagatacaaaacagaagagtattcccacacagctgtgaacaagtttaatgtcattccggattccattcctgattgggtgtttggtttcatgccatgtcgaggaggctactttcttggcaacgtcagccctgctatgatggacttccggtggtttgcccttggtaattgcattgccattgtatcatctctagctaccccagaacagtcagttgctataatggatctgatcgaggaaaagtgggatgagctagttggtgagatgcctttgaagatatgctatcctgctctcgagaatcatgagtggagaataatcactggatgtgaccccaagaacacccggtggagttaccacaatggaggatcgtggccagttcttctgtggctgctgacagcagcctgcatcaagactggtcggccacagatggcaaaacgtgccattgagcttgctgagtcgaggctgctcaaggacggctggcccgagtactacgatggcaagcttggaagattcgttggtaagcaggccaggaagttccaaacctggtccattgctggttacctcgtggcccgcatgatgctggaggacccatcgacactgatgatgatctccatggaggaggaccggcctgtgaagccgaccatgcggcggtcagcatcatggaatgcctgaatgcgtggacagttgtttctgaattaaggaaatttagaagcaaaggttatacgtgagtttttttgggatcataaaagtttgatgtgattttgttgggaccggaatagttcaacgttcattatagttgagctctgtcaattaggacagaaattgtataccatagaggatcataggagttacacaggattttgtcacacctttttgttttgaatactaggatcctgttcagttgaaaccttgattttggaataacaaatcactatttatgcacacttttcactgtggcattactggtatctctgataactctggaat

SEQ ID NO: 199213 - DNA, 327 bp, Zea Mays
ctgcctttctcggcaggtttggaatttgatttgatggagggtacttcaatgcaataatgagcttcccagaaaattacccaaacagcccgccatcagtcagatttacctctgaaatgtggcatccaaatgtttattcagatgggctggtgtgtatctctattcttcatccacctggtgaagatccaagtggttatgagctcgcaagtgagcgttggacacctgtgcatacagttgaaagcatagttctgagcattatatcaatgctctctagtccaaatgacgagtctgcagcaaacattgaggcagctatatccttcgattgttaag

SEQ ID NO: 199214 - DNA, 2327 bp, Zea Mays
gtctccgcctagtcgctcgccatactacctcctcagacaccggcggcggccatgccgcctccgcgtccgacgcaccccccacttccctctcctctgccgcccgggccgcctcccctaagcgcccgtcgtctccctctcccgcccaaccgcccggcccccacgtctctcctcctcgcgccgccctcctccccagcccgtgccctcgcgcttctcttccccgactcctccgcccatctcttcccgtccctaccctccgtctcccccttcgccacctcttatcccgctcacacccccgtcccatcaccactcgccgccgccgcctccttcgcgctcctcctgccgtcgtcacacctcatcttcctatccgcgcatccgtccccttccaactcctctgtccacctccgcgcctattccctcgctcccgcgcccgctttcccgcgctttgcgcccgcctcgctctccttcaagcgccatgcctcagctgcaggcctgccgctccaggacctacccttcggcattggcgtccgcctggccggcggggtcaacgccgtctcgctgctctcactgtccaccggccagatctgggtgctctctccgaagctggccgcggacggccggacagtggagctgcacaagtgcgcggtcgtcgagctcgagccggcgcggcccgtgtacgcaatggaagtcgcaatgggaaggctgctgctcggggaggttggcggtttgcgcgtcttcccgctacggggtttgatgaagggtggaaaggagagggatgtgaagaaggaagttgctgtggtagtaggaaggaagggctgccacaagaagaatgggatgctgaatggcttagttgtgccagttaatcgtgttagctatgggggcaatggtgaaggtaagctcacaactctgagggtaaaacagagttcaggaagctattgttctttttcgttggcatttcaaaatgatgatcaaaagtcagaaggcagcatggaattgctgaattcagtgaaagctatttcgatccatcctctttccaataacaagtttttggtactggattcatctggagtgttgcatgtcttcattttttcaacaacacaaatggtctcaagaggtgccatcaagcaatgttctgaaaatatccatacatatcgcttgcattatcccatgaaagtgcaattatctgctgtcttttcagttacctctataagtgagttcttgttctgaatttgctgtcttatttcacattatggtttaattcattaataaatatgttcagagtgtttgtgcagagacacaatttttttgggtttcagatggtggacatactgtacatgttatgtccgcagttgagactgaatcccctaacggtgataatggagacgttactggagaaagagagttagcacctatcaagctttcagctattgaagcaatctttacaagcgaaagagttgaggacattgtatctatctccaaggattcagttcttatccttggtcaaggcaacatgtttctgtatggaacttcttgaatttggttctttatcatgcatgggcatggttcaagactttgcagctttggatggtcttttggctaaagacaggatgagttttggtgattttgaagatgaacttatccaccagtccttgaagtcgtgagctttactatttattaatcacagtaagcagatgaaaaaagctcatgttttttcagaggacagcaagaatctgaaggtgacgccagattatggacggaccacgccgtaatgaccctattgctctgcatgcgtactttacatgcaaagactggcacaattcttgttgatatgacttggaaagagcaatgctgccaaatctattcccagtctcagttgtcgtggaaagtggatcaccatgagggccattcagctatggaataatacagctggtgctagactgctagtgtaattcagggactggacttgcggtgtggtggagtcgaggtttgggcatgttacttactgcatactacctctgttcttaaatatttgtcacccgctagtcatttttgaattaaacggtgacaaattaaaaagaacggagggagtatatcaaaaaaggaataatgtagtactcttgtaagagttaagatggaatgttgaaaggcgcgactttgagccattcttatcattggttttttattgctgtattttttttgtgacattccactattccggtatacccaaatcattcctggttggttgtgtaatcacgctttaggctgtcctcactggtaagtggtggaccccccattttagtgagtgctcacaacttgacatgtttattgga

SEQ ID NO: 199215 - DNA, 2336 bp, Zea Mays
gtctccgcctagtcgctcgccatactacctcctcagacaccggcggcggccatgccgcctccgcgtccgacgcaccccccacttccctctcctctgccgcccgggccgcctcccctaagcgcccgtcgtctccctctcccgcccaaccgcccggcccccacgtctctcctcctcgcgccgccctcctccccagcccgtgccctcgcgcttctcttccccgactcctccgcccatctcttcccgtccctaccctccgtctcccccttcgccacctcttatcccgctcacacccccgtcccatcaccactcgccgccgccgcctccttcgcgctcctcctgccgtcgtcacacctcatcttcctatccgcgcatccgtccccttccaactcctctgtccacctccgcgcctattccctcgctcccgcgcccgctttcccgcgctttgcgcccgcctcgctctccttcaagcgccatgcctcagctgcaggcctgccgctccaggacctacccttcggcattggcgtccgcctggccggcggggtcaacgccgtctcgctgctctcactgtccaccggccagatctgggtgctctctccgaagctggccgcggacggccggacagtggagctgcacaagtgcgcggtcgtcgagctcgagccggcgcggcccgtgtacgcaatggaagtcgcaatgggaaggctgctgctcggggaggttggcggtttgcgcgtcttcccgctacggggtttgatgaagggtggaaaggagagggatgtgaagaaggaagttgctgtggtagtaggaaggaagggctgccacaagaagaatgggatgctgaatggcttagttgtgccagttaatcgtgttagctatgggggcaatggtgaaggtgattttgtttcgacttgtaagctcacaactctgagggtaaaacagagttcaggaagctattgttctttttcgttggcatttcaaaatgatgatcaaaagtcagaaggcagcatggaattgctgaattcagtgaaagctatttcgatccatcctctttccaataacaagtttttggtactggattcatctggagtgttgcatgtcttcattttttcaacaacacaaatggtctcaagaggtgccatcaagcaatgttctgaaaatatccatacatatcgcttgcattatcccatgaaagtgcaattatctgctgtcttttcagttacctctataagtgagttcttgttctgaatttgctgtcttatttcacattatggtttaattcattaataaatatgttcagagtgtttgtgcagagacacaatttttttgggtttcagatggtggacatactgtacatgttatgtccgcagttgagactgaatcccctaacggtgataatggagacgttactggagaaagagagttagcacctatcaagctttcagcaatctttacaagcgaaagagttgaggacattgtatctatctccaaggattcagttcttatccttggtcaaggcaacatgtttctgtatggaacttcttgaatttggttctttatcatgcatgggcatggttcaagactttgcagctttggatggtcttttggctaaagacaggatgagttttggtgattttgaagatgaacttatccaccagtccttgaagtcgtgagctttactatttattaatcacagtaagcagatgaaaaaagctcatgttttttcagaggacagcaagaatctgaaggtgacgccagattatggacggaccacgccgtaatgaccctattgctctgcatgcgtactttacatgcaaagactggcacaattcttgttgatatgacttggaaagagcaatgctgccaaatctattcccagtctcagttgtcgtggaaagtggatcaccatgagggccattcagctatggaataatacagctggtgctagactgctagtgtaattcagggactggacttgcggtgtggtggagtcgaggtttgggcatgttacttactgcatactacctctgttcttaaatatttgtcacccgctagtcatttttgaattaaacggtgacaaattaaaaagaacggagggagtatatcaaaaaaggaataatgtagtactcttgtaagagttaagatggaatgttgaaaggcgcgactttgagccattcttatcattggttttttattgctgtattttttttgtgacattccactattccggtatacccaaatcattcctggttggttgtgtaatcacgctttaggctgtcctcactggtaagtggtggaccccccattttagtgagtgctcacaacttgacatgtttattgga

SEQ ID NO: 199216 - DNA, 1252 bp, Zea Mays
gtagtgggttccctactttgatgttttttgaccatggagtgccctcggagtacacgggttcaaggaaggctgatgtgctagttgagaaccttaagaagcttgttgcacctgatgtttctgtccttgagtcggactcgtcaattaacggctttgttcaagcagctggcatcaattttccattgtttattgggtttggaatggatgagtcattgattgttgaatatggagcgaagtacaagaagaaggcatggttttcaacagcaaaggatttctctgaggatgtgatggttgtgtatgattttgacaaggttccagcgttggtttctgttaacccaaaatataatgagcagagtgtattctatggcccgtttgaaggaacttttctggaagattttataaggcaatccctactgcctgcaactgtgcccatcaatagagagacagtaaagctattgaaagatgatgggaggaaagttgttcttacaatcttggaggatgaatcagatgaaagctctctgcagctaataaaagtgttgaggtctgccgccaatgcaaaccatgatttagtgttcggatatgtgggagtcaaacagtgggaggagttcaccgagacttttgatgtgaaggtttcgcagctgccaaagattgttgtctgggacacaaaagaggagtacgaagtggttgagggttcagagagtttcatagaaggtgactatggatcccaagtcagtcgatttctagagggatatagggaaggaagaacaacaaagaagaaagtgggccgtggttccccaacactgctcggccttaacgcggtatacatcctcgtcctgttggtcgccgttctcgttgttttgatgtatttttccgcgcaaggcgaggaggatcatcagccaagaagagcccatgaggactgacagcaatctgagatggcttagattcaaggcgttgatccggaggctgccgagttatttttgaaggggggtaacatataacatctgatggacaaattttcctgatcttcatttcacgtgccctagggtcgagttttagatatttgttgcagagctatgcatgagctcccctgtgtttctcttgaacccttgaagtttttggacttgttacttgaggaccgggtttcctcaggtttatgtcattgtaattattcggcactttgtaacatagcattcatgtgttatatttgagacccttggagaaacgacttctatagattgaacagcttatatctggg

SEQ ID NO: 199217 - DNA, 5067 bp, Zea Mays
attggttagtgttgctataaaatttgatgcacaatatatgttcaacatatttcatatcaaagtaccatcatcaattaggatcacttattttttccctgaaaagttaagcttacatacttcatcatcaatcctttgatttgaaaaattggtatgtgtggacttaccaaacgatgcagctctagcagtacgatcctattgcacggcactgcggcagtacacgactaccaaaggtccacatctttgttctttgcctgtgtgcatgtgctaaccacaaagatgacacaatacattaaagtgagcatcggggtaggtcccgcgccaaaggtttattgtgctttcaattctagaactctaacacaaaagaaggattagagtatcttctccacttactaaatatagcactatattgattattaaattatctatggcgagtgagtaggctctgagtccctcggaggatggactcaaagatggggaggcaatagctgcgctgcaaaaaaatggaatttatgcctgcagaaatatggctgcctcacaacactctcaagctcagacgaagttgccactaaaccctcaagtgaatgtgtgaaacaatcaattagtaaggagaaatatttgtaacttaatttcccaccaagaattatattttaaatttactttagaaggctttattcatagtacatttaaatttgagcatgctgttatgccaccatatcttctattttactgctaggctcagcaaggttgagcatgctattatgccatccataaaaaaattaacatgctgaatgttttttttccggttcaattgaaaattacaatggttgattctttttcctaattatgcattctatcataatctttctgcaatattcaaggctcgttgtttatccaagccttttacaacttcataagacacaatgcattcgggctgcaagcttttgttacaaggtcagtaagctaagtcgcaatgcattcaagttgcaatcttttgctacatgtcagtaagtttcactgttggctccataaacaattcatgctttaactagatgctatatatgtattttagtgtaaaaatgaattatcaaaatctatgcgcctagtagaaaattaaaaaaacgacctacattttgggacggaggaagtagctattaatgtccaaatcaagagtcaccagctacaaaacgaacaccactggtcaatgatgatggtgcggcaacgccgcgccccgttctttctagttatatatactatagcttcaacctctctagttgctcgcatgttgtctctcactcgtgtttaggtttaacacaaccatcaacctaaaccacactctcttctaacttttttttttaattcttggtgcctactgtatgttgttaacaacgatacagtcaccaactcaccataagataaaacttcacttaaaaactaaatctggtttcatattttttgaagctttgaaacaaaattttcacatctttctaagattaatccagatttcaggaatttaactacatgattatttttggaaaaaaacatctgtagtccgaaaaaacagtccatacagggccaaattctacagcccaattaacctccaaggaccgaggctccaaccaaaagggccccgacccagtgtcaatgtaaaacgcgaggatattttccccttcaccattcccttctcatcccctacctctcttggtttcgctggtaggcggcagcccgactaaaggaacgcccgccgtcgccgtcgccgtcgccgacttcacctgcgcccctctattggaacacctgcttgctgttttttcttctctgttcacctcgtctggccgggccggactgccgcagccttactcccagctgcccaggtttctgttggacccttcgacggcaacgagcatccaccataccagtaggtaggtcgacctgcgccaatgcactgacaacacggacacgggggatacattcttcggtgaagaataatcttagctttggacctttttagtggactcgagctattgcaatggagattgtgaacagtgtttccttcagctcaattggagtcggaagaattgtaataaacaagacagtgaaggtaggatgccaaacacaccggattggctggaagctaacaaggacatgttgcgagtactctcctggtgcttctagaaagaagcaagagaagtatgagcaacaaccacagaacgtcgatcttccagaattacacccaaaaaacaaaaagaaacccttccctgttccgattaaaaagatgctgcaagcttctcggcgagagaagaggcttgcacaaatgcatatagagaagcctcttgaacccccaaagaacggtttgcttgtgccagagcttgttccagttgcacatgaagtccttgataactggaaagtgctaatcagagggctctctcaacttctgaatgttgtttcagtttatggttgcagaaagtgtcctcaagtccatgttggtccagttggccaccagatccaagactgttacggttccggaagccagcgtcggaacagtcatcactcttgggctagaggttccatcaatgatgttctcatcccaattgagtcttaccatctttttgacccatttggtcggagagtgaagcatgataccaggtttgattatgataggataccagcaattgttgagctatgcattcaggctggtgttgacttaccacaatacccctcgaggcgacggactgctcctgtccggatgataggcaagaaggtgattgaccgcggtgagtttgttgatgagcccaagccacaacgttcagaacactgtgtatctctgcttgctgagctcgacacattcagcaaccaacaagtccagtcaccttcaccatcaaatatgaaagagcttgccaagaggacactgaaagcataccttaatgtccggcgaggcgtcgagcagctgatgagcaagtacactgtgaaagcatgtgggtactgctctgaggtccatgttggtccgtggggccacaatgtgaagctctgcggggctttcaagcaccagtggcgggatggcaagcatgggtggcaggacgcggtggttgatgaggtcatcccgcccaactacgtgtggcatgtccctgaccccagtggctctcctctcagatcctctctcaggagtttctatggcaaagctccagctgtcgtagagctgtgtgtgcaggctggggctgaaatacctgacgagtatcgggccatgatgaggactgacattgtcatcccggactctgtggaagctcggatggctgcataacaacaatgatctgagcttctacgactactatcctgcagttcttgtccagagtacagattccaaccaaatgtgccgctttctgggcatgctgtgatggtgggtctcttagccctgtggtaattgctcagggagcagcagatgcatagtttgtataatataattagcatagctaaatcatgatcgtttgggatttaaagctgagttgaagatctgatttaagtactattcgttgaaaggtttaacgcatgaacctaggacgcgcaatgacaagcctgatagcctgaaagctaaaaggaatggtctctgcaccatttataaggtccatcccatcttgtttacaggccgcagatgctttattcctgcctatgctagactgtgaggcacctagaatgctcaggagtcgccatactgatggccttccactttctccatcggtacaattgcgagctaatgctttggattaaactaatcacggtggtttgttcggggtatttgtgcgcctggctgtagttaatcatggactaaaagcctgtgctgtgcacctgtgcccgcccccagatcgacactttgggggtatggctacatgtatagtcctaccagatcgtcggcatattgtgttcccctttttgctgtatactagtactttgtaacatgcaagcggaggctacttattcagcgccgttccctaattgtgcttatgaaatgttttgagctgtatatggaacggatggtgatgaatgatccatgggcgaaagattcatccatgtgtgatcagctctgtgatgaatgatccatgagacctgattggctacaagaggtactaaactcttaggccacttatcgttaatagagggattacccaggtctcaaagctatagtgtcgttctcgtggtggagactgattatcacttcgtggcagtgaagcacccctacacaacttcttcaatagcccaactcttgatggacaacattgtcgcactccatcgtcttcttcctcactgtattgtcactgacagagacatcatatttctcagaactcttcaagctctacaaagtcgatctacaactgagtacaacctatcattctcaggcagatgggcaaaaaccaagaagtcaaccagtacagatgggcaaactgagagagtcaaactagtgtctggagatgttcctctgttgtgcagttcaggactccccgaatacatggaagtcttggttgtcatttgcagagctatggtacaactctgcttaccatgcatccattggatgccctccattcaaggccctatatggttttgagccatacagccttctactcctgctacagtgtctggcttagtggaaagtagagagctacatttacgatcaccgaaacataatgaagctcatggtagataggaagtgctctgacttgcagttccaagtgggtgatctagtattactgaatttacagccatacactgagttctctgtggctaacaagtatggattattcaggaaagcacattcgctctctagaaatacagaactagctcttgtttattggagtgtcaagaacatgacatgtcatcacataacaacctacgaatccatgatgcctgctggcgcaagcacagaaagagagaaaaggggggaggggagaaaagagtgagcagctgcactgcaagtacacgggcttgagttgtcccggtatataccctcttctcccttaagctagggcgattaaaataacgcaagtaaatacagctcggaatcgagcaacgggccgtggacgtttg

SEQ ID NO: 199218 - DNA, 6181 bp, Zea Mays
gtttccatttgttgaagccgaacgtttcataattggcgaaaatctcccgtccaggcggcacatttacttcttccttatcacctccatctctcaccccggtctctctcccctcgcgcggccggcgccccaactccctcccctccggttctcgctcgcctccacttcttcctcctcgcctctgggtcctgacgccttccaccgtcggccggagaagcacctccgccttgccaccgtcgggccctgctgtctccagccatcgccgctccacctccgccaccccaccaccgggtcccgtcggcatctggccactgttgccggtgcagcggcgtggcgaggaagcgcgggaggagccggtacggcgggacgcggagggccccgtcgcctggtccgcaacagcctgcatcccgggaggccacgagtaagataaggtgagggagaagaagtgaaatccggccgccatgccgaggcctcaaccttccgtgtgtctcctatctgaagaccccccactacctccactgactcccccttcttttaatgtcgttaaagttgctttgaattttcaattgactaatgcgcgtccgttcaacacaacgaacagaaatggccatcagctgacttgcacgtttgtgagacaggcttgaaatatgaaacacattgcttgtgtctactgaagtgtttactcttcatttttgattttatcactctagccctgaatgcatttgccatctattgatgtcatggtagaatgtttgaagaaatgcccttaaggtgttagatgaaatgtctatatggatgcattaggcaactgccctcaaaggattagataaaatgagtatatgaatggataggcacctctaacgcacatgtaccacatctttgccatgcctgtggtgttagttttgatgtacaagacaacaatatgaatttcaattttatcttattattctatcaacagatttattcagtgtcttcctttagaagcagtggttgtaaatgttcaaagtagcacttattattcatgttcattgagaaatcaacagtaccgatttctgatattttttatattgtttgttttttaatgctgttggtctgctgcaatagtacactgctacaataaattggttagtgttgctataaaatttgatgcacaatatatgttcaacatatttcatatcaaagtaccatcatcaattaggatcacttattttttccctgaaaagttaagcttacatacttcatcatcaatcctttgatttgaaaaattggtatgtgtggacttaccaaacgatgcagctctagcagtacgatcctattgcacggcactgcggcagtacacgactaccaaaggtccacatctttgttctttgcctgtgtgcatgtgctaaccacaaagatgacacaatacattaaagtgagcatcggggtaggtcccgcgccaaaggtttattgtgctttcaattctagaactctaacacaaaagaaggattagagtatcttctccacttactaaatatagcactatattgattattaaattatctatggcgagtgagtaggctctgagtccctcggaggatggactcaaagatggggaggcaatagctgcgctgcaaaaaaatggaatttatgcctgcagaaatatggctgcctcacaacactctcaagctcagacgaagttgccactaaaccctcaagtgaatgtgtgaaacaatcaattagtaaggagaaatatttgtaacttaatttcccaccaagaattatattttaaatttactttagaaggctttattcatagtacatttaaatttgagcatgctgttatgccaccatatcttctattttactgctaggctcagcaaggttgagcatgctattatgccatccataaaaaaattaacatgctgaatgttttttttccggttcaattgaaaattacaatggttgattctttttcctaattatgcattctatcataatctttctgcaatattcaaggctcgttgtttatccaagccttttacaacttcataagacacaatgcattcgggctgcaagcttttgttacaaggtcagtaagctaagtcgcaatgcattcaagttgcaatcttttgctacatgtcagtaagtttcactgttggctccataaacaattcatgctttaactagatgctatatatgtattttagtgtaaaaatgaattatcaaaatctatgcgcctagtagaaaattaaaaaaacgacctacattttgggacggaggaagtagctattaatgtccaaatcaagagtcaccagctacaaaacgaacaccactggtcaatgatgatggtgcggcaacgccgcgccccgttctttctagttatatatactatagcttcaacctctctagttgctcgcatgttgtctctcactcgtgtttaggtttaacacaaccatcaacctaaaccacactctcttctaacttttttttttaattcttggtgcctactgtatgttgttaacaacgatacagtcaccaactcaccataagataaaacttcacttaaaaactaaatctggtttcatattttttgaagctttgaaacaaaattttcacatctttctaagattaatccagatttcaggaatttaactacatgattatttttggaaaaaaacatctgtagtccgaaaaaacagtccatacagggccaaattctacagcccaattaacctccaaggaccgaggctccaaccaaaagggccccgacccagtgtcaatgtaaaacgcgaggatattttccccttcaccattcccttctcatcccctacctctcttggtttcgctggtaggcggcagcccgactaaaggaacgcccgccgtcgccgtcgccgtcgccgacttcacctgcgcccctctattggaacacctgcttgctgttttttcttctctgttcacctcgtctggccgggccggactgccgcagccttactcccagctgcccaggtttctgttggacccttcgacggcaacgagcatccaccataccaggtaggtcgacctgcgccaatgcactgacaacacggacacgggggatacattcttcggtgaagaataatcttagctttggacctttttagtggactcgagctattgcaatggagattgtgaacagtgtttccttcagctcaattggagtcggaagaattgtaataaacaagacagtgaaggtaggatgccaaacacaccggattggctggaagctaacaaggacatgttgcgagtactctcctggtgcttctagaaagaagcaagagaagtatgagcaacaaccacagaacgtcgatcttccagaattacacccaaaaaacaaaaagaaacccttccctgttccgattaaaaagatgctgcaagcttctcggcgagagaagaggcttgcacaaatgcatatagagaagcctcttgaacccccaaagaacggtttgcttgtgccagagcttgttccagttgcacatgaagtccttgataactggaaagtgctaatcagagggctctctcaacttctgaatgttgtttcagtttatggttgcagaaagtgtcctcaagtccatgttggtccagttggccaccagatccaagactgttacggttccggaagccagcgtcggaacagtcatcactcttgggctagaggttccatcaatgatgttctcatcccaattgagtcttaccatctttttgacccatttggtcggagagtgaagcatgataccaggtttgattatgataggataccagcaattgttgagctatgcattcaggctggtgttgacttaccacaatacccctcgaggcgacggactgctcctgtccggatgataggcaagaaggtgattgaccgcggtgagtttgttgatgagcccaagccacaacgttcagaacactgtgtatctctgcttgctgagctcgacacattcagcaaccaacaagtccagtcaccttcaccatcaaatatgaaagagcttgccaagaggacactgaaagcataccttaatgtccggcgaggcgtcgagcagctgatgagcaagtacactgtgaaagcatgtgggtactgctctgaggtccatgttggtccgtggggccacaatgtgaagctctgcggggctttcaagcaccagtggcgggatggcaagcatgggtggcaggacgcggtggttgatgaggtcatcccgcccaactacgtgtggcatgtccctgaccccagtggctctcctctcagatcctctctcaggagtttctatggcaaagctccagctgtcgtagagctgtgtgtgcaggctggggctgaaatacctgacgagtatcgggccatgatgaggactgacattgtcatcccggactctgtggaagctcggatggctgcataacaacaatgatctgagcttctacgactactatcctgcagttcttgtccagagtacagattccaaccaaatgtgccgctttctgggcatgctgtgatggtgggtctcttagccctgtggtaattgctcagggagcagcagatgcatagtttgtataatataattagcatagctaaatcatgatcgtttgggatttaaagctgagttgaagatctgatttaagtactattcgttgaaaggtttaacgcatgaacctaggacgcgcaatgacaagcctgatagcctgaaagctaaaaggaatggtctctgcaccatttataaggtccatcccatcttgtttacaggccgcagatgctttattcctgcctatgctagactgtgaggcacctagaatgctcaggagtcgccatactgatggccttccactttctccatcggtacaattgcgagctaatgctttggattaaactaatcacggtggtttgttcggggtatttgtgcgcctggctgtagttaatcatggactaaaagcctgtgctgtgcacctgtgcccgcccccagatcgacactttgggggtatggctacatgtatagtcctaccagatcgtcggcatattgtgttcccctttttgctgtatactagtactttgtaacatgcaagcggaggctacttattcagcgccgttccctaattgtgcttatgaaatgttttgagctgtatatggaacggatggtgatgaatgatccatgggcgaaagattcatccatgtgtgatcagctctgtgatgaatgatccatgagacctgattggctacaagaggtactaaactcttaggccacttatcgttaatagagggattacccaggtctcaaagctatagtgtcgttctcgtggtggagactgattatcacttcgtggcagtgaagcacccctacacaacttcttcaatagcccaactcttgatggacaacattgtcgcactccatcgtcttcttcctcactgtattgtcactgacagagacatcatatttctcagaactcttcaagctctacaaagtcgatctacaactgagtacaacctatcattctcaggcagatgggcaaaaaccaagaagtcaaccagtacagatgggcaaactgagagagtcaaactagtgtctggagatgttcctctgttgtgcagttcaggactccccgaatacatggaagtcttggttgtcatttgcagagctatggtacaactctgcttaccatgcatccattggatgccctccattcaaggccctatatggttttgagccatacagccttctactcctgctacagtgtctggcttagtggaaagtagagagctacatttacgatcaccgaaacataatgaagctcatggtagataggaagtgctctgacttgcagttccaagtgggtgatctagtattactgaatttacagccatacactgagttctctgtggctaacaagtatggattattcaggaaagcacattcgctctctagaaatacagaactagctcttgtttattggagtgtcaagaacatgacatgtcatcacataacaacctacgaatccatgatgcctgctggcgcaagcacagaaagagagaaaaggggggaggggagaaaagagtgagcagctgcactgcaagtacacgggcttgagttgtcccggtatataccctcttctcccttaagctagggcgattaaaataacgcaagtaaatacagctcggaatcgagcaacgggccgtggacgtttg

SEQ ID NO: 199219 - DNA, 1507 bp, Zea Mays
aaggtctttgcgtagacctgaatgccagcagcagacgcgaaacattacggccattttgaagtatataatactctgagagcaagaggagcaaaagttccgaaaaccagaaagaccccgatggctgtgtcaaatccgaaacaagttccagagtatgaactgaacccacttgaactggagtttcgaagaggagaggaggtcacaaagggtacatatctggcaaaatggtatggctcgaaagtttttgttaagatactagacaaagacagcttctcagatgctgaaagcataaatgcgttcaaacacgagcttaccttacttgagaaagcacgacatcccaatttggtccaatttgttggagctgtcacgcaaaatgtcccgatgatgattgtttcagagtaccatcaaaagggtgatttagccagttatattgagatgaaaggtcggctgaagcctcacaaagctataagatttgctcttgacattgcgaggggactgaattatctccatgagtgcaagcctgagccaatcattcatggaaatttgtcgccaaaaaacatcattcgggacgatgaaggacaacttaaggtggctggttttggatcactgagtttgagtaaagtttctgaagataaagtacaaatggctcagccagttacaaaatttgacaatgtatacatcgctcccgaggtctacaaaaacgaaccatttgacagaagtgtagatgtatttgcatttggtctcattctttatgagatgattgaaggagctcctgcttttcacccaaagccacaagaggaagcagctaagatgatttgcttagaggggctgagaccaccattcaagaataaaccgaaatactaccccagtgatgtgaaagagttgatacaagaatgctgggatccgatgccttccgtcaggccaacattcgcggagataattgtgcgcctgaacaagatacatgcgaactgtgctaagcagggtagctggagagacaccttcaagcttccatggaaacaaactggagagagataattgtaaagccccgcgaggctgccgtgtcaagatttcgccccttcccttcagcaagtgtgagtaaacacgagtcaagaaacgtacagagttacaaacagaaaggcaaagttcctatttagttcaggtttcagaccagtttgtgctttgtagcctgtataactgtatctaggcttatgccaccggcccaatttctcttgagctatcttcatccaaacgggaacaacagagtattaatcagtattctgaacattcagggcgtgcctattccttttgaactcctacgtgaacgttgtaaattctgcacgatttcctttcgtgccttttgtgtacgttgtgctgaaagagaaccagaggcatacgcatatcccgagaaaatgctgcagcgacgaaggaaaagcacagcgaagaaacgttcgccgctcaccagtggcacgatgagccaggttcacaacgcgcaggccgtgcctgtgttcgg

SEQ ID NO: 199220 - DNA, 1516 bp, Zea Mays
acaaggtctttgcgtagacctgaatgccagcagcagacgcgaaacattacggccattttgaagtatataatactctgagagcaagaggagcaaaagttccgaaaaccagaaagaccccgatggctgtgtcaaatccgaaacaagttccagagtatgaactgaacccacttgaactggagtttcgaagaggagaggaggtcacaaagggtacatatctggcaaaatggtatggctcgaaagtttttgttaagatactagacaaagacagcttctcagatgctgaaagcataaatgcgttcaaacacgagcttaccttacttgagaaagcacgacatcccaatttggtccaatttgttggagctgtcacgcaaaatgtcccgatgatgattgtttcagagtaccatcaaaagggtgatttagccagttatattgagatgaaaggtcggctgaagcctcacaaagctataagatttgctcttgacattgcgaggggactgaattatctccatgagtgcaagcctgagccaatcattcatggaaatttgtcgccaaagttgcagaaacatcattcgggacgatgaaggacaacttaaggtggctggttttggatcactgagtttgagtaaagtttctgaagataaagtacaaatggctcagccagttacaaaatttgacaatgtatacatcgctcccgaggtctacaaaaacgaaccatttgacagaagtgtagatgtatttgcatttggtctcattctttatgagatgattgaaggagctcctgcttttcacccaaagccacaagaggaagcagctaagatgatttgcttagaggggctgagaccaccattcaagaataaaccgaaatactaccccagtgatgtgaaagagttgatacaagaatgctgggatccgatgccttccgtcaggccaacattcgcggagataattgtgcgcctgaacaagatacatgcgaactgtgctaagcagggtagctggagagacaccttcaagcttccatggaaacaaactggagagagataattgtaaagccccgcgaggctgccgtgtcaagatttcgccccttcccttcagcaagtgtgagtaaacacgagtcaagaaacgtacagagttacaaacagaaaggcaaagttcctatttagttcaggtttcagaccagtttgtgctttgtagcctgtataactgtatctaggcttatgccaccggcccaatttctcttgagctatcttcatccaaacgggaacaacagagtattaatcagtattctgaacattcagggcgtgcctattccttttgaactcctacgtgaacgttgtaaattctgcacgatttcctttcgtgccttttgtgtacgttgtgctgaaagagaaccagaggcatacgcatatcccgagaaaatgctgcagcgacgaaggaaaagcacagcgaagaaacgttcgccgctcaccagtggcacgatgagccaggttcacaacgcgcaggccgtgcctgtgttcgg

SEQ ID NO: 199221 - DNA, 1613 bp, Zea Mays
gtagtttcgatatgcctcagttcattgccagcagcagacgcgaaacattacggccattttgaagtatataatactctgagagcaagaggagcaaaagttccgaaaaccagaaagaccccgatggctgtgtcaaatccgaaacaagttccagagtatgaactgaacccacttgaactggagtttcgaagaggagaggaggtcacaaagggtacatatctggcaaaatggtatggctcgaaagtttttgttaagatactagacaaagacagcttctcagatgctgaaagcataaatgcgttcaaacacgagcttaccttacttgagaaagcacgacatcccaatttggtccaatttgttggagctgtcacgcaaaatgtcccgatgatgattgtttcagagtaccatcaaaagggtgatttagccagttatattgagatgaaaggtcggctgaagcctcacaaagctataagatttgctcttgacattgcgaggggactgaattatctccatgagtgcaagcctgagccaatcattcatggaaatttgtcgccaaagtaagctcattaagcattattccatcgttgaattcgtgcaagacttttagatataagtggctacatgtatgctgtacgctatgatactttggtaaggttgcagaaacatcattcgggacgatgaaggacaacttaaggtggctggttttggatcactgagtttgagtaaagtttctgaagataaagtacaaatggctcagccagttacaaaatttgacaatgtatacatcgctcccgaggtctacaaaaacgaaccatttgacagaagtgtagatgtatttgcatttggtctcattctttatgagatgattgaaggagctcctgcttttcacccaaagccacaagaggaagcagctaagatgatttgcttagaggggctgagaccaccattcaagaataaaccgaaatactaccccagtgatgtgaaagagttgatacaagaatgctgggatccgatgccttccgtcaggccaacattcgcggagataattgtgcgcctgaacaagatacatgcgaactgtgctaagcagggtagctggagagacaccttcaagcttccatggaaacaaactggagagagataattgtaaagccccgcgaggctgccgtgtcaagatttcgccccttcccttcagcaagtgtgagtaaacacgagtcaagaaacgtacagagttacaaacagaaaggcaaagttcctatttagttcaggtttcagaccagtttgtgctttgtagcctgtataactgtatctaggcttatgccaccggcccaatttctcttgagctatcttcatccaaacgggaacaacagagtattaatcagtattctgaacattcagggcgtgcctattccttttgaactcctacgtgaacgttgtaaattctgcacgatttcctttcgtgccttttgtgtacgttgtgctgaaagagaaccagaggcatacgcatatcccgagaaaatgctgcagcgacgaaggaaaagcacagcgaagaaacgttcgccgctcaccagtggcacgatgagccaggttcacaacgcgcaggccgtgcctgtgttcgg

SEQ ID NO: 199222 - DNA, 2333 bp, Zea Mays
gttttattcccccacccacccaaccgcgctcctctgctagtctgctctgcaactgcaagacgattcgtttccatcgccatcggtgctgctcgagctcgactgctgcagctgctaccagtagtgagctgtgtgtgtgtgtagtatatacaatattcgtataaactgctggtctcaatcgagtcgtcgcccaatcggttgaatcggggagcagaggcatcgcccccacgcccaatcatccgcccccaaatccccagaagcacccacccctccgcgcgcgagatcccacgcgcgtccctcccacagtcccaccaccccccggggacgcggactccctcctccgtcctccccccccccccgcggtcccagcccagcggtggccctgcgacgaccgatggacgcggcggcgaagaagatgacgcggagcatctcgcggcagctctcgtcgggggcggcgcggctgtggcgccagctgtcgctggacccgcacaccccgcgccgcggcggcccgggcccggtcccagcggcgggggccgggcagacgcggttcgcgatcgccaggcagtcgtcgctcgacccgacgccgcgcggcgggccggacgggtcgtcggcgcaccagcagctcgcggtgccggagaacctggacgccaccatgcgcctgctcttcgccgcgtgccagggggatgccgccggggtcgaggagctgctcaggagcggggtggacgtcgacagcatcgacctcgacggacgtacggcgctgcacatcgcggcctgcgaggggcagggggaggtcgtgcgcctgctgctcgactggaaggccaacatcaacgcccgcgaccgctggggtagcacgccagcagcagacgcgaaacattacggccattttgaagtatataatactctgagagcaagaggagcaaaagttccgaaaaccagaaagaccccgatggctgtgtcaaatccgaaacaagttccagagtatgaactgaacccacttgaactggagtttcgaagaggagaggaggtcacaaagggtacatatctggcaaaatggtatggctcgaaagtttttgttaagatactagacaaagacagcttctcagatgctgaaagcataaatgcgttcaaacacgagcttaccttacttgagaaagcacgacatcccaatttggtccaatttgttggagctgtcacgcaaaatgtcccgatgatgattgtttcagagtaccatcaaaagggtgatttagccagttatattgagatgaaaggtcggctgaagcctcacaaagctataagatttgctcttgacattgcgaggggactgaattatctccatgagtgcaagcctgagccaatcattcatggaaatttgtcgccaaaaaacatcattcgggacgatgaaggacaacttaaggtggctggttttggatcactgagtttgagtaaagtttctgaagataaagtacaaatggctcagccagttacaaaatttgacaatgtatacatcgctcccgaggtctacaaaaacgaaccatttgacagaagtgtagatgtatttgcatttggtctcattctttatgagatgattgaaggagctcctgcttttcacccaaagccacaagaggaagcagctaagatgatttgcttagaggggctgagaccaccattcaagaataaaccgaaatactaccccagtgatgtgaaagagttgatacaagaatgctgggatccgatgccttccgtcaggccaacattcgcggagataattgtgcgcctgaacaagatacatgcgaactgtgctaagcagggtagctggagagacaccttcaagcttccatggaaacaaactggagagagataattgtaaagccccgcgaggctgccgtgtcaagatttcgccccttcccttcagcaagtgtgagtaaacacgagtcaagaaacgtacagagttacaaacagaaaggcaaagttcctatttagttcaggtttcagaccagtttgtgctttgtagcctgtataactgtatctaggcttatgccaccggcccaatttctcttgagctatcttcatccaaacgggaacaacagagtattaatcagtattctgaacattcagggcgtgcctattccttttgaactcctacgtgaacgttgtaaattctgcacgatttcctttcgtgccttttgtgtacgttgtgctgaaagagaaccagaggcatacgcatatcccgagaaaatgctgcagcgacgaaggaaaagcacagcgaagaaacgttcgccgctcaccagtggcacgatgagccaggttcacaacgcgcaggccgtgcctgtgttcgg

SEQ ID NO: 199223 - DNA, 1820 bp, Zea Mays
ctctaattggtcagcaacggctgcgtgcgtgttccttccttggcctttcataagtcgtctttctccttgaccagccattagcgtcgatcgatgatttagcacggagaggctcaaggctgtccacacagctggagcgagagaactctaaacaagcttacagcccggatgcgtcgccgacatggtgaatgcagtggctacaatcatatctacagtagcctcaactgcgacagtggtagtaatcgtcgccctcatcagaaggtgccgcgtcgtgaggaagaagatgaagaagaaaatcgtgaagaaagtcctggaggagattgagaaaaagaaccgcgagatgcaggccagcaacgccgtggaagatgtggcgatcgaggtcgggccagtggagacgtttctcaaccagatcctcaacgagaagccgatgcgtttcagctccgagcagctggcggcctgcacccggaactactcgtcggagctagggtccggcggctacggcgtggtctacaagggcgagctgccgaacggcctgctggtggccgcgaaagtcctcaaggtgtcgtccatgaacaggaaggtccaggaggcgttcatggcggagatcggcaccatcggccggacgtaccacgtgcacctcgtccgcctctacggcttctgcttcgacgcgagcaccaaagcgctagtgtacgagttcctggagaacggctcgctggagaagtacctttacggcggtgacgagggcagcacgacgagcacgaggctggagtgggggacgctgcacggcatcgccgtcggcacggccaaggggatcaggtacctgcacgaggagtgccagcagcggatcgtgcactacgacatcaagccggccaacatcctcctcacggccgactacaccccgaaggtggcggacttcgggctggcgcggctgggagagcgcgagaacacgcacatgtcgctgaccggcggcggccgcgggacgcctgggtacgcggcgccggagctgtggatggcgatgccggcgtcggagaagtgcgacgtgtacagcttcgggatggtgctgttcgagatcctgggacggcgccggaactacgacccctgccttgagggcgagagcaaggagtggttcccgagatgggtgtgggagaagtacgagcagggtgagatcgagcacgtcgtgtcctgctcctgcgacgggatcgtcggaggggcggacagggagaaggcggagatcatgtgcaaggtggcgctgtggtgcgtgcagttccagccgtcggcgcggccgacgatgagcagcgtggtgcggatgctggagggggagatgcccattgtcccgcccgtgaacccgttccattatctcatggaaagcggcggcggctcaactagctcgggattgtggagcggcacataccagagcagcagcagagacaccgccggcgcagagttgtcgcctgtcggatagctctgctgccaggtcaatcggcgtcgacgcgccgtgatcgaagatgttgagcggactcgtggggggtcgtgttgatgaaacagagtttgtagtcctgtagtacacattagttaatgctttaaaaaacaatgaaggccgtggtttgtaaattagcatcgtgttttggaggactatataaaagataaaagattcgcgcacgacaaaaaaaaatcgtgcatgcgttgagtgaaatgtacttgtaccggcaggtaccaaaagatagaccattattttaggggaaagttaggtagtatttggttatattgctctgttttgagactgtttgtttggaattaaagtaaacagtcactctaattaagca

SEQ ID NO: 199224 - DNA, 1899 bp, Zea Mays
ctcaacctcgtcaggaacggaccccatcgcgcggccgacgtctctaattggtcagcaacggctgcgtgcgtgttccttccttggcctttcataagtcgtctttctccttgaccagccattagcgtcgatcgatgatttagcacggagaggctcaaggctgtccacacagcctggattgttcgatcgttcttggagctcgcagctggagcgagagacgtagactctaaacaagcttacagcccggatgcgtcgccgacatggtgaatgcagtggctacaatcatatctacagtagcctcaactgcgacagtggtagtaatcgtcgccctcatcagaaggtgccgcgtcgtgaggaagaagatgaagaagaaaatcgtgaagaaagtcctggaggagattgagaaaaagaaccgcgagatgcaggccagcaacgccgtggaagatgtggcgatcgaggtcgggccagtggagacgtttctcaaccagatcctcaacgagaagccgatgcgtttcagctccgagcagctggcggcctgcacccggaactactcgtcggagctagggtccggcggctacggcgtggtctacaagggcgagctgccgaacggcctgctggtggccgcgaaagtcctcaaggtgtcgtccatgaacaggaaggtccaggaggcgttcatggcggagatcggcaccatcggccggacgtaccacgtgcacctcgtccgcctctacggcttctgcttcgacgcgagcaccaaagcgctagtgtacgagttcctggagaacggctcgctggagaagtacctttacggcggtgacgagggcagcacgacgagcacgaggctggagtgggggacgctgcacggcatcgccgtcggcacggccaaggggatcaggtacctgcacgaggagtgccagcagcggatcgtgcactacgacatcaagccggccaacatcctcctcacggccgactacaccccgaaggtggcggacttcgggctggcgcggctgggagagcgcgagaacacgcacatgtcgctgaccggcggcggccgcgggacgcctgggtacgcggcgccggagctgtggatggcgatgccggcgtcggagaagtgcgacgtgtacagcttcgggatggtgctgttcgagatcctgggacggcgccggaactacgacccctgccttgagggcgagagcaaggagtggttcccgagatgggtgtgggagaagtacgagcagggtgagatcgagcacgtcgtgtcctgctcctgcgacgggatcgtcggaggggcggacagggagaaggcggagatcatgtgcaaggtggcgctgtggtgcgtgcagttccagccgtcggcgcggccgacgatgagcagcgtggtgcggatgctggagggggagatgcccattgtcccgcccgtgaacccgttccattatctcatggaaagcggcggcggctcaactagctcgggattgtggagcggcacataccagagcagcagcagagacaccgccggcgcagagttgtcgcctgtcggatagctctgctgccaggtcaatcggcgtcgacgcgccgtgatcgaagatgttgagcggactcgtggggggtcgtgttgatgaaacagagtttgtagtcctgtagtacacattagttaatgctttaaaaaacaatgaaggccgtggtttgtaaattagcatcgtgttttggaggactatataaaagataaaagattcgcgcacgacaaaaaaaaatcgtgcatgcgttgagtgaaatgtacttgtaccggcaggtaccaaaagatagaccattattttaggggaaagttaggtagtatttggttatattgctctgttttgagactgtttgtttggaattaaagtaaacagtcactctaattaagca

SEQ ID NO: 199225 - DNA, 1853 bp, Zea Mays
ctcaacctcgtcaggaacggaccccatcgcgcggccgacgtctctaattggtcagcaacggctgcgtgcgtgttccttccttggcctttcataagtcgtctttctccttgaccagccattagcgtcgatcgatgatttagcacggagaggctcaaggctgtccacacagcgtagactctaaacaagcttacagcccggatgcgtcgccgacatggtgaatgcagtggctacaatcatatctacagtagcctcaactgcgacagtggtagtaatcgtcgccctcatcagaaggtgccgcgtcgtgaggaagaagatgaagaagaaaatcgtgaagaaagtcctggaggagattgagaaaaagaaccgcgagatgcaggccagcaacgccgtggaagatgtggcgatcgaggtcgggccagtggagacgtttctcaaccagatcctcaacgagaagccgatgcgtttcagctccgagcagctggcggcctgcacccggaactactcgtcggagctagggtccggcggctacggcgtggtctacaagggcgagctgccgaacggcctgctggtggccgcgaaagtcctcaaggtgtcgtccatgaacaggaaggtccaggaggcgttcatggcggagatcggcaccatcggccggacgtaccacgtgcacctcgtccgcctctacggcttctgcttcgacgcgagcaccaaagcgctagtgtacgagttcctggagaacggctcgctggagaagtacctttacggcggtgacgagggcagcacgacgagcacgaggctggagtgggggacgctgcacggcatcgccgtcggcacggccaaggggatcaggtacctgcacgaggagtgccagcagcggatcgtgcactacgacatcaagccggccaacatcctcctcacggccgactacaccccgaaggtggcggacttcgggctggcgcggctgggagagcgcgagaacacgcacatgtcgctgaccggcggcggccgcgggacgcctgggtacgcggcgccggagctgtggatggcgatgccggcgtcggagaagtgcgacgtgtacagcttcgggatggtgctgttcgagatcctgggacggcgccggaactacgacccctgccttgagggcgagagcaaggagtggttcccgagatgggtgtgggagaagtacgagcagggtgagatcgagcacgtcgtgtcctgctcctgcgacgggatcgtcggaggggcggacagggagaaggcggagatcatgtgcaaggtggcgctgtggtgcgtgcagttccagccgtcggcgcggccgacgatgagcagcgtggtgcggatgctggagggggagatgcccattgtcccgcccgtgaacccgttccattatctcatggaaagcggcggcggctcaactagctcgggattgtggagcggcacataccagagcagcagcagagacaccgccggcgcagagttgtcgcctgtcggatagctctgctgccaggtcaatcggcgtcgacgcgccgtgatcgaagatgttgagcggactcgtggggggtcgtgttgatgaaacagagtttgtagtcctgtagtacacattagttaatgctttaaaaaacaatgaaggccgtggtttgtaaattagcatcgtgttttggaggactatataaaagataaaagattcgcgcacgacaaaaaaaaatcgtgcatgcgttgagtgaaatgtacttgtaccggcaggtaccaaaagatagaccattattttaggggaaagttaggtagtatttggttatattgctctgttttgagactgtttgtttggaattaaagtaaacagtcactctaattaagca

SEQ ID NO: 199226 - DNA, 2125 bp, Zea Mays
ttggtggtggccttgctttgcccgaaaaggttggcatttcgagtgctgagacatcggcttcattgaatcctaaagcacggttgagccatggctggctcccttgctgcctcagccttcttccctggcccaggggcgtctccagcagcatccgcgaagaacttggctggtgaagtaccggatagtttgagcgtccgtggtattgtcgcaaagcctaatgccaattctgggaacatgcaagtgaaggctcaagcacaaacccttcccaaggttaatggcaccaaggttaacctcaagaatgcaagctcagacacagaggaggcgataccctacactgctcccaagacattctacaaccaactgccagattggagcatgcttcttgcggctgtcactaccatcttcctggcagcagagaagcagtggacactgcttgactggaagccgaagaaacccgacatgcttgttgatacatttggttttggtgggatcatccaggatgggatggtgtttaggcaaaacttcattattcggtcctatgagattggtgccgatcgtactgcttctatagagacattaatgaatcacttacaggaaacagctcttaaccatgtgaagacagctggccttcttggagatggttttggcgccacgccagagatgagcaaacgaaacttgatctgggttgtcagcaaaattcagcttcttgttgagaagtaccccttgtgggaagacacggttcaagtggacacgtgggtagctgccgctgggaaaaatggcatgcgtcgagactggcatgtcctcgactgcaagtctggatgtacgatcttgagagctacaagtgtttgggtgatgatgaataagaacactagaaggctttcaaaaatgccggacgaagtaagggctgagataggcccgtatttcaacgcccgcgcagccataacagatgagcagagcgagaaactggctaagccagggagcactgctggtggcgatgctatgaagcagttcatgagaaaggggctcactcctaggtggtggggtgaccttgatgtcaaccagcacgtgaataacgtcaagtacatcggttggattcttgaggtaatttcttcggggcctgcctcttttcatcgtattcaatggccactgctctggccatgtggtgggtgttgttggagagatctcgctggcatggcttcaaagtttataaagctctgtatacttgtgcttgtgtaactccttgctgatgaatgatcaattggtagtctggctgggtctgtatttgaaaaaacagacgttgctagtacggttgatcagctgagctgcttcttgatctttgcctagtacgaagcaaagccccttagtgcctgaaccctttttcttcttcttcgcagagtgctccgatcgcgatcctggagaagcacgagctcgcaagcatgacgctggattacaggaaggagtgcggacgcgacagcgtgctgcagtcgctcaccaccgtcgcgggtgaatgcgtagacggcgacacagactccaccatccagtgcgaccacctgctccagctggaaacaggagccgatattgtgaaggcgcacacggagtggcgcccgaagcgggcgcatggtgaggggacccccatggggggtttcccggcggagagcgcgtgaatccatatttggcagggtgagggggacggctgtgaagcacagatcctatgtttatgggtacactaacgcccaactgagttgagtgtgttttggttggttggttggtcgcgacaagtatggcaggcacatgggggagcgccgcattacccacacccaacctggggatttggccaagacaaaagcccagcggtatgaggatcgaggaagcagaccagagttgttgcggagcgagaggactggggatcagtgtgtgttgtgggttgctgggcaaggatacatgcagggggagctgatggttttgcaggggatgatgttgtgtagctggttggttggttggggtgtgtagaaggcattcattcccctttgtaacagcctaatctgtacattcttaccatcatctttgtcttgttgattgatcgagtcgcagacctcctgcgtttatttgcattcctcctggtggtgcc

SEQ ID NO: 199227 - DNA, 554 bp, Zea Mays
caaaacacaaaatcgatttagtattctttattccaagttctggctaccgatgctggaggatttggaaaggcgctgtttgattagaagacgagcatcctgacaagtgggtacctatatcctgtatgggccattttctggtagcagtttgtttcgcatctccatgtatttctcaatttggagactggagagagaacaacagagagaaactgatgttgaggagaaccatagaagtaattggttaggcttgagattaggaatttggcaaacaggttgtgtttctacgaagatccaaaattccttggaccaaaagcttcagcttccaatagtcgttaagggccttgtactgcgaactctggacaaagtttcatgctgctacaaagggagttgccgagctttctcaacaatagcgatcgtggaaggcgtcaaccagattgtggatgttgaaactattctatctacttttggatctaagttataggatatttgaacattttaatgtttgatacctggatgctttatgcttatatgtggatgctagaaaaagttgtgtacac

SEQ ID NO: 199228 - DNA, 176 bp, Zea Mays
cggttgtgtttctacgaagatccaaaattccttggaccaaaagcttcagcttccaatagtcgttaagggccttgtactgcgaactctggacaaagtttcatgctgctacaaagtgctctgcatacctggtgagtgtttaatcaatctcggtgctgatttgttagttttctttaaga

SEQ ID NO: 199229 - DNA, 1524 bp, Zea Mays
caataacaaatgccaggaaacaaaactttcccgccgccggccggcgtcaccatgaaacaaccccatcaaggtgggaggaccgtaccggaaaatatcgggagcaaaaaatcagaccagattttcccccgtgaggcatgaatccagtgttccaagctcccagcggaacaaacaaggaccaatccgtccagggatcggtggagcccgatccgttcgattcgtcgaccaagggagcggcgaagccgcagtcttcatcgtcgtcgctgatcttccttggtacggggtgctccggctcgttgcccgacacacggtgcctcctcaagccgtcgacgccgccctgcggcgtctgttcgatgggcgtctccctccctccggagcggaaccccaactacaggctgaacacctccctcttgatagattattgccatgacgaaacccacaagtacatcctaattgacattggcaagaccttcagagaacaagtcctccggtggtttgtccaccacaaagttccttccgttaattcaatcatcctgactcatgagcacgcggatgctgtcttaggccttgatgaagtctgggtggtacaaccaagaaatggcagaaatgacattgaacaaattcctatttttctcacacaattcaccatggacagtatcgcaagaagatttccctacttgatggagcagaagccagaggatggtgatgaagatgcccaagccgcgaaaattgactggaagataattgaggatgatgtcgacaaaccatttgtagcatcagggctagagtttgtgccgttgccggtaatgcacggagaggggtatatttgtttaggctttttatttgggaggagagccagagttgcatatttatctgatgtttcgagatttctacctaaaactgagaacgttatttcaaagtctggtgctggacaacttgaccttcttatattagaagcaaacgctttgcatggagtgggagattcttccagcacccatttaactctgagtgagagtcttgatgctatcaagaggatccgtcctaaacaagctcttttgattggaatgaggcatttttttgagcatgaaagagaaaaccagatgttggccgaatggtcaatcagagaaggaatatctacacaactggctcatgacggcctgcgtgtattcattgatttgtaataagatttgcagcatgccagcatccatatgcccatatctctgttgctgattgtacgaagatctgccagaccagtagtctagcaattattttgtgattttttatgtatccaaaagattgtaagtttggtcatgttgatatttttatacactgcagtatattgtattgttctcgtagattttaattggataacagaatgatgtcctaagccaacagaaaataaaagattatggatgtggtaacaagttaaaggatatattgtgtatagtatgagctttcaagttgtgaacttgtaacttcctttacttgaaactctctgcctgtgtgtattagccaacatgtcattag

SEQ ID NO: 199230 - DNA, 884 bp, Zea Mays
cccgaaacggcaacgccgagagctccgggagagaagagaacacgcgcggcacgggcgcaccgcgcaccccgaccccgcacaccgacgacgaagagaggagaggaggcggagctcgagcccaaccgcgcaactcacttccccgtcgcgatttgcattgccctcctcttggcccccgatctcgccgtgccctacccccagcctcgctccgccgccaccagagagatagcgccccccattcccacaatctaatccttccgtccctcgaggagccgagccctccgcgcggccgtgggatggggcggtgacaacaccggtgagtggcgtggggcagggagccggtggcgagggcatatcatggtgcagtgcctggacggggtgaggcagctgctcgcggtcctgctcaagtgctgcgacgtcgagctcaagcagccgcccgggctcgaggaccctcaggttctcgcgagggagaccgtcttcagcgtgagcgaggtcgaggctctgtacgagctgttcaagaagataagcagtgctgtcatcgatgatgggctgattaacaaggaggagtttcagttggcactatttaagaccagcaagaaggagagcctgttcgcagaccgcgtatttgatttgtttgacacaaagcacaatggaattttaggatttgaagaatttgctcgtgctctctcagtatttcatcctaatgctccccttgatgagaaaattgacttttcattccggctgtatgatctcaagcagcaaggctacattgagagacaagaggttaagcagatggttgttgctacacttgctgagtcaggaatgaatctttcagatgaaattgtagagagtataattgacaagagtcacttgcgtcaagaatcaag

SEQ ID NO: 199231 - DNA, 853 bp, Zea Mays
aagagaacacgcgcggcacgggcgcaccgcgcaccccgaccccgcacaccgacgacgaagagaggagaggaggcggagctcgagcccaaccgcgcaactcacttccccgtcgcgatttgcattgccctcctcttggcccccgatctcgccgtgccctacccccagcctcgctccgccgccaccagagagatagcgccccccattcccacaatctaatccttccgtccctcgaggagccgagccctccgcgcggccgtgggatggggcggtgacaacaccggtgagtggcgtggggcagggagccggtggcgagggcatatcatggtgcagtgcctggacggggtgaggcagctgctcgcggtcctgctcaagtgctgcgacgtcgagctcaagcagccgcccgggctcgaggaccctcaggttctcgcgagggagaccgtcttcagcgtgagcgaggtcgaggctctgtacgagctgttcaagaagataagcagtgctgtcatcgatgatgggctgattaacaaggaggagtttcagttggcactatttaagaccagcaagaaggagagcctgttcgcagaccgcgtatttgatttgtttgacacaaagcacaatggaattttaggatttgaagaatttgctcgtgctctctcagtatttcatcctaatgctccccttgatgagaaaattgactgtgagctctcgtgttttgtagattgtttcattccggctgtatgatctcaagcagcaaggctacattgagagacaagaggttaagcagatggttgttgctacacttgctgagtcaggaatgaatctttcagatgaaattgtagagagtataattgacaag

SEQ ID NO: 199232 - DNA, 1157 bp, Zea Mays
gcccactcgcccgcccaacccggagccgagccctccgcgcggccgtgggatggggcggtgacaacaccggtgagtggcgtggggcagggagccggtggcgagggcatatcatggtgcagtgcctggacggggtgaggcagctgctcgcggtcctgctcaagtgctgcgacgtcgagctcaagcagccgcccgggctcgaggaccctcaggttctcgcgagggagaccgtcttcagcgtgagcgaggtcgaggctctgtacgagctgttcaagaagataagcagtgctgtcatcgatgatgggctgattaacaaggaggagtttcagttggcactatttaagaccagcaagaaggagagcctgttcgcagaccgcgtatttgatttgtttgacacaaagcacaatggaattttaggatttgaagaatttgctcgtgctctctcagtatttcatcctaatgctccccttgatgagaaaattgacttttcattccggctgtatgatctcaagcagcaaggctacattgagagacaagaggttaagcagatggttgttgctacacttgctgagtcaggaatgaatctttcagatgaaattgtagagagtataattgacaagggacatcaccacaacatttccaagctttgtctttcactcccaagttgatgataactgattttcatgggattattttggcaagaagtattagaagatattctcgtggggttctgatatggttttctttttcaattattgggttgttggattgactgagatcgtagtgctcataagtatgttggatgttggattcgagaactcaaatcttttgtcaaccatgtttctttcatttgcatgtctggatgcgcttggaaaatatatgtagtatatgtccaaagttttcctttttttttgttatttttggctggcccgcaatcggatccagttcttagaagcttctgtcttttgtacaggttagaaagtgttttgaggactaatattgtgcttagacctctttttagacttcaatcgtagctcgagcagattttttttttaggtgtgtacttgtgtgcttccatttgtttttgagatatgcatgtgttttatctccaattcattctttctcccgttacttctcaaaacattttagtttccgagtat

SEQ ID NO: 199233 - DNA, 312 bp, Zea Mays
agaatcaggattgctcgatagttaatactgcacaggcgatgaaagctatcaaaaacttaagggtgggaggtatttgatttgtttgacacaaagcacaatggaattttaggatttgaagaatttgctcgtgctctctcagtatttcatcctaatgctccccttgatgagaaaattgacttttcattccggctgtatgatctcaagcagcaaggctacattgagagacaagaggttaagcagatggttgttgctacacttgctgagtcaggaatgaatctttcagatgaaattgtagagagtataattgacaag

SEQ ID NO: 199234 - DNA, 365 bp, Zea Mays
gtggggatgttaagacactaattgtggaaatgctccaagctgcaagagcctcatcttcagatcctgaatgatgtcgtcggtctggaatgtgaagaatcgtgcaaattgaagtaaacctaatgaataagagttattgggtttccgtccaatctctgcaccaactgaaggtggggccacagacactccatggattgatacacgaccttgtatataatataacaaagagcgcttgagccttgaagtacttgtagttgaatgaatacaaagcgatttcactatattgtacttactgacatgcataacaatttcaacggattgttcaccaaatgactgaactaattttaaccaaacaacttaattttttc

SEQ ID NO: 199235 - DNA, 1737 bp, Zea Mays
ggaagatctttctgtgcagtcacggccctcttccttcttccatcgccactcactagtcactattctgcccctccgaccgtgtgtgcacaggaagggccagtcacggcaccgcagcatcgcggtcgcagattgccgtgccgagcgaagcgaccacaacaaagcggccagcgaggctctccgacaccgagccgcgcgcacgcaacgatgcccttcctgctcacgccgggcgctcgggcggtgccctcaccgtcaacgctctcgcgcctactgcttccgctccacctacaaattactaatggccggcacaaccaccagcacggtcacgtccccgcctctcccctcctataccctcgcctccgcaaccgccgcagccgattcttcgcggcctcctcctcctcctcctcgcctcagatggcggcgcctgccgacgccgccggtggctcctctgacgcgttcgaggtgatccgcgttcaccaggcaaaagctgttcgtctttctccagttgaagaaatacggaccattatggaccgaagtgtcagatgtgttcttgctacccattctcaggatcatgctggttatccatctggttcaatggttgattttgcatgtgatcaggatggttaccccatattagcagtgagtagtttagcagtccattcaaagaatctctctggaaatcctaaatgctcacttcttgttgccaaagatcctgaggacagaactgatactgtaatcactgtatatggcgacgctgttcctgtttctgacgaagaaaaagattcagtgagaagtgcttacctacgcaggcaccctgatgctttctgggttgactttggtgacttcagtttcctgcacatcaaacctaaagctgtgcgctatgtatctggcgttgcaactgctctccttggttctggagaattcaatgttgcagagtataaggaagcaaaagttgatccaatatctcaattctcaactcctatcacaagccatatgaacaaggatcatgccaatgatacaaagctcattgtgcaacactccactactgtcaaggtggattttgcttatatgctggacgtggacagccttggttttaatgtgaaggctggttatgatggaagtgttctgaagttgagaatccccttcccaagacaggcgcaagacaggaagtgggtcctgactcttgactctcttaaccttataatctgacatatatctcttcttttcctcttaatttgtgtgctattaagctcagatgctttttcttcatggttgtctttcagtatgttttgtacaccatttaattgatgcctaaaatacagctattcctgaatatttcttgacgggttctctgacatgggcatgccactcttgtacagggatgttaagacactaattgtggaaatgctccaagctgcaagagcctcatcttcagatcctgaatgatgtcgtcggtctggaatgtgaagaatcgtgcaaattgaagtaaacctaatgaataagagttattgggtttccgtccaatctctgcaccaactgaaggtggggccacagacactccatggattgatacacgaccttgtatataatataacaaagagcgcttgagccttgaagtacttgtagttgaatgaatacaaagcgatttcactatattgtacttactgacatgcataacaatttcaacggattgttcaccaaatgactgaactaattttaaccaaacaacttaattttttc

SEQ ID NO: 199236 - DNA, 2390 bp, Zea Mays
ggaagatctttctgtgcagtcacggccctcttccttcttccatcgccactcactagtcactattctgcccctccgaccgtgtgtgcacaggaagggccagtcacggcaccgcagcatcgcggtcgcagattgccgtgccgagcgaagcgaccacaacaaagcggccagcgaggctctccgacaccgagccgcgcgcacgcaacgatgcccttcctgctcacgccgggcgctcgggcggtgccctcaccgtcaacgctctcgcgcctactgcttccgctccacctacaaattactaatggccggcacaaccaccagcacggtcacgtccccgcctctcccctcctataccctcgcctccgcaaccgccgcagccgattcttcgcggcctcctcctcctcctcctcgcctcagatggcggcgcctgccgacgccgccggtggctcctctgacgcgttcgaggtgatccgcgttcaccaggcaaaagctgttcgtctttctccagttgaagaaatacggaccattatggaccgaagtgtcagatgtgttcttgctacccattctcaggatcatgctggttatccatctggttcaatggttgattttgcatgtgatcaggatggttaccccatattagcagtgagtagtttagcagtccattcaaagaatctctctggaaatcctaaatgctcacttcttgttgccaaagatcctgaggacagaactgatactgtaatcactgtatatggcgacgctgttcctgtttctgacgaagaaaaagattcagtgagaagtgcttacctacgcaggcaccctgatgctttctgggttgactttggtgacttcagtttcctgcacatcaaacctaaagctgtgcgctatgtatctggcgttgcaactgctctccttggttctggagaattcaatgttgcagagtataaggaagcaaaagttgatccaatatctcaattctcaactcctatcacaagccatatgaacaaggatcatgccaatgatacaaagctcattgtgcaacactccactactgtcaaggcaagaaaatgatgaagtctactttaatgctttcttttgttccaacaatattacaataaagtatttattcgaataacattactgcaaaacctgatgtatcttgaagaaaattgagcctaaatattcttttcttgagggtgctgtctgttttcttataatgtagttatttctgtaaataaatagctagcattttttattgatcatatatcatatatgtgtatcttttgttcttgacacattgtgttgcttgtagttcggaaagtgaaaattgtactctgtttaagcatatgcttgcagtcttgtcaatccacaggtgcaaaagtagatacatcatgcagggctagatctgcgtgcaactgtgcaattcttgcctgggaaaacagccagccactcattcaaaattgcaaactagtttacaaatgaatgtaactgttggaagactgaaaaccctaaccctaattgggtaggggatgtattaatatatatcaaggtacatgggccaaggcccatgacactacacagtatgctaacagtaaccatttactttatagtctatttgttatgcatatctgtctgtatacttggcaaccagaagtgttattctgtgttttgctggaatctgcattgaagaactggattcattgctgtagttagcattgtacatagtgtttatttatcagtattcccaaacaatgcagtcatgaaactcttgatcacccatcagcaggggatagtagcaaaggggaattgttcagtgctttgcacaacttcttttacagtttgtccattttgtggtgttacacttttgaccaaatattgctttcaaatttattgaaacttgaaagatgacaaatacaattcaggtggattttgcttatatgctggacgtggacagccttggttttaatgtgaaggctggttatgatggaagtgttctgaagttgagaatccccttcccaagacaggcgcaagacaggaaggatgttaagacactaattgtggaaatgctccaagctgcaagagcctcatcttcagatcctgaatgatgtcgtcggtctggaatgtgaagaatcgtgcaaattgaagtaaacctaatgaataagagttattgggtttccgtccaatctctgcaccaactgaaggtggggccacagacactccatggattgatacacgaccttgtatataatataacaaagagcgcttgagccttgaagtacttgtagttgaatgaatacaaagcgatttcactatattgtacttactgacatgcataacaatttcaacggattgttcaccaaatgactgaactaattttaaccaaacaacttaattttttc

SEQ ID NO: 199237 - DNA, 2368 bp, Zea Mays
agacctaccaaatagcgcagctgtagcctctactctctagagggtggcgaaggcggagctgacctgaccggctgacccgcccaacccaacaacctctccgctggccatcttcctcccgggatccctctccctccttcgatccagctcagctctcttcctcccgccccgtactcttcttgatccgttcactcatacttctcgagagaaaaggaagaggattcgatctgttgctaccgctagctgcggtactaacagcagcagcagcaacaggaggtaccgtagaagaagggaagggaatccatgaagagatggggcagcagcggacaggccgccgattccttctaccaggtccgccccgattgcagccaaaacgtccccaacaccaagttcaagatcaaggcggggaagacactgagcgttaggaaatggcatgctgcgttcacgcgtgatggatgcctggatatcgcctctgttctgagccgcatacagagagggggtgtgcaccccacgatcaggggagaggtttgggagttcttgctcggctgctttgaccctgggagcaccttcgatgagagggaccagattagggagcggagaaggatgcagtatgccagatggaaggaagaatgcaaagagatggattctcatgtcggcagtggtaaaatcatcaccgccccgattataactgaggatggattccctattaaggatccgttggtattacttgaggctacttcagacacgcaaggtacttcaatcgccaccggcaacagtggaaatggaattgagaaccgtgtcttggataaacaaattattgactggaagcttaccttacatcaaataggccttgatgttctgcgcactgaccgcaccatggtattttatgagaacaaagataacatttcaaagttgtgggatattcttgctgtctatgcatggatcgacaaagaagttggttattgtcaaggaatgagtgatttatgttcacccatgatagtgctactccacaatgaagcagatgcattttggtgctttgagagattgatgcgtagactgcgaggtaatttcagatgcacacaacagtctgttggggtggaaaaccagcttcagcatcttgcttctatcattcaggtgcttgatccaaagttacatggccacctagaaagacttggcgggggtgactatctcttcgcattccgcatgttcatggtattgttccggcgagaactatcatttggggactccttgtacctttgggagtttctccttcagaatggcaccatctgcatattcatcaaaccatatttgaggcaaaatatgctagcaagcatacaaaaaaggcacgtggatacaagaaattgtggaaaacctgcttttgtatcaacaacactacaacagcaagcctcaatactgcaaagagtgcatagattccatccaactgctgtgttgtcttgctgatgcatgggtgcggacggggttgctggcggtctggaaggagtccatgctgtagaactgggcaggaagtcaaccagcaaacttgtgcattggtgacccattattccacatgcgaatcatacagatgatgtgggctctcgaatatgatcctggcatttgctccacttatgaagaggataatactggggctgtggtccacaaaattgaaggaaaggtaaaatcaatacgtcagtttggtaagtacgagagggagaatatgaagaagagggcaaacgatggtgatggacctgtccctatttcggtcttcctggttgctagtgtcctaaaagagaacagtacaaagcttctgcaagaggctcgagggattgatgacattattaggatattgaataatgttaatggaaatctggacgccaaaagagcttgcgttgttgcactaaagcttcataggaagtatcacaaaaaggaaaagaaatcctaacatcatatggcgagattgcacgcaacacaacactgggacttatatattgcttgtttctgttcctttcattttcccactcactgtatcggaggaagaaggtggtttacatatacagtcgcgggcgagacctcataaatataagtgacttattgtatctacaatatcaatgatccacgtccacagcctactcaattgtgaacatcaacctagtacatgataatttattcacgatcacaatggacttggcaaatattatcccatcagtatttgtcatgaacctcagtctactctcgtatcatcttaggtttttggatcccttcgttttgaaggaactgaaatttacttaatggagtaggttacttggtttacattctaccacttttcaaaatttaaatacaagtatatctcaaatttataggatgatgaatgaaa

SEQ ID NO: 199238 - DNA, 2354 bp, Zea Mays
agacctaccaaatagcgcagctgtagcctctactctctagagggtggcgaaggcggagctgacctgaccggctgacccgcccaacccaacaacctctccgctggccatcttcctcccgggatccctctccctccttcgatccagctcagctctcttcctcccgccccgtactcttcttgatccgttcactcatacttctcgagagaaaaggaagaggattcgatctgttgctaccgctagctgcggtactaacagcagcagcagcaacaggaggtaccgtagaagaagggaagggaatccatgaagagatggggcagcagcggacaggccgccgattccttctaccaggtccgccccgattgcagccaaaacgtccccaacaccaagttcaagatcaaggcggggaagacactgagcgttaggaaatggcatgctgcgttcacgcgtgatggatgcctggatatcgcctctgttctgagccgcatacagagagggggtgtgcaccccacgatcaggggagaggtttgggagttcttgctcggctgctttgaccctgggagcaccttcgatgagagggaccagattagggagcggagaaggatgcagtatgccagatggaaggaagaatgcaaagagatggattctcatgtcggcagtggtaaaatcatcaccgccccgattataactgaggatggattccctattaaggatccgttggtattacttgaggctacttcagacacgcaaggtacttcaatcgccaccggcaacagtggaaatggaattgagaaccgtgtcttggataaacaaattattgactggaagcttaccttacatcaaataggccttgatgttctgcgcactgaccgcaccatggtattttatgagaacaaagataacatttcaaagttgtgggatattcttgctgtctatgcatggatcgacaaagaagttggttattgtcaaggaatgagtgatttatgttcacccatgatagtgctactccacaatgaagcagatgcattttggtgctttgagagattgatgcgtagactgatgcacacaacagtctgttggggtggaaaaccagcttcagcatcttgcttctatcattcaggtgcttgatccaaagttacatggccacctagaaagacttggcgggggtgactatctcttcgcattccgcatgttcatggtattgttccggcgagaactatcatttggggactccttgtacctttgggagtttctccttcagaatggcaccatctgcatattcatcaaaccatatttgaggcaaaatatgctagcaagcatacaaaaaaggcacgtggatacaagaaattgtggaaaacctgcttttgtatcaacaacactacaacagcaagcctcaatactgcaaagagtgcatagattccatccaactgctgtgttgtcttgctgatgcatgggtgcggacggggttgctggcggtctggaaggagtccatgctgtagaactgggcaggaagtcaaccagcaaacttgtgcattggtgacccattattccacatgcgaatcatacagatgatgtgggctctcgaatatgatcctggcatttgctccacttatgaagaggataatactggggctgtggtccacaaaattgaaggaaaggtaaaatcaatacgtcagtttggtaagtacgagagggagaatatgaagaagagggcaaacgatggtgatggacctgtccctatttcggtcttcctggttgctagtgtcctaaaagagaacagtacaaagcttctgcaagaggctcgagggattgatgacattattaggatattgaataatgttaatggaaatctggacgccaaaagagcttgcgttgttgcactaaagcttcataggaagtatcacaaaaaggaaaagaaatcctaacatcatatggcgagattgcacgcaacacaacactgggacttatatattgcttgtttctgttcctttcattttcccactcactgtatcggaggaagaaggtggtttacatatacagtcgcgggcgagacctcataaatataagtgacttattgtatctacaatatcaatgatccacgtccacagcctactcaattgtgaacatcaacctagtacatgataatttattcacgatcacaatggacttggcaaatattatcccatcagtatttgtcatgaacctcagtctactctcgtatcatcttaggtttttggatcccttcgttttgaaggaactgaaatttacttaatggagtaggttacttggtttacattctaccacttttcaaaatttaaatacaagtatatctcaaatttataggatgatgaatgaaa

SEQ ID NO: 199239 - DNA, 3643 bp, Zea Mays
ccgcaacagagaagggaaaaattccaggcagcgcagtgcgcacgccctgcggcaaatacacgaatccccgagccgggggcgagaaaaccgcaaaaggagattctcctcgccccttccactagactactggagtacccgacggcccgaggcggcgagctcgtcggcgactgaccgccgccggagcagccgccgcctcccgctggttcctgtaccacagcctcgcaggagcgcctccgttcgctacgccacccgccactgtgctgtcggaaggcagctcggactactcgcgccgcctcggcttctccgcgctcgccgcccctccgccggcgtgatcaaggatggagctacatcgtgaacctcctgaagctattctgaatgccataaaatttgatctcatgacgagtacggatatggaaaaattgagcagcatgagcataatcgaagtgagtgatgtcactagtccgaagctaggattaccaaatggttccctgcagtgtgagacttgtggatcacaacgtggacgcgactgtgatgggcattttggtgtgactaaactggcggcaacagtacacaatccatacttcatcgatgacgttgttcactttctaaaccgaatatgtcctggctgtctcagcccaagggaaggcatagatacaaagagattggagagagaaaaggttcaagcaacatgcaagtattgttcgaaggatggctctaaactttaccctagcatagtctttaagacactgtcaagtccaagagtattattattcaagagtaaacttcacagaaacgccagcgtgatggaaagaatttcgattgttgcagaagctgctgacagaatgcctaatagatcaaagggtaaaggttcgcttgaaggcctgcccctggatttttgggattttgtaccttctgagaataaacaagtccagtcaaatatgaccaagataatattgtcgccctaccaagtcttctacatgttgaagaaaagtgaccctgaacttatcaaacaatttgtttcaaggcgggagctattgtttctatcatgtttaccagtaactcctaattgccatcgtgttgtagaaattggatatgggcttccagatggacgcctaacatttgatgacagaacaaaggcttacaagaggatggttgatgtcagtaggagaattgatgactaccgccagcatccacatttcagtgttcttgcaagttcacttgtctcaagccgggtttcagaatgcctaaagtcatccaagttgtactctaaaaaggcagatggagagacatccacagatacatatggaatgaaatggctaaaggatgttgttctcagcaaaagatcagataatgtttttaggagtattatggttggagacccaaaaattaagttatgggaaattggcattcctgaagatttatcctcaagcctggttgtttctgagcacgtcagttcttataattttcaaagtacaaatctgaagtgcaacctgcaccttctagccaagcaagaactatttattcggcgaaatggaaagctaatgtttcttcggaaggcagaccagctagaaataggtgacattgcctatagaccattgcaggatggtgatattattctcatcaacaggcctccttcagttcatcaacattcattgattgcattatctgcaaaaattctaccaattcactctgtcgtatcaatcaatccactatgctgtacaccttttgcaggagattttgatggtgattgtttgcatggatatatcccacaatctatacgctcaagggttgaacttgaagagctggtaagcttacacaaccagctgttgaatatgcaagacggtcgaaatttggtgtcactaacacatgactctctagctgctgcacatttgttaacaagtacagatgtttttctgaagaaatctgaattacagcagcttcaaatgctatgcctttcagtatcaacaccagcacccgcagttattaaatctatgaattttcaaggttctctgtggactggtaaacaacttttcagcatgcttcttccttcaggcatgaatttcagttgcgatacggagttacatatcatggacagtgaggtgcttacctgctcactgggttcttcttggctacaaaataacacatctggtcttttctctgtcatgttcaaacagtatggttgcaaggcacttgacttcctttcttcagcacaagaagtactatgtgagttcttaaccatgaggggtttaagtgtctctctttcagatctctacatgttctcagaccattactcaaggagaaaactagctgagggagttaagttggcactgtatgaagctgaagaagcttttcgagtcaagaaaatattgttagatccaattaacataccagttctgaagtgtcacgatgaaactgaagatgtaacttacagacaatctgattgtatccagagcaatccatcagttatcagatcttcaatcatggcatttaaagacgtcttccgtgatctcttaaaaatggtgcaacaacatgttagtaatgataactcaatgatggtgatgataaatgcaggaagcaagggtagcatgttgaaatatgctcaacaaactgcatgtattggtcttcaacttccagctagcaaatttcccttcagaattccttcccaactctcatgtattagctggaatggacagaaatcgttgaactatgaagctgagagtactagtgaacgtgtgggaggtcaaaacctttatgctgtgataaagaattccttcattgagggtttgaatccattggaatgtcttctgcacgctatatctggcagggcaaacttctttagtgaaaatgctgatgtaccagggacattgacaagaaaattaatgtatcacttgagagatatacatgttgcctatgatggaactgttagaagttcttatgggcagcaaatagtgcaattctcttatgatagtgttgatgacctagtagataaactcggcgccccggttggatgtcgggctgcttgttccatttcagaagctgcatatggagctttggaacacccggtcaatggtttagaggactcccctctcatgaatctacaagaagtatttaagtgtcacaaggctacaaattcaggggatcatattggtttgcttttcctgtcaaggcatttgaagaagtacagatacggtctggaatatgcatccctagaagttaaaaaccatcttgagcgagtgaacttctctgatttggttgaaaccatcatgattatatacgatggacatgacaaaataagaaacgaaggaatgtggaccacccattttcatataaacaaggcaatgatgaagaaaaaaagattaggattgagatttgttgtagatgaacttgcaaaagagtatgacaccaccagagatcagctaaacaacgcaatcccatcaattcgtatctcaaggagaaaatgtttagtaggtgacgagggtgttaaaagttcatcatgctgtatcgctgtcgtagcacatgctgaacgcaactccatctctcagttggacactatcaagacaagggtgattccaagcatactggatacactgctgaaaggaaaaaagatagttcggttcaagtatttttggacagcatgaatctg

SEQ ID NO: 199240 - DNA, 3674 bp, Zea Mays
ccgcaacagagaagggaaaaattccaggcagcgcagtgcgcacgccctgcggcaaatacacgaatccccgagccgggggcgagaaaaccgcaaaaggagattctcctcgccccttccactagactactggagtacccgacggcccgaggcggcgagctcgtcggcgactgaccgccgccggagcagccgccgcctcccgctggttcctgtaccacagcctcgcaggagcgcctccgttcgctacgccacccgccactgtgctgtcggaaggcagctcggactactcgcgccgcctcggcttctccgcgctcgccgcccctccgccggcgtgatcaaggatggagctacatcgtgaacctcctgaagctattctgaatgccataaaatttgatctcatgacgagtacggatatggaaaaattgagcagcatgagcataatcgaagtgagtgatgtcactagtccgaagctaggattaccaaatggttccctgcagtgtgagacttgtggatcacaacgtggacgcgactgtgatgggcattttggtgtgactaaactggcggcaacagtacacaatccatacttcatcgatgacgttgttcactttctaaaccgaatatgtcctggctgtctcagcccaagggaaggcatagatacaaagagattggagagagaaaaggttcaagcaacatgcaagtattgttcgaaggatggctctaaactttaccctagcatagtctttaagacactgtcaagtccaagagtattattattcaagagtaaacttcacagaaacgccagcgtgatggaaagaatttcgattgttgcagaagctgctgacagaatgcctaatagatcaaagggtaaaggttcgcttgaaggcctgcccctggatttttgggattttgtaccttctgagaataaacaagtccagtcaaatatgaccaagataatattgtcgccctaccaagtcttctacatgttgaagaaaagtgaccctgaacttatcaaacaatttgtttcaaggcgggagctattgtttctatcatgtttaccagtaactcctaattgccatcgtgttgtagaaattggatatgggcttccagatggacgcctaacatttgatgacagaacaaaggcttacaagaggatggttgatgtcagtaggagaattgatgactaccgccagcatccacatttcagtgttcttgcaagttcacttgtctcaagccgggtttcagaatgcctaaagtcatccaagttgtactctaaaaaggcagatggagagacatccacagatacatatggaatgaaatggctaaaggatgttgttctcagcaaaagatcagataatgtttttaggagtattatggttggagacccaaaaattaagttatgggaaattggcattcctgaagatttatcctcaagcctggttgtttctgagcacgtcagttcttataattttcaaagtacaaatctgaagtgcaacctgcaccttctagccaagcaagaactatttattcggcgaaatggaaagctaatgtttcttcggaaggcagaccagctagaaataggtgacattgcctatagaccattgcaggatggtgatattattctcatcaacaggcctccttcagttcatcaacattcattgattgcattatctgcaaaaattctaccaattcactctgtcgtatcaatcaatccactatgctgtacaccttttgcaggagattttgatggtgattgtttgcatggatatatcccacaatctatacgctcaagggttgaacttgaagagctggtaagcttacacaaccagctgttgaatatgcaagacggtcgaaatttggtgtcactaacacatgactctctagctgctgcacatttgttaacaagtacagatgtttttctgaagaaatctgaattacagcagcttcaaatgctatgcctttcagtatcaacaccagcacccgcagttattaaatctatgaattttcaaggttctctgtggactggtaaacaacttttcagcatgcttcttccttcaggcatgaatttcagttgcgatacggagttacatatcatggacagtgaggtgcttacctgctcactgggttcttcttggctacaaaataacacatctggtcttttctctgtcatgttcaaacagtatggttgcaaggcacttgacttcctttcttcagcacaagaagtactatgtgagttcttaaccatgaggggtttaagtgtctctctttcagatctctacatgttctcagaccattactcaaggagaaaactagctgagggagttaagttggcactgtatgaagctgaagaagcttttcgagtcaagaaaatattgttagatccaattaacataccagttctgaagtgtcacgatgaaactgaagatgtaacttacagacaatctgattgtatccagagcaatccatcagttatcagatcttcaatcatggcatttaaagacgtcttccgtgatctcttaaaaatggtgcaacaacatgttagtaatgataactcaatgatggtgatgataaatgcaggaagcaagggtagcatgttgaaatatgctcaacaaactgcatgtattggtcttcaacttccagctagcaaatttcccttcagaattccttcccaactctcatgtattagctggaatggacagaaatcgttgaactatgaagctgagagtactagtgaacgtgtgggaggtcaaaacctttatgctgtgataaagaattccttcattgagggtttgaatccattggaatgtcttctgcacgctatatctggcagggcaaacttctttagtgaaaatgctgatgtaccagggacattgacaagaaaattaatgtatcacttgagagatatacatgttgcctatgatggaactgttagaagttcttatgggcagcaaatagtgcaattctcttatgatagtgttgatgacctagtagataaactcggcgccccggttggatgtcgggctgcttgttccatttcagaagctgcatatggagctttggaacacccggtcaatggtttagaggactcccctctcatgaatctacaagaagtatttaagtgtcacaaggctacaaattcaggggatcatattggtttgcttttcctgtcaaggcatttgaagaagtacagatacggtctggaatatgcatccctagaagttaaaaaccatcttgagcgagtgaacttctctgatttggttgaaaccatcatgattatatacgatggacatgacaaaataagaaacgaaggaatgtggaccacccattttcatataaacaaggcaatgatgaagaaaaaaagattaggattgagatttgttgtagatgaacttgcaaaagagtatgacaccaccagagatcagctaaacaacgcaatcccatcaattcgtatctcaaggagaaaatgtttagtaggtgacgagggtgttaaaagttcatcatgctgtatcgctgtcgtagcacatgctgaacgcaactccatctctcagttggacactatcaagacaagggtgattccaagcatactggatacactgctgaaaggctgctcaggaatatcaagcctttcatgagattgtcagtaacctccagaattctagagctggtaaagacaaatggac

SEQ ID NO: 199241 - DNA, 5048 bp, Zea Mays
atggagctacatcgtgaacctcctgaagctattctgaatgccataaaatttgatctcatgacgagtacggatatggaaaaattgagcagcatgagcataatcgaagtgagtgatgtcactagtccgaagctaggattaccaaatggttccctgcagtgtgagacttgtggatcacaacgtggacgcgactgtgatgggcattttggtgtgactaaactggcggcaacagtacacaatccatacttcatcgatgacgttgttcactttctaaaccgaatatgtcctggctgtctcagcccaagggaaggcatagatacaaagagattggagagagaaaaggttcaagcaacatgcaagtattgttcgaaggatggctctaaactttaccctagcatagtctttaagacactgtcaagtccaagagtattattattcaagagtaaacttcacagaaacgccagcgtgatggaaagaatttcgattgttgcagaagctgctgacagaatgcctaatagatcaaagggtaaaggttcgcttgaaggcctgcccctggatttttgggattttgtaccttctgagaataaacaagtccagtcaaatatgaccaagataatattgtcgccctaccaagtcttctacatgttgaagaaaagtgaccctgaacttatcaaacaatttgtttcaaggcgggagctattgtttctatcatgtttaccagtaactcctaattgccatcgtgttgtagaaattggatatgggcttccagatggacgcctaacatttgatgacagaacaaaggcttacaagaggatggttgatgtcagtaggagaattgatgactaccgccagcatccacatttcagtgttcttgcaagttcacttgtctcaagccgggtttcagaatgcctaaagtcatccaagttgtactctaaaaaggcagatggagagacatccacagatacatatggaatgaaatggctaaaggatgttgttctcagcaaaagatcagataatgtttttaggagtattatggttggagacccaaaaattaagttatgggaaattggcattcctgaagatttatcctcaagcctggttgtttctgagcacgtcagttcttataattttcaaagtacaaatctgaagtgcaacctgcaccttctagccaagcaagaactatttattcggcgaaatggaaagctaatgtttcttcggaaggcagaccagctagaaataggtgacattgcctatagaccattgcaggatggtgatattattctcatcaacaggcctccttcagttcatcaacattcattgattgcattatctgcaaaaattctaccaattcactctgtcgtatcaatcaatccactatgctgtacaccttttgcaggagattttgatggtgattgtttgcatggatatatcccacaatctatacgctcaagggttgaacttgaagagctggtaagcttacacaaccagctgttgaatatgcaagacggtcgaaatttggtgtcactaacacatgactctctagctgctgcacatttgttaacaagtacagatgtttttctgaagaaatctgaattacagcagcttcaaatgctatgcctttcagtatcaacaccagcacccgcagttattaaatctatgaattttcaaggttctctgtggactggtaaacaacttttcagcatgcttcttccttcaggcatgaatttcagttgcgatacggagttacatatcatggacagtgaggtgcttacctgctcactgggttcttcttggctacaaaataacacatctggtcttttctctgtcatgttcaaacagtatggttgcaaggcacttgacttcctttcttcagcacaagaagtactatgtgagttcttaaccatgaggggtttaagtgtctctctttcagatctctacatgttctcagaccattactcaaggagaaaactagctgagggagttaagttggcactgtatgaagctgaagaagcttttcgagtcaagaaaatattgttagatccaattaacataccagttctgaagtgtcacgatgaaactgaagatgtaacttacagacaatctgattgtatccagagcaatccatcagttatcagatcttcaatcatggcatttaaagacgtcttccgtgatctcttaaaaatggtgcaacaacatgttagtaatgataactcaatgatggtgatgataaatgcaggaagcaagggtagcatgttgaaatatgctcaacaaactgcatgtattggtcttcaacttccagctagcaaatttcccttcagaattccttcccaactctcatgtattagctggaatggacagaaatcgttgaactatgaagctgagagtactagtgaacgtgtgggaggtcaaaacctttatgctgtgataaagaattccttcattgagggtttgaatccattggaatgtcttctgcacgctatatctggcagggcaaacttctttagtgaaaatgctgatgtaccagggacattgacaagaaaattaatgtatcacttgagagatatacatgttgcctatgatggaactgttagaagttcttatgggcagcaaatagtgcaattctcttatgatagtgttgatgacctagtagataaactcggcgccccggttggatgtcgggctgcttgttccatttcagaagctgcatatggagctttggaacacccggtcaatggtttagaggactcccctctcatgaatctacaagaagtatttaagtgtcacaaggctacaaattcaggggatcatattggtttgcttttcctgtcaaggcatttgaagaagtacagatacggtctggaatatgcatccctagaagttaaaaaccatcttgagcgagtgaacttctctgatttggttgaaaccatcatgattatatacgatggacatgacaaaataagaaacgaaggaatgtggaccacccattttcatataaacaaggcaatgatgaagaaaaaaagattaggattgagatttgttgtagatgaacttgcaaaagagtatgacaccaccagagatcagctaaacaacgcaatcccatcaattcgtatctcaaggagaaaatgtttagtaggtgacgagggtgttaaaagttcatcatgctgtatcgctgtcgtagcacatgctgaacgcaactccatctctcagttggacactatcaagacaagggtgattccaagcatactggatacactgctgaaaggttttttggaatttaaggatgttgagatccagtgtccacatgatggtgaacttcttgttaaagtttgtatgtctgagcattgtaaaggggggaggttctggcctactctacaaaatgcttgcattccagtaatggagttgattgactgggagctgagtcaaccaagcaatgtatctgatattttctgttcatatggcatagactcagcatggaaatactttgttgaatccttgaaatcagcgactactgatactgggaggaacattcgccgggagcacttgctggttattgcagatagcttgtctgtaactgggcagttccatgcattaagcagtcaaggtttaaagcagcagcgcactcggttatcgatctcgtctccattttctgaagcatgtttttctaggcctgcacaaagttttataaatgctgcaaagcaatgttcagtggacaatctgtgtggaagtctcgatgcagttgcttggggcaaagagcctttcaatgggacgtcagggccttttgaaattatgcactcgggaaagccacatgaaccagaacaaaatgagagcatctatgatttcctatgcagctctaaagttcggaattttgaaaagaatcatttggatacccgtagacaaagtactgaaaatgcttcgatatgtagattagcatgcaagtcttctaaaggcagtacgaccgtcaatggtgttgctataactatcgaccaggactttcttcatgctaaagtacccgttaaatggatatgtggcggagccagataaatcacagttaatcgaggccctgaaatttcattccagaggtgctgaaaagatcggtgtgggagtaagagaaattaagatcgggttgaatcctagtcacccaggtacaaggtgcttcattttgctgagaaacgatgataccactgaagacttttcttaccacaagtgtgttcagggtgctgcagactctatctcaccccagctcggaagttatttgaagaaactatattacagagcataagcttatgcaacactcccactagttcatttttttaactaaaacgtggcaaataaaaaagaacggatggagtaggattttggaaagtgttcctggcaacatcttgttctgatcagaccatattaccaatttctgataaggaaactacgtgtcgcattttaaggatgaggtgaaaactgaaagggtctggcgctcagaactcagaaggtcttctggactggaggtgtatgtcaactcaactcaatgggactatgtaaggtgggcctgagtcatgactgcggtttcatgcctgcaattctctagtcagtagtataaatactagtctgcgtgttttctaatatgaagatccatctattttattacttaaccatagcgtagatgattggtaacagatagatacattttatttactgattaaaatgcagcagcgactccccgaacttaaaacaggtaaacgggtgtggaaacttagtggctcattcaaaactgtctaaaatcgggtttgctcaaacaaagtgtcgacatggcatgtcatgttgaaatcatttgagtctctaaatttggtttacagacttttattagtgtgcttcaatcgtagcacaccaaatcagtattcggtttgagcatccgatttctgatggttttgcacaggccggccaagttatatgatctagttttttaacttaggggatctaattgatacaacatgccaagtttaagaatggctattgtatcttactcttatttattgaacaagtaatgcacattcccagtc

SEQ ID NO: 199242 - DNA, 1874 bp, Zea Mays
gtgggttattggcttctactacaaaggttttttggaatttaaggatgttgagatccagtgtccacatgatggtgaacttcttgttaaagtttgtatgtctgagcattgtaaaggggggaggttctggcctactctacaaaatgcttgcattccagtaatggagttgattgactgggagctgagtcaaccaagcaatgtatctgatattttctgttcatatggcatagactcagcatggaaatactttgttgaatccttgaaatcagcgactactgatactgggaggaacattcgccgggagcacttgctggttattgcagatagcttgtctgtaactgggcagttccatgcattaagcagtcaaggtttaaagcagcagcgcactcggttatcgatctcgtctccattttctgaagcatgtttttctaggcctgcacaaagttttataaatgctgcaaagcaatgttcagtggacaatctgtgtggaagtctcgatgcagttgcttggggcaaagagcctttcaatgggacgtcagggccttttgaaattatgcactcgggaaagccacatgaaccagaacaaaatgagagcatctatgatttcctatgcagctctaaagttcggaattttgaaaagaatcatttggatacccgtagacaaagtactgaaaatgcttcgatatgtagattagcatgcaagtcttctaaaggcagtacgaccgtcaatggtgttgctataactatcgaccaggactttcttcatgctaaagtcagtatatgggataacattatcgatatgcgtacttccttacaaaacatgctaagagagtacccgttaaatggatatgtggcggagccagataaatcacagttaatcgaggccctgaaatttcattccagaggtgctgaaaagatcggtgtgggagtaagagaaattaagatcgggttgaatcctagtcacccaggtacaaggtgcttcattttgctgagaaacgatgataccactgaagacttttcttaccacaagtgtgttcagggtgctgcagactctatctcaccccagctcggaagttatttgaagaaactatattacagagcataagcttatgcaacactcccactagttcatttttttaactaaaacgtggcaaataaaaaagaacggatggagtaggattttggaaagtgttcctggcaacatcttgttctgatcagaccatattaccaatttctgataaggaaactacgtgtcgcattttaaggatgaggtgaaaactgaaagggtctggcgctcagaactcagaaggtcttctggactggaggtgtatgtcaactcaactcaatgggactatgtaaggtgggcctgagtcatgactgcggtttcatgcctgcaattctctagtcagtagtataaatactagtctgcgtgttttctaatatgaagatccatctattttattacttaaccatagcgtagatgattggtaacagatagatacattttatttactgattaaaatgcagcagcgactccccgaacttaaaacaggtaaacgggtgtggaaacttagtggctcattcaaaactgtctaaaatcgggtttgctcaaacaaagtgtcgacatggcatgtcatgttgaaatcatttgagtctctaaatttggtttacagacttttattagtgtgcttcaatcgtagcacaccaaatcagtattcggtttgagcatccgatttctgatggttttgcacaggccggccaagttatatgatctagttttttaacttaggggatctaattgatacaacatgccaagtttaagaatggctattgtatcttactcttatttattgaacaagtaatgcacattcccagtc

SEQ ID NO: 199243 - DNA, 1002 bp, Zea Mays
gggatatcgtttttcctctttagtgtgcagcagtgccatccctgacaacagattcggagaagaagggcccagtgataatggaaattccactggaccaaatccggaggccactgatgcgaacgcgggccaatgatccagtcaaggtgcaagaactcatggacagtatccgtgtcatcggcctccaagtacctattgatgtgttggaggtcgatggggtctattatggcttctctggatgccaccgctacgaggctcaccagcgccttggtctcccaaccatccgctgcaaagttcgccgtgggacaaaggaaacactgaggcgagagcaccttccttcagcttggattccatttttgaattacttgatgcactgaacttcagtttgctctttcaggcaccatatgcgatgagttatattttattcagttacaaagtgatctgtgtatctagagctaaaacagaagcttccatggtcttttcgtcgtctcgtctgcaattctccatacctgtaaatgttgtccaaacagagtggtgaatagtacttctgtacccagcagcatcagaaaatgttaattttgcctacaacactcttttcgatcagtggatggatgagtaccacccgctcagtagatcattccatttctacgagatttttgtaaaaaaagaaaaatgcagcagcagtcggcacgctgtgtcatttagatcatctagaaaaccagaaaaaacgagtcatgtaacttgtttggctcgtgcaaaaaaatattcaaaaccaagtttgcttatactggatgctgatgtgtcatgctatgttggggcacactaatgaaagtttggagatttaatttatatgtcaagtttgggagctcaaatgctaagtttgatgatgcaagtgactctaacatggtacgtcaatgttggtatccagttttagcaaatctgatttaaatctgattttggatagttttagatgagcaaacctgattttggatattttagatgggc

SEQ ID NO: 199244 - DNA, 1232 bp, Zea Mays
ggacagatgtgcgccagcgaggcataagcagaatgaggcatcaccgcatgaccgcatcagctcatcgcatcggccgctttgctttgcttgctgctctcttctctccgctttccgccgcggtgcaaggccagcgaattccatttccttccgcgtctgtccccaaaagcgggaggcccgccgccggaacgagccagcaaagccaagcaagcatattgacggaggaggcggaacggcggaagcgtgaatccggaggctctgcagctgttctccagaagcagccgactgggtgtccgtccgcggaccggtcggtgtataaatggttggcgaggagagcggctgcggcgtcgagggagggacaggaggaggagaagtgccggcggcctctgctcccaacggggaccgctcagggaatagccgcctcgccgtgccgtcatcctccgcagatgatagaggcttccatagatcaagcaccatgccaggggtgattaagaatgatgaaattaccaatgaatctactggaccatcaaatttggaaaggtccagaactgagcgtcgtcggcaaaataatccaactattgatcctgctaaacagttacttgatgaaaggattccaataaaaaagaagctcaaaatgctaaatcggattgctacagtaaaagatgatggaactgtggttgttgatgtgccaagtggtctggaaccaactatagttggtggaactgaggatatttatactgaagctgttgaagaagcattagatggaacggagatactatacaggcctcctatgcaaatagttatacttattgtgggtacacgaggagatgtgcagccatttgttgctatcgggaaatgtttacaggactatgggcatcgtgtgagattggccactcatgccaactttaaggagtttgtactaacagctggcctggagttttttccgcttggtggagatcccaaaattcttgctgaatatatggtgaagaataaaggattcctaccttcgggaccatcagaaattcctattcaaaggaaacagatgaaagaaattattttttctttgctgcctgcatgcaaggaacctgatcctgacactggcattccttttaatgttgatgcaattattgcgaacccacccgcgtatggaaaccacataagcattgtaagaggaaaaacttcttacctatttcacatccatcaatcaagattaattttgctgagacctgaaggag

SEQ ID NO: 199245 - DNA, 1281 bp, Zea Mays
gcgccagcgaggcataagcagaatgaggcatcaccgcatgaccgcatcagctcatcgcatcggccgctttgctttgcttgctgctctcttctctccgctttccgccgcggtgcaaggccagcgaattccatttccttccgcgtctgtccccaaaagcgggaggcccgccgccggaacgagccagcaaagccaagcaagcatattgacggaggaggcggaacggcggaagcgtgaatccggaggctctgcagctgttctccagaagcagccgactgggtgtccgtccgcggaccggtcggtgtataaatggttggcgaggagagcggctgcggcgtcgagggagggacaggaggaggagaagtgccggcggcctctgctcccaacggggaccgctcagggaatagccgcctcgccgtgccgtcatcctccgcagatgatagaggcttccatagatcaagcaccatgccaggggtgattaagaatgatgaaattaccaatgaatctactggaccatcaaatttggaaaggtccagaactgagcgtcgtcggcaaaataatccaactattgatcctgctaaacagttacttgatgaaaggattccaataaaaaagaagctcaaaatgctaaatcggattgctacagtaaaagatgatggaactgtggttgttgatgtgccaagtggtctggaaccaactatagttggtggaactgaggatatttatactgaagctgttgaagaagcattagatggaacggagatactatacaggcctcctatgcaaatagttatacttattgtgggtacacgaggagatgtgcagccatttgttgctatcgggaaatgtttacaggactatgggcatcgtgtgagattggccactcatgccaactttaaggagtttgtactaacagctggcctggagttttttccgcttggtggagatcccaaaattcttgctgaatatatggtgaagaataaaggattcctaccttcgggaccatcagaaattcctattcaaaggaaacagatgaaagaaattattttttctttgctgcctgcatgcaaggaacctgatcctgacactggcattccttttaatgttgatgcaattattgcgaacccacccgcgtatggacatacacatgtggcagaagcactaaaagtaccaattcatatattctttaccatgccatggacgcctactaatgaatttcctcaccctctttctcgcgtgaagcagcctgctggatatcgatcctgctgtgccagaagcccagaa

SEQ ID NO: 199246 - DNA, 3143 bp, Zea Mays
attcgtttgacttcttcattggcttgttcaagatttcttttgatgcaaggtttggcttttcgtggtcatgatgaatcatctagttcattaaataagggaaattttctagaattggtttattggatgaaagataaaattaaagaagtgagagatgcttttcagcatgctccaagaaattgcattatgatatcaccacatattcaaaaagatcttgcaaagtgttgtgctcaacagatcacagagaacatcctaggagaaataggagatagaaacttctctattcttattgatgaatcacgtgatgtatctgttaaagaacaaatggcggtgatattgagatatgtgaataatcaaggccatgtgatggaacggtttcttgccctcaagcatgtcaaggatactacatcagatgccttgaaggaagctatttttggccttcttgatcaccatggattatctatatccaagatcagagggcaaggatatgatggagcatcgaatatgcgaggtgaatttaatggcttacaaagaaagatacttgatattaatccacatgcctattatgttcattgttttgcacatcaactccaacttgtggtggtttctattgctagtagtgcttgttgccaatcggttcatgacttctttgagtacattcacttaattgtcaccaccacaagctcatcttgcaagagaagggatgctctaaaagaaaaacaccaccagaatattttagaaaaactagaaagaggtgaaattttatctggtagaggtgtgaatcaagaaactaaccttgctagacctggtgacacaagatggggttcacattatttaacattgctttgattagagacaatgtgggactcagtattgcatgttcttaccattgtgcatgaagatggtcgtgtaccaacacaggcagcgggattgattgaaaaaatggagagcttcaaatttgttttcattttaaaattgatgttgaaaatgcttgcaatcacaaatgagctctctcaaaccttgcaaaggaagaatgccaacattgttcatgctatggagttgcttgatgttgtgaaaacccgaatggctacaatgaggacagatagtggttgggagtcattctttcaaagcgtgaaagaattctgtgctcaaaagggtattcctgtggtagatatggatgaagaagtgcctattagaggtcgttcaaggcgagatggcttcacaatcacaaaccttcactactaccgcactgagatattctttgttgttcttgataaaatcaacactgagttatgccatcgctttaatgaagtttctagcgagttgcttgtttgcttttcttgcctcgatccaaagaacttattttgcagttttgatattgagaaacttgttcgacttggtactctatatgataaggatttttcagttattgaatgtgcaatgttaagagagcaacttgagacatacattgtccacgtgcgaaggcatgctgcttttggtacttgtgaagatattgcatctctatctatgaagatggttgaaactaaaaagcatcttgtgttccctttggttttcaagctaattgagttggccttgttattacctgtctcaacagcaagtgttgagagaatattttcggcaatgaacatcattaagagagaattgcgtaacaaaattgaaaatgattggatgaatgatttgatggtttgctatacggagaaagagatattcaaatcccttgatgatgagactattactagaagattccagcgtcttaaaactagaagaatgcaattgcctcgagtcacaactacaagattgacaacttagtgattggatttttgttggtgattttggtgccacactacagattaagagagaaatttcggtgccaccagatcagatattaccatctttgtatctgctagatagtattgtgaagaacataggtggggaatatgtagagcattttgcaactaggttgcgaagtgtatttgttgatgcatactacagagttcatccaaaccagtatacttcaatgaggcgcctctttcgtacctggtggccagtgttcccttcttctgtgcttcgcagcattgaggatgaccttcaattttcttcctcggagaataaccgccccaccacatcaacaaatctgcatcaaacagagtcgttatctcctaggccatctcatggcatacatgtaaatcctaaatacctggaagcacaacataagttcaagcaggccaatgtggtgcaccagccagcagctcgggacactaggcaaatgactgatgtgcaggaggatctgataaatggattagcatcgaatagttcgtgtgaacggccttcaattttccagaaatcttctttacagtatgctgatgatcctgatcaacaagagacgtttcggcctcttgctggaacaagggcagcatcaccacatctcttgagtacacatgcatctgatatgaatctagatgggccattagtcaattcaaggagaaacttgtccatatcaccacctcttgatgtgttctctaggaatgtgtcccccaagagagcactagagaggctgccaccatctcattctgtattgggacctgatcccagaaaattcactgatcgaaatggcaggttaagatggggtttggatgatggtgcacaacggcctacaatcagtatgcttgatgaagagtacaggaagcaaagtgcaagggaacttattgatgcatatgggaattgtcaaggacgagatgctgatgaacgacttcctaaagtgcagcgcctggatccaaatggtatggctagcagatctagtgcacgaaattggttaacttccgaggaagaagagtattcatgggaggatatgagcccaactttgactgatcgagtcagtagcagcatgccatcttttcctcctggaaccatgagaactggatttcctggggcaaatgcagggttactggaatctgatgttgggaggcacaatttcccaagccaagctactagattatcggttgatggttcaccgtttaatcttgaagataggttttcaactgcaagtgatcatatgcagacttgtcaacatgatagtgctgtctcgatgaatctatgaacacctattgacacaggaacacctttac

SEQ ID NO: 199247 - DNA, 1662 bp, Zea Mays
gaaagcatcgctgaaacgagatcctcgccgtttcgcgaacaaatcggtgactgtctcctgctatctccccctttccgccacttcgctccgctcccatgcctcctgccccctctcgccgtggaggcaccccaaaccctagcccctgaaaccctagatcctcctcccctgttccgatggcgggggccgcggcgtccccagcggcgggccacgtggtggagcggttccggtcgcgactgcgcgaggaagcgggcggcggcgagccgggcgccgccgcggtcgtgcacgtgtacgcggaggcgctccgtgagctaaccttcaactgcaagccggtcatcaccgagctcaccatcatcgcgggccagcacgccacgctcgccgccgggggaatcgccgacgccatctgcgcccgcgtcgccgaggtgccaccagatcagatattaccatctttgtatctgctagatagtattgtgaagaacataggtggggaatatgtagagcattttgcaactaggttgcgaagtgtatttgttgatgcatactacagagttcatccaaaccagtatacttcaatgaggcgcctctttcgtacctggtggccagtgttcccttcttctgtgcttcgcagcattgaggatgaccttcaattttcttcctcggagaataaccgccccaccacatcaacaaatctgcatcaaacagagtcgttatctcctaggccatctcatggcatacatgtaaatcctaaatacctggaagcacaacataagttcaagcaggccaatgtggtgcaccagccagcagctcgggacactaggcaaatgactgatgtgcaggaggatctgataaatggattagcatcgaatagttcgtgtgaacggccttcaattttccagtatgctgatgatcctgatcaacaagagacgtttcggcctcttgctggaacaagggcagcatcaccacatctcttgagtacacatgcatctgatatgaatctagatgggccattagtcaattcaaggagaaacttgtccatatcaccacctcttgatgtgttctctaggaatgtgtcccccaagagagcactagagaggctgccaccatctcattctgtattgggacctgatcccagaaaattcactgatcgaaatggcaggttaagatggggtttggatgatggtgcacaacggcctacaatcagtatgcttgatgaagagtacaggaagcaaagtgcaagggaacttattgatgcatatgggaattgtcaaggacgagatgctgatgaacgacttcctaaagtgcagcgcctggatccaaatggtatggctagcagatctagtgcacgaaattggttaacttccgaggaagaagagtattcatgggaggatatgagcccaactttgactgatcgagtcagtagcagcatgccatcttttcctcctggaaccatgagaactggatttcctggggcaaatgcagggttactggaatctgatgttgggaggcacaatttcccaagccaagctactagattatcggttgatggttcaccgtttaatcttgaagataggttttcaactgcaagtgatcatatgcagacttgtcaacatgatagtgctgtctcgatgaatctatgaacacctattgacacaggaacacctttac

SEQ ID NO: 199248 - DNA, 848 bp, Zea Mays
atttttgcaaccagtctccaattccaagcctgtcttccagacatcaatgtagtaatgcctgcagaaatcttctttacagtatgctgatgatcctgatcaacaagagacgtttcggcctcttgctggaacaagggcagcatcaccacatctcttgagtacacatgcatctgatatgaatctagatgggccattagtcaattcaaggagaaacttgtccatatcaccacctcttgatgtgttctctaggaatgtgtcccccaagagagcactagagaggctgccaccatctcattctgtattgggacctgatcccagaaaattcactgatcgaaatggcaggttaagatggggtttggatgatggtgcacaacggcctacaatcagtatgcttgatgaagagtacaggaagcaaagtgcaagggaacttattgatgcatatgggaattgtcaaggacgagatgctgatgaacgacttcctaaagtgcagcgcctggatccaaatggtatggctagcagatctagtgcacgaaattggttaacttccgaggaagaagagtattcatgggaggatatgagcccaactttgactgatcgagtcagtagcagcatgccatcttttcctcctggaaccatgagaactggatttcctggggcaaatgcagggttactggaatctgatgttgggaggcacaatttcccaagccaagctactagattatcggttgatggttcaccgtttaatcttgaagataggttttcaactgcaagtgatcatatgcagacttgtcaacatgatagtgctgtctcgatgaatctatgaacacctattgacacaggaacacctttac

SEQ ID NO: 199249 - DNA, 731 bp, Zea Mays
gtgtcatgctttacttttgttgctcacggtgtccatgataaatctgtatcaggatttatttcctatgctctgtgtgcagctgatgaggctttaagagatgcaaattggttgccttccgaagatgataagaaggaaagaacgggagtctctattggtggagggattggaagcatctccgatatcttagatgcatcacaaatgatcatcgaaaatcgtctacgtcgtctcagcccatacttcatccccaagattttgatcaacatggcatcaggtcatgtcagcatgagatatggtttccaggatgatccaatttggtgatgccgatgtgatggtggctggtggaactgagtccaatattgatgctttgtctatagcgggattttctaggttaagagcattgtctacaaaatataattcctctccacttttagcttcaagaccttttgattgcggtagagatggatttgtgattggtgagggctgtggggtcatggttttggagaacagattatgaactgtgaactctgaagaagtctgatgttctctagggtggtcaggaagtctgaactatgaagaagtctgaactctgaagtttaggatggctgcacgctggacggtggacaccggtggaggcatggagcggaggcgggcgctgcacactggagggcggaggctcgagcacaagcctctgcagcagccacacgatggagcagagagccgccggagtagag

SEQ ID NO: 199250 - DNA, 2572 bp, Zea Mays
agataccataagaacgcacgcgagtggccagtgggaaccaggaaacaagtgagagggggaagctgcggccgacggccgagctcttgccgtccctatccacccctctcggctctcgccctcctctctgtctttcgctccgtccagccgccgcgtaaaatccgcggaaccagatgcccttatccgccctctgatcgaatccggccagaaaggccggttctttgtcgtcgtcctcggcatcgccggcgaccttgatggcactggaggcgggtagcagcggcggcggcgggaggggatggggtggcaggttccgaagcctgatgcggcggaagcaggtggactccgatcgggtccgcgccgagggccagccgcagctcgccaaggagctcaacgtgccggagctggtcgcgatcggggttggttccacagttggagcaggagtatatgttcttgttggaacagttgctagggagcacgctggtccagcattgacaatttcatttctgatagctggaatagcagccgcgctttcagctttctgttatgctgagcttgctagtcgttgcccctcagctggaagtgcttaccattattcatacatctgtgttggagaaggtgctggaatatactattggtgggtctgctgttgcccgtggtatatctccaaatttagccttgttttttggaggacaggatagtgtgccatggattttagcacgccatcagcttccatggtttgatatcattgttgatccctgtgcagccgctcttgtttttgttgtcactgttttactatgcgtgggaattaaagagagttcatttgcacaaggagtcgtaacagttctcaatgcctgtgtaatgatatttgttattgtagctgggagttatattggcttccaaataggatgggtgggctacaaggtttctgacgggtatttcccacatggagtaaatggaatgcttgctggatcagcaactgtcttctttgcatacataggctttgatacagtcgctagtacagctgaagaggtaaagaatccacagagagatttgccattgggaattggagttgcattggctatttgttgtgcgttgtatatggctgtttctgttgttattgttgggctggtgccatattttgccatggatccagatactcctatttcatctgcctttgcaaggcatggaatgcaatgggctatgtacgttgtgacaagtggtgctgttcttgcactctgctcgaccttgatgggctcacttcttccacagcctagaatacttatggccatggcacgagatggtctgttgccatccttcttctctgatgttaacaagcaaactcaagtacctgttaagagcacaattgtgactggcatctgtgcagctgctctggcttttgcaatggatgtttcacagttagcaggaatggtcagtgtaggcacactccttgcattcaccatagttgctgtctcgatcttgatactcagatatgtccctccagatgaggtccctttgccgccttctatgcaagaatcattttgtttgaaccaggaatgtgatgaggaaagggataggggtcttcttggagttgggaactgtaacttatctcagacaaaggatgtgattgtggtagtagaatcagtgaaggatcctctcattgataaaagactgcataaaggcaagatggatgagacgaagcgccgaaagatagcctctttaagcatagggtctgtgtgtgtaggggttctgatccttgcttcttcagcctctgccacatggttgccttttctcccgatatgtattggctgcaccattggagttgtgctccttctggctggcctcagcttgctctcctggatcgaccaagatgctggcaggcactcttttggtcattccggaggattcacatgcccttttgttccagtgctaccagttttgtgtatcctgataaatacgtatctgttaataaacctgagtggtgacacatggatgagagttggcatatggctgctgctgggtgttcttgtgtacgctttctacggccgaacccacagctccctaatagatgttgtctacgttccggcagcgcaagctgatgagatatacaggagttcatcaggatatgtatcatagaaaagaacagctgcagtcatgtgacacgatagagccacagaaagaccgagcggatgacagttactcaaaaggtggttgtccatcagctgtagaaaattggttatcagccggggaagacggaactgactgttatttctttcatgctcggctagcatgatctcgtggatgcaactttgcaagatatgtatgctgctcacgagccaggtcaatttatacattgttggagtgtgtagatatggtgtatataaaaccaactgggtggagtatgtgatgtcatacataataatttgtctaattcatgtaaaagccctttgtgcagttgtgctgaaatgtgagggcatttaaaggacctattgaaacagtacacggacggcaaaagaagccacctttttttatatcatgtatatgtcgtcaacaaacattctcttcaagatctttgcat

SEQ ID NO: 199251 - DNA, 995 bp, Zea Mays
aatgcagcccaggagtggagaaggagggcgtggcactggtacccgattccggttccgggtaggggaggaaggtaagcgaagaagcatccggactctctcgctcgagggtagggcagggcagggcagggcaggcggcgatccgaatccaatcgccggagggaggaagccaccggtggccgcagtgagggcggcggaggtagaggcaaagggatgacgcgcgggaagcagaagatcgacgcgcagcggcgtaacgcggagcgaaaccagaaatccaaggggtctcagctcgaggcccgcgccgtcggcctcaagatcgtctgctccatctgcaaggtacaattggcaaatgaaaaacagctgaccgatcactatggatcaaagcatccaaaggagaaacctccgagcacatcgagcaccgaataaccatggctggtcgtgacgcagaaatatagatcctgcttggctggtttgaggatctttaagtattgtgttgtcgtgctgccaatgtgtctccaaactgtatgtggtcaccatggcattgggatgatgcgaaaaaattatgagcgtatccaatgtttgtgtggcttacaagatggtttgtgcccgtgcgttcgctccctaaacggcttcgcccgtgccgcttgaatggtgccgtgcttccgaatgaatgaaatgaaatgacgccccgtttggatcactagaattgaattctattctaataatagtaatttaggcatatatcaaattaagctaattcacttttatacaaacgccccgtgaaggaaattggccggtcgatcccaaacaaggaaggctcctgctcctctgactcggatgttatgccattagccggatgtaattttcttcttaatcctcgaaaatcctagagaggaactacttcgagtgtattaaaaaagggttaggagcctgtgctctatttcgaaaggacgtgtatattcacttgtaagtccaactccagcaacgccgtgtatgtg

SEQ ID NO: 199252 - DNA, 2930 bp, Zea Mays
caggctccttggccattcgcccgttctacgccagagcccagaggaggcagcaagtcgttctcgcatctcgcgcgcctcgtgaacgaatccctaaccccacaattaaaagcaagcaacccccgctcccccacctgcgctaattaatcacatcacgagatccccttgcccacctccttcgcctcagtcacacgcctcgatctcgcctcgccgcgctcccaccaccgcaccatcccggccgcctcgctcgcgacgcaccaaggtgccctcgtatcccgcggcgccggattgggttccctccggggatcacgcggcgagcctcgccgctcgagccacagagtggccttgaaggatgataattgaagcaaaatgattctctatttcaccatattttggagatggatgatctgccaggagatgaaggaagatcccagacacacccttcagaccggaattggccctcccatttggagcagaagttccagtccctgcccctgactaaacaggaaaggaattttgattctgcatattcttcccttgattctagggaagttggtcattcattgcaggctgctcagacattatggtctagcggatccctttcaggtccaatacccaatggtttttattccattattccggaaaagagactcaaggagcattttgataccataccttctcctgatgacctttattctcttggaatagaaggatttaaggctgagattatccttgtggacatagaaagagataaaaagctatctgctttaaagcagttatgcacagcactggtaaaaggattgaattcaaatcctgctgcaatgataaaaaaaattgcaggtttggtttttgacttctacaaccgaccaaacccacatctcagtcctgcaagaacatcctctgaagatctttccaatttattagaaaatcgaggagttcaattgctgggacagataagacatggatcttgcaggcccaaagctatattatttaaagtccttgctgactcagttggtatagattctaaactgctggtgggcattccaaatgaagaacctcatggatatgataattcatccaaacatatgtctgttgtggtcattctgaaatctgcggagtttctagttgacctgatgcgttttccaggacaactagttccattttcatccaaagctgttgtcacatcccatatgtctgcaactggagaaagtgattcagccgactatgattcctgtgattctcctcttgaaccaaatagtcctctatgtgctcaaaggcaagagcaagatgatggcaatagatccttcaaagtcctctcactaagaaacatcatgctcaaatcgacaaattctatggagggtaaaatgagttgttcatctcatagtgagccgaatgttgcaaatgccttctgtggtcgcagccgcgataaagttgtggatgaacatcaaagaactgcaagctcaagtccagagcatccactgtccagagttcgtgggcgctcaatgctgggtgataaacaatatggtggtgctgtagcagtgtcaaggtcagatggcgcatcaacatcaaatacacatagagcacggagaagtactaatattactcctgaaatcagtgatgatattgtgagttcgagcaatgagtgaaagcatgagacaaaatcgcctttcaagggagcagaaggatggtagtcttggatcctcaaatgattcaatgaaacatgaacctgctggtgactccaatgatgatgaagcatccacaagacgaccgagtgcactggagggtttgagaaggcaatttaatagtcagaaagctgtgtcattgccttcgtcgcccaataggtcaggtattcttggcctcaggagcccatctgactatacagaagccgatctgatggcgacctggaatgaggtgttgcagtcttcaccatttctgaacaagcctttattgccttatgaggaatggtgcattgagttttcagagatcactgttggcattcgtgtgggagtagggttttttggggaagtcttccgtggcctttggaacggaacagatgtagctataaaagtatttctggagcaggatttgacaacagagaatatgaaagatttctgcaacgagatatcaatacttagccgacttcgacaccccaatgtcatactctttcttggtgcatgtatgaagcctcctcacttatccctagtcactgagtacatggaagtgggttctttgtatagtttgattcactcaaaaacacagaaaactaagctccattggaagaggaggttaaagatgctccgtgatatctgtaggggtctcatgtgcatgcaccggctaaagattgttcaccgggacctcaagagtgcaaattgcctcgttaacaaatactggacagtcaagatatgtgattttgggctctctcgagtaatgtcaaattctgcaatgaatgacaactcatctgcgggaactccagagtggatggctcctgagctcattcgcaacgagccattcacagaaaaatgtgatatcttcagcttcggggtcatcatgtgggagctttgcactctttgtagaccttgggaaggaattccacctgttcagatcgtttactctgttgcgaatgatggggcaagactggaaataccagatgggcctcttggaagcttgatagcagattgctgggcagaaccggagaggcgtccatgctgccaggagatcctgacccgccttcttgattgcgagacccgacccaaacgtttttgattggatctctttctttctctctccctgagagcaagcagatgggatgtaagcttgtctatgtcattaaatcctacgtagagatgagagagaataagagaccgaagtgggcacccgatctaccgcacaactaaaacacgccatttccaaggttcgtttaacttttaatccat

SEQ ID NO: 199253 - DNA, 3240 bp, Zea Mays
caggctccttggccattcgcccgttctacgccagagcccagaggaggcagcaagtcgttctcgcatctcgcgcgcctcgtgaacgaatccctaaccccacaattaaaagcaagcaacccccgctcccccacctgcgctaattaatcacatcacgagatccccttgcccacctccttcgcctcagtcacacgcctcgatctcgcctcgccgcgctcccaccaccgcaccatcccggccgcctcgctcgcgacgcaccaaggtgccctcgtatcccgcggcgccggattgggttccctccggggatcacgcggcgagcctcgccgctcgagccacaggataatatgttcaatctgtttccttgttcatttaaacgtagagtggccttgaaggatgataattgaagcaaaatgattctctatttcaccatattttggagatggatgatctgccaggagatgaaggaagatcccagacacacccttcagaccggaattggccctcccatttggagcagaagttccagtccctgcccctgactaaacaggaaaggaattttgattctgcatattcttcccttgattctagggaagttggtcattcattgcaggctgctcagacattatggtctagcggatccctttcaggtccaatacccaatggtttttattccattattccggaaaagagactcaaggagcattttgataccataccttctcctgatgacctttattctcttggaatagaaggatttaaggctgagattatccttgtggacatagaaagagataaaaagctatctgctttaaagcagttatgcacagcactggtaaaaggattgaattcaaatcctgctgcaatgataaaaaaaattgcaggtttggtttttgacttctacaaccgaccaaacccacatctcagtcctgcaagaacatcctctgaagatctttccaatttattagaaaatcgaggagttcaattgctgggacagataagacatggatcttgcaggcccaaagctatattatttaaagtccttgctgactcagttggtatagattctaaactgctggtgggcattccaaatgaagaacctcatggatatgataattcatccaaacatatgtctgttgtggtcattctgaaatctgcggagtttctagttgacctgatgcgttttccaggacaactagttccattttcatccaaagctgttgtcacatcccatatgtctgcaactggagaaagtgattcagccgactatgattcctgtgattctcctcttgaaccaaatagtcctctatgtgctcaaaggcaagagcaagatgatggcaatagatccttcaaagtcctctcactaagaaacatcatgctcaaatcgacaaattctatggagggtaaaatgagttgttcatctcatagtgagccgaatgttgcaaatgccttctgtggtcgcagccgcgataaagttgtggatgaacatcaaagaactgcaagctcaagtccagagcatccactgtccagagttcgtgggcgctcaatgctgggtgataaacaatatggtggtgctgtagcagtgtcaagagcagttcgagcaatgagtgaaagcatgagacaaaatcgcctttcaagggagcagaaggatggtagtcttggatcctcaaatgattcaatgaaacatgaacctgctggtgactccaatgatgatgaagcatccacaagacgaccgagtgcactggagggtttgagaaggcaatttaatagtcagaaagctgtgtcattgccttcgtcgcccaataggtcaggtattcttggcctcaggagcccatctgactatacagaagccgatctgatggcgacctggaatgaggtgttgcagtcttcaccatttctgaacaagcctttattgccttatgaggaatggtgcattgagttttcagagatcactgttggcattcgtgtgggagtagggttttttggggaagtcttccgtggcctttggaacggaacagatgtagctataaaagtatttctggagcaggatttgacaacagagaatatgaaagatttctgcaacgagatatcaatacttagccgacttcgacaccccaatgtcatactctttcttggtgcatgtatgaagcctcctcacttatccctagtcactgagtacatggaagtgggttctttgtatagtttgattcactcaaaaacacagaaaactaagctccattggaagaggaggttaaagatgctccgtgatatctgtaggggtctcatgtgcatgcaccggctaaagattgttcaccgggacctcaagagtgcaaattgcctcgttaacaaatactggacagtcaagatatgtgattttgggctctctcgagtaatgtcaaattctgcaatgaatgacaactcatctgcgggaactccagagtggatggctcctgagctcattcgcaacgagccattcacagaaaaatgtgatatcttcagcttcggggtcatcatgtgggagctttgcactctttgtagaccttgggaaggaattccacctgttcagatcgtttactctgttgcgaatgatggggcaagactggaaataccagatgggcctcttggaagcttgatagcagattgctgggcagaaccggagaggcgtccatgctgccaggagatcctgacccgccttcttgattgcgagtataccttgtgctgaggctttgcttctagtctgtatagcggttataggggcatcagacggtctggcttatatatacatcacttaattttccatttcacatacatcattgagggtgtaaattaccatgtattaataagcaaactttttctaaacctctttaatgctattgccccaaaatccaagaaaagttttcgcaaaaaaaaagccttgttcgagttctgtacgttttccctttatctatatcttagtcgctttctgaaataatgagatttcactttccaaataaatctatatgtgatttttttaacctttgtttgactaactgccgaacccaacgattcttccaggacccgacccaaacgtttttgattggatctctttctttctctctccctgagagcaagcagatgggatgtaagcttgtctatgtcattaaatcctacgtagagatgagagagaataagagaccgaagtgggcacccgatctaccgcacaactaaaacacgccatttccaaggttcgtttaacttttaatccat

SEQ ID NO: 199254 - DNA, 3283 bp, Zea Mays
caggctccttggccattcgcccgttctacgccagagcccagaggaggcagcaagtcgttctcgcatctcgcgcgcctcgtgaacgaatccctaaccccacaattaaaagcaagcaacccccgctcccccacctgcgctaattaatcacatcacgagatccccttgcccacctccttcgcctcagtcacacgcctcgatctcgcctcgccgcgctcccaccaccgcaccatcccggccgcctcgctcgcgacgcaccaaggtgccctcgtatcccgcggcgccggattgggttccctccggggatcacgcggcgagcctcgccgctcgagccacagagtggccttgaaggatgataattgaagcaaaatgattctctatttcaccatattttggagatggatgatctgccaggagatgaaggaagatcccagacacacccttcagaccggaattggccctcccatttggagcagaagttccagtccctgcccctgactaaacaggaaaggaattttgattctgcatattcttcccttgattctagggaagttggtcattcattgcaggctgctcagacattatggtctagcggatccctttcaggtccaatacccaatggtttttattccattattccggaaaagagactcaaggagcattttgataccataccttctcctgatgacctttattctcttggaatagaaggatttaaggctgagattatccttgtggacatagaaagagataaaaagctatctgctttaaagcagttatgcacagcactggtaaaaggattgaattcaaatcctgctgcaatgataaaaaaaattgcaggtttggtttttgacttctacaaccgaccaaacccacatctcagtcctgcaagaacatcctctgaagatctttccaatttattagaaaatcgaggagttcaattgctgggacagataagacatggatcttgcaggcccaaagctatattatttaaagtccttgctgactcagttggtatagattctaaactgctggtgggcattccaaatgaagaacctcatggatatgataattcatccaaacatatgtctgttgtggtcattctgaaatctgcggagtttctagttgacctgatgcgttttccaggacaactagttccattttcatccaaagctgttgtcacatcccatatgtctgcaactggagaaagtgattcagccgactatgattcctgtgattctcctcttgaaccaaatagtcctctatgtgctcaaaggcaagagcaagatgatggcaatagatccttcaaagtcctctcactaagaaacatcatgctcaaatcgacaaattctatggagggtaaaatgagttgttcatctcatagtgagccgaatgttgcaaatgccttctgtggtcgcagccgcgataaagttgtggatgaacatcaaagaactgcaagctcaagtccagagcatccactgtccagagttcgtgggcgctcaatgctgggtgataaacaatatggtggtgctgtagcagtgtcaaggtcagatggcgcatcaacatcaaatacacatagagcacggagaagtactaatattactcctgaaatcagtgatgatattgtgagagcagttcgagcaatgagtgaaagcatgagacaaaatcgcctttcaagggagcagaaggatggtagtcttggatcctcaaatgattcaatgaaacatgaacctgctggtgactccaatgatgatgaagcatccacaagacgaccgagtgcactggagggtttgagaaggcaatttaatagtcagaaagctgtgtcattgccttcgtcgcccaataggtcaggtattcttggcctcaggagcccatctgactatacagaagccgatctgatggcgacctggaatgaggtgttgcagtcttcaccatttctgaacaagcctttattgccttatgaggaatggtgcattgagttttcagagatcactgttggcattcgtgtgggagtagggttttttggggaagtcttccgtggcctttggaacggaacagatgtagctataaaagtatttctggagcaggatttgacaacagagaatatgaaagatttctgcaacgagatatcaatacttagccgacttcgacaccccaatgtcatactctttcttggtgcatgtatgaagcctcctcacttatccctagtcactgagtacatggaagtgggttctttgtatagtttgattcactcaaaaacacagaaaactaagctccattggaagaggaggttaaagatgctccgtgatatctgtaggggtctcatgtgcatgcaccggctaaagattgttcaccgggacctcaagagtgcaaattgcctcgttaacaaatactggacagtcaagatatgtgattttgggctctctcgagtaatgtcaaattctgcaatgaatgacaactcatctgcgggaactccagagtggatggctcctgagctcattcgcaacgagccattcacagaaaaatgtgatatcttcagcttcggggtcatcatgtgggagctttgcactctttgtagaccttgggaaggaattccacctgttcagatcgtttactctgttgcgaatgatggggcaagactggaaataccagatgggcctcttggaagcttgatagcagattgctgggcagaaccggagaggcgtccatgctgccaggagatcctgacccgccttcttgattgcgagtataccttgtgctgaggctttgcttctagtctgtatagcggttataggggcatcagacggtctggcttatatatacatcacttaattttccatttcacatacatcattgagggtgtaaattaccatgtattaataagcaaactttttctaaacctctttaatgctattgccccaaaatccaagaaaagttttcgcaaaaaaaaagccttgttcgagttctgtacgttttccctttatctatatcttagtcgctttctgaaataatgagatttcactttccaaataaatctatatgtgatttttttaacctttgtttgactaactgccgaacccaacgattcttccaggacccgacccaaacgtttttgattggatctctttctttctctctccctgagagcaagcagatgggatgtaagcttgtctatgtcattaaatcctacgtagagatgagagagaataagagaccgaagtgggcacccgatctaccgcacaactaaaacacgccatttccaaggttcgtttaacttttaatccat

SEQ ID NO: 199255 - DNA, 1846 bp, Zea Mays
caggctccttggccattcgcccgttctacgccagagcccagaggaggcagcaagtcgttctcgcatctcgcgcgcctcgtgaacgaatccctaaccccacaattaaaagcaagcaacccccgctcccccacctgcgctaattaatcacatcacgagatccccttgcccacctccttcgcctcagtcacacgcctcgatctcgcctcgccgcgctcccaccaccgcaccatcccggccgcctcgctcgcgacgcaccaaggtgccctcgtatcccgcggcgccggattgggttccctccggggatcacgcggcgagcctcgccgctcgagccacaggataatatgttcaatctgtttccttgttcatttaaacgtagagtggccttgaaggatgataattgaagcaaaatgattctctatttcaccatattttggagatggatgatctgccaggagatgaaggaagatcccagacacacccttcagaccggaattggccctcccatttggagcagaagttccagtccctgcccctgactaaacaggaaaggaattttgattctgcatattcttcccttgattctagggaagttggtcattcattgcaggctgctcagacattatggtctagcggatccctttcaggtccaatacccaatggtttttattccattattccggaaaagagactcaaggagcattttgataccataccttctcctgatgacctttattctcttggaatagaaggatttaaggctgagattatccttgtggacatagaaagagataaaaagctatctgctttaaagcagttatgcacagcactggtaaaaggattgaattcaaatcctgctgcaatgataaaaaaaattgcaggtttggtttttgacttctacaaccgaccaaacccacatctcagtcctgcaagaacatcctctgaagatctttccaatttattagaaaatcgaggagttcaattgctgggacagataagacatggatcttgcaggcccaaagctatattatttaaagtccttgctgactcagttggtatagattctaaactgctggtgggcattccaaatgaagaacctcatggatatgataattcatccaaacatatgtctgttgtggtcattctgaaatctgcggagtttctagttgacctgatgcgttttccaggacaactagttccattttcatccaaagctgttgtcacatcccatatgtctgcaactggagaaagtgattcagccgactatgattcctgtgattctcctcttgaaccaaatagtcctctatgtgctcaaaggcaagagcaagatgatggcaatagatccttcaaagtcctctcactaagaaacatcatgctcaaatcgacaaattctatggagggtaaaatgagttgttcatctcatagtgagccgaatgttgcaaatgccttctgtggtcgcagccgcgataaagttgtggatgaacatcaaagaactgcaagctcaagtccagagcatccactgtccagagttcgtgggcgctcaatgctgggtgataaacaatatggtggtgctgtagcagtgtcaaggtcagatggcgcatcaacatcaaatacacatagagcacggagaagtactaatattactcctgaaatcagtgatgatattgtgagagcagttcgagcaatgagtgaaagcatgagacaaaatcgcctttcaagggagcagaaggatggtagtcttggatcctcaaatgattcaatgaaacatatcatgatctattatcaccctacaaaccagaggcccagcttggcatgtccaccagccttatcgcccaggctgctgttttgg

SEQ ID NO: 199256 - DNA, 1795 bp, Zea Mays
aaaatgttataagataatctccgtttcgtgaggtgttatcaccagaacgatagcaactttgtgcaagcaactgttccttttggtacacggagagcgatctggacggacggagaggggtcgtcagactttagcattggcgaattaggaatctatctaggttcgtcaatccaactgaatactatgtgtaggatggtgacattggatgaatccacgagccaaccaattgggttccatccagttttaaggtagcaattttaaaaaataaattttaaaaagaaaaagaaaaggaagcaggggccaagaactcaagtaaagaacacccccgcctccacccaaaacacttgcaaggcgggcctgccccctcaatctccagcgtgcgcggcgtcccgatcgcttcgtaaccgcctgattgatccgcctgtcctccgagccaggctttcaccgcgcggctttaatcccgattgggttggctggaccgcaacccaattgggggttaattgggattgctactccgcggctgcctgtctctcgtgttcctggattggcgaggcgaatcgactggtttgctgcagcctcctgggtagaatcatgaagctgaaaaatagcgcagtggagacttttaaggagaacaatatgattttcacttctgaaggaaatctccactctaaaaaaatgagagaagattatgttgctagtccaaaccaaccgggtgttgtccagacaagatgcaaatggataattggagatgtaactgaggtctttgatcgcagcacatggaagcttggaaagatcttaaagatgctaaagaacaactactttgttatcaggcttgctgattgcatccagctcaaagagttccacatatctagtttgagaatcccacgtggtctggaagctcctcaaagcaagccctttcatgcagcagataaggccaccggacgcggtaatcgtcgacctgctgatggcgccttgcccggcgcaagggctgcggatcaaatgggtcaccgagcctacgagctggggagcagcggcaagaagcggaaagcaaccgcagacgcctctcaccatctgggcagagcagcagcagcagcacattcccggaatgtcgccgcagcctccaacccgaacggcggcagctacccgcacagctcttcacaggccatagaagacgccgaatgctcggttgccagctgcagcgtggacgacctttaccgcctcggcaatggcggcaacgccaagcgtcgccccgccgccgcagggtgcctccctgacgacgccatgtccgcgtgcacgggctggagctggaggcgtacgggtcgactatgcgggcgctgtacgcgtcgggcccgctgacgtgggagcaggaggcgctgctgacgaacctgcgcctgtcgctcaacatctccaacgaggagcatctgctccagctcaggcgcctactgtcctcgtgattattggcacttggcattggcgcattgccagccaccgcccttctggccttctctttcgtacgtctccagcgtcgtcgtcggccaacggccatgcacgtcggcttggctcgccgaacgccgcgttcagcgagcctcttgcttttactcttgttgctaattgctattacatggttctctgtctagtctaggtagaaagaatcctatgttcataccagtgtcgagacatgtcatgccttttgtatcctggatatagtcttgcttgtaaatgcaaacaagttttcctttgagggaccatatttacaagtttttcttcgaaattaaatgaattttctaaatgatttctg

SEQ ID NO: 199257 - DNA, 1287 bp, Zea Mays
aactcatgctgcaaggataggagtgcaatgtaacagaaataaggctgtaccattaagtgcacgaaaagctagtggtgctaactcggaaggaatagcgcctttcttgcagctgccacatttcacagaagcaaccgtgaaaaagattgctcgcaagaaaatccgtgcattccaagaactttgtgacatgcctgtggaagatcgtgctgcattgctcacacaagttgctgggctttctgaagaacaagctcgggatgtagagtttgtactggagatgattccttctattgaagtagacatgaaatgtgagactgaaggtgaagagggcattcaagagggtgatgtcgtgaccatgtatgcttgggtctcgctacaacggcgcaatggactgactgctgctcttcctcattgtcccaacttcctgttccacaaggaagaaaacttctggctgcttctagccaacgtggcatctaatgatgtctggttgtcacagaaagtcagcttcatggatgaggccacggccataactgcagcatcaaaagctatacaagagacccaggaagcactaggtgcaagtgcaaaggaaataggaaatgcagttagggaggcagttgacagggtgaagaaaggcagtaggctggtaatgggcaagttccaagccccagcagagggtactcacaacctcacctcttttgtttgtgcgacgcttggataggctgtgacacgaagaccagcttcaagctcaaggtcctgaagcgcagccgtgctggaacaagaggccatgtgcctgaagaagggccagtggctgctgcagaggatggtattgaggaggaagaggaggaagaggaagaggagtatgatgactatgagagcgagtacagtgatgacgaggaggacgcgaagaacaagggggaagggaaggggaaggttgtgaacggatcggcccatcaaggggctgaatctgatattgattcaggcagcgatgagtaattctatactgtgttatgttgagaaaggaacgtagaggttgacaccatctgtttttttttttaaaattgaacgtatcccctccattttatagatggtcatagttactcagttttgtttactaataagttgagattgattggttacaaaagagccgagcaaaactagcttactatctcgagttgacctgaagactgcatggtcattctccaaagtgcaagcgtttcacccatgcctatcacctgtgtggtgtatgttcctcacatttattccgaatggcactgctgatttcttaaatttctg

SEQ ID NO: 199258 - DNA, 1327 bp, Zea Mays
ttgttttaccaaggaatccccatggttttggatggctccggcctgcactcagtgttattgagctttctcaaaatattatccaggctgtaccattaagtgcacgaaaagctagtggtgctaactcggaaggaatagcgcctttcttgcagctgccacatttcacagaagcaaccgtgaaaaagattgctcgcaagaaaatccgtgcattccaagaactttgtgacatgcctgtggaagatcgtgctgcattgctcacacaagttgctgggctttctgaagaacaagctcgggatgtagagtttgtactggagatgattccttctattgaagtagacatgaaatgtgagactgaaggtgaagagggcattcaagagggtgatgtcgtgaccatgtatgcttgggtctcgctacaacggcgcaatggactgactgctgctcttcctcattgtcccaacttcctgttccacaaggaagaaaacttctggctgcttctagccaacgtggcatctaatgatgtctggttgtcacagaaagtcagcttcatggatgaggccacggccataactgcagcatcaaaagctatacaagagacccaggaagcactaggtgcaagtgcaaaggaaataggaaatgcagttagggaggcagttgacagggtgaagaaaggcagtaggctggtaatgggcaagttccaagccccagcagagggtactcacaacctcacctcttttgtttgtgcgacgcttggataggctgtgacacgaagaccagcttcaagctcaaggtcctgaagcgcagccgtgctggaacaagaggccatgtgcctgaagaagggccagtggctgctgcagaggatggtattgaggaggaagaggaggaagaggaagaggagtatgatgactatgagagcgagtacagtgatgacgaggaggacgcgaagaacaagggggaagggaaggggaaggttgtgaacggatcggcccatcaaggggctgaatctgatattgattcaggcagcgatgagtaattctatactgtgttatgttgagaaaggaacgtagaggttgacaccatctgtttttttttttaaaattgaacgtatcccctccattttatagatggtcatagttactcagttttgtttactaataagttgagattgattggttacaaaagagccgagcaaaactagcttactatctcgagttgacctgaagactgcatggtcattctccaaagtgcaagcgtttcacccatgcctatcacctgtgtggtgtatgttcctcacatttattccgaatggcactgctgatttcttaaatttctg

SEQ ID NO: 199259 - DNA, 2305 bp, Zea Mays
ctaccgcctacaggctacagcccaccgcggcaccgctgaagacaccccaaaacctatcccaatcggccgcgcctccgtccgtggctccgcctgccggcgacccctcagatccgcgcgccccgtaccacctcccgccgcctcactgccagatccggccctggctccgcaaaatcctgcgacatcgcagacgagccgggcgggagagcggagatatccaacttctccacgtgcagtaacctaaccatccttctgctctggattgttatgatattcctggtttactacataaagcttgttagccgtgaggtccaagtttttgagcctttcagtattcttggactggaagctggggcatctgaatctgatatcaagaaatcatataggagactttctattcagtaccatcctgataaaaatcctgatccagaggctcataaatacttcattgaatatatatccaaggcatatcaagcattaactgatcctatatctcgtgagaattatgagaaatatggtcaccctgatgggcggcaggggctgcaaatgggcattgctttgcccaagtttttactaaatattgatggtgcatctgatcatcaaaatatactggaaactatgtcatgcatcaaactttgtccacttactactactttatgaagccatctcttgctccaagcaaagttatagatgtcttcatcaaggctgcagaatatatggagatgccagttcgacgcagtgatgatgaacccctgcaaaaattgtttgtagctgttagaagcgagttaaatctggacttaaagaacattaagacagaacaagcaaagttctggaagcagcatccatcactagtaaagatggaactgctgattcaggcgcatctcacttgtgagtcattcgctttgacgccagcacttcttaaagattacagacacatgcttgaacttgcacctcgtcttctggaagaactcgttaagattgcagttttaccaaggaatccccatggttttggatggctccggcctgcactcagtgttattgagctttctcaaaatattatccaggctgtaccattaagtgcacgaaaagctagtggtgctaactcggaaggaatagcgcctttcttgcagctgccacatttcacagaagcaaccgtgaaaaagattgctcgcaagaaaatccgtgcattccaagaactttgtgacatgcctgtggaagatcgtgctgcattgctcacacaagttgctgggctttctgaagaacaagctcgggatgtagagtttgtactggagatgattccttctattgaagtagacatgaaatgtgagactgaaggtgaagagggcattcaagagggtgatgtcgtgaccatgtatgcttgggtctcgctacaacggcgcaatggactgactgctgctcttcctcattgtcccaacttcctgttccacaaggaagaaaacttctggctgcttctagccaacgtggcatctaatgatgtctggttgtcacagaaagtcagcttcatggatgaggccacggccataactgcagcatcaaaagctatacaagagacccaggaagcactaggtgcaagtgcaaaggaaataggaaatgcagttagggaggcagttgacagggtgaagaaaggcagtaggctggtaatgggcaagttccaagccccagcagagggtactcacaacctcacctcttttgtttgtgcgacgcttggataggctgtgacacgaagaccagcttcaagctcaaggtcctgaagcgcagccgtgctggaacaagaggccatgtgcctgaagaagggccagtggctgctgcagaggatggtattgaggaggaagaggaggaagaggaagaggagtatgatgactatgagagcgagtacagtgatgacgaggaggacgcgaagaacaagggggaagggaaggggaaggttgtgaacggatcggcccatcaaggggctgaatctgatattgattcaggcagcgatgagtaattctatactgtgttatgttgagaaaggaacgtagaggttgacaccatctgtttttttttttaaaattgaacgtatcccctccattttatagatggtcatagttactcagttttgtttactaataagttgagattgattggttacaaaagagccgagcaaaactagcttactatctcgagttgacctgaagactgcatggtcattctccaaagtgcaagcgtttcacccatgcctatcacctgtgtggtgtatgttcctcacatttattccgaatggcactgctgatttcttaaatttctg

SEQ ID NO: 199260 - DNA, 2465 bp, Zea Mays
gtcgtggtaccactaccgcctacaggctacagcccaccgcggcaccgctgaagacaccccaaaacctatcccaatcggccgcgcctccgtccgtggctccgcctgccggcgacccctcagatccgcgcgccccgtaccacctcccgccgcctcactgccagatccggccctggctccgcaaaatcctgcgacatcgcagacgagccgggcgggagagcggaggcgaagaccatccactgccgctgctcgggttgccaccgctccggcaagtaccgcaagtcgatctacaagaggatatccaacttctccacgtgcagtaacctaaccatccttctgctctggattgttatgatattcctggtttactacataaagcttgttagccgtgaggtccaagtttttgagcctttcagtattcttggactggaagctggggcatctgaatctgatatcaagaaatcatataggagactttctattcagtaccatcctgataaaaatcctgatccagaggctcataaatacttcattgaatatatatccaaggcatatcaagcattaactgatcctatatctcgtgagaattatgagaaatatggtcaccctgatgggcggcaggggctgcaaatgggcattgctttgcccaagtttttactaaatattgatggtgcatctggtgggataatgcttcttggaatagtcggattttgtatattattgcctttgatgatagctgttatttatttgtcaagatcatcaaaatatactggaaactatgtcatgcatcaaactttgtccacttactactactttatgaagccatctcttgctccaagcaaagttatagatgtcttcatcaaggctgcagaatatatggagatgccagttcgacgcagtgatgatgaacccctgcaaaaattgtttgtagctgttagaagcgagttaaatctggacttaaagaacattaagacagaacaagcaaagttctggaagcagcatccatcactagtaaagatggaactgctgattcaggcgcatctcacttgtgagtcattcgctttgacgccagcacttcttaaagattacagacacatgcttgaacttgcacctcgtcttctggaagaactcgttaagattgcagttttaccaaggaatccccatggttttggatggctccggcctgcactcagtgttattgagctttctcaaaatattatccaggctgtaccattaagtgcacgaaaagctagtggtgctaactcggaaggaatagcgcctttcttgcagctgccacatttcacagaagcaaccgtgaaaaagattgctcgcaagaaaatccgtgcattccaagaactttgtgacatgcctgtggaagatcgtgctgcattgctcacacaagttgctgggctttctgaagaacaagctcgggatgtagagtttgtactggagatgattccttctattgaagtagacatgaaatgtgagactgaaggtgaagagggcattcaagagggtgatgtcgtgaccatgtatgcttgggtctcgctacaacggcgcaatggactgactgctgctcttcctcattgtcccaacttcctgttccacaaggaagaaaacttctggctgcttctagccaacgtggcatctaatgatgtctggttgtcacagaaagtcagcttcatggatgaggccacggccataactgcagcatcaaaagctatacaagagacccaggaagcactaggtgcaagtgcaaaggaaataggaaatgcagttagggaggcagttgacagggtgaagaaaggcagtaggctggtaatgggcaagttccaagccccagcagagggtactcacaacctcacctcttttgtttgtgcgacgcttggataggctgtgacacgaagaccagcttcaagctcaaggtcctgaagcgcagccgtgctggaacaagaggccatgtgcctgaagaagggccagtggctgctgcagaggatggtattgaggaggaagaggaggaagaggaagaggagtatgatgactatgagagcgagtacagtgatgacgaggaggacgcgaagaacaagggggaagggaaggggaaggttgtgaacggatcggcccatcaaggggctgaatctgatattgattcaggcagcgatgagtaattctatactgtgttatgttgagaaaggaacgtagaggttgacaccatctgtttttttttttaaaattgaacgtatcccctccattttatagatggtcatagttactcagttttgtttactaataagttgagattgattggttacaaaagagccgagcaaaactagcttactatctcgagttgacctgaagactgcatggtcattctccaaagtgcaagcgtttcacccatgcctatcacctgtgtggtgtatgttcctcacatttattccgaatggcactgctgatttcttaaatttctg

SEQ ID NO: 199261 - DNA, 2594 bp, Zea Mays
gtcgtggtaccactaccgcctacaggctacagcccaccgcggcaccgctgaagacaccccaaaacctatcccaatcggccgcgcctccgtccgtggctccgcctgccggcgacccctcagatccgcgcgccccgtaccacctcccgccgcctcactgccagatccggccctggctccgcaaaatcctgcgacatcgcagacgagccgggcgggagagcggaggtaggtcacagcagccatggcggccgcagaggagaacagctcgctgttcctgatttttatactcaccatgatcgcgctgcccctcgtgccctacacgatcctgcgcttgtgtcgcgctgcctccgagaaggcgaagaccatccactgccgctgctcgggttgccaccgctccggcaagtaccgcaagtcgatctacaagaggatatccaacttctccacgtgcagtaacctaaccatccttctgctctggattgttatgatattcctggtttactacataaagcttgttagccgtgaggtccaagtttttgagcctttcagtattcttggactggaagctggggcatctgaatctgatatcaagaaatcatataggagactttctattcagtaccatcctgataaaaatcctgatccagaggctcataaatacttcattgaatatatatccaaggcatatcaagcattaactgatcctatatctcgtgagaattatgagaaatatggtcaccctgatgggcggcaggggctgcaaatgggcattgctttgcccaagtttttactaaatattgatggtgcatctggtgggataatgcttcttggaatagtcggattttgtatattattgcctttgatgatagctgttatttatttgtcaagatcatcaaaatatactggaaactatgtcatgcatcaaactttgtccacttactactactttatgaagccatctcttgctccaagcaaagttatagatgtcttcatcaaggctgcagaatatatggagatgccagttcgacgcagtgatgatgaacccctgcaaaaattgtttgtagctgttagaagcgagttaaatctggacttaaagaacattaagacagaacaagcaaagttctggaagcagcatccatcactagtaaagatggaactgctgattcaggcgcatctcacttgtgagtcattcgctttgacgccagcacttcttaaagattacagacacatgcttgaacttgcacctcgtcttctggaagaactcgttaaggtacttttttaccaaggaatccccatggttttggatggctccggcctgcactcagtgttattgagctttctcaaaatattatccaggctgtaccattaagtgcacgaaaagctagtggtgctaactcggaaggaatagcgcctttcttgcagctgccacatttcacagaagcaaccgtgaaaaagattgctcgcaagaaaatccgtgcattccaagaactttgtgacatgcctgtggaagatcgtgctgcattgctcacacaagttgctgggctttctgaagaacaagctcgggatgtagagtttgtactggagatgattccttctattgaagtagacatgaaatgtgagactgaaggtgaagagggcattcaagagggtgatgtcgtgaccatgtatgcttgggtctcgctacaacggcgcaatggactgactgctgctcttcctcattgtcccaacttcctgttccacaaggaagaaaacttctggctgcttctagccaacgtggcatctaatgatgtctggttgtcacagaaagtcagcttcatggatgaggccacggccataactgcagcatcaaaagctatacaagagacccaggaagcactaggtgcaagtgcaaaggaaataggaaatgcagttagggaggcagttgacagggtgaagaaaggcagtaggctggtaatgggcaagttccaagccccagcagagggtactcacaacctcacctcttttgtttgtgcgacgcttggataggctgtgacacgaagaccagcttcaagctcaaggtcctgaagcgcagccgtgctggaacaagaggccatgtgcctgaagaagggccagtggctgctgcagaggatggtattgaggaggaagaggaggaagaggaagaggagtatgatgactatgagagcgagtacagtgatgacgaggaggacgcgaagaacaagggggaagggaaggggaaggttgtgaacggatcggcccatcaaggggctgaatctgatattgattcaggcagcgatgagtaattctatactgtgttatgttgagaaaggaacgtagaggttgacaccatctgtttttttttttaaaattgaacgtatcccctccattttatagatggtcatagttactcagttttgtttactaataagttgagattgattggttacaaaagagccgagcaaaactagcttactatctcgagttgacctgaagactgcatggtcattctccaaagtgcaagcgtttcacccatgcctatcacctgtgtggtgtatgttcctcacatttattccgaatggcactgctgatttcttaaatttctg

SEQ ID NO: 199262 - DNA, 2588 bp, Zea Mays
gtcgtggtaccactaccgcctacaggctacagcccaccgcggcaccgctgaagacaccccaaaacctatcccaatcggccgcgcctccgtccgtggctccgcctgccggcgacccctcagatccgcgcgccccgtaccacctcccgccgcctcactgccagatccggccctggctccgcaaaatcctgcgacatcgcagacgagccgggcgggagagcggaggtaggtcacagcagccatggcggccgcagaggagaacagctcgctgttcctgatttttatactcaccatgatcgcgctgcccctcgtgccctacacgatcctgcgcttgtgtcgcgctgcctccgagaaggcgaagaccatccactgccgctgctcgggttgccaccgctccggcaagtaccgcaagtcgatctacaagaggatatccaacttctccacgtgcagtaacctaaccatccttctgctctggattgttatgatattcctggtttactacataaagcttgttagccgtgaggtccaagtttttgagcctttcagtattcttggactggaagctggggcatctgaatctgatatcaagaaatcatataggagactttctattcagtaccatcctgataaaaatcctgatccagaggctcataaatacttcattgaatatatatccaaggcatatcaagcattaactgatcctatatctcgtgagaattatgagaaatatggtcaccctgatgggcggcaggggctgcaaatgggcattgctttgcccaagtttttactaaatattgatggtgcatctggtgggataatgcttcttggaatagtcggattttgtatattattgcctttgatgatagctgttatttatttgtcaagatcatcaaaatatactggaaactatgtcatgcatcaaactttgtccacttactactactttatgaagccatctcttgctccaagcaaagttatagatgtcttcatcaaggctgcagaatatatggagatgccagttcgacgcagtgatgatgaacccctgcaaaaattgtttgtagctgttagaagcgagttaaatctggacttaaagaacattaagacagaacaagcaaagttctggaagcagcatccatcactagtaaagatggaactgctgattcaggcgcatctcacttgtgagtcattcgctttgacgccagcacttcttaaagattacagacacatgcttgaacttgcacctcgtcttctggaagaactcgttaagttttaccaaggaatccccatggttttggatggctccggcctgcactcagtgttattgagctttctcaaaatattatccaggctgtaccattaagtgcacgaaaagctagtggtgctaactcggaaggaatagcgcctttcttgcagctgccacatttcacagaagcaaccgtgaaaaagattgctcgcaagaaaatccgtgcattccaagaactttgtgacatgcctgtggaagatcgtgctgcattgctcacacaagttgctgggctttctgaagaacaagctcgggatgtagagtttgtactggagatgattccttctattgaagtagacatgaaatgtgagactgaaggtgaagagggcattcaagagggtgatgtcgtgaccatgtatgcttgggtctcgctacaacggcgcaatggactgactgctgctcttcctcattgtcccaacttcctgttccacaaggaagaaaacttctggctgcttctagccaacgtggcatctaatgatgtctggttgtcacagaaagtcagcttcatggatgaggccacggccataactgcagcatcaaaagctatacaagagacccaggaagcactaggtgcaagtgcaaaggaaataggaaatgcagttagggaggcagttgacagggtgaagaaaggcagtaggctggtaatgggcaagttccaagccccagcagagggtactcacaacctcacctcttttgtttgtgcgacgcttggataggctgtgacacgaagaccagcttcaagctcaaggtcctgaagcgcagccgtgctggaacaagaggccatgtgcctgaagaagggccagtggctgctgcagaggatggtattgaggaggaagaggaggaagaggaagaggagtatgatgactatgagagcgagtacagtgatgacgaggaggacgcgaagaacaagggggaagggaaggggaaggttgtgaacggatcggcccatcaaggggctgaatctgatattgattcaggcagcgatgagtaattctatactgtgttatgttgagaaaggaacgtagaggttgacaccatctgtttttttttttaaaattgaacgtatcccctccattttatagatggtcatagttactcagttttgtttactaataagttgagattgattggttacaaaagagccgagcaaaactagcttactatctcgagttgacctgaagactgcatggtcattctccaaagtgcaagcgtttcacccatgcctatcacctgtgtggtgtatgttcctcacatttattccgaatggcactgctgatttcttaaatttctg

SEQ ID NO: 199263 - DNA, 1922 bp, Zea Mays
caatcaagctgtaaagtaaaaaaagatggaggttaatttcccgttgagagaaagctccagaggacaagcagtgatcaaaagcgcaggattcagaagactgaacatgctcttaaagctgctgaggaggagctgatgaaggctcagttggaaacaacaacaaaagtaaaacagcttagagaggttcatggagcctggttgccaccatggttagcgacacatgcagcccgctctatggaggtgatgtcaaatcactggaatgaacatgggaaacctgcctttgacagcttcttgcagaaggcatctgaaaaaacagtgcagacaaagaaatgggctgagcctcatctggaaactgctaagacaaaatggatgcctgttgctaaagaaaaatgggttaccttgaagaaacatgcaaagccctatgtccaaatggtctcagagaaatcattggaggcttatcaaacatcaagtgactttgtcaggcctcatcttgtaaatgcacatcaagttgttgatccctatttccaggaagccaagaaattatccaagccatatgttgatcaaattgctacagctactaaaccacatgtcgagaaagttagaactgctctcaagccttatactgaaagagcacgacatgtatatggacagtttcttgagacagctactacatatcatcagcagtaccaagaagaagaagaaaacacctcggagcagtaataccaaccatggtcataggagacataagcgccggcatgctgacaagtaaaacattgatcaaccatggtcattactttttttataacgatcttggaagcttgaccatttacctttcactgtaaatggtatagacactatcatccgtcatcgccgaaccttgttgtgtatccacgaactagaatacacacaagaaatgtgtttctgccccccatcgtgttgggagagttgtgtttttcatcagagtagggaccgcgagcttaaatctgtgggtgtcatttcataggttatttgttgtagcattgtgcttgagcttgtgtaattcatgattattttgtctcgcgtttgtggatcacttcagccactacattattctacagcttccactcggtgtaaaagttttatcttccacgctgggatgctgtggtttggagaaattctagtaccaagaaaaaccttagttttatatacaagagacatggaaaaggaggtctagactctgttccatcgtaactgcgctgcgtaagcccctaatctaccgcgaatccgcttgatgtttctaaggggaaatccaaatcgaagcaatcggcatgtcccgggcgcttgtcggagaaatttttggcaccattcgtccatcacgtaaccacatatagctcaaaattcaaaggtcgggtttgaagaaaacatacacgtttatcagaaactatcacacggacgagtacaccccatactcttatctagatccctgtatgagctcgatcagtaccaagcctgtttttgttgcacatgacatgcatgctgtcaacctatgctgctccgatctctacaagccaagagcccccaacaaaaaactgaaaaaaaagagaggataatttccagctactgatacaaacaacggactaaattgacacatcaaatcctaccgacctacatgatccatacaccaacattacgtcgttgttacgtttgtcggctgcatgcatgccattgccaagccacgccactactccgatccacagctactagctagacttggtacccgccggcaggccagtacctctccaccagctgctccacgtccaagccctggtaccgggccccggccgccgagtccgcgccgaaccctccgtccgcgccgggcacgatcacgcagccgccgagccccgccgcagccgccgtcgccatctgcttctgctggtggtgttcac

SEQ ID NO: 199264 - DNA, 345 bp, Zea Mays
ctagtcgaagcttccgttcccgtggaggagatgaagggcgtgggcgcgagcatccggcggtggatgggagctcctcctcgccgagcgggaggtagtgactaaccctcgcactgcaactgtggtctgtctgaacctctgaggatttctcagctctggtaggaaactacagaatgagtgctgtagtgtgggctgcttcacgtttcagagctatgagagagtgtcattctgaattcatagccagaatgcagggcagtaataagattactgttgtaacctgtattgtatcacaagcttttgatccctcaaaatttatttccacagagcacatactccgaagttactttg

SEQ ID NO: 199265 - DNA, 2106 bp, Zea Mays
ctcgctgccacgtcggtccgaaccaaatccagcaccctgcaccctcttcctccatcgcaccctatcctcctcctccccggtccggcggtccccaccggtccaccacggcaccaccgtctccccgccccccgcgtccgatcaccgcaccggcgaactcggcgagccgctcgtcgctgcacgctaagctgggaatggccgctgcgctcgccagctcaccgcttgttcacctatccacctcccgcctccgcctccccaggccccgggcctcctccagttccgctccaggctgctcgatcggcgtgtgcttgggatggaggctgaaggtcgggtggagggctctgaggcggtgcgaccggcttcgatgcttctccaccgacggcgacggcgtggaggagggggagaagcgtggcgaggaggaggcctcggcgacggcggccccggccccggacccagccccagcggagacacaggtgggcgctgcggaggagctggcgtctgagcggagccgatcagggagcttttcgtcctcatcctcgtccgggaatcctggtgtatcaagcgagccaccactgttgagttttagtgttgataatatcgatacagttaaactattggaacttctaggcccggaaaaggttgacccagttgatgtcatggcaattaaggaaaaactctttggttatacgacattctggttgacaaaagaagagccttttggtgatctcggtgaaggagtccttttcattgggaatctccgtgggaagagggaggaaatctttgcaaaacttcaaaggcaactacgcgaacttgctggtgaaaaatacaatctttttatggtggaggaacccaattcagaaggggatgacccacgtgggggaccacgtgttagttttggtttgcttaggaaggaagtttctgagcctggacctactaccctatggcagtatgtcatttctctgtcacttttccttctcactatgttctcctgtgttgagctaggaattgcatcaaagattagcagtcttccaccagaaattgtttcatatttcactgatccaaattctactggaccccctcctgatatgcaacttctgctcccatttgtggaatcggctttgccagtggcttacggtgtcttggctatccaattatttcatgaaattggacactttttggcagcatttccaaaaaatgtgaaactaggcattcctttctttattccgaacttcacccttggaacttttggtgcaattactcagttcaagtccattcttccggatcgaaagacaatgtttgacatatcaatggctggtcctgtggctggagctgcactttccttttcaatgttctttgtaggcttattactctcttcaaatcctgttggggcaagtgatttagtagaagtacctagccagctgttccagggttcattattgcttggactcattagtagagcaacacttggatacagagctatgcatgctgctacagtttcgatccaccctctagtgattgcaggctggtgtggtttaactactactgcatttaatatgcttcctgttggatgtcttgatggtggaagagcattacagggtgcttttggcaaggatgctttgtttggatttggcctcacaacatactcgttgcttggactaggagtgagaacaccggagaaaccatgcttgaacgacgtaagcgatattggaggttggaggaggacggccttgatagcttcagtgtttcttgttgttttgactctcatcccgttgtgggatgaactcgcggaggaactaggtgtagggcttgttacttcgttctgagatacggtccttaccgatagaattaggccgtgatgtagctcaattttgtattgaaatgtagcgtcccatagcgggactgctgtaaaggcatgtgcagtttcctgattaggtgagcaatgatatcacctatgcgagtgtcatgaaattgtgccaagacgctgacgattattatcaattacatacatgtacgcacattttgaccatacgagtacagatacacacaacctacccttctatgagcatcttcaaacgattgggcgtgaagccatgaagtcagtagaggcaa

SEQ ID NO: 199266 - DNA, 2187 bp, Zea Mays
aaatccagcaccctgcaccctcttcctccatcgcaccctatcctcctcctccccggtccggcggtccccaccggtccaccacggcaccaccgtctccccgccccccgcgtccgatcaccgcaccggcgaactcggcgagccgctcgtcgctgcacgctaagctgggaatggccgctgcgctcgccagctcaccgcttgttcacctatccacctcccgcctccgcctccccaggccccgggcctcctccagttccgctccaggctgctcgatcggcgtgtgcttgggatggaggctgaaggtcgggtggagggctctgaggcggtgcgaccggcttcgatgcttctccaccgacggcgacggcgtggaggagggggagaagcgtggcgaggaggaggcctcggcgacggcggccccggccccggacccagccccagcggagacacaggtgggcgctgcggaggagctggcgtctgagcggagccgatcagggagcttttcgtcctcatcctcgtccgggaatcctggtgtatcaagcgagccaccactgttgagttttagtgttgataatatcgatacagttaaactattggaacttctaggcccggaaaaggttgacccagttgatgtcatggcaattaaggaaaaactctttggttatacgacattctggttgacaaaagaagagccttttggtgatctcggtgaaggagtccttttcattgggaatctccgtgggaagagggaggaaatctttgcaaaacttcaaaggcaactacgcgaacttgctggtgaaaaatacaatctttttatggtggaggaacccaattcagaaggggatgacccacgtgggggaccacgtgttagttttggtttgcttaggaaggaagtttctgagcctggacctactaccctatggcagtatgtcatttctctgtcacttttccttctcactatgttctcctgtgttgagctaggaattgcatcaaagattagcagtcttccaccagaaattgtttcatatttcactgatccaaattctactggaccccctcctgatatgcaacttctgctcccatttgtggaatcggctttgccagtggcttacggtgtcttggctatccaattatttcatgaaattggacactttttggcagcatttccaaaaaatgtgaaactaggcattcctttctttattccgaacttcacccttggaacttttggtgcaattactcagttcaagtccattcttccggatcgaaagacaatgtttgacatatcaatggctggtcctgtggctggagctgcactttccttttcaatgttctttgtaggcttattactctcttcaaatcctgttggggcaagtgatttagtagaagtacctagccagctgttccagggttcattattgcttggactcattagtagagcaacacttggatacagagctatgcatgctgctacagtttcgatccaccctctagtgattgcaggctggtgtggtttaactactactgcatttaatatgcttcctgttggatgtcttgatggtggaagagcattacagaaaacagggttgtactcagcttcgcatgatgacggggctaccaccttctgcttttgagactgccaggttatgatgttgctgctgaggaagaacaggacactagagggtgcttttggcaaggatgctttgtttggatttggcctcacaacatactcgttgcttggactaggagtgagaacaccggagaaaccatgcttgaacgacgtaagcgatattggaggttggaggaggacggccttgatagcttcagtgtttcttgttgttttgactctcatcccgttgtgggatgaactcgcggaggaactaggtgtagggcttgttacttcgttctgagatacggtccttaccgatagaattaggccgtgatgtagctcaattttgtattgaaatgtagcgtcccatagcgggactgctgtaaaggcatgtgcagtttcctgattaggtgagcaatgatatcacctatgcgagtgtcatgaaattgtgccaagacgctgacgattattatcaattacatacatgtacgcacattttgaccatacgagtacagatacacacaacctacccttctatgagcatcttcaaacgattgggcgtgaagccatgaagtcagtagaggcaa

SEQ ID NO: 199267 - DNA, 2036 bp, Zea Mays
aaatccagcaccctgcaccctcttcctccatcgcaccctatcctcctcctccccggtccggcggtccccaccggtccaccacggcaccaccgtctccccgccccccgcgtccgatcaccgcaccggcgaactcggcgagccgctcgtcgctgcacgctaagctgggaatggccgctgcgctcgccagctcaccgcttgttcacctatccacctcccgcctccgcctccccaggccccgggcctcctccagttccgctccaggctgctcgatcggcgtgtgcttgggatggaggctgaaggtcgggtggagggctctgaggcggtgcgaccggcttcgatgcttctccaccgacggcgacggcgtggaggagggggagaagcgtggcgaggaggaggcctcggcgacggcggccccggccccggacccagccccagcggagacacaggtgggcgctgcggaggagctggcgtctgagcggagccgatcagggagcttttcgtcctcatcctcgtccgggaatcctggtgtatcaagcgagccaccactgttgagttttagtgttgataatatcgatacagttaaactattggaacttctaggcccggaaaaggttgacccagttgatgtcatggcaattaaggaaaaactctttggttatacgacattctggttgacaaaagaagagccttttggtgatctcggtgaaggagtccttttcattgggaatctccgtgggaagagggaggaaatctttgcaaaacttcaaaggcaactacgcgaacttgctggtgaaaaatacaatctttttatggtggaggaacccaattcagaaggggatgacccacgtgggggaccacgtgttagttttggtttgcttaggaaggaagtttctgagcctggacctactaccctatggcagtatgtcatttctctgtcacttttccttctcactatgttctcctgtgttgagctaggaattgcatcaaagattagcagtcttccaccagaaattgtttcatatttcactgatccaaattctactggaccccctcctgatatgcaacttctgctcccatttgtggaatcggctttgccagtggcttacggtgtcttggctatccaattatttcatgaaattggacactttttggcagcatttccaaaaaatgtgaaactaggcattcctttctttattccgaacttcacccttggaacttttggtgcaattactcaggcttattactctcttcaaatcctgttggggcaagtgatttagtagaagtacctagccagctgttccagggttcattattgcttggactcattagtagagcaacacttggatacagagctatgcatgctgctacagtttcgatccaccctctagtgattgcaggctggtgtggtttaactactactgcatttaatatgcttcctgttggatgtcttgatggtggaagagcattacagggtgcttttggcaaggatgctttgtttggatttggcctcacaacatactcgttgcttggactaggagtgcttggaggaccactgtctcttccttggggtttgtacgtgctaatttgccagagaacaccggagaaaccatgcttgaacgacgtaagcgatattggaggttggaggaggacggccttgatagcttcagtgtttcttgttgttttgactctcatcccgttgtgggatgaactcgcggaggaactaggtgtagggcttgttacttcgttctgagatacggtccttaccgatagaattaggccgtgatgtagctcaattttgtattgaaatgtagcgtcccatagcgggactgctgtaaaggcatgtgcagtttcctgattaggtgagcaatgatatcacctatgcgagtgtcatgaaattgtgccaagacgctgacgattattatcaattacatacatgtacgcacattttgaccatacgagtacagatacacacaacctacccttctatgagcatcttcaaacgattgggcgtgaagccatgaagtcagtagaggcaa

SEQ ID NO: 199268 - DNA, 641 bp, Zea Mays
gcaggctggtggtttaactactactgcatttaatatgcttcctgttggatgtcttgatggtggaagagcattacagggtgcttttggcaaggatgctttgtttggatttggcctcacaacatactcgttgcttggactaggagtgcttggaggaccactgtctcttccttggggtttgtacgtgctaatttgccagagaacaccggagaaaccatgcttgaacgacgtaagcgatattggaggttggaggaggacggccttgatagcttcagtgtttcttgttgttttgactctcatcccgttgtgggatgaactcgcggaggaactaggtgtagggcttgttacttcgttctgagatacggtccttaccgatagaattaggccgtgatgtagctcaattttgtattgaaatgtagcgtcccatagcgggactgctgtaaaggcatgtgcagtttcctgattaggtgagcaatgatatcacctatgcgagtgtcatgaaattgtgccaagacgctgacgattattatcaattacatacatgtacgcacattttgaccatacgagtacagatacacacaacctacccttctatgagcatcttcaaacgattgggcgtgaagccatgaagtcagtagaggcaa

SEQ ID NO: 199269 - DNA, 545 bp, Zea Mays
ccatctcagattgtgccacctccaggccaagggtgcttttggcaaggatgctttgtttggatttggcctcacaacatactcgttgcttggactaggagtgagaacaccggagaaaccatgcttgaacgacgtaagcgatattggaggttggaggaggacggccttgatagcttcagtgtttcttgttgttttgactctcatcccgttgtgggatgaactcgcggaggaactaggtgtagggcttgttacttcgttctgagatacggtccttaccgatagaattaggccgtgatgtagctcaattttgtattgaaatgtagcgtcccatagcgggactgctgtaaaggcatgtgcagtttcctgattaggtgagcaatgatatcacctatgcgagtgtcatgaaattgtgccaagacgctgacgattattatcaattacatacatgtacgcacattttgaccatacgagtacagatacacacaacctacccttctatgagcatcttcaaacgattgggcgtgaagccatgaagtcagtagaggcaa

SEQ ID NO: 199270 - DNA, 1738 bp, Zea Mays
ccattctagatcatatgggaggaatagagtgtagctcctaccaactcaccaataataatacggatgtaagaaacaaaagaatgtacaaagaaaatccaaatgaataaaaggagaaacaatgagtggaaaatgatatggagcacccaacagtatacgcatacgccaggcaccacatgtccatccgcgactccgcgtcggtatccgtcaagaaattttcaacaaaaaaaaaacttaattttccactcctattcttccccgacgccggggaccagcgccagcgccaccaagaagtgacccacccaggtagccaggtaggtaaccgcccgtgccccgtcgccggcgatggcgaggtacgaggcgtcggcggccgcgccgggcgtagactttcaccttcccgacgagatcctggccgtgatccccaccgacccgtacgagcaactggacgtggcgcgcaagatcacctccatggccatcacctcccgcgtctcccgcctcgaggccgactctgggcgcctccgccgtgacctagccgaccgcgaccacgccgaggccgagctccgtgcccgcctcgccgactccgacgcgcgcctggccgccgctctcgacgagaacgcgaagctagcgaaggaaagggactcgctcgccgcgacgaccaaaaagctgaccaggaatttggcgaagttggaggcttttaagaaacaactgatgaaatcgttaagtgaagataatctattgcaactgtctgaaaccagtcaagatcacaacggagaagatattttgacagctcgagtcccgtattggaaagatgaagtttgtagcagtaacacttcttcagatacctccatcagatctacaataactgaatccatccatggtggaggataccagttctcaatcaaaacatatgtgcctccaaaattaactcctggctcaacacctatgatttcgtcttctagtggttctccccgagcttattcaactggcccaccctctcccaacttcttctctggtccgacttctcctacaaaagctcgatctgagggccaattgacattttcgtcatggcaaggatcatcaagtcatcagtattcagcacctacctctcctcaacgccactcattcacagggcggccacgtatagatgggaaggaattcttccggcaagcacggacaagactttcttatgagcaatttggagcatttttggccaacatcaaggagttcaatgctcaaaaacaatcacgggagaagagatttttggaacagaacacaaagacttgtacatttctttccagaatatgcttagtcgcaaccagtcatgaaaaatatgtcagaagcggtattttctgtctctaaatcaagcagggaagaatttgttgcaataaacgaggcccttccatagtttttttaaaaaaaaaaatgctttcataggttctcaagatcacattgtagagatctgtatgttggcaatcttaatccgaggcgtccgttctcaatgatttggagcggtgacttgagaatgaaattctcataactgccggaaaattagcccgtttgatttagcatacatccaatcattccctggcattcaagacttcttgtttgtctttctgctgtaaaggtattcattgaaaaactgaaaaggggttcagcgtacattgtgcaaagcagtaccaggtgcttagctgaggaggcaccggctaaataaaaaaatgttgggttattatctcatcggaca

SEQ ID NO: 199271 - DNA, 1392 bp, Zea Mays
ccattctagatcatatgggaggaatagagtgtagctcctaccaactcaccaataataatacggatgtaagaaacaaaagaatgtacaaagaaaatccaaatgaataaaaggagaaacaatgagtggaaaatgatatggagcacccaacagtatacgcatacgccaggcaccacatgtccatccgcgactccgcgtcggtatccgtcaagaaattttcaacaaaaaaaaaacttaattttccactcctattcttccccgacgccggggaccagcgccagcgccaccaagaagtgacccacccaggtagccaggtaggtaaccgcccgtgccccgtcgccggcgatggcgaggtacgaggcgtcggcggccgcgccgggcgtagactttcaccttcccgacgagatcctggccgtgatccccaccgacccgtacgagcaactggacgtggcgcgcaagatcacctccatggccatcacctcccgcgtctcccgcctcgaggccgactctgggcgcctccgccgtgacctagccgaccgcgaccacgccgaggccgagctccgtgcccgcctcgccgactccgacgcgcgcctggccgccgctctcgacgagaacgcgaagctagcgaaggaaagggactcgctcgccgcgacgaccaaaaagctgaccaggaatttggcgaagttggaggcttttaagaaacaactgatgaaatcgttaagtgaagataatctattgcaactgtctgaaaccagtcaagatcacaacggagaagatattttgacagctcgagtcccgtattggaaagatgaagtttgtagcagtaacacttcttcagatacctccatcagatctacaataactgaatccatccatggtggaggataccagttctcaatcaaaacatatgtgcctccaaaattaactcctggctcaacacctatgatttcgtcttctagtggttctccccgagcttattcaactggcccaccctctcccaacttcttctctggtccgacttctcctacaaaagctcgatctgagggccaattgacattttcgtcatggcaaggatcatcaagtcatcagtattcagcacctacctctcctcaacgccactcattcacagggcggccacgtatagatgggaaggaattcttccggcaagcacggacaagactttcttatgagcaatttggagcatttttggccaacatcaaggagttcaatgctcaaaaacaatcacgggaggacaccctgtcaaaagcagaagagatttttggaacagaacacaaagacttgtacatttctttccagaatatgcttagtcgcaaccagtcatgaaaaatatgtcagaagcggtattttctgtctctaaatcaagcagatctttga

SEQ ID NO: 199272 - DNA, 3970 bp, Zea Mays
  misc_feature (3969)..(3970): n is a, c, g, or t
caccacgtcacaacagggcctccacaccgcctccctccgcccccttccgcttgcgcccacgaaccctaaccctaaccccgtcgccgccgcgggacctacccggctagcactcgcaccgcgccttcggcgtcatattcggcgcctgcgctctccgtcctcgcgcggcgagccggggtgctagggttttctagatggatccacgccgcgcacccccgcggggcgggggcgccaacgggctctcttactccacgctgttcaatctcgagcctttgctgaacttcagggttcctgtaccggaagatcttgcccgctacgagaatagcagctcaaatgggagtccaagcagtgaaggtcagggatccttattggatcagtacaatggtgtaaatgatgcttcccatggcctgcaccggaagcggaaaaggcatcttgacggtgccagcgatgatgatgaggcagatgcctatagtaacaaaataactgaggagcaataccgtgctatgctcagtgaacatgtccagaagtaccggaggtcaaagttcaaggagggtgcttttagttctgatcctcctcgtgtggcaacccctcaattaaaacacaaaaatggtggtaaaaaaaatatgaagcgcataagtgatttcagcgatgatgtggcattagatgggatagaagcctcacatgaatataatgggatagagtgtattaaaactcatggcggttttaataagcttgttgcaactcttgattccacttatttagatatgggggatagtacacgttacttagttccagagggttatgataagttagcatcatccctcaatctccctgtttcttctgatatacgtgtcgaggaacacttcttgaagggcatgctagatttacgcaccctagcagcaatgcttggtactgaccaaaggtttgaggcttccaatcgtggtggaatatctgaacccctgccacaatttgaatctctcaaagaaagggtaaaggtgcaggaattttctcttcaagttaccaaggacccctttgcaattccggaaggatcagctgggaggatacgaaggtatattatatcagaagctggcgatttgcaggttcattatgttagagtcatggaaaaaggagatacatatgagattatcgagcgtagcttaccgaagaagcaaatagtaaagaaggaaccttcggtaattatgaaagaagagtctgaaaagacttacaaactatggcagtctcttgctacaaaaagcataccaaagcatcacaagaattttactgctttgataaagaaacgacaagtagatgcgaagcgcttctctgatagttgtcaacgagaggtaaagctcaaagtaagcaggtcactgaaactgatgaggtgtgctgcagtacgcacaagaaagtttgttaaggatatgcagatgttttggaaacgtgtagacaaagagcagtatgagttgaggaaaaaagaggaaaaagaagctgctgaagctttgaaacgggaagaggagctacgtgaagccaaaagacagcaacataggctaaattttctgctgtcccaaacagagctttatagtcatttcatgcagaacaagactggtggttcagcgccgcctgatgaggaagatgtccctgatgaagaagatcctgaggaagctcaattgaaaagagaggccttgagagcagctcagcatgccgtctctcaacaaaagatgaagacaaatgcatttgatagtgaaattgtgaggcttcgtcaaacttctgattctgctcttccaactgatgattcatctagcatggaccctagcaagattgatctattacacccctcaacaatgcctgagacgtcttctgtgcagaccccggagttgtttaagggtgtattaaaagaatatcagttaaaaggcttacagtggctggttaattgttatgagcagggcttgaatggcattcttgctgatgagatgggtcttggcaaaactgttcaggctatggcattcctgtctcatttggctgaggacaaaaacatatggggcccctttcttgtggtggctcctgcatctgttgtgaataattgggctgaggagttgattagattctgccctgacctaaagatacttccttactggggtccagagaggatgattcttcgaaagaatatcaaccccaagcgtctgtatcgcagagatgctagctttcatattcttattacaaactatcagatacttgtgaatgaagagaagcttttgagacgtgttaaatggcaatacatggtattggatgaggcccaggctatcaaaagttcaagcagccagcgatggaagacattactgagcttcaactgtagaaaccgtcttcttcttactgggacaccaatacagaacaatatggctgagttatgggcacttcttcatttcattatgcccactctatttgacagccatgaacagttcaacgagtggttctcaaagggttgctgatgttttgacagtattgagggtcatgctgagcatggaggagctttgaatgaacatcaacttagtagattgcacgctattttgaagccctttatgctccgccgggttaagattgatgtcattgctgaaatgaccaaaaagaaagaagaaattgttccctgcaaattgagttctcgtcaacaagttttctatcaagccataaaaaataagatctcgcttaacgagttgcttgctggaagtcgtggcagtctaaatgacaagaagttacttagcctgatgaatattgtcatgcagttacggaaggtctgcaatcaccccgagctgtttgagcggaatgagggaagctcttacttcaactttgctgaaatcccaaactcacttctttctcccccatttggggaattgcaagatgtacactatgcaggcaagagaaatcccataatctttgagattccaaagttagtttatgagggaatcatctccaacatggaaaattctggaaacatctgtggatttcagaatggatatttgaacaggctgtttaatatatttttgcccagcaatatctatcgctcagccattccagaagttagttcatcaaaagagtctcttctatcatctggtgcatttggctttacacgtttgtcaaatctgtgcccagttgaagcttccttcctggctactgcttcattgtttgagagactagtcttttcagtaatgcaatggaatatgaactacactgctgaaattctggatgaattccttgattcagaagataccggcatccagtccagtcataatgattccacaaaagttcgtgcagttgcccgtttgttgctttcttctacaaaggtcaagcccagtttgcttaggacaaagattgggactgggccaattgatggcccatatgaagcactggtgctttctcatcgcgacaggctcgcttcaaacattaggcttcttcgttcagcatatgcttttattccgccagctagagcaccacctataaatgtttggtgtgctgatcgaaattttgcctataagttcaccgatgagatgtatgatccttgggccaagaaactgttcctgggatttgctcgtacttctgagttcaatggtcctagacaaccaattgctcctcatcctttgatacaagaacttaatactgatttgcccatcattgagccgatgctgcagctaccctataggatatttgggtcttctccaccgatgagtaattttgatccagctaaaatgctcactgattctgggaagctccacaccttggatatgctactacgacgccttcgagctgaaggtcatcgtgtgcttctttttgctcagatgactaaaatgttggacattcttgaggattacatgaatttcagaaaattcaagtatttcagacttgatgggtcttcagccatctcagaccgccgtgacatggtccgagattttcagaacaggaatgacatatttgttttcttgttann

SEQ ID NO: 199273 - DNA, 4004 bp, Zea Mays
  misc_feature (4003)..(4004): n is a, c, g, or t
ccaagccaaagccatgcctccttcgacttctacttcccccaccacgtcacaacagggcctccacaccgcctccctccgcccccttccgcttgcgcccacgaaccctaaccctaaccccgtcgccgccgcgggacctacccggctagcactcgcaccgcgccttcggcgtcatattcggcgcctgcgctctccgtcctcgcgcggcgagccggggtgctagggttttctagatggatccacgccgcgcacccccgcggggcgggggcgccaacgggctctcttactccacgctgttcaatctcgagcctttgctgaacttcagggttcctgtaccggaagatcttgcccgctacgagaatagcagctcaaatgggagtccaagcagtgaaggtcagggatccttattggatcagtacaatggtgtaaatgatgcttcccatggcctgcaccggaagcggaaaaggcatcttgacggtgccagcgatgatgatgaggcagatgcctatagtaacaaaataactgaggagcaataccgtgctatgctcagtgaacatgtccagaagtaccggaggtcaaagttcaaggagggtgcttttagttctgatcctcctcgtgtggcaacccctcaattaaaacacaaaaatggtggtaaaaaaaatatgaagcgcataagtgatttcagcgatgatgtggcattagatgggatagaagcctcacatgaatataatgggatagagtgtattaaaactcatggcggttttaataagcttgttgcaactcttgattccacttatttagatatgggggatagtacacgttacttagttccagagggttatgataagttagcatcatccctcaatctccctgtttcttctgatatacgtgtcgaggaacacttcttgaagggcatgctagatttacgcaccctagcagcaatgcttggtactgaccaaaggtttgaggcttccaatcgtggtggaatatctgaacccctgccacaatttgaatctctcaaagaaagggtaaaggtgcaggaattttctcttcaagttaccaaggacccctttgcaattccggaaggatcagctgggaggatacgaaggtatattatatcagaagctggcgatttgcaggttcattatgttagagtcatggaaaaaggagatacatatgagattatcgagcgtagcttaccgaagaagcaaatagtaaagaaggaaccttcggtaattatgaaagaagagtctgaaaagacttacaaactatggcagtctcttgctacaaaaagcataccaaagcatcacaagaattttactgctttgataaagaaacgacaagtagatgcgaagcgcttctctgatagttgtcaacgagaggtaaagctcaaagtaagcaggtcactgaaactgatgaggtgtgctgcagtacgcacaagaaagtttgttaaggatatgcagatgttttggaaacgtgtagacaaagagcagtatgagttgaggaaaaaagaggaaaaagaagctgctgaagctttgaaacgggaagaggagctacgtgaagccaaaagacagcaacataggctaaattttctgctgtcccaaacagagctttatagtcatttcatgcagaacaagactggtggttcagcgccgcctgatgaggaagatgtccctgatgaagaagatcctgaggaagctcaattgaaaagagaggccttgagagcagctcagcatgccgtctctcaacaaaagatgaagacaaatgcatttgatagtgaaattgtgaggcttcgtcaaacttctgattctgctcttccaactgatgattcatctagcatggaccctagcaagattgatctattacacccctcaacaatgcctgagacgtcttctgtgcagaccccggagttgtttaagggtgtattaaaagaatatcagttaaaaggcttacagtggctggttaattgttatgagcagggcttgaatggcattcttgctgatgagatgggtcttggcaaaactgttcaggctatggcattcctgtctcatttggctgaggacaaaaacatatggggcccctttcttgtggtggctcctgcatctgttgtgaataattgggctgaggagttgattagattctgccctgacctaaagatacttccttactggggtccagagaggatgattcttcgaaagaatatcaaccccaagcgtctgtatcgcagagatgctagctttcatattcttattacaaactatcagatacttgtgaatgaagagaagcttttgagacgtgttaaatggcaatacatggtattggatgaggcccaggctatcaaaagttcaagcagccagcgatggaagacattactgagcttcaactgtagaaaccgtcttcttcttactgggacaccaatacagaacaatatggctgagttatgggcacttcttcatttcattatgcccactctatttgacagccatgaacagttcaacgagtggttctcaaagggtattgagggtcatgctgagcatggaggagctttgaatgaacatcaacttagtagattgcacgctattttgaagccctttatgctccgccgggttaagattgatgtcattgctgaaatgaccaaaaagaaagaagaaattgttccctgcaaattgagttctcgtcaacaagttttctatcaagccataaaaaataagatctcgcttaacgagttgcttgctggaagtcgtggcagtctaaatgacaagaagttacttagcctgatgaatattgtcatgcagttacggaaggtctgcaatcaccccgagctgtttgagcggaatgagggaagctcttacttcaactttgctgaaatcccaaactcacttctttctcccccatttggggaattgcaagatgtacactatgcaggcaagagaaatcccataatctttgagattccaaagttagtttatgagggaatcatctccaacatggaaaattctggaaacatctgtggatttcagaatggatatttgaacaggctgtttaatatatttttgcccagcaatatctatcgctcagccattccagaagttagttcatcaaaagagtctcttctatcatctggtgcatttggctttacacgtttgtcaaatctgtgcccagttgaagcttccttcctggctactgcttcattgtttgagagactagtcttttcagtaatgcaatggaatatgaactacactgctgaaattctggatgaattccttgattcagaagataccggcatccagtccagtcataatgattccacaaaagttcgtgcagttgcccgtttgttgctttcttctacaaaggtcaagcccagtttgcttaggacaaagattgggactgggccaattgatggcccatatgaagcactggtgctttctcatcgcgacaggctcgcttcaaacattaggcttcttcgttcagcatatgcttttattccgccagctagagcaccacctataaatgtttggtgtgctgatcgaaattttgcctataagttcaccgatgagatgtatgatccttgggccaagaaactgttcctgggatttgctcgtacttctgagttcaatggtcctagacaaccaattgctcctcatcctttgatacaagaacttaatactgatttgcccatcattgagccgatgctgcagctaccctataggatatttgggtcttctccaccgatgagtaattttgatccagctaaaatgctcacttgcttgatgacaggattctgggaagctccacaccttggatatgctactacgacgccttcgagctgaaggtcatcgtgtgcttctttttgctcagatgactaaaatgttggacattcttgaggattacatgaatttcagaaaattcaagtatttcagacttgatgggtcttcagccatctcagaccgccgtgacatggtccgagattttcagaacaggaatgacatatttgttttcttgttann

SEQ ID NO: 199274 - DNA, 3980 bp, Zea Mays
  misc_feature (3979)..(3980): n is a, c, g, or t
ctcctctccccccttcgcggccaagccaaagccatgcctccttcgacttctacttcccccaccacgtcacaacagggcctccacaccgcctccctccgcccccttccgcttgcgcccacgaaccctaaccctaaccccgtcgccgccgcgggacctacccggctagcactcgcaccgcgccttcggcgtcatattcggcgcctgcgctctccgtcctcgcgcggcgagccggggtgctagggttttctagatggatccacgccgcgcacccccgcggggcgggggcgccaacgggctctcttactccacgctgttcaatctcgagcctttgctgaacttcagggttcctgtaccggaagatcttgcccgctacgagaatagcagctcaaatgggagtccaagcagtgaaggtcagggatccttattggatcagtacaatggtgtaaatgatgcttcccatggcctgcaccggaagcggaaaaggcatcttgacggtgccagcgatgatgatgaggcagatgcctatagtaacaaaataactgaggagcaataccgtgctatgctcagtgaacatgtccagaagtaccggaggtcaaagttcaaggagggtgcttttagttctgatcctcctcgtgtggcaacccctcaattaaaacacaaaaatggtggtaaaaaaaatatgaagcgcataagtgatttcagcgatgatgtggcattagatgggatagaagcctcacatgaatataatgggatagagtgtattaaaactcatggcggttttaataagcttgttgcaactcttgattccacttatttagatatgggggatagtacacgttacttagttccagagggttatgataagttagcatcatccctcaatctccctgtttcttctgatatacgtgtcgaggaacacttcttgaagggcatgctagatttacgcaccctagcagcaatgcttggtactgaccaaaggtttgaggcttccaatcgtggtggaatatctgaacccctgccacaatttgaatctctcaaagaaagggtaaaggtgcaggaattttctcttcaagttaccaaggacccctttgcaattccggaaggatcagctgggaggatacgaaggtatattatatcagaagctggcgatttgcaggttcattatgttagagtcatggaaaaaggagatacatatgagattatcgagcgtagcttaccgaagaagcaaatagtaaagaaggaaccttcggtaattatgaaagaagagtctgaaaagacttacaaactatggcagtctcttgctacaaaaagcataccaaagcatcacaagaattttactgctttgataaagaaacgacaagtagatgcgaagcgcttctctgatagttgtcaacgagaggtaaagctcaaagtaagcaggtcactgaaactgatgaggtgtgctgcagtacgcacaagaaagtttgttaaggatatgcagatgttttggaaacgtgtagacaaagagcagtatgagttgaggaaaaaagaggaaaaagaagctgctgaagctttgaaacgggaagaggagctacgtgaagccaaaagacagcaacataggctaaattttctgctgtcccaaacagagctttatagtcatttcatgcagaacaagactggtggttcagcgccgcctgatgaggaagatgtccctgatgaagaagatcctgaggaagctcaattgaaaagagaggccttgagagcagctcagcatgccgtctctcaacaaaagatgaagacaaatgcatttgatagtgaaattgtgaggcttcgtcaaacttctgattctgctcttccaactgatgattcatctagcatggaccctagcaagattgatctattacacccaccccggagttgtttaagggtgtattaaaagaatatcagttaaaaggcttacagtggctggttaattgttatgagcagggcttgaatggcattcttgctgatgagatgggtcttggcaaaactgttcaggctatggcattcctgtctcatttggctgaggacaaaaacatatggggcccctttcttgtggtggctcctgcatctgttgtgaataattgggctgaggagttgattagattctgccctgacctaaagatacttccttactggggtccagagaggatgattcttcgaaagaatatcaaccccaagcgtctgtatcgcagagatgctagctttcatattcttattacaaactatcagatacttgtgaatgaagagaagcttttgagacgtgttaaatggcaatacatggtattggatgaggcccaggctatcaaaagttcaagcagccagcgatggaagacattactgagcttcaactgtagaaaccgtcttcttcttactgggacaccaatacagaacaatatggctgagttatgggcacttcttcatttcattatgcccactctatttgacagccatgaacagttcaacgagtggttctcaaagggtattgagggtcatgctgagcatggaggagctttgaatgaacatcaacttagtagattgcacgctattttgaagccctttatgctccgccgggttaagattgatgtcattgctgaaatgaccaaaaagaaagaagaaattgttccctgcaaattgagttctcgtcaacaagttttctatcaagccataaaaaataagatctcgcttaacgagttgcttgctggaagtcgtggcagtctaaatgacaagaagttacttagcctgatgaatattgtcatgcagttacggaaggtctgcaatcaccccgagctgtttgagcggaatgagggaagctcttacttcaactttgctgaaatcccaaactcacttctttctcccccatttggggaattgcaagatgtacactatgcaggcaagagaaatcccataatctttgagattccaaagttagtttatgagggaatcatctccaacatggaaaattctggaaacatctgtggatttcagaatggatatttgaacaggctgtttaatatatttttgcccagcaatatctatcgctcagccattccagaagttagttcatcaaaagagtctcttctatcatctggtgcatttggctttacacgtttgtcaaatctgtgcccagttgaagcttccttcctggctactgcttcattgtttgagagactagtcttttcagtaatgcaatggaatatgaactacactgctgaaattctggatgaattccttgattcagaagataccggcatccagtccagtcataatgattccacaaaagttcgtgcagttgcccgtttgttgctttcttctacaaaggtcaagcccagtttgcttaggacaaagattgggactgggccaattgatggcccatatgaagcactggtgctttctcatcgcgacaggctcgcttcaaacattaggcttcttcgttcagcatatgcttttattccgccagctagagcaccacctataaatgtttggtgtgctgatcgaaattttgcctataagttcaccgatgagatgtatgatccttgggccaagaaactgttcctgggatttgctcgtacttctgagttcaatggtcctagacaaccaattgctcctcatcctttgatacaagaacttaatactgatttgcccatcattgagccgatgctgcagctaccctataggatatttgggtcttctccaccgatgagtaattttgatccagctaaaatgctcactgattctgggaagctccacaccttggatatgctactacgacgccttcgagctgaaggtcatcgtgtgcttctttttgctcagatgactaaaatgttggacattcttgaggattacatgaatttcagaaaattcaagtatttcagacttgatgggtcttcagccatctcagaccgccgtgacatggtccgagattttcagaacaggaatgacatatttgttttcttgttann

SEQ ID NO: 199275 - DNA, 4004 bp, Zea Mays
  misc_feature (4003)..(4004): n is a, c, g, or t
cttctcctctccccccttcgcggccaagccaaagccatgcctccttcgacttctacttcccccaccacgtcacaacagggcctccacaccgcctccctccgcccccttccgcttgcgcccacgaaccctaaccctaaccccgtcgccgccgcgggacctacccggctagcactcgcaccgcgccttcggcgtcatattcggcgcctgcgctctccgtcctcgcgcggcgagccggggtgctagggttttctagatggatccacgccgcgcacccccgcggggcgggggcgccaacgggctctcttactccacgctgttcaatctcgagcctttgctgaacttcagggttcctgtaccggaagatcttgcccgctacgagaatagcagctcaaatgggagtccaagcagtgaaggtcagggatccttattggatcagtacaatggtgtaaatgatgcttcccatggcctgcaccggaagcggaaaaggcatcttgacggtgccagcgatgatgatgaggcagatgcctatagtaacaaaataactgaggagcaataccgtgctatgctcagtgaacatgtccagaagtaccggaggtcaaagttcaaggagggtgcttttagttctgatcctcctcgtgtggcaacccctcaattaaaacacaaaaatggtggtaaaaaaaatatgaagcgcataagtgatttcagcgatgatgtggcattagatgggatagaagcctcacatgaatataatgggatagagtgtattaaaactcatggcggttttaataagcttgttgcaactcttgattccacttatttagatatgggggatagtacacgttacttagttccagagggttatgataagttagcatcatccctcaatctccctgtttcttctgatatacgtgtcgaggaacacttcttgaagggcatgctagatttacgcaccctagcagcaatgcttggtactgaccaaaggtttgaggcttccaatcgtggtggaatatctgaacccctgccacaatttgaatctctcaaagaaagggtaaaggtgcaggaattttctcttcaagttaccaaggacccctttgcaattccggaaggatcagctgggaggatacgaaggtatattatatcagaagctggcgatttgcaggttcattatgttagagtcatggaaaaaggagatacatatgagattatcgagcgtagcttaccgaagaagcaaatagtaaagaaggaaccttcggtaattatgaaagaagagtctgaaaagacttacaaactatggcagtctcttgctacaaaaagcataccaaagcatcacaagaattttactgctttgataaagaaacgacaagtagatgcgaagcgcttctctgatagttgtcaacgagaggtaaagctcaaagtaagcaggtcactgaaactgatgaggtgtgctgcagtacgcacaagaaagtttgttaaggatatgcagatgttttggaaacgtgtagacaaagagcagtatgagttgaggaaaaaagaggaaaaagaagctgctgaagctttgaaacgggaagaggagctacgtgaagccaaaagacagcaacataggctaaattttctgctgtcccaaacagagctttatagtcatttcatgcagaacaagactggtggttcagcgccgcctgatgaggaagatgtccctgatgaagaagatcctgaggaagctcaattgaaaagagaggccttgagagcagctcagcatgccgtctctcaacaaaagatgaagacaaatgcatttgatagtgaaattgtgaggcttcgtcaaacttctgattctgctcttccaactgatgattcatctagcatggaccctagcaagattgatctattacacccctcaacaatgcctgagacgtcttctgtgcagaccccggagttgtttaagggtgtattaaaagaatatcagttaaaaggcttacagtggctggttaattgttatgagcagggcttgaatggcattcttgctgatgagatgggtcttggcaaaactgttcaggctatggcattcctgtctcatttggctgaggacaaaaacatatggggcccctttcttgtggtggctcctgcatctgttgtgaataattgggctgaggagttgattagattctgccctgacctaaagatacttccttactggggtccagagaggatgattcttcgaaagaatatcaaccccaagcgtctgtatcgcagagatgctagctttcatattcttattacaaactatcagatacttgtgaatgaagagaagcttttgagacgtgttaaatggcaatacatggtattggatgaggcccaggctatcaaaagttcaagcagccagcgatggaagacattactgagcttcaactgtagaaaccgtcttcttcttactgggacaccaatacagaacaatatggctgagttatgggcacttcttcatttcattatgcccactctatttgacagccatgaacagttcaacgagtggttctcaaagggtattgagggtcatgctgagcatggaggagctttgaatgaacatcaacttagtagattgcacgctattttgaagccctttatgctccgccgggttaagattgatgtcattgctgaaatgaccaaaaagaaagaagaaattgttccctgcaaattgagttctcgtcaacaagttttctatcaagccataaaaaataagatctcgcttaacgagttgcttgctggaagtcgtggcagtctaaatgacaagaagttacttagcctgatgaatattgtcatgcagtctgcaatcaccccgagctgtttgagcggaatgagggaagctcttacttcaactttgctgaaatcccaaactcacttctttctcccccatttggggaattgcaagatgtacactatgcaggcaagagaaatcccataatctttgagattccaaagttagtttatgagggaatcatctccaacatggaaaattctggaaacatctgtggatttcagaatggatatttgaacaggctgtttaatatatttttgcccagcaatatctatcgctcagccattccagaagttagttcatcaaaagagtctcttctatcatctggtgcatttggctttacacgtttgtcaaatctgtgcccagttgaagcttccttcctggctactgcttcattgtttgagagactagtcttttcagtaatgcaatggaatatgaactacactgctgaaattctggatgaattccttgattcagaagataccggcatccagtccagtcataatgattccacaaaagttcgtgcagttgcccgtttgttgctttcttctacaaaggtcaagcccagtttgcttaggacaaagattgggactgggccaattgatggcccatatgaagcactggtgctttctcatcgcgacaggctcgcttcaaacattaggcttcttcgttcagcatatgcttttattccgccagctagagcaccacctataaatgtttggtgtgctgatcgaaattttgcctataagttcaccgatgagatgtatgatccttgggccaagaaactgttcctgggatttgctcgtacttctgagttcaatggtcctagacaaccaattgctcctcatcctttgatacaagaacttaatactgatttgcccatcattgagccgatgctgcagctaccctataggatatttgggtcttctccaccgatgagtaattttgatccagctaaaatgctcactgattctgggaagctccacaccttggatatgctactacgacgccttcgagctgaaggtcatcgtgtgcttctttttgctcagatgactaaaatgttggacattcttgaggattacatgaatttcagaaaattcaagtatttcagacttgatgggtcttcagccatctcagaccgccgtgacatggtccgagattttcagaacaggaatgacatatttgttttcttgttann

SEQ ID NO: 199276 - DNA, 4016 bp, Zea Mays
  misc_feature (4015)..(4016): n is a, c, g, or t
ttcgctttcctgctcccatcttctcctctccccccttcgcggccaagccaaagccatgcctccttcgacttctacttcccccaccacgtcacaacagggcctccacaccgcctccctccgcccccttccgcttgcgcccacgaaccctaaccctaaccccgtcgccgccgcgggacctacccggctagcactcgcaccgcgccttcggcgtcatattcggcgcctgcgctctccgtcctcgcgcggcgagccggggtgctagggttttctagatggatccacgccgcgcacccccgcggggcgggggcgccaacgggctctcttactccacgctgttcaatctcgagcctttgctgaacttcagggttcctgtaccggaagatcttgcccgctacgagaatagcagctcaaatgggagtccaagcagtgaaggtcagggatccttattggatcagtacaatggtgtaaatgatgcttcccatggcctgcaccggaagcggaaaaggcatcttgacggtgccagcgatgatgatgaggcagatgcctatagtaacaaaataactgaggagcaataccgtgctatgctcagtgaacatgtccagaagtaccggaggtcaaagttcaaggagggtgcttttagttctgatcctcctcgtgtggcaacccctcaattaaaacacaaaaatggtggtaaaaaaaatatgaagcgcataagtgatttcagcgatgatgtggcattagatgggatagaagcctcacatgaatataatgggatagagtgtattaaaactcatggcggttttaataagcttgttgcaactcttgattccacttatttagatatgggggatagtacacgttacttagttccagagggttatgataagttagcatcatccctcaatctccctgtttcttctgatatacgtgtcgaggaacacttcttgaagggcatgctagatttacgcaccctagcagcaatgcttggtactgaccaaaggtttgaggcttccaatcgtggtggaatatctgaacccctgccacaatttgaatctctcaaagaaagggtaaaggtgcaggaattttctcttcaagttaccaaggacccctttgcaattccggaaggatcagctgggaggatacgaaggtatattatatcagaagctggcgatttgcaggttcattatgttagagtcatggaaaaaggagatacatatgagattatcgagcgtagcttaccgaagaagcaaatagtaaagaaggaaccttcggtaattatgaaagaagagtctgaaaagacttacaaactatggcagtctcttgctacaaaaagcataccaaagcatcacaagaattttactgctttgataaagaaacgacaagtagatgcgaagcgcttctctgatagttgtcaacgagaggtaaagctcaaagtaagcaggtcactgaaactgatgaggtgtgctgcagtacgcacaagaaagtttgttaaggatatgcagatgttttggaaacgtgtagacaaagagcagtatgagttgaggaaaaaagaggaaaaagaagctgctgaagctttgaaacgggaagaggagctacgtgaagccaaaagacagcaacataggctaaattttctgctgtcccaaacagagctttatagtcatttcatgcagaacaagactggtggttcagcgccgcctgatgaggaagatgtccctgatgaagaagatcctgaggaagctcaattgaaaagagaggccttgagagcagctcagcatgccgtctctcaacaaaagatgaagacaaatgcatttgatagtgaaattgtgaggcttcgtcaaacttctgattctgctcttccaactgatgattcatctagcatggaccctagcaagattgatctattacacccctcaacaatgcctgagacgtcttctgtgcagaccccggagttgtttaagggtgtattaaaagaatatcagttaaaaggcttacagtggctggttaattgttatgagcagggcttgaatggcattcttgctgatgagatgggtcttggcaaaactgttcaggctatggcattcctgtctcatttggctgaggacaaaaacatatggggcccctttcttgtggtggctcctgcatctgttgtgaataattgggctgaggagttgattagattctgccctgacctaaagatacttccttactggggtccagagaggatgattcttcgaaagaatatcaaccccaagcgtctgtatcgcagagatgctagctttcatattcttattacaaactatcagatacttgtgaatgaagagaagcttttgagacgtgttaaatggcaatacatggtattggatgaggcccaggctatcaaaagttcaagcagccagcgatggaagacattactgagcttcaactgtagaaaccgtcttcttcttactgggacaccaatacagaacaatatggctgagttatgggcacttcttcatttcattatgcccactctatttgacagccatgaacagttcaacgagtggttctcaaagggtattgagggtcatgctgagcatggaggagctttgaatgaacatcaacttagtagattgcacgctattttgaagccctttatgctccgccgggttaagattgatgtcattgctgaaatgaccaaaaagaaagaagaaattgttccctgcaaattgagttctcgtcaacaagttttctatcaagccataaaaaataagatctcgcttaacgagttgcttgctggaagtcgtggcagtctaaatgacaagaagttacttagcctgatgaatattgtcatgcagttacggaaggtctgcaatcaccccgagctgtttgagcggaatgagggaagctcttacttcaactttgctgaaatcccaaactcacttctttctcccccatttggggaattgcaagatgtacactatgcaggcaagagaaatcccataatctttgagattccaaagttagtttatgagggaatcatctccaacatggaaaattctggaaacatctgtggatttcagaatggatatttgaacaggctgtttaatatatttttgcccagcaatatctatcgctcagccattccagaagttagttcatcaaaagagtctcttctatcatctggtgcatttggctttacacgtttgtcaaatctgtgcccagttgaagcttccttcctggctactgcttcattgtttgagagactagtcttttcagtaatgcaatggaatatgaactacactgctgaaattctggatgaattccttgattcagaagataccggcatccagtccagtcataatgattccacaaaagttcgtgcagttgcccgtttgttgctttcttctacaaaggtcaagcccagtttgcttaggacaaagattgggactgggccaattgatggcccatatgaagcactggtgctttctcatcgcgacaggctcgcttcaaacattaggcttcttcgttcagcatatgcttttattccgccagctagagcaccacctataaatgtttggtgtgctgatcgaaattttgcctataagttcaccgatgagatgtatgatccttgggccaagaaactgttcctgggatttgctcgtacttctgagttcaatggtcctagacaaccaattgctcctcatcctttgatacaagaacttaatactgatttgcccatcattgagccgatgctgcagctaccctataggatatttgggtcttctccaccgatgagtaattttgatccagctaaaatgctcactgattctgggaagctccacaccttggatatgctactacgacgccttcgagctgaaggtcatcgtgtgcttctttttgctcagatgactaaaatgttggacattcttgagaaaattcaagtatttcagacttgatgggtcttcagccatctcagaccgccgtgacatggtccgagattttcagaacaggaatgacatatttgttttcttgttann

SEQ ID NO: 199277 - DNA, 4033 bp, Zea Mays
  misc_feature (4032)..(4033): n is a, c, g, or t
ccggtttcgctttcctgctcccatcttctcctctccccccttcgcggccaagccaaagccatgcctccttcgacttctacttcccccaccacgtcacaacagggcctccacaccgcctccctccgcccccttccgcttgcgcccacgaaccctaaccctaaccccgtcgccgccgcgggacctacccggctagcactcgcaccgcgccttcggcgtcatattcggcgcctgcgctctccgtcctcgcgcggcgagccggggtgctagggttttctagatggatccacgccgcgcacccccgcggggcgggggcgccaacgggctctcttactccacgctgttcaatctcgagcctttgctgaacttcagggttcctgtaccggaagatcttgcccgctacgagaatagcagctcaaatgggagtccaagcagtgaagggatccttattggatcagtacaatggtgtaaatgatgcttcccatggcctgcaccggaagcggaaaaggcatcttgacggtgccagcgatgatgatgaggcagatgcctatagtaacaaaataactgaggagcaataccgtgctatgctcagtgaacatgtccagaagtaccggaggtcaaagttcaaggagggtgcttttagttctgatcctcctcgtgtggcaacccctcaattaaaacacaaaaatggtggtaaaaaaaatatgaagcgcataagtgatttcagcgatgatgtggcattagatgggatagaagcctcacatgaatataatgggatagagtgtattaaaactcatggcggttttaataagcttgttgcaactcttgattccacttatttagatatgggggatagtacacgttacttagttccagagggttatgataagttagcatcatccctcaatctccctgtttcttctgatatacgtgtcgaggaacacttcttgaagggcatgctagatttacgcaccctagcagcaatgcttggtactgaccaaaggtttgaggcttccaatcgtggtggaatatctgaacccctgccacaatttgaatctctcaaagaaagggtaaaggtgcaggaattttctcttcaagttaccaaggacccctttgcaattccggaaggatcagctgggaggatacgaaggtatattatatcagaagctggcgatttgcaggttcattatgttagagtcatggaaaaaggagatacatatgagattatcgagcgtagcttaccgaagaagcaaatagtaaagaaggaaccttcggtaattatgaaagaagagtctgaaaagacttacaaactatggcagtctcttgctacaaaaagcataccaaagcatcacaagaattttactgctttgataaagaaacgacaagtagatgcgaagcgcttctctgatagttgtcaacgagaggtaaagctcaaagtaagcaggtcactgaaactgatgaggtgtgctgcagtacgcacaagaaagtttgttaaggatatgcagatgttttggaaacgtgtagacaaagagcagtatgagttgaggaaaaaagaggaaaaagaagctgctgaagctttgaaacgggaagaggagctacgtgaagccaaaagacagcaacataggctaaattttctgctgtcccaaacagagctttatagtcatttcatgcagaacaagactggtggttcagcgccgcctgatgaggaagatgtccctgatgaagaagatcctgaggaagctcaattgaaaagagaggccttgagagcagctcagcatgccgtctctcaacaaaagatgaagacaaatgcatttgatagtgaaattgtgaggcttcgtcaaacttctgattctgctcttccaactgatgattcatctagcatggaccctagcaagattgatctattacacccctcaacaatgcctgagacgtcttctgtgcagaccccggagttgtttaagggtgtattaaaagaatatcagttaaaaggcttacagtggctggttaattgttatgagcagggcttgaatggcattcttgctgatgagatgggtcttggcaaaactgttcaggctatggcattcctgtctcatttggctgaggacaaaaacatatggggcccctttcttgtggtggctcctgcatctgttgtgaataattgggctgaggagttgattagattctgccctgacctaaagatacttccttactggggtccagagaggatgattcttcgaaagaatatcaaccccaagcgtctgtatcgcagagatgctagctttcatattcttattacaaactatcagatacttgtgaatgaagagaagcttttgagacgtgttaaatggcaatacatggtattggatgaggcccaggctatcaaaagttcaagcagccagcgatggaagacattactgagcttcaactgtagaaaccgtcttcttcttactgggacaccaatacagaacaatatggctgagttatgggcacttcttcatttcattatgcccactctatttgacagccatgaacagttcaacgagtggttctcaaagggtattgagggtcatgctgagcatggaggagctttgaatgaacatcaacttagtagattgcacgctattttgaagccctttatgctccgccgggttaagattgatgtcattgctgaaatgaccaaaaagaaagaagaaattgttccctgcaaattgagttctcgtcaacaagttttctatcaagccataaaaaataagatctcgcttaacgagttgcttgctggaagtcgtggcagtctaaatgacaagaagttacttagcctgatgaatattgtcatgcagttacggaaggtctgcaatcaccccgagctgtttgagcggaatgagggaagctcttacttcaactttgctgaaatcccaaactcacttctttctcccccatttggggaattgcaagatgtacactatgcaggcaagagaaatcccataatctttgagattccaaagttagtttatgagggaatcatctccaacatggaaaattctggaaacatctgtggatttcagaatggatatttgaacaggctgtttaatatatttttgcccagcaatatctatcgctcagccattccagaagttagttcatcaaaagagtctcttctatcatctggtgcatttggctttacacgtttgtcaaatctgtgcccagttgaagcttccttcctggctactgcttcattgtttgagagactagtcttttcagtaatgcaatggaatatgaactacactgctgaaattctggatgaattccttgattcagaagataccggcatccagtccagtcataatgattccacaaaagttcgtgcagttgcccgtttgttgctttcttctacaaaggtcaagcccagtttgcttaggacaaagattgggactgggccaattgatggcccatatgaagcactggtgctttctcatcgcgacaggctcgcttcaaacattaggcttcttcgttcagcatatgcttttattccgccagctagagcaccacctataaatgtttggtgtgctgatcgaaattttgcctataagttcaccgatgagatgtatgatccttgggccaagaaactgttcctgggatttgctcgtacttctgagttcaatggtcctagacaaccaattgctcctcatcctttgatacaagaacttaatactgatttgcccatcattgagccgatgctgcagctaccctataggatatttgggtcttctccaccgatgagtaattttgatccagctaaaatgctcactgattctgggaagctccacaccttggatatgctactacgacgccttcgagctgaaggtcatcgtgtgcttctttttgctcagatgactaaaatgttggacattcttgaggattacatgaatttcagaaaattcaagtatttcagacttgatgggtcttcagccatctcagaccgccgtgacatggtccgagattttcagaacaggaatgacatatttgttttcttgttann

SEQ ID NO: 199278 - DNA, 4261 bp, Zea Mays
  misc_feature (4260)..(4261): n is a, c, g, or t
cccattcggagttccggtttcgctttcctgctcccatcttctcctctccccccttcgcggccaagccaaagccatgcctccttcgacttctacttcccccaccacgtcacaacagggcctccacaccgcctccctccgcccccttccgcttgcgcccacgaaccctaaccctaaccccgtcgccgccgcgggacctacccggctagcactcgcaccgcgccttcggcgtcatattcggcgcctgcgctctccgtcctcgcgcggcgagccggggtgctagggttttctagatggatccacgccgcgcacccccgcggggcgggggcgccaacgggctctcttactccacgctgttcaatctcgagcctttgctgaacttcagggttcctgtaccggaagatcttgcccgctacgagaatagcagctcaaatgggagtccaagcagtgaaggtcagggatccttattggatcagtacaatggtgtaaatgatgcttcccatggcctgcaccggaagcggaaaaggcatcttgacggtgccagcgatgatgatgaggcagatgcctatagtaacaaaataactgaggagcaataccgtgctatgctcagtgaacatgtccagaagtaccggaggtcaaagttcaaggagggtgcttttagttctgatcctcctcgtgtggcaacccctcaattaaaacacaaaaatggtggtaaaaaaaatatgaagcgcataagtgatttcagcgatgatgtggcattagatgggatagaagcctcacatgaatataatgggatagagtgtattaaaactcatggcggttttaataagcttgttgcaactcttgattccacttatttagatatgggggatagtacacgttacttagttccagagggttatgataagttagcatcatccctcaatctccctgtttcttctgatatacgtgtcgaggaacacttcttgaagggcatgctagatttacgcaccctagcagcaatgcttggtactgaccaaaggtttgaggcttccaatcgtggtggaatatctgaacccctgccacaatttgaatctctcaaagaaagggtaaaggtgcaggaattttctcttcaagttaccaaggacccctttgcaattccggaaggatcagctgggaggatacgaaggtatattatatcagaagctggcgatttgcaggttcattatgttagagtcatggaaaaaggagatacatatgagattatcgagcgtagcttaccgaagaagcaaatagtaaagaaggaaccttcggtaattatgaaagaagagtctgaaaagacttacaaactatggcagtctcttgctacaaaaagcataccaaagcatcacaagaattttactgctttgataaagaaacgacaagtagatgcgaagcgcttctctgatagttgtcaacgagaggtaaagctcaaagtaagcaggtcactgaaactgatgaggtgtgctgcagtacgcacaagaaagtttgttaaggatatgcagatgttttggaaacgtgtagacaaagagcagtatgagttgaggaaaaaagaggaaaaagaagctgctgaagctttgaaacgggaagaggagctacgtgaagccaaaagacagcaacataggctaaattttctgctgtcccaaacagagctttatagtcatttcatgcagaacaagactggtggttcagcgccgcctgatgaggaagatgtccctgatgaagaagatcctgaggaagctcaattgaaaagagaggccttgagagcagctcagcatgccgtctctcaacaaaagatgaagacaaatgcatttgatagtgaaattgtgaggcttcgtcaaacttctgattctgctcttccaactgatgattcatctagcatggaccctagcaagattgatctattacacccctcaacaatgcctgagacgtcttctgtgcagaccccggagttgtttaagggtgtattaaaagaatatcagttaaaaggcttacagtggctggttaattgttatgagcagggcttgaatggcattcttgctgatgagatgggtcttggcaaaactgttcaggctatggcattcctgtctcatttggctgaggacaaaaacatatggggcccctttcttgtggtggctcctgcatctgttgtgaataattgggctgaggagttgattagattctgccctgacctaaagatacttccttactggggtccagagaggatgattcttcgaaagaatatcaaccccaagcgtctgtatcgcagagatgctagctttcatattcttattacaaactatcagatacttgtgaatgaagagaagcttttgagacgtgttaaatggcaatacatggtattggatgaggcccaggctatcaaaagttcaagcagccagcgatggaagacattactgagcttcaactgtagaaaccgtcttcttcttactgggacaccaatacagaacaatatggctgagttatgggcacttcttcatttcattatgcccactctatttgacagccatgaacagttcaacgagtggttctcaaagggtattgagggtcatgctgagcatggaggagctttgaatgaacatcaacttagtagattgcacgctattttgaagccctttatgctccgccgggttaagattgatgtcattgctgaaatgaccaaaaagaaagaagaaattgttccctgcaaattgagttctcgtcaacaagttttctatcaagccataaaaaataagatctcgcttaacgagttgcttgctggaagtcgtggcagtctaaatgacaagaagttacttagcctgatgaatattgtcatgcagttacggaaggtctgcaatcaccccgagctgtttgagcggaatgagggaagctcttacttcaactttgctgaaatcccaaactcacttctttctcccccatttggggaattgcaagatgtacactatgcaggcaagagaaatcccataatctttgagattccaaagttagtttatgagggaatcatctccaacatggaaaattctggaaacatctgtggatttcagaatggatatttgaacaggctgtttaatatatttttgcccagcaatatctatcgctcagccattccagaagttagttcatcaaaagagtctcttctatcatctggtgcatttggctttacacgtttgtcaaatctgtgcccagttgaagcttccttcctggctactgcttcattgtttgagagactagtcttttcagtaatgcaatggaatatgaactacactgctgaaattctggatgaattccttgattcagaagataccggcatccagtccagtcataatgattccacaaaagttcgtgcagttgcccgtttgttgctttcttctacaaaggtcaagcccagtttgcttaggacaaagattgggactgggccaattgatggcccatatgaagcactggtgctttctcatcgcgacaggctcgcttcaaacattaggcttcttcgttcagcatatgcttttattccgccagctagagcaccacctgtgagtccatttgtcttgtccatgtgggtttcttttgtatattgcattgcatgaggccatcagtgtctatagtcatctgagtacattttttgctctaaatgttaaaagagtttggaacctccaagtattgtaagagttgttcttttacatctatctgtttttatcacatatattgtcagtgttcattaacagccctttccccttcaccagataaatgtttggtgtgctgatcgaaattttgcctataagttcaccgatgagatgtatgatccttgggccaagaaactgttcctgggatttgctcgtacttctgagttcaatggtcctagacaaccaattgctcctcatcctttgatacaagaacttaatactgatttgcccatcattgagccgatgctgcagctaccctataggatatttgggtcttctccaccgatgagtaattttgatccagctaaaatgctcactgattctgggaagctccacaccttggatatgctactacgacgccttcgagctgaaggtcatcgtgtgcttctttttgctcagatgactaaaatgttggacattcttgaggattacatgaatttcagaaaattcaagtatttcagacttgatgggtcttcagccatctcagaccgccgtgacatggtccgagattttcagaacaggaatgacatatttgttttcttgttann

SEQ ID NO: 199279 - DNA, 4049 bp, Zea Mays
  misc_feature (4048)..(4049): n is a, c, g, or t
gtcccattcggagttccggtttcgctttcctgctcccatcttctcctctccccccttcgcggccaagccaaagccatgcctccttcgacttctacttcccccaccacgtcacaacagggcctccacaccgcctccctccgcccccttccgcttgcgcccacgaaccctaaccctaaccccgtcgccgccgcgggacctacccggctagcactcgcaccgcgccttcggcgtcatattcggcgcctgcgctctccgtcctcgcgcggcgagccggggtgctagggttttctagatggatccacgccgcgcacccccgcggggcgggggcgccaacgggctctcttactccacgctgttcaatctcgagcctttgctgaacttcagggttcctgtaccggaagatcttgcccgctacgagaatagcagctcaaatgggagtccaagcagtgaaggtcagggatccttattggatcagtacaatggtgtaaatgatgcttcccatggcctgcaccggaagcggaaaaggcatcttgacggtgccagcgatgatgatgaggcagatgcctatagtaacaaaataactgaggagcaataccgtgctatgctcagtgaacatgtccagaagtaccggaggtcaaagttcaaggagggtgcttttagttctgatcctcctcgtgtggcaacccctcaattaaaacacaaaaatggtggtaaaaaaaatatgaagcgcataagtgatttcagcgatgatgtggcattagatgggatagaagcctcacatgaatataatgggatagagtgtattaaaactcatggcggttttaataagcttgttgcaactcttgattccacttatttagatatgggggatagtacacgttacttagttccagagggttatgataagttagcatcatccctcaatctccctgtttcttctgatatacgtgtcgaggaacacttcttgaagggcatgctagatttacgcaccctagcagcaatgcttggtactgaccaaaggtttgaggcttccaatcgtggtggaatatctgaacccctgccacaatttgaatctctcaaagaaagggtaaaggtgcaggaattttctcttcaagttaccaaggacccctttgcaattccggaaggatcagctgggaggatacgaaggtatattatatcagaagctggcgatttgcaggttcattatgttagagtcatggaaaaaggagatacatatgagattatcgagcgtagcttaccgaagaagcaaatagtaaagaaggaaccttcggtaattatgaaagaagagtctgaaaagacttacaaactatggcagtctcttgctacaaaaagcataccaaagcatcacaagaattttactgctttgataaagaaacgacaagtagatgcgaagcgcttctctgatagttgtcaacgagaggtaaagctcaaagtaagcaggtcactgaaactgatgaggtgtgctgcagtacgcacaagaaagtttgttaaggatatgcagatgttttggaaacgtgtagacaaagagcagtatgagttgaggaaaaaagaggaaaaagaagctgctgaagctttgaaacgggaagaggagctacgtgaagccaaaagacagcaacataggctaaattttctgctgtcccaaacagagctttatagtcatttcatgcagaacaagactggtggttcagcgccgcctgatgaggaagatgtccctgatgaagaagatcctgaggaagctcaattgaaaagagaggccttgagagcagctcagcatgccgtctctcaacaaaagatgaagacaaatgcatttgatagtgaaattgtgaggcttcgtcaaacttctgattctgctcttccaactgatgattcatctagcatggaccctagcaagattgatctattacacccctcaacaatgcctgagacgtcttctgtgcagaccccggagttgtttaagggtgtattaaaagaatatcagttaaaaggcttacagtggctggttaattgttatgagcagggcttgaatggcattcttgctgatgagatgggtcttggcaaaactgttcaggctatggcattcctgtctcatttggctgaggacaaaaacatatggggcccctttcttgtggtggctcctgcatctgttgtgaataattgggctgaggagttgattagattctgccctgacctaaagatacttccttactggggtccagagaggatgattcttcgaaagaatatcaaccccaagcgtctgtatcgcagagatgctagctttcatattcttattacaaactatcagatacttgtgaatgaagagaagcttttgagacgtgttaaatggcaatacatggtattggatgaggcccaggctatcaaaagttcaagcagcgatggaagacattactgagcttcaactgtagaaaccgtcttcttcttactgggacaccaatacagaacaatatggctgagttatgggcacttcttcatttcattatgcccactctatttgacagccatgaacagttcaacgagtggttctcaaagggtattgagggtcatgctgagcatggaggagctttgaatgaacatcaacttagtagattgcacgctattttgaagccctttatgctccgccgggttaagattgatgtcattgctgaaatgaccaaaaagaaagaagaaattgttccctgcaaattgagttctcgtcaacaagttttctatcaagccataaaaaataagatctcgcttaacgagttgcttgctggaagtcgtggcagtctaaatgacaagaagttacttagcctgatgaatattgtcatgcagttacggaaggtctgcaatcaccccgagctgtttgagcggaatgagggaagctcttacttcaactttgctgaaatcccaaactcacttctttctcccccatttggggaattgcaagatgtacactatgcaggcaagagaaatcccataatctttgagattccaaagttagtttatgagggaatcatctccaacatggaaaattctggaaacatctgtggatttcagaatggatatttgaacaggctgtttaatatatttttgcccagcaatatctatcgctcagccattccagaagttagttcatcaaaagagtctcttctatcatctggtgcatttggctttacacgtttgtcaaatctgtgcccagttgaagcttccttcctggctactgcttcattgtttgagagactagtcttttcagtaatgcaatggaatatgaactacactgctgaaattctggatgaattccttgattcagaagataccggcatccagtccagtcataatgattccacaaaagttcgtgcagttgcccgtttgttgctttcttctacaaaggtcaagcccagtttgcttaggacaaagattgggactgggccaattgatggcccatatgaagcactggtgctttctcatcgcgacaggctcgcttcaaacattaggcttcttcgttcagcatatgcttttattccgccagctagagcaccacctataaatgtttggtgtgctgatcgaaattttgcctataagttcaccgatgagatgtatgatccttgggccaagaaactgttcctgggatttgctcgtacttctgagttcaatggtcctagacaaccaattgctcctcatcctttgatacaagaacttaatactgatttgcccatcattgagccgatgctgcagctaccctataggatatttgggtcttctccaccgatgagtaattttgatccagctaaaatgctcactgattctgggaagctccacaccttggatatgctactacgacgccttcgagctgaaggtcatcgtgtgcttctttttgctcagatgactaaaatgttggacattcttgaggattacatgaatttcagaaaattcaagtatttcagacttgatgggtcttcagccatctcagaccgccgtgacatggtccgagattttcagaacaggaatgacatatttgttttcttgttann

SEQ ID NO: 199280 - DNA, 2648 bp, Zea Mays
ctccgccgtgcttgcgcttcctcacccgcgcaatttgcacgcgctccccccgcgacagtcgccacgctcgcacgcactccctctgcaatagctgtcatgcgccctatctccgtcgcatcccgcccgctcgccacgcttgattcctcctttcaatggtgcccacgccgtccaatcccgcccgcggtccttccccacgcggatcccccacccctcctccccaccgccgccgcaacaaatccgcgcacctcgatctgctcaagtgagcgtggctcaacgagaaggccacgtcagatatcctcagcttcgaatcgcccctcgcgttacgtgtccgcgagcagatccagcacctcatacgctcttctccctcccccttcttgaccacgttcctccactcccccccatagctctgggatctggccatggctccctctcctggtgtcgtgtcacccaggaggcggcgctcgatgacttcgtcgacgatggcgttgacgacctggtggtctcgctctaccagatggacctcgatctcacgctcttcctcctccgctcctaactcctcccggagaagatcaagaagtacacgatgcatatctctagggccacggccgaggcgactggtgaagttgcggcaatctgatgcgggaggtggccgacctcatccttagcttccctgacgagacgcccgtcgtcgtcctctctgccatggggaagaccaccaataacctcctcctgctaacaaggatagatgcgtgtgtgcctgattcgttgtctgtggaggccggagagaatgcggtgagctgcggtgcccccaaggcgtccgaaatccctaagctcgctgtcatcaaggacctgcatcttaggacggttgatgagcttggtttagataagtcgattgtttcagggttccacatgcacattcaccgagtcaatcctgcgatcgtgtggcttccatactgggctgttcacctcaccacatttgatggatgttagagagcgatttcagctagggttaatatttgaatatttctgaagagaaatttttgaagtacttctggtggtgctggaacaagttgaaggagaagactgatgatgatattcccatgccagcctatttcaggttcctcgcgctgctcgcattcaagatattttctgctgagcaggtagatgttgctgttctcgaggttggcctaggagggaagtttgatgcaactaatgtggttaaagcacctgtagtttgtggcatatcttcccttggatatgatcatatggaaattcttggtgaccaaatcctgttcttggtgataaacttggtgtcgataaacgggttaattctgttggcaaaattaggatgacacaggtgacatgaagatgccaagtcggtgcatccatactaattgcgactttggtctgtttggacctctggtaaacgacgtagtaggtttggagacctggaactacaaatcaatagtattgggacttaagtgacaacctgaacaagtttaggaacaacttgctagaaaatttttatgctttctaccaatcttacaacgataatttgaaagttgatatttatggtacttatttggtccaggaactagattttttgtacattctttcggatctggattaaacaacgctctctttgtatatgaacaatgctctataaatatacgtttgataattttatatgatatttaataaatagtagctactgtgactgtttcattttgtttttcttaggttgttagttctcatgaatgtcatgttgtctcgaaataaagagcttctgtccgcacctaatcgcctaaaatggaaatgtttgactcattgtttaattcggggggaagctgaaggtggtctgatccggtaagagatcttaatctgcattacacttgttggattttgatgtcgcttctgggagtgtttgattgaattctacaccagttctaggaagagaaagcctgaccaagtcatcatctccaggtttgttattgtttggatgcaaaaatcgtcgttagttaacttttttgtgttgaagtaactgtttggttgagaaaattagttgcctatcttctattttctctgttttgttatagcagcaagctgatttgtgtctaatttatagggacgatgttagcgaaagtcaatttaatcaggtgctgaacattgagttgcaacaaatcatcgatggagactgtcaccgcagccagaaaaccacggtctcaatttgaggagcctttccatctatgtttgttagaaggcatataatgcctatttatctcttgtattcgaacatttggcaattaagaaatagaagattacttccccaatatcccttattcctaatctcacctttcacggcttctggtgaacaatcacttgctattaccgactgacatgtccactcctcatatgtgagatattggggttgatatatatgttgttcgtttccatgtaattattgtgtactaacatttattgaataatttttacgccgtaacaacgtacgggcactcacctagtgtctgatggaaagggaactgttcgggtgggttagataaaataatatctgaaaaactgcaaggtaagaccatggagcagtaagatgaaactatcatagtgaaagggaaataggcttacaccttttc

SEQ ID NO: 199281 - DNA, 2279 bp, Zea Mays
ccgcgacagtcgccacgctcgcacgcactccctctgcaatagctgtcatgcgccctatctccgtcgcatcccgcccgctcgccacgcttgattcctcctttcaatggtgcccacgccgtccaatcccgcccgcggtccttccccacgcggatcccccacccctcctccccaccgccgccgcaacaaatccgcgcacctcgatctgctcaagtgagcgtggctcaacgagaaggccacgtcagatatcctcagcttcgaatcgcccctcgcgttacgtgtccgcgagcagatccagcacctcatacgctcttctccctcccccttcttgaccacgttcctccactcccccccatagctctgggatctggccatggctccctctcctggtgtcgtgtcacccaggaggcggcgctcgatgacttcgtcgacgatggcgttgacgacctggtggtctcgctctaccagatggacctcgatctcacgctcttcctcctccgctcctaactcctcccggagaagatcaagaagtacacgatgcatatctctagggccacggccgaggcgactggtgaagttgcggcaatctgatgcgggaggtggccgacctcatccttagcttccctgacgagacgcccgtcgtcgtcctctctgccatggggaagaccaccaataacctcctcctggccggagagaatgcggtgagctgcggtgcccccaaggcgtccgaaatccctaagctcgctgtcatcaaggacctgcatcttaggacggttgatgagcttggtttagataagtcgattgtttcagggttccacatgcacattcaccgagtcaatcctgcgatcgtgtggcttccatactgggctgttcacctcaccacatttgatggatgttagagagcgatttcagctaggtgggtaattctttttcctaccattctttcatcttatacacctgcatctggctgtggtgttgacaatagtggatcctatgaacttccaaatgattttttgtatgtaaacatcctgtgtcatctttcttgtgctgtccctgtaattaggtgctatgaaatttatgatcgcactgacctagctcctcctttttgagggcatcagggttaatatttgaatatttctgaagagaaatttttgaagtacttctggtggtgctggaacaagttgaaggtaagtgtcttgatttgttgttccatataaagtcactctgcgctcgacgtttactacctagaagtgacaaagctcaaactactgaattgattccatcaggaacttttttgcatctgtcatataatctgtctaatctcatcatgctgcttttattctatataaactggtggatgatgagataaatgggcttacttccaggagaagactgatgatgatattcccatgccagcctatttcaggttcctcgcgctgctcgcattcaagatattttctgctgagcaggtagatgttgctgttctcgaggttggcctaggagggaagtttgatgcaactaatgtggttaaagcacctgtagtttgtggcatatcttcccttggatatgatcatatggaaattcttggtgaccaaatcctgttcttggtgataaacttggtgtcgataaacgggttgttagttctcatgaatgtcatgttgtctcgaaataaagagcttctgtccgcacctaatcgcctaaaatggaaatgtttgactcattgtttaattcggggggaagctgaaggtggtctgatccgggacgatgttagcgaaagtcaatttaatcaggtgctgaacattgagttgcaacaaatcatcgatggagactgtcaccgcagccagaaaaccacggtctcaatttgaggagcctttccatctatgtttgttagaaggcatataatgcctatttatctcttgtattcgaacatttggcaattaagaaatagaagattacttccccaatatcccttattcctaatctcacctttcacggcttctggtgaacaatcacttgctattaccgactgacatgtccactcctcatatgtgagatattggggttgatatatatgttgttcgtttccatgtaattattgtgtactaacatttattgaataatttttacgccgtaacaacgtacgggcactcacctagtgtctgatggaaagggaactgttcgggtgggttagataaaataatatctgaaaaactgcaaggtaagaccatggagcagtaagatgaaactatcatagtgaaagggaaataggcttacaccttttc

SEQ ID NO: 199282 - DNA, 2174 bp, Zea Mays
ccgcgacagtcgccacgctcgcacgcactccctctgcaatagctgtcatgcgccctatctccgtcgcatcccgcccgctcgccacgcttgattcctcctttcaatggtgcccacgccgtccaatcccgcccgcggtccttccccacgcggatcccccacccctcctccccaccgccgccgcaacaaatccgcgcacctcgatctgctcaagtgagcgtggctcaacgagaaggccacgtcagatatcctcagcttcgaatcgcccctcgcgttacgtgtccgcgagcagatccagcacctcatacgctcttctccctcccccttcttgaccacgttcctccactcccccccatagctctgggatctggccatggctccctctcctggtgtcgtgtcacccaggaggcggcgctcgatgacttcgtcgacgatggcgttgacgacctggtggtctcgctctaccagatggacctcgatctcacgctcttcctcctccgctcctaactcctcccggagaagatcaagaagtacacgatgcatatctctagggccacggccgaggcgactggtgaagttgcggcaatctgatgcgggaggtggccgacctcatccttagcttccctgacgagacgcccgtcgtcgtcctctctgccatggggaagaccaccaataacctcctcctggccggagagaatgcggtgagctgcggtgcccccaaggcgtccgaaatccctaagctcgctgtcatcaaggacctgcatcttaggacggttgatgagcttggtttagataagtcgattgtttcagggttccacatgcacattcaccgagtcaatcctgcgatcgtgtggcttccatactgggctgttcacctcaccacatttgatggatgttagagagcgatttcagctaggtgggttaatatttgaatatttctgaagagaaatttttgaagtacttctggtggtgctggaacaagttgaaggagaagactgatgatgatattcccatgccagcctatttcaggttcctcgcgctgctcgcattcaagatattttctgctgagcaggtagatgttgctgttctcgaggttggcctaggagggaagtttgatgcaactaatgtggttaaagcacctgtagtttgtggcatatcttcccttggatatgatcatatggaaattcttggtgaccaaatcctgttcttggtgataaacttggtgtcgataaacgggttaattctgttggcaaaattaggatgacacaggttgttagttctcatgaatgtcatgttgtctcgaaataaagagcttctgtccgcacctaatcgcctaaaatggaaatgtttgactcattgtttaattcggggggaagctgaaggtggtctgatccggtaagagatcttaatctgcattacacttgttggattttgatgtcgcttctgggagtgtttgattgaattctacaccagttctaggaagagaaagcctgaccaagtcatcatctccaggtttgttattgtttggatgcaaaaatcgtcgttagttaacttttttgtgttgaagtaactgtttggttgagaaaattagttgcctatcttctattttctctgttttgttatagcagcaagctgatttgtgtctaatttatagggacgatgttagcgaaagtcaatttaatcaggtgctgaacattgagttgcaacaaatcatcgatggagactgtcaccgcagccagaaaaccacggtctcaatttgaggagcctttccatctatgtttgttagaaggcatataatgcctatttatctcttgtattcgaacatttggcaattaagaaatagaagattacttccccaatatcccttattcctaatctcacctttcacggcttctggtgaacaatcacttgctattaccgactgacatgtccactcctcatatgtgagatattggggttgatatatatgttgttcgtttccatgtaattattgtgtactaacatttattgaataatttttacgccgtaacaacgtacgggcactcacctagtgtctgatggaaagggaactgttcgggtgggttagataaaataatatctgaaaaactgcaaggtaagaccatggagcagtaagatgaaactatcatagtgaaagggaaataggcttacaccttttc

SEQ ID NO: 199283 - DNA, 2290 bp, Zea Mays
ccgcgacagtcgccacgctcgcacgcactccctctgcaatagctgtcatgcgccctatctccgtcgcatcccgcccgctcgccacgcttgattcctcctttcaatggtgcccacgccgtccaatcccgcccgcggtccttccccacgcggatcccccacccctcctccccaccgccgccgcaacaaatccgcgcacctcgatctgctcaagtgagcgtggctcaacgagaaggccacgtcagatatcctcagcttcgaatcgcccctcgcgttacgtgtccgcgagcagatccagcacctcatacgctcttctccctcccccttcttgaccacgttcctccactcccccccatagctctgggatctggccatggctccctctcctggtgtcgtgtcacccaggaggcggcgctcgatgacttcgtcgacgatggcgttgacgacctggtggtctcgctctaccagatggacctcgatctcacgctcttcctcctccgctcctaactcctcccggagaagatcaagaagtacacgatgcatatctctagggccacggccgaggcgactggtgaagttgcggcaatctgatgcgggaggtggccgacctcatccttagcttccctgacgagacgcccgtcgtcgtcctctctgccatggggaagaccaccaataacctcctcctggccggagagaatgcggtgagctgcggtgcccccaaggcgtccgaaatccctaagctcgctgtcatcaaggacctgcatcttaggacggttgatgagcttggtttagataagtcgattgtttcagggttccacatgcacattcaccgagtcaatcctgcgatcgtgtggcttccatactgggctgttcacctcaccacatttgatggatgttagagagcgatttcagctagggttaatatttgaatatttctgaagagaaatttttgaagtacttctggtggtgctggaacaagttgaaggtaagtgtcttgatttgttgttccatataaagtcactctgcgctcgacgtttactacctagaagtgacaaagctcaaactactgaattgattccatcaggaacttttttgcatctgtcatataatctgtctaatctcatcatgctgcttttattctatataaactggtggatgatgagataaatgggcttacttccaggagaagactgatgatgatattcccatgccagcctatttcaggttcctcgcgctgctcgcattcaagatattttctgctgagcaggtagatgttgctgttctcgaggttggcctaggagggaagtttgatgcaactaatgtggttaaagcacctgtagtttgtggcatatcttcccttggatatgatcatatggaaattcttggttgttagttctcatgaatgtcatgttgtctcgaaataaagagcttctgtccgcacctaatcgcctaaaatggaaatgtttgactcattgtttaattcggggggaagctgaaggtggtctgatccggtaagagatcttaatctgcattacacttgttggattttgatgtcgcttctgggagtgtttgattgaattctacaccagttctaggaagagaaagcctgaccaagtcatcatctccaggtttgttattgtttggatgcaaaaatcgtcgttagttaacttttttgtgttgaagtaactgtttggttgagaaaattagttgcctatcttctattttctctgttttgttatagcagcaagctgatttgtgtctaatttatagggacgatgttagcgaaagtcaatttaatcaggtgctgaacattgagttgcaacaaatcatcgatggagactgtcaccgcagccagaaaaccacggtctcaatttgaggagcctttccatctatgtttgttagaaggcatataatgcctatttatctcttgtattcgaacatttggcaattaagaaatagaagattacttccccaatatcccttattcctaatctcacctttcacggcttctggtgaacaatcacttgctattaccgactgacatgtccactcctcatatgtgagatattggggttgatatatatgttgttcgtttccatgtaattattgtgtactaacatttattgaataatttttacgccgtaacaacgtacgggcactcacctagtgtctgatggaaagggaactgttcgggtgggttagataaaataatatctgaaaaactgcaaggtaagaccatggagcagtaagatgaaactatcatagtgaaagggaaataggcttacaccttttc

SEQ ID NO: 199284 - DNA, 1933 bp, Zea Mays
ccgcgacagtcgccacgctcgcacgcactccctctgcaatagctgtcatgcgccctatctccgtcgcatcccgcccgctcgccacgcttgattcctcctttcaatggtgcccacgccgtccaatcccgcccgcggtccttccccacgcggatcccccacccctcctccccaccgccgccgcaacaaatccgcgcacctcgatctgctcaagtgagcgtggctcaacgagaaggccacgtcagatatcctcagcttcgaatcgcccctcgcgttacgtgtccgcgagcagatccagcacctcatacgctcttctccctcccccttcttgaccacgttcctccactcccccccatagctctgggatctggccatggctccctctcctggtgtcgtgtcacccaggaggcggcgctcgatgacttcgtcgacgatggcgttgacgacctggtggtctcgctctaccagatggacctcgatctcacgctcttcctcctccgctcctaactcctcccggagaagatcaagaagtacacgatgcatatctctagggccacggccgaggcgactggtgaagttgcggcaatctgatgcgggaggtggccgacctcatccttagcttccctgacgagacgcccgtcgtcgtcctctctgccatggggaagaccaccaataacctcctcctggccggagagaatgcggtgagctgcggtgcccccaaggcgtccgaaatccctaagctcgctgtcatcaaggacctgcatcttaggacggttgatgagcttggtttagataagtcgattgtttcagggttccacatgcacattcaccgagtcaatcctgcgatcgtgtggcttccatactgggctgttcacctcaccacatttgatggatgttagagagcgatttcagctagggttaatatttgaatatttctgaagagaaatttttgaagtacttctggtggtgctggaacaagttgaaggttcctcgcgctgctcgcattcaagatattttctgctgagcaggttgttagttctcatgaatgtcatgttgtctcgaaataaagagcttctgtccgcacctaatcgcctaaaatggaaatgtttgactcattgtttaattcggggggaagctgaaggtggtctgatccggtaagagatcttaatctgcattacacttgttggattttgatgtcgcttctgggagtgtttgattgaattctacaccagttctaggaagagaaagcctgaccaagtcatcatctccaggtttgttattgtttggatgcaaaaatcgtcgttagttaacttttttgtgttgaagtaactgtttggttgagaaaattagttgcctatcttctattttctctgttttgttatagcagcaagctgatttgtgtctaatttatagggacgatgttagcgaaagtcaatttaatcaggtgctgaacattgagttgcaacaaatcatcgatggagactgtcaccgcagccagaaaaccacggtctcaatttgaggagcctttccatctatgtttgttagaaggcatataatgcctatttatctcttgtattcgaacatttggcaattaagaaatagaagattacttccccaatatcccttattcctaatctcacctttcacggcttctggtgaacaatcacttgctattaccgactgacatgtccactcctcatatgtgagatattggggttgatatatatgttgttcgtttccatgtaattattgtgtactaacatttattgaataatttttacgccgtaacaacgtacgggcactcacctagtgtctgatggaaagggaactgttcgggtgggttagataaaataatatctgaaaaactgcaaggtaagaccatggagcagtaagatgaaactatcatagtgaaagggaaataggcttacaccttttc

SEQ ID NO: 199285 - DNA, 1120 bp, Zea Mays
cgccacgcttgattcctcctttcaatggtgcccacgccgtccaatcccgcccgcggtccttccccacgcggatcccccacccctcctccccaccgccgccgcaacaaatccgcgcacctcgatctgctcaagtgagcgtggctcaacgagaaggccacgtcagatatcctcagcttcgaatcgcccctcgcgttacgtgtccgcgagcagatccagcacctcatacgctcttctccctcccccttcttgaccacgttcctccactcccccccatagctctgggatctggccatggctccctctcctggtgtcgtgtcacccaggaggcggcgctcgatgacttcgtcgacgatggcgttgacgacctggtggtctcgctctaccagatggacctcgatctcacgctcttcctcctccgctcctaactcctcccggagaagatcaagaagtacacgatgcatatctctagggccacggccgaggcgactggtgaagttgcggcaatctgatgcgggaggtggccgacctcatccttagcttccctgacgagacgcccgtcgtcgtcctctctgccatggggaagaccaccaataacctcctcctgatgcgtgtgtgcctgattcgttgtctgtggaggccggagagaatgcggtgagctgcggtgcccccaaggcgtccgaaatccctaagctcgctgtcatcaaggacctgcatcttaggacggttgatgagcttggtttagataagtcgattgtttcagggttccacatgcacattcaccgagtcaatcctgcgatcgtgtggcttccatactgggctgttcacctcaccacatttgatggatgttagagagcgatttcagctagggttaatatttgaatatttctgaagagaaatttttgaagtacttctggtggtgctggaacaagttgaaggagaagactgatgatgatattcccatgccagcctatttcaggttcctcgcgctgctcgcattcaagatattttctgctgagcaggtagatgttgctgttctcgaggttggcctaggagggaagtttgatgcaactaatgtgttgtcttgaactatcaaaaatcaaagatcttgactggtctctaa

SEQ ID NO: 199286 - DNA, 2044 bp, Zea Mays
ccctcctccccaccgccgccgcaacaaatccgcgcacctcgatctgctcaagtgagcgtggctcaacgagaaggccacgtcagatatcctcagcttcgaatcgcccctcgcgttacgtgtccgcgagcagatccagcacctcatacgctcttctccctcccccttcttgaccacgttcctccactcccccccatagctctgggatctggccatggctccctctcctggtgtcgtgtcacccaggaggcggcgctcgatgacttcgtcgacgatggcgttgacgacctggtggtctcgctctaccagatggacctcgatctcacgctcttcctcctccgctcctaactcctcccggagaagatcaagaagtacacgatgcatatctctagggccacggccgaggcgactggtgaagttgcggcaatctgatgcgggaggtggccgacctcatccttagcttccctgacgagacgcccgtcgtcgtcctctctgccatggggaagaccaccaataacctcctcctgatgcgtgtgtgcctgattcgttgtctgtggaggccggagagaatgcggtgagctgcggtgcccccaaggcgtccgaaatccctaagctcgctgtcatcaaggacctgcatcttaggacggttgatgagcttggtttagataagtcgattgtttcagggttccacatgcacattcaccgagtcaatcctgcgatcgtgtggcttccatactgggctgttcacctcaccacatttgatggatgttagagagcgatttcagctagggttaatatttgaatatttctgaagagaaatttttgaagtacttctggtggtgctggaacaagttgaaggagaagactgatgatgatattcccatgccagcctatttcaggttcctcgcgctgctcgcattcaagatattttctgctgagcaggtagatgttgctgttctcgaggttggcctaggagggaagtttgatgcaactaatgtggttaaagcacctgtagtttgtggcatatcttcccttggatatgatcatatggaaattcttggtgaccaaatcctgttcttggtgataaacttggtgtcgataaacgggttaattctgttggcaaaattaggatgacacaggttgttagttctcatgaatgtcatgttgtctcgaaataaagagcttctgtccgcacctaatcgcctaaaatggaaatgtttgactcattgtttaattcggggggaagctgaaggtggtctgatccggtaagagatcttaatctgcattacacttgttggattttgatgtcgcttctgggagtgtttgattgaattctacaccagttctaggaagagaaagcctgaccaagtcatcatctccaggtttgttattgtttggatgcaaaaatcgtcgttagttaacttttttgtgttgaagtaactgtttggttgagaaaattagttgcctatcttctattttctctgttttgttatagcagcaagctgatttgtgtctaatttatagggacgatgttagcgaaagtcaatttaatcaggtgctgaacattgagttgcaacaaatcatcgatggagactgtcaccgcagccagaaaaccacggtctcaatttgaggagcctttccatctatgtttgttagaaggcatataatgcctatttatctcttgtattcgaacatttggcaattaagaaatagaagattacttccccaatatcccttattcctaatctcacctttcacggcttctggtgaacaatcacttgctattaccgactgacatgtccactcctcatatgtgagatattggggttgatatatatgttgttcgtttccatgtaattattgtgtactaacatttattgaataatttttacgccgtaacaacgtacgggcactcacctagtgtctgatggaaagggaactgttcgggtgggttagataaaataatatctgaaaaactgcaaggtaagaccatggagcagtaagatgaaactatcatagtgaaagggaaataggcttacaccttttc

SEQ ID NO: 199287 - DNA, 730 bp, Zea Mays
gttaattctgttggcaaaattaggatgacacaggtgacatgaagatgccaagtcggtgcatccatactaattgcgactttggttgttagttctcatgaatgtcatgttgtctcgaaataaagagcttctgtccgcacctaatcgcctaaaatggaaatgtttgactcattgtttaattcggggggaagctgaaggtggtctgatccgggacgatgttagcgaaagtcaatttaatcaggtgctgaacattgagttgcaacaaatcatcgatggagactgtcaccgcagccagaaaaccacggtctcaatttgaggagcctttccatctatgtttgttagaaggcatataatgcctatttatctcttgtattcgaacatttggcaattaagaaatagaagattacttccccaatatcccttattcctaatctcacctttcacggcttctggtgaacaatcacttgctattaccgactgacatgtccactcctcatatgtgagatattggggttgatatatatgttgttcgtttccatgtaattattgtgtactaacatttattgaataatttttacgccgtaacaacgtacgggcactcacctagtgtctgatggaaagggaactgttcgggtgggttagataaaataatatctgaaaaactgcaaggtaagaccatggagcagtaagatgaaactatcatagtgaaagggaaataggcttacaccttttc

SEQ ID NO: 199288 - DNA, 583 bp, Zea Mays
atccatgtacccggaccggaccccctcaattcaaatcccccctccgtcatcatctcgtctcgtcatactcctcgccccccacctccaccccctcgtgattatctccccggattccaaatcccatctccgattcactcggccccagagccgccgccgggttcttcgcgcggacgatggcgggggctgccgagggcgccggcgcggaggcggtggagagggcgcacgggctctaccgcggcggccgccaccgggaggcgctggagctctactccgccgcgctggctgcggcgcggggccccgcgcagcgcatcgcgctccacagcaaccgcgccgcctgctacctaaagctccacgacttccacaaggcagcacaagagtgtacatctgtcctcgagttggatacggagcatgctggagctctgatgttacgtgcccagactctcgtcactctgaaggattatcagtcagctctgtttgatgtcaacaggctcgttgagataaacccgtcgtctgaagtgtatcggaacctgcaggcacgattgaagacacagctagtttatgttttgtccaaatgatgtggtgg

SEQ ID NO: 199289 - DNA, 2431 bp, Zea Mays
aaagcagaggcatcaaccatcaacacacgctatagggtcctcctcccgctgctatttctctaatcgcatgcacatcacgttctcgtgtggaggagggcgtgctgcctcgctcgcacttgttgccattgcggatcgccagtagctaggcggaggcagcagctgaggattaagcagccaggttgcttaattattctgcccgcttcagaattgccgcccgtgatgagtcgtccgtcatccgtgaccttcgataaaagcaggagactttcttcgtcttagcattatccgccgagaaatagaggttagagcgagagcgggagacagttggaggccggccatccattgctggatccatctgttgtccaaggctgctgattaattctgcgacgagggtgcaacttgctttccttggtggcagcagatccagctccaggtgcgtacgtgcgtagcgccgtagcctcgctactagccactagccagcgcgcgctaagcagccgggcatccatgggttcttgcgtgtcggtgtcgtcgacgaggcaccggcggcggcggtcgaggaagctgtcggtcgcggcgaggaagttccggcggaagctgtccacggcgatcgccgccgacgcgccgatcgtccgcggcgccggcagcgcggcgacctgcctcgcccggcacggggtcgtccacgtggaggcgccggactccaacgtcaccctgcgcctcaccaagctgcagtggcagcacagccagatggacgccgggagcgtggtttgcgaagaagcgtggtacgattctgtcagcatcctggagtcgccggactccgacgacgatctcgacaacgatttcgctagcgtcagcggaggtaatgctaccctctccctgatgtcaccggcggctcggacgcaccgcagtgcaaggaggcagcgtgcttcttggacaccatgcagctcctcaggagcatcgcaaacgcagaagcatacgaccaaagtgaacaacctgctgacaagagtgacgacgacgactcgaacgtcgctgccactgcaactaataatagcggtagctgcaataatgacgagggctgctgcagtagtacactgaaggagcttcaggctgcaatgtcgccgcggccgttcccggcgtcggttccgagcaacaaggtccagccgatgccggtcgttggtgtcagcccggtcccgcccccgcaccagcagcagcagcagcagaagaagaaaacggccgtggtcaggctctcgttcaggcgaaggtcatatgagggcgacgagatgaccgaaatgagtggttctgcgaattatctgtaccgcccaagggcaggtttcacggtgccgtgttcgaccggcgagaaactgccacaaggttgctggtcggttcttgagccatcgacgttcagagtccgaggggagagcttcttcaaagacaagaggaagtacccagctccaggctgctccccttacacccccatcggagtggacatgttcgcctacacgaggaagattcaccacattgcgcagcacctctcgcttccgtctctgaagacacacgagacatttcctaccctgctcatcgtcaacattcagttgcccacctaccctgctacagtgtttggcgataacgacggcgatgggataagcctagttctgtatttcaagttatctgacagttttgacaaggagatttctcctcagttgcaggacagcataaagaggctcatgaacgaggaaacggaaaaggtgaaggggttcccagtagacagcattgtgccctacaccgagaggctgaaaatcctggctggtttggcgaaccctgaggacctgcaactgagcaccgcagagaggaagcttgtgcagacctacaatatgaagcctgtgctatctcgcccacaacacaaattctacaagggttcaaactactttgagatcgatctggatgtccatcggttcagcttcatatcacggaaagggctcgagaccttccaggagcggctcaagcatggcgttcttgatcttggtctaactatccaggcacagaaggctgaggagttgccagagcatgtcctgtgctgcatgaggctgaacaagatcgacttcgccaacaacgggcagataccgacgctgataactgcagctgatgagtaaatctgtcctgttactgtaaggcgctaactttctggaaaagcaaaagagactgttgcttttcgagatgctgttgtatagatcggcagatagttgtagggactaactcaagtttgtgagctaagaaacacctaatcactgaggagggaaaagaagatattgcagcaatctgcattctgaactctgaagacgatgtgtatacatgtctgtgttttctttttctttttttgaaacgaaatacatgtctgtatttccagttcaggcttactaatgttgcaggtacatcacca

SEQ ID NO: 199290 - DNA, 2458 bp, Zea Mays
atatgccgtgcctttgcggagcagaaaagcagaggcatcaaccatcaacacacgctatagggtcctcctcccgctgctatttctctaatcgcatgcacatcacgttctcgtgtggaggagggcgtgctgcctcgctcgcacttgttgccattgcggatcgccagtagctaggcggaggcagcagctgaggattaagcagccaggttgcttaattattctgcccgcttcagaattgccgcccgtgatgagtcgtccgtcatccgtgaccttcgataaaagcaggagactttcttcgtcttagcattatccgccgagaaatagaggttagagcgagagcgggagacagttggaggccggccatccattgctggatccatctgttgtccaaggctgctgattaattctgcgacgagggtgcaacttgctttccttggtggcagcagatccagctccaggtgcgtacgtgcgtagcgccgtagcctcgctactagccactagccagcgcgcgctaagcagccgggcatccatgggttcttgcgtgtcggtgtcgtcgacgaggcaccggcggcggcggtcgaggaagctgtcggtcgcggcgaggaagttccggcggaagctgtccacggcgatcgccgccgacgcgccgatcgtccgcggcgccggcagcgcggcgacctgcctcgcccggcacggggtcgtccacgtggaggcgccggactccaacgtcaccctgcgcctcaccaagctgcagtggcagcacagccagatggacgccgggagcgtggtttgcgaagaagcgtggtacgattctgtcagcatcctggagtcgccggactccgacgacgatctcgacaacgatttcgctagcgtcagcggagaccctctccctgatgtcaccggcggctcggacgcaccgcagtgcaaggaggcagcgtgcttcttggacaccatgcagctcctcaggagcatcgcaaacgcagaagcatacgaccaaagtgaacaacctgctgacaagagtgacgacgacgactcgaacgtcgctgccactgcaactaataatagcggtagctgcaataatgacgagggctgctgcagtagtacactgaaggagcttcaggctgcaatgtcgccgcggccgttcccggcgtcggttccgagcaacaaggtccagccgatgccggtcgttggtgtcagcccggtcccgcccccgcaccagcagcagcagcagcagaagaagaaaacggccgtggtcaggctctcgttcaggcgaaggtcatatgagggcgacgagatgaccgaaatgagtggttctgcgaattatctgtaccgcccaagggcaggtttcacggtgccgtgttcgaccggcgagaaactgccacaaggttgctggtcggttcttgagccatcgacgttcagagtccgaggggagagcttcttcaagtacgaagcgagacaagaggaagtacccagctccaggctgctccccttacacccccatcggagtggacatgttcgcctacacgaggaagattcaccacattgcgcagcacctctcgcttccgtctctgaagacacacgagacatttcctaccctgctcatcgtcaacattcagttgcccacctaccctgctacagtgtttggcgataacgacggcgatgggataagcctagttctgtatttcaagttatctgacagttttgacaaggagatttctcctcagttgcaggacagcataaagaggctcatgaacgaggaaacggaaaaggtgaaggggttcccagtagacagcattgtgccctacaccgagaggctgaaaatcctggctggtttggcgaaccctgaggacctgcaactgagcaccgcagagaggaagcttgtgcagacctacaatatgaagcctgtgctatctcgcccacaacacaaattctacaagggttcaaactactttgagatcgatctggatgtccatcggttcagcttcatatcacggaaagggctcgagaccttccaggagcggctcaagcatggcgttcttgatcttggtctaactatccaggcacagaaggctgaggagttgccagagcatgtcctgtgctgcatgaggctgaacaagatcgacttcgccaacaacgggcagataccgacgctgataactgcagctgatgagtaaatctgtcctgttactgtaaggcgctaactttctggaaaagcaaaagagactgttgcttttcgagatgctgttgtatagatcggcagatagttgtagggactaactcaagtttgtgagctaagaaacacctaatcactgaggagggaaaagaagatattgcagcaatctgcattctgaactctgaagacgatgtgtatacatgtctgtgttttctttttctttttttgaaacgaaatacatgtctgtatttccagttcaggcttactaatgttgcaggtacatcacca

SEQ ID NO: 199291 - DNA, 2473 bp, Zea Mays
ctcccccgtccgtctccgatgattcatatgccgtgcctttgcggagcagaaaagcagaggcatcaaccatcaacacacgctatagggtcctcctcccgctgctatttctctaatcgcatgcacatcacgttctcgtgtggaggagggcgtgctgcctcgctcgcacttgttgccattgcggatcgccagtagctaggcggaggcagcagctgaggattaagcagccaggttgcttaattattctgcccgcttcagaattgccgcccgtgatgagtcgtccgtcatccgtgaccttcgataaaagcaggagactttcttcgtcttagcattatccgccgagaaatagaggttagagcgagagcgggagacagttggaggccggccatccattgctggatccatctgttgtccaaggctgctgattaattctgcgacgagggtgcaacttgctttccttggtggcagcagatccagctccaggtgcgtacgtgcgtagcgccgtagcctcgctactagccactagccagcgcgcgctaagcagccgggcatccatgggttcttgcgtgtcggtgtcgtcgacgaggcaccggcggcggcggtcgaggaagctgtcggtcgcggcgaggaagttccggcggaagctgtccacggcgatcgccgccgacgcgccgatcgtccgcggcgccggcagcgcggcgacctgcctcgcccggcacggggtcgtccacgtggaggcgccggactccaacgtcaccctgcgcctcaccaagctgcagtggcagcacagccagatggacgccgggagcgtggtttgcgaagaagcgtggtacgattctgtcagcatcctggagtcgccggactccgacgacgatctcgacaacgatttcgctagcgtcagcggagaccctctccctgatgtcaccggcggctcggacgcaccgcagtgcaaggaggcagcgtgcttcttggacaccatgcagctcctcaggagcatcgcaaacgcagaagcatacgaccaaagtgaacaacctgctgacaagagtgacgacgacgactcgaacgtcgctgccactgcaactaataatagcggtagctgcaataatgacgagggctgctgcagtagtacactgaaggagcttcaggctgcaatgtcgccgcggccgttcccggcgtcggttccgagcaacaaggtccagccgatgccggtcgttggtgtcagcccggtcccgcccccgcaccagcagcagcagcagcagaagaagaaaacggccgtggtcaggctctcgttcaggcgaaggtcatatgagggcgacgagatgaccgaaatgagtggttctgcgaattatctgtaccgcccaagggcaggtttcacggtgccgtgttcgaccggcgagaaactgccacaaggttgctggtcggttcttgagccatcgacgttcagagtccgaggggagagcttcttcaaagacaagaggaagtacccagctccaggctgctccccttacacccccatcggagtggacatgttcgcctacacgaggaagattcaccacattgcgcagcacctctcgcttccgtctctgaagacacacgagacatttcctaccctgctcatcgtcaacattcagttgcccacctaccctgctacagtgtttggcgataacgacggcgatgggataagcctagttctgtatttcaagttatctgacagttttgacaaggagatttctcctcagttgcaggacagcataaagaggctcatgaacgaggaaacggaaaaggtgaaggggttcccagtagacagcattgtgccctacaccgagaggctgaaaatcctggctggtttggcgaaccctgaggacctgcaactgagcaccgcagagaggaagcttgtgcagacctacaatatgaagcctgtgctatctcgcccacaacacaaattctacaagggttcaaactactttgagatcgatctggatgtccatcggttcagcttcatatcacggaaagggctcgagaccttccaggagcggctcaagcatggcgttcttgatcttggtctaactatccaggcacagaaggctgaggagttgccagagcatgtcctgtgctgcatgaggctgaacaagatcgacttcgccaacaacgggcagataccgacgctgataactgcagctgatgagtaaatctgtcctgttactgtaaggcgctaactttctggaaaagcaaaagagactgttgcttttcgagatgctgttgtatagatcggcagatagttgtagggactaactcaagtttgtgagctaagaaacacctaatcactgaggagggaaaagaagatattgcagcaatctgcattctgaactctgaagacgatgtgtatacatgtctgtgttttctttttctttttttgaaacgaaatacatgtctgtatttccagttcaggcttactaatgttgcaggtacatcacca

SEQ ID NO: 199292 - DNA, 1119 bp, Zea Mays
aaccaaacccacacaacaaaggccgcgcggctgttggataaccaaggcgtcggaggatttgcctgccgtgtagttcttcctcgttggcacccggctccgcactgagaaagcgcgatgacggcccaggcgaagcggcggcaagcggaggaccctctaaggcccgaattctgacggtcgagggcgaagagcaggatggaggtgcggtggtaggggcggggagggctgaagggaacggcagcaagggggtggagacggtagttggcggagaggctgacgggattagtgtgcgcatcgacccggatgtgctcgattgctccatctgcttcgatcccctccaaccgcccctctaccaggtagttattcccgttttgaaaatcgcctatattgcttgattccccgtagtaatttgggtaggatgacataatatgctgtaaaagcataatatgattagcatcctagttcctgaaatgtttgtacaaactgtaagaactaagaagcaacagtttgttactaaattgaggatatgaaaggagacagtaacatataaatacaaagcagttgacttaccagtgtgcgtgcagcacgcttcgacaaaattttcattcatatccttcatgtatggttttgtagcaaccgtgatttgaaggcagctaaacgctgtactcaatcctgactatgacttcccaaaatgcctgcaattgaatcaatacttatctgtctcaaacagttgaacctgacatttagaaacaaaggcaagtaactgctcttctgaccacatggattattaaatcctttttttaacgtaatggcatgagctctgtctttccattaagaagattagaattgatcaagttttaaggaaaactgggcccgaaacctaaacagagtgcccaaacaacacaagcagcgacaaccccacacacaaagctcatctagagtcatcgttgccgagctcaacacaagatacaagcaccttcgactttgccagacgggccgcacacggccaaaagaaaaacgacgacgcctacacctaaaacctagcacagaaggacaaagaccgcgacgcgccatcgttgccaagcctcaacacacccacactctaggcaactctgattcttc

SEQ ID NO: 199293 - DNA, 612 bp, Zea Mays
cacctcattgatttggcacaaatgaaggttgaaatgctgaagaagcaaaaggatgaggtcctggagcgaatcaacaaccaacatggaccgaaggcaaagaaactttgtcttcaccgcaccctgactggcccatggtagcctgctgaagcttgcacagacctcaccgaagtcgagatcgtcggcttagatgtgctcgtgtgtataccagatgatctcaagttgttctgtgacgtgggttgttgtctgtgcctgacagttcaccgtttaggttcagctgcgcaatcctcatataaacaatgaggcgtactatctaatctgttcatttaactccctcctattgccatggtgagatcatgcatgtaacttaggccttgttcgtttgtgtcagattgtacccggaatcgttccagtttatcaaagtctatataaattagagaatcaatccggttaggaatcgtttcggcccatcaatccggtacaaacgaacaaggccttaatgttgttgagataatttgacaatgagattatagctgatagctcagatggtctgtatgcttctgcttgtaacaagtcctgttttcctgggctaccttactcatgactgcttctgga

SEQ ID NO: 199294 - DNA, 616 bp, Zea Mays
ctaaattatccttgcgattgagcagtagaggcgtgcccccgaggacaccgtcactggcttcttgatggccggcgttggcaatgttgatctgcgcaagaaaaccaactacctcctcgtcgacaacaagacgacagttaaacaaatcgaggatgcgttcaaagaatttactacgagggaggatattgctattgtgctcatcagtcagtatattgccaacatgataaggtttctggtggatagctacaacaagcccgtccctgctattctggagatcccatccaaggaccatccatatgatccagcgcacgactctgtgctctctcgagtgaaatatctgttctctgcagaatcggtggcgtctgataggcgatgaaggcatccttgcgtagcagtacccttcgatgcatctattttgttatggtattgaaaagaagatggcacgtaccattgggtgcgagcgagccagcatgaataataatgagcttgcaaacaatgattggttgaactaaaccaacacaattttttttcataaatggttcgaatgatattttggtgcttgtgtttgattggttattagggaataaaatgcgattgttatgacgaattgattgcccag

SEQ ID NO: 199295 - DNA, 526 bp, Zea Mays
ctgggttttccttcctagtactggtttccttatttagacgacagttaaacaaatcgaggatgcgttcaaagaatttactacgagggaggatattgctattgtgctcatcagtcagtatattgccaacatgataaggtttctggtggatagctacaacaagcccgtccctgctattctggagatcccatccaaggaccatccatatgatccagcgcacgactctgtgctctctcgagtgaaatatctgttctctgcagaatcggtggcgtctgataggcgatgaaggcatccttgcgtagcagtacccttcgatgcatctattttgttatggtattgaaaagaagatggcacgtaccattgggtgcgagcgagccagcatgaataataatgagcttgcaaacaatgattggttgaactaaaccaacacaattttttttcataaatggttcgaatgatattttggtgcttgtgtttgattggttattagggaataaaatgcgattgttatgacgaattgattgcccag

SEQ ID NO: 199296 - DNA, 3116 bp, Zea Mays
attttttttttggttggatgcagcatgttgtgttgtgtgtgtaaatgtggcagggcgagggagcaagtctctcattccttttgctggagtcccgctttaaagccacgcgcgcgcgtacacaacgcaagcgcagaagaagacttgcccttgcccacctcctcctcctcctcctcctcctccgccgccgcgcgcttcacacccctcatctcctcgcggcaatggccaccgcaccgtgcgctccccaatgattgctgctccactccgacgaccgatcgccattgccgcgcaagcaggttgtgttactagcttgctgtcgcttaggtagttttgtgttttagcttggttcacacgatgaccaacgaaaacaatggcaacggcacgaaccccgcgtcggcgagcggctggctaggcttctcgctgtcgcctcacatggcttccgccatggacgaacaccagcaccagcaccagcaccataatggcctcttcttcccttccgtcaccgcggcatacggcctcggtggcggcgacggcgtggtggccgccagcgcgtcgccgtactacacgccgcagctggcgtccatgccgctgaagtccgacggctccctctgcatcatggaggcgctccgcaggagcgaccaacaggatcaccacgggcccaagctggaggacttcctcggcgcggcggcgcagtcgcaggccatggcgctgagcctggacaaccccgccgccgccgcctccagcttctactactacggcggcggcggcggtccggggcaccagcacgggttcctgcagccgtgcggcgacctgtacggcggaacctcggccgcgtccctggtgtccgcggacgacgaggcggccgccgcgacggccatggcgagctgggtggcggcggcgcgcgccgagagcggcgtgctgtccgccgccgcagccgcggggcaccaccacgcgctggccctgtccatgagctccgggtcgctgtcgagctgcgtgaccgcgcaccccgcggcgcccgagtacggcgcggcggcggcgctggacggcgggcgcaagcgcggcggcgcggcggggcagaagcagcccgtgcaccaccgcaagtccatcgacacgttcgggcagaggacgtcgcagtaccgcggcgtgaccaggcataggtggacggggaggtacgaggcgcacctgtgggacaacagctgcaagaaggaaggccagaccaggaagggcaggcaggtctatctcggcgggtacgacgtggaggagaaggcggcgagagcctacgacctggcggcgctcaagtactggggcccttccacgcacatcaacttcccgctggaggactaccaggatgagctggaggagatgaagaacatgacgcggcaggagtacgtggcgcacctcaggaggaagagcagcggcttctcgcggggcgcgtccatgtaccggggagtcacaaggcaccaccagcacgggcggtggcaggcgcgcatcggccgcgtctccggcaacaaggacctctacctcggcaccttcagcacgcaggaggaggccgcggaggcgtacgacgtcgcggccatcaagttcaggggcctcaacgccgtcaccaacttcgacatcacgcgctacgacgtcgacaagatcatggccagcaacacgctgctgccgggcgacctcgcgcgccgcaggaaggacgacgccagcgacgacaacccggcgcccgccgccgcagccgccatcgccatcgccgaaccggcggcgcatcagcctgccgccggcgtcaacgacgccagcgagacgtggaagcatgtggtggcatcggcggcgctggccgccgcgccgcgggacaaccaccaccaccgccaccacgacgtgctgtccggcgaggccttctccgtgctgcacgacctggtggccaccgccgcggacggcggcgccggccaccaccaccaccacgcccacagcgccgcgcaccacgtgcccatgtccagcgcgacgtcgtcgctggtcaccagcctcggcaactcccgcgagggcagccccgaccgcggcggcggcctgtccatgctcttctccaagccgccgcaggccgccaagcccatgagcccgctcatgccgctgggctcctgggcgtccgcgacggcgtcggccagggccgccgtctccatcgcgcacatgcccgtgttcgccgcctggaccgacgcctgatcgtaccactcgatccaccgattcatgacatggccagcggccggccggttccaccatgcattatgtgccactccggccgaccgacggacggctagccacccaccacgtaacccggccgttctagctcggtgcacgtccgcgcgctagctctccaccgggttgcgtcgctggacttcttcacaccacttagttgattttaattacggttcttgggaggtagtgagttcattagttaattagctaatagccatcggaggagattggtcagaagctagctaggcgatatgatggaagggcaggagcgcacggcgcgcggcctctgctgtttccttcttctccggctccgtcgtgtgcggcccggacaaggaggggttttgtaaaatggaggccggcggagatcggatcacgtgcgtctactctaaaatctatatccagaactaatccactactaatgttaagtcatagcctctttgaattctcttacatatcgagctccggggcttcaacccgtctgaaccactggcatatgggtccggatgcagatttcaagcatcgcgatccacctgcctcacgctaaggtatacaagataaacgtgtacctttgttaacatgtaaaccgaatattgacgtggtgtgccatgttagagcatactaataaaagctcgaagatctaaatgacaaacatctaagttcatagatttaaataacacaacatgccaagttttagatcctaagtggctccaacgtagctacatcgacatccgattttgcaaacctgactttggatgttttcacatgagccgacaaagttctatgacccgtttttccggttttttgagttcgagcctaagtgatacaacgtgccaagttcgaggactgtcaatgcactttactgatagattctgatattcgac

SEQ ID NO: 199297 - DNA, 1807 bp, Zea Mays
ttattaaaatttgatttgaacctcacgatgcaaaggcacacgcgaatccgccccgcaatcgctgtcgtcgattctcccatctccactaaaagcatccgttggacggctggagtcattccggcgactcgagaaccgtccgacgtggaccaccaacgaaccgggaaatgcccgcatcttccagattctatacttccgccacgtgctccctcgcctccgcctccgcctcctcccgttccccacctcgccgccgccgcgtctccctcacgggccagtccccgagtacccccctcacgcgccacagtcgaaaccaaagcagctcgcggtggccacacccggacctcgggctcgacatggggttcctgctcgtgcgcaagccgcgtccgagggacgagaagccggacctggtgaactggatgcggtgcttcctgtcgcagcgtctgtctcagcccgccgcggcggcggaggagaccgcgaacgcggagggtaaggccgccgggagacgagaggaagaggagggtggcggggatgacgctgaccacctcgtcgtcatggtgaacgggctgtacgggagttctgcggattggaagtttgcagcagagcagtttgtcaagagattgccgggaaaagtctacgtgcatcgttcgacaagttgttcagaggagaagaaacttgaggaaaatatcttttgttgctcattcacttggcggcttagtaacaagatatgcaataggaaaactttatgaacctgccatggatgaaacatcttcttgtgacattgataagccttctgatgaacaaaatgtacgtgatgttggtaaaatagctggtttggaaccaatcaattttattacatctgctacacctcacttgggctcaaggttgaataagcaacttcccttcctttttggtgtcccacttttggagaaaactgctgcaggaacagcacattttatagttggaagaactggtaaacatctattccttacagacaatgatgatgggaagcctcctcttctcctacgaatggttgaagattgtgacgacgggaaattcatgtctgctttgcgctgtttcaagcgtcgtgttgcctatgctaatgtaacatatgatcatatagttggttggagaacatcatcgcttcgacgtcaacatgaattaccaaaactcaagctaacagcaaacgatgaaaagtatcctcatattattaatgtcgataaaggaaatctagaggatcatcggcaagagggatctgtagaagattcactggcagatagttatgaagaggtgatgatccgtggccttacacaagtggcctgggaacgtgtggacgtatgctttcataagagttggctaagatacaacgcccataataacatccaggttaggatccatccaattaattcagatggagaagacgtcatataccatatgatagacaattttgtagtgtagccaagtagtccgtccggtgaatgccaactactacgtaaaagattactgctatttccagtggattcgccttgagaggtcattaatcttttaccatgtgggttgctatgcacaacagctagataattggcatcaatcagcacgtaactcatacgtgctgctaggtgattcgagcgtaggacctgtgcttgttggttgttgctggcaatgtaaatataagtgttaggtaatgcaaatatttgcatgacagtgcatattcttgtaaatgggaatttaccatgttattggaaatccaaagttcaaactatctcaagcttgttggttgctgtgctgaaataaaaaagatgttccttttctg

SEQ ID NO: 199298 - DNA, 1790 bp, Zea Mays
ttattaaaatttgatttgaacctcacgatgcaaaggcacacgcgaatccgccccgcaatcgctgtcgtcgattctcccatctccactaaaagcatccgttggacggctggagtcattccggcgactcgagaaccgtccgacgtggaccaccaacgaaccgggaaatgcccgcatcttccagattctatacttccgccacgtgctccctcgcctccgcctccgcctcctcccgttccccacctcgccgccgccgcgtctccctcacgggccagtccccgagtacccccctcacgcgccacagtcgaaaccaaagcagctcgcggtggccacacccggacctcgggctcgacatggggttcctgctcgtgcgcaagccgcgtccgagggacgagaagccggacctggtgaactggatgcggtgcttcctgtcgcagcgtctgtctcagcccgccgcggcggcggaggagaccgcgaacgcggagggtaaggccgccgggagacgagaggaagaggagggtggcggggatgacgctgaccacctcgtcgtcatggtgaacgggctgtacgggagttctgcggattggaagtttgcagcagagcagtttgtcaagagattgccgggaaaagtctacgtgcatcgtagtcagagcaattattcaaaattaacatatgacggagttgacttaatgggtgaaaggctagcagaggaggttcgacaagttgttcagaggagaagaaacttgaggaaaatatcttttgttgctcattcacttggcggcttagtaacaagatatgcaataggaaaactttatgaacctgccatggatgaaacatcttcttgtgacattgataagccttctgatgaacaaaatgtacgtgatgttggtaaaatagctggtttggaaccaatcaattttattacatctgctacacctcacttgggctcaaggttgaataagcaacttcccttcctttttggtgtcccacttttggagaaaactgctgcaggaacagcacattttatagttggaagaactggtctgctttgcgctgtttcaagcgtcgtgttgcctatgctaatgtaacatatgatcatatagttggttggagaacatcatcgcttcgacgtcaacatgaattaccaaaactcaagctaacagcaaacgatgaaaagtatcctcatattattaatgtcgataaaggaaatctagaggatcatcggcaagagggatctgtagaagattcactggcagatagttatgaagaggtgatgatccgtggccttacacaagtggcctgggaacgtgtggacgtatgctttcataagagttggctaagatacaacgcccataataacatccaggttaggatccatccaattaattcagatggagaagacgtcatataccatatgatagacaattttgtagtgtagccaagtagtccgtccggtgaatgccaactactacgtaaaagattactgctatttccagtggattcgccttgagaggtcattaatcttttaccatgtgggttgctatgcacaacagctagataattggcatcaatcagcacgtaactcatacgtgctgctaggtgattcgagcgtaggacctgtgcttgttggttgttgctggcaatgtaaatataagtgttaggtaatgcaaatatttgcatgacagtgcatattcttgtaaatgggaatttaccatgttattggaaatccaaagttcaaactatctcaagcttgttggttgctgtgctgaaataaaaaagatgttccttttctg

SEQ ID NO: 199299 - DNA, 1504 bp, Zea Mays
actgaattcgctgaagtggtgatgctataggacaattgtaaaacgtaaaatgctgaaggtgcttgtgggtatgtgattctaaaagcagctgctgagaatactttgcaacactagtaagcacaagttacagcaggttataatcatagtttgaactcgattgaagtcactgaaatgattatgcaactgggagtgatgcacagcagcaacgcaatctagtttgctagtgacaatcctgttatgtccacgggtaccctcatgctactcagtagtcagagcaattattcaaaattaacatatgacggagttgacttaatgggtgaaaggctagcagaggaggttcgacaagttgttcagaggagaagaaacttgaggaaaatatcttttgttgctcattcacttggcggcttagtaacaagatatgcaataggaaaactttatgaacctgccatggatgaaacatcttcttgtgacattgataagccttctgatgaacaaaatgtacgtgatgttggtaaaatagctggtttggaaccaatcaattttattacatctgctacacctcacttgggctcaaggttgaataagcaacttcccttcctttttggtgtcccacttttggagaaaactgctgcaggaacagcacattttatagttggaagaactggtaaacatctattccttacagacaatgatgatgggaagcctcctcttctcctacgaatggttgaagattgtgacgacgggaaattcatgtctgctttgcgctgtttcaagcgtcgtgttgcctatgctaatgtaacatatgatcatatagttggttggagaacatcatcgcttcgacgtcaacatgaattaccaaaactcaagctaacagcaaacgatgaaaagtatcctcatattattaatgtcgataaaggaaatctagaggatcatcggcaagagggatctgtagaagattcactggcagatagttatgaagaggtgatgatccgtggccttacacaagtggcctgggaacgtgtggacgtatgctttcataagagttggctaagatacaacgcccataataacatccaggttaggatccatccaattaattcagatggagaagacgtcatataccatatgatagacaattttgtagtgtagccaagtagtccgtccggtgaatgccaactactacgtaaaagattactgctatttccagtggattcgccttgagaggtcattaatcttttaccatgtgggttgctatgcacaacagctagataattggcatcaatcagcacgtaactcatacgtgctgctaggtgattcgagcgtaggacctgtgcttgttggttgttgctggcaatgtaaatataagtgttaggtaatgcaaatatttgcatgacagtgcatattcttgtaaatgggaatttaccatgttattggaaatccaaagttcaaactatctcaagcttgttggttgctgtgctgaaataaaaaagatgttccttttctg

SEQ ID NO: 199300 - DNA, 1925 bp, Zea Mays
gtattcactactcaagccgctcaaaactctagctagctagcagggggggaaatggctccacttctcgccgcagccatgaaccacgctgcccatccagtccttagaagccatctaggacccaacaatgagagtttctcacgacaccacctatcttcttcaccgcaaagcagtaagcgaaggtttaaccttagctttacgccacgatctgcaagagtaggcaatcaaaatggagtccaattgttgagcccttcggaaatccctcgaagggactggttcccctccgacttcatctttggtgccgccacttcagcgtaccaaattgaaggtgcttggaacgaagatggaaagggggaaagcaattgggatcacttctgccacaattttccggaaaggataatggacgggagcaatgcagacattggagcgaattcgtaccatatgtacaaaacggatgtcagattgctgaaggaaatgggcatggacgcatatagagggaacggtcgaaggaggtattaaccaggatggcatcgattactacaaaaggctcatcaacttgttgctagagaatggcatagagccatatgtaacaattttccactgggatgtccctcaagcactagaagagaagtacggcggattcttagataagactcataagaggattgtaaatgattacaaaaacttcgctaaggtgtgcttcgacaactttggtgacaaggtgaagaattggttgacctttaatgagccccagacatttacttcattttcctatggaaccggggtctttgccccaggacgatgctcaccgggactagactgtgccatcccaactgggaattcactcgtcgaaccttacattgctggccacaacattcttctagcccacgctgaggctgttgatctttacaacaagtattacaagggcgagaacggccgcataggtcttgcatttgatgtaatgggtcgtgtgccatacggaacatcatttctagatgaacaggccaaagaaaggtccatggacattaacctaggatggttcttggagcctgtggttcgtggtgactaccccttctcaatgagatcgttagcgagggaacgactacccttcttcagtgacaaacagcaagagaagcttgtgggatcctataacatgttgggaataaactactacacctcaatattctccaaacatatcgacatctcaccaaaatactcgcctgttctcaacactgacgacgcctacgctagtcaagaaacgtatgggcctgacgggaaacccattggtcctcctatgggaaatccgtggatctacttatacccagaaggcctaaaggatatccttatgatcatgaagaacaaatatggaaacccacctatctacatcactgagaacggaatcggggatgttgatacaaaggagaaacctctacccatggaggctgccttaaatgactacaaaaggctagattacatccagcgccacatctcaactctcaaggagtcaatagacttgggagcaaatgtgcatggctacttcgcttggtctctgctggataactttgaatggtacgccggctacaccgaacgttatggcattgtctacgtcgaccgcaaaaataactacacgcgctacatgaaggagtcagccaagtggttaaaagagttcaatactgcgaagaagcctagcaagaagattattacgccagcttaaaaacatgggacctcgtgatgtgggtacggtgccacccatgaaataaaaacctagtgtgtggtttgaaacctaaatttttctttttcttttttgcaccatgagagaggtagtggagtcatattctccagcaccgtggctaataatgtattgttgcagtacaatctagcattgtcgtcatgcaataaataaagtgactggtttccctatttcaatt

SEQ ID NO: 199301 - DNA, 2126 bp, Zea Mays
cactaattatgaatatgaccgcaggtcatcattgaatggctgcaacgatgggttcaatatctgccaatggttcttaccaaacaaataggcccagtgcactaaagcaggcacctcacatgcaattccaacaatgttgcaacggtggacttaggttcttaagcaagcattcccaatccacgcgaagtaagatacaggtggctaaaagaagagctacagataatggaattcatccaaagactacgggacatcgggcacctattgtatgttctgctgggatgactattgtatttgttgcaactgaagtgcacccatggtgcaaaactggtggcctcggtgatgttgtaggaggactgcccccagctttggctgctatgggacaccgtgtcatgacaatagctcctcgttatgatcaatacaaggatgcatgggatacaagtgtccttgttgaggtaaatattggtgacacggtagaaactgttcgcttcttccactgctacaaaagaggagttgatcgtgtttttgttgatcatcctatgtttcttgaaaaggtatggggcaagactggagcaaaattgtatggtcctactactggaactgactatcgagataaccagttgaggttctgccttttgtgccttgctgctttggaggctccaagagttctcaatttcaacaattctgaatatttctctggaccatatggggaagatgttgtcttcgtagccaatgattggcacactgctattttgccatgttatttgaagagcatgtataagccaaatggaatttataaaaatgctaaggttgctttctgcatacataatattgcctatcaagggagaaagcttaactggatgaaggcagggatcattgagagtgatctggttctaacagtcagtccacattatgtcaaggaactcacatctggcccagataagggtgttgagttggatggtgtccttcgcacaaagcctctagaaattggaatcgttaatggcatggatgtttatgaatgggatccttcaacagataagtacatcagcgtgaaatatgatgcaacaacggtaactgaagcaagggctctcaataaagagagtttgcaagcagaagtcggattgcctgtggactcgagcatccctgttatagttttcgtcgggcgtctcgaagaacagaaagggtccgacatactcattgcagccattccagagttcgtgggcgagaatgtccagataatcgttcttggcacgggaaagaagaagatggaggaggaactaacgcagctggaagtgaaatatccaaacaacgctagaggcatagcgaaattcaatgttccattggcacacatgatgtttgccggggctgacttcattatcgtcccaagcaggtttgagccatgtggtctcattcagctgcaagggatgagatatggagtgattcctatctgttcatccactggaggacttgtcgacacggttgaggagggcgtcaccggattccacatgggttctttcaatgtcgagtgtgaaactgtagacccagccgacgtgacagcagtggcgtcaaccgtcacgcgagccctgaagcagtacgacaccccggcattccatgagatggttcagaactgcatggcgaaagacctgtcctggaaggggcctgcgaagaagtgggaggaggtgcttctgggccttggagtcgaggggagtcgagctggcatcgacgacgcagaggagatcgccccacttgccaaggaaaacgtagccactccgtgagggcttggtggtgcctcgactcggaaacacgcgttggtgataggaagcgtcttctaggatcctcctgggcggccttgtggctggtggagtgaggtgtccagtcagacacggtttcgcctctactactagtctactactactacctcattgtaatataatccttggcattctaaaaaatgccatgcctgctctaattcttctgttcttgcgcaacatacacttcccgcttccgttcggtcgacaacggttatgtaaatatagcgaatgctagcgggcagctcgaatcatcccaagtggtagggtcacgatggagttgtttgaaatggctcgttcttgtgcatagttcgcttctcagtg

SEQ ID NO: 199302 - DNA, 574 bp, Zea Mays
atgatacaatattgggaatttagaagggaacatgataccgaaaagccagcatggacaactaacaacaaagagcacttcagtcattatgttgaactgaatcctgaccctaatgccgagcacaatagagagaatggttggttttgtggcgaagatatgcctgatggtggctgggttcatgatgatgaggacatggttgatggtaagtattgtgcttttgttctacatttttgtgctgatgtaatagtagcacttatatgtcttactttgcaagcgccgatgcatttagatatatttatttctaattatggtaaaaaaacaagactctttaccgatacaacttggtttgcctactgattcttctacactttctccctccttttccttcatgaacctcaatgttataggataaacatcactgggtgacttctagagttgcatcaatggttctttttagtgagaaaaggtcttaccattgatcgaaaatgtaacttgtagagcatgatgttgaatcatgaaaattagttgagtacttttgatctaacaaatagaaggtcgaattgggaaaggaaatact

SEQ ID NO: 199303 - DNA, 1095 bp, Zea Mays
atgatacaatattgggaatttagaagggaacatgataccgaaaagccagcatggacaactaacaacaaagagcacttcagtcattatgttgaactgaatcctgaccctaatgccgagcacaatagagagaatggttggttttgtggcgaagatatgcctgatggtggctgggttcatgatgatgaggacatggttgatgtgggagattaattcaattgtgttgcatgcttggacgaacaacgcctcctcattacatcggtccaactatacgcataagagggtcggtgcaatgaggtgcgctgctagggcatccaataggtccattgaggcggcgatggcggaagaggaaggtagaagcgggtgtgagtatgtgactgaggaagaggttttataatacacactctatccaagactctatgacaactgggcaccgaggcggcggaagaggaagaggttttatattagtaccggttggttactgaaaccggtactaaattactctgcacgaaccaaatatctttagtgtcgattacttcagaaaaccggtattgaatatcttagtatcgttttattgtcttgaaccgggactaaataaattaatattaacaccggtggacgtgctaaacgttttaaattaatataaatccgtactaatatcttctggacgtgctaaacgttttaaattgatactgaagctaatataaatattgattttaaacaaccggaacaaacattgttgaacggaatccccattctccaatagtgtatgataaacatgccactaacctacgtctctcgctctattcacctctttaccaaatctcttttgggttaattgaagaacgtgggtaccgacgttcttaattgagttaagttcatgggtttgttgaagaacgtgggttccaagtttaaattcgtgcgccctagataaaaccgtcgaacttatagtattagaaacgtgggtacccatgttcttaatttaagtttgtgggccacgtggacaccgttgaacttaacccaaaaacctaaatccctagcgacccgcgcgtctctcttctttcccgcctacacgcacgccaccggtccccgctcctc

SEQ ID NO: 199304 - DNA, 943 bp, Zea Mays
cggtgcaaaaaaagcaggcgtacttgataagggtcccaccatttcctaagtatacatccatatcagctcaaaggagtatgagaaatcatgcccagatttatgctgagctatctacaagctatagcaatggtagcaaaactgatttagagacattcatccaatcaaattcagcagcatttcaatctgacaacaaccttgggctggtgaagcaagtgctctcctcgatgtacaaacggaacatccaaaggctgacccagacttacttgactctttcacttgaagatattgctaggtctgttcaacttgaaacaccaagggatgctgaaatgcatgtacttcgcatgatcgaagacggagagatccatgcatccataaaccaaaaggatggaatggtcagctttcatgaagatcctgaacaatataaaagtgttgagatggtggagcatattgacacctctatccatagattgacggcattgtccaagaagttggcttcaattgatcagaacatgtcatgtgatactgcatatttgatgacgggaagggatcgtggaagattcgactacgacgacttcgactctgttccacacaagtatttttgagttgatctgagccttatgtgattctgaagtacgatcgtcaacgtagcagccattccctaaagttataattagtttgatcggccaatggcttttgaaaattgaaatgctgtaaattctggtttaaagaatgggtctgtgaaggcagagacttaagacaatagggctgttcactttggatttaagtcaactattttgtttgactactgcagctataatatataaagacaaaaacattgtataagtagtagaagctgatacggattaaagccaaccgaatatgccgaataatcggtaacccaccataaggttatcatcttcaatgatatctacatcctcttgta

SEQ ID NO: 199305 - DNA, 3788 bp, Zea Mays
ctcagatctgggttcatctctgccgaggagctcggcaccgtggtgtgctcgctcgacctgcgcactacctgaagacgcattatgctgctattgtctccctcgtcgttgcctcgtgggtcacagtgctcctccactccctcgtcagccacaatgacagccaacaagactggtgtccaggagactgaaaagcactgctgaggagactgaaattatcttcgcgaggtggattacacattgtaagaactaagaactaaatctgttttttcttcttcttattttaaagaggaccaggtctcctgcattcttggaaacaagagacgatctcagattatcactaacttttttatgagctataaatgtgctctgcttaacggacatcttaaggaccacagattcagagaactatggattcatataaaacgggtgactcgttcatctttgagacgcagcgccacaatggcataagggagctttgccctgcgaatggagagcacaagctaatccgtgcccgtgctctcatccccctgcatgaacccaattctgttgcgatcaaccatcaagggttgtcctattgtattattcagttcattgaaaaggactacaaattagcagatactatgatttggggtctactcaagcattggccagtcagaaactgccaagaggtaattggttttgaccaaattatcaactagatggctctatataaaatggcacacggaattggctgtgagcctgtctgtcaatgtccgaaacgacggcaggcgtgaagcggtggtcgggaaggaattaatgagtagcagcaatgcgtcagacagctacgtatcttcttccgcaatcccattctgacttaattaataaaacaacctttataatagtattatactgactcgatcgtctccaaagtctgaagcaaataaagggtgggtgcgtctccacctatacatatagtataatagtgaggtacccgtagagaccatataaatcagagggttttatatttcaccatttgataagaaaatactcgtattaggaagcttcaaaaaggagaggatattggatcttctatatatcttactttgtcctttatcattttcaaatgccaatcagtgaacaccaaatttcaggtttgttaaatgcctgttaccagtcaggaatgatatattatcttcggataataaataaaataactgggaactaggaattgtaccactatgctgtgtacttagttcctatgtaattctaattccttggtttattcttcaataactaggactggacaagagcttttggacatggttgacagtttgcccattgttgcgataaagagcctaaaagtatctgacttccaagctctctgcccagccaccagttttgagttgtattgagagcaaaaattcacatgctttccgaatgcaaatattgttctcataatttctcccagcagcaactaagccatttatcgcatggagggtcccatagataaaacatattccccaagtgccataccttgcaggggattgagatgctgtcattgggatcatttaaaaccagagtcattctctcggcctttcagattgaaccgattacttcaacggtgtcatacatgattggtagggatgtgatggaggggagggggcaatgcaggtgcaggtgcattccgaatctccttccctttctccggattctattgttctttgtttcctcctattcgtttctgtagtgagaaatgtcttcggtaagatttggttggtggaaattcactgcatttacttattattgtctcccaatttcctcttcatagtcaggaactttctggttcagtggaaatgtggaattgtaccaatgtagagtctagaataagtgtgcccttatcctcccagttagcataatgtgggtacttcgtttgtcatgtatggggcatagtgcaatacaaatccttttgttaattaataatgattcagggatgcctcgttgtccatgtaacatccaaactgcccacacacacacatcaaattttggcatgataaccctgttcattaaatctgttttgtttgtaaatcacaaacaaatatgttaaccttttattgaagtgtgagatactcaatcatgttgtgttttttggttttctattttgagtgtataggtaaaatttagaattttaagagcataataccctggttgtatttggcttgggagtaagtggatgttagcaatagtggagcatgtgtgggaagcggaggctgacgacagctcttacgttatcaaggaacaaacttatcctgagaaagtgctcacacgtggaacacagactactctttatttgagagatgatgacaagtatgagtttactgaccctgcaagaattgaaagcttagttaagaactgctcacaatttgtgtcattctcatatatacatggaaggagaaatcaagaacatttgggggtaatgattgctatagtttattgtaatttagcttccttcaattatacttaatgtaattcttcatccttgtctaaatagtctaaagagtctaaagaggaggaagaataaaaaaaggtgaagaggtcactgaggttagttttgtgtcagtgtaatatgttgtttgttttcatgtaattcttgcttctaatattatagaaagaatccggataggcagataagaacatgtcaatgattttgatattttcagaaataaggatttctatggtgcatgttatttaaaaaacaagccaactatagcttgtgtcaggtcatagatgcttgctattattggaactggtccatgcaaatcatttttgctcaaaatccaacttggccaatcattagtaggtcaagttatattcatgaaaccttttgtttgttgtttctttgcctaaaaacatgctttcattggttagttcattatcctagagttgcagagggactttatgtagcatgatccatgctcaggtattgcaattttggcaatttctgtaatgtaacatggaattggtgaaggtccttggtcgagtaatcacaatactattgatattattcatattgattaaatttttatcattggttctctttgtttgttatattatcttgtgtcatcgattaacaactctttcaccggacgtcttgaggtgactttagtttcttatcttttatatgtatcctgacataaaaccagtgcttattttctattcgtgcatgtgcaggtgttgtactgtttcttagaattatccagcaacttcgatgggaggaattttgtttgagcttgtgggcccaatttgagaagttttacatatagagtaaaaaaaggtcctgctctcgtgttttcgtgtaaaactggattttgttcagttcttactgtggagctatgcttcctagataaaacttctcgatttgtataacttctcgatttgtataaaaacttctccatttacatattgggaagtctatatgtaaaacttctcgatttatatatcaactatgcttcctgtggagcaaggaagcgaacgcaagctagccttttgtattagtgcattctgttcagttcttacttgatcatcccgtgttctcgcgtgtgccatggctgagtggcaagctcaacactggtattgttgtcttgtctcaaatgaagtccggttccacaagttaaccggaaatcttcatgggtgatagctgcgtcagattcttccgcgcatagggcaagtaatgcaagtgatagctgtgtcagtttacccccattttcttgggcatcacttgtctcaaatgaagtccattggaggttcgcaattta

SEQ ID NO: 199306 - DNA, 2724 bp, Zea Mays
ctcagatctgggttcatctctgccgaggagctcggcaccgtggtgtgctcgctcgacctgcgcactacctgaagacgcattatgctgctattgtctccctcgtcgttgcctcgtgggtcacagtgctcctccactccctcgtcagccacaatgacagccaacaagactggtgtccaggagactgaaaagcactgctgaggagactgaaattatcttcgcgaggtggattacacattgtaagaactaagaactaaatctgttttttcttcttcttattttaaagaggaccaggtctcctgcattcttggaaacaagagacgatctcagattatcactaacttttttatgagctataaatgtgctctgcttaacggacatcttaaggaccacagattcagagaactatggattcatataaaacggcatggaactgattcaaaagaacatgaagtccagtgtgatttgaaaatttgggtatagctcagaagagatttgtgatgattcgaagtatcaaagaaacctgcaacatcaagaatttaaaaatgaaggtgactcgttcatctttgagacgcagcgccacaatggcataagggagctttgccctgcgaatggagagcacaagctaatccgtgcccgtgctctcatccccctgcatgaacccaattctgttgcgatcaaccatcaagggttgtcctattgtattattcagttcattgaaaaggactacaaattagcagatactatgatttggggtctactcaagcattggccagtcagaaactgccaagaggtaattggttttgaccaaattatcaactagatggctctatataaaatggcacacggaattggctgtgagcctgtctgtcaatgtccgaaacgacggcaggcgtgaagcggtggtcgggaaggaattaatgagtagcagcaatgcgtcagacagctacgtatcttcttccgcaatcccattctgacttaattaataaaacaacctttataatagtattatactgactcgatcgtctccaaagtctgaagcaaataaagggtgggtgcgtctccacctatacatatagtataatagtgaggtacccgtagagaccatataaatcagagggttttatatttcaccatttgataagaaaatactcgtattaggaagcttcaaaaaggagaggatattggatcttctatatatcttactttgtcctttatcattttcaaatgccaatcagtgaacaccaaatttcaggtttgttaaatgcctgttaccagtcaggaatgatatattatcttcggataataaataaaataactgggaactaggaattgtaccactatgctgtgtacttagttcctatgtaattctaattccttggtttattcttcaataactaggactggacaagagcttttggacatggttgacagtttgcccattgttgcgataaagagcctaaaagtatctgacttccaaggaacgatagctctctgcccagccaccagttttgagttgtattgagagcaaaaattcacatgctttccgaatgcaaatattgttctcataatttctcccagcagcaactaagccatttatcgcatggagggtcccatagataaaacatattccccaagtgccataccttgcaggggattgagatgctgtcattgggatcatttaaaaccagagtcattctctcggcctttcagattgaaccgattacttcaacggtgtcatacatgattggtagggatgtgatggaggggagggggcaatgcaggtgcaggtaaaatttagaattttaagagcataataccctggttgtatttggcttgggagtaagtggatgttagcaatagtggagcatgtgtgggaagcggaggctgacgacagctcttacgttatcaaggaacaaacttatcctgagaaagtgctcacacgtggaacacagactactctttatttgagagatgatgacaagtatgagtttactgaccctgcaagaattgaaagcttagttaagaactgctcacaatttgtgtcattctcatatatacatggaaggagaaatcaagaacatttggggtctaaagagtctaaagaggaggaagaataaaaaaaggtgaagaggtcactgaggtgttgtactgtttcttagaattatccagcaacttcgatgggaggaattttgtttgagcttgtgggcccaatttgagaagttttacatatagagtaaaaaaaggtcctgctctcgtgttttcgtgtaaaactggattttgttcagttcttactgtggagctatgcttcctagataaaacttctcgatttgtataacttctcgatttgtataaaaacttctccatttacatattgggaagtctatatgtaaaacttctcgatttatatatcaactatgcttcctgtggagcaaggaagcgaacgcaagctagccttttgtattagtgcattctgttcagttcttacttgatcatcccgtgttctcgcgtgtgccatggctgagtggcaagctcaacactggtattgttgtcttgtctcaaatgaagtccggttccacaagttaaccggaaatcttcatgggtgatagctgcgtcagattcttccgcgcatagggcaagtaatgcaagtgatagctgtgtcagtttacccccattttcttgggcatcacttgtctcaaatgaagtccattggaggttcgcaattta

SEQ ID NO: 199307 - DNA, 1088 bp, Zea Mays
tggggattgagatgctgtcattgggatcatttaaaaccagagtcattctctcgtcgtgtttgcaggcctttcagattgaaccgattacttcaacggtgtcatacatgattggtagggatgtgatggaggggagggggcaatgcaggtgcaggtaaaatttagaattttaagagcataataccctggttgtatttggcttgggagtaagtggatgttagcaatagtggagcatgtgtgggaagcggaggctgacgacagctcttacgttatcaaggaacaaacttatcctgagaaagtgctcacacgtggaacacagactactctttatttgagagatgatgacaagtatgagtttactgaccctgcaagaattgaaagcttagttaagaactgctcacaatttgtgtcattctcatatatacatggaaggagaaatcaagaacatttggggtctaaagagtctaaagaggaggaagaataaaaaaaggtgaagaggtcactgaggtgttgtactgtttcttagaattatccagcaacttcgatgggaggaattttgtttgagcttgtgggcccaatttgagaagttttacatatagagtaaaaaaaggtcctgctctcgtgttttcgtgtaaaactggattttgttcagttcttactgtggagctatgcttcctagataaaacttctcgatttgtataacttctcgatttgtataaaaacttctccatttacatattgggaagtctatatgtaaaacttctcgatttatatatcaactatgcttcctgtggagcaaggaagcgaacgcaagctagccttttgtattagtgcattctgttcagttcttacttgatcatcccgtgttctcgcgtgtgccatggctgagtggcaagctcaacactggtattgttgtcttgtctcaaatgaagtccggttccacaagttaaccggaaatcttcatgggtgatagctgcgtcagattcttccgcgcatagggcaagtaatgcaagtgatagctgtgtcagtttacccccattttcttgggcatcacttgtctcaaatgaagtccattggaggttcgcaattta

SEQ ID NO: 199308 - DNA, 2868 bp, Zea Mays
gggagtaactttttaggttttgtggttactttttcaaaaattaactctttcgttcactataactacaaaatagtaagccagtgtactgcaagaacaatgttcttcttgaatactcaaaagaacaatgtccatcatggattctgctacgtgaccatgtggtccagcttgtttggtacacgaggccatatctttgtgttcgctttatgtatatgttccctttttattcctcagtttattcacttttatcttgtagttgcaggtttcttactcctgggtaggttccatttgtcttaaatagctttagagcaccaccttatgatatctccttttgactatgattattttcctatgaataatttttctgggaatactattaagataccaactaatctttgatatcctctaaaccaaacgcttcatgatagatgattcttgaggttgttgaatgaattggtcttgcgcatgtttgcaggcctttattggcccactaatctttgatacccactaatctttgtgctctcaattagctctaaactaatctttgatacccactaatatttgtgctctgaattggcctaattaatgatcaagtggtcatggtgtatgtcaactaatcactttctcttcatgtactactaggttataattatttgatgtggagtataaacatgcttcttgtaacatacatactgatggttaggtacctatcctagtcgtgtttgcaggcctttcagattgaaccgattacttcaacggtgtcatacatgattggtagggatgtgatggaggggagggggcaatgcaggtgcaggtgcattccgaatctccttccctttctccggattctattgttctttgtttcctcctattcgtttctgtagtgagaaatgtcttcggtaagatttggttggtggaaattcactgcatttacttattattgtctcccaatttcctcttcatagtcaggaactttctggttcagtggaaatgtggaattgtaccaatgtagagtctagaataagtgtgcccttatcctcccagttagcataatgtgggtacttcgtttgtcatgtatggggcatagtgcaatacaaatccttttgttaattaataatgattcagggatgcctcgttgtccatgtaacatccaaactgcccacacacacacatcaaattttggcatgataaccctgttcattaaatctgttttgtttgtaaatcacaaacaaatatgttaaccttttattgaagtgtgagatactcaatcatgttgtgttttttggttttctattttgagtgtataggtaaaatttagaattttaagagcataataccctggttgtatttggcttgggagtaagtggatgttagcaatagtggagcatgtgtgggaagcggaggctgacgacagctcttacgttatcaaggaacaaacttatcctgagaaagtgctcacacgtggaacacagactactctttatttgagagatgatgacaagtatgagtttactgaccctgcaagaattgaaagcttagttaagaactgctcacaatttgtgtcattctcatatatacatggaaggagaaatcaagaacatttggggtctaaagagtctaaagaggaggaagaataaaaaaaggtgaagaggtcactgaggttagttttgtgtcagtgtaatatgttgtttgttttcatgtaattcttgcttctaatattatagaaagaatccggataggcagataagaacatgtcaatgattttgatattttcagaaataaggatttctatggtgcatgttatttaaaaaacaagccaactatagcttgtgtcaggtcatagatgcttgctattattggaactggtccatgcaaatcatttttgctcaaaatccaacttggccaatcattagtaggtcaagttatattcatgaaaccttttgtttgttgtttctttgcctaaaaacatgctttcattggttagttcattatcctagagttgcagagggactttatgtagcatgatccatgctcaggtattgcaattttggcaatttctgtaatgtaacatggaattggtgaaggtccttggtcgagtaatcacaatactattgatattattcatattgattaaatttttatcattggttctctttgtttgttatattatcttgtgtcatcgattaacaactctttcaccggacgtcttgaggtgactttagtttcttatcttttatatgtatcctgacataaaaccagtgcttattttctattcgtgcatgtgcaggtgttgtactgtttcttagaattatccagcaacttcgatgggaggaattttgtttgagcttgtgggcccaatttgagaagttttacatatagagtaaaaaaaggtcctgctctcgtgttttcgtgtaaaactggattttgttcagttcttactgtggagctatgcttcctagataaaacttctcgatttgtataacttctcgatttgtataaaaacttctccatttacatattgggaagtctatatgtaaaacttctcgatttatatatcaactatgcttcctgtggagcaaggaagcgaacgcaagctagccttttgtattagtgcattctgttcagttcttacttgatcatcccgtgttctcgcgtgtgccatggctgagtggcaagctcaacactggtattgttgtcttgtctcaaatgaagtccggttccacaagttaaccggaaatcttcatgggtgatagctgcgtcagattcttccgcgcatagggcaagtaatgcaagtgatagctgtgtcagtttacccccattttcttgggcatcacttgtctcaaatgaagtccattggaggttcgcaattta

SEQ ID NO: 199309 - DNA, 1005 bp, Zea Mays
tttctataaccacattctgttattttccttataaaagtgagaatagccgatctgttgatgtgcttggccttaagactgcttttgcaaccttcatgggtaaggcaagtaaccttcctcctttgcctctctgatgctatgtgttatgtaataatggcctaaccccatcggtcgcttagtaagttgtcttgtctgttattaacttacattaaaattctgccacaaattcccatcaacaagaaaaacaagaaagatagctactaggagaagctttaatacgctcgatacctggcatgatgagttcctcaatcaatttcaggctggcccatcggatcctcaatgctttctgttcattttggtcgggaacaagattgatttagatggcgggagcaaacggatggtcagttttcctgaatgcgcaagctttctcatatatatatattcgaaataccctgcagtctctttgcctttcccgcaggttccagagaagaaagcgagggaatggtgcgcctccaagggcgatattccatacttcgagacctctgcgaaggaggaccacaacgtcgacactgctttcctatgcatcgctaggctcgctttggagcatgagcatgaccaagacatttacttcaagacagttgtggaacaagtcccggacactgaacagacaagcggatgtgcttgctaggagccagccatttcctggaaggctggaactacgtggatgttactgaaggactggcccccgatatgtttccctcccattttttcttttgagctccagtaactttattactattctgtgttgctctcactggattttagcacttctgtaagttgtcatcttttaaagttaagaatttttacataagtcttacacatcgaacaaatccaccatgtacattaagatgcaatgcttatcgaacactcaagtattatgctcttgtaacctaaattaatcaaaattgggcaatgatcagcaaccgacttgtgctaaggtagaaaaat

SEQ ID NO: 199310 - DNA, 650 bp, Zea Mays
tcaggagaagggtgacagaatacatttctataaccacattctgttattttccttataaaagtgagaatagccgatctgttgatgtgcttggccttaagactgcttttgcaaccttcatgggttccagagaagaaagcgagggaatggtgcgcctccaagggcgatattccatacttcgagacctctgcgaaggaggaccacaacgtcgacactgctttcctatgcatcgctaggctcgctttggagcatgagcatgaccaagacatttacttcaagacagttgtggaacaagtcccggacactgaacagacaagcggatgtgcttgctaggagccagccatttcctggaaggctggaactacgtggatgttactgaaggactggcccccgatatgtttccctcccattttttcttttgagctccagtaactttattactattctgtgttgctctcactggattttagcacttctgtaagttgtcatcttttaaagttaagaatttttacataagtcttacacatcgaacaaatccaccatgtacattaagatgcaatgcttatcgaacactcaagtattatgctcttgtaacctaaattaatcaaaattgggcaatgatcagcaaccgacttgtgctaaggtagaaaaat

SEQ ID NO: 199311 - DNA, 806 bp, Zea Mays
cctaggtttgatacagtgctgcaattttctgctctcccaccgtacataatgcgctcgaccacattaattttgtcgttaagagtcaaacgatggtttgtgttcacaactgaaaccattggattttgtttttgacatcctcaaggaggaattaaccgagagcttgctgccgcaaagaagatttctcacatctgagatcgggagaagaaagcattttcaaggagaatagccgatctgttgatgtgcttggccttaagactgcttttgcaaccttcatgggttccagagaagaaagcgagggaatggtgcgcctccaagggcgatattccatacttcgagacctctgcgaaggaggaccacaacgtcgacactgctttcctatgcatcgctaggctcgctttggagcatgagcatgaccaagacatttacttcaagacagttgtggaacaagtcccggacactgaacagacaagcggatgtgcttgctaggagccagccatttcctggaaggctggaactacgtggatgttactgaaggactggcccccgatatgtttccctcccattttttcttttgagctccagtaactttattactattctgtgttgctctcactggattttagcacttctgtaagttgtcatcttttaaagttaagaatttttacataagtcttacacatcgaacaaatccaccatgtacattaagatgcaatgcttatcgaacactcaagtattatgctcttgtaacctaaattaatcaaaattgggcaatgatcagcaaccgacttgtgctaaggtagaaaaat

SEQ ID NO: 199312 - DNA, 738 bp, Zea Mays
gcgcccctcctccgtgcgtgccccgcccccgtccttcgctcacccgatgccctgccacctccgccgcgatagcctcccccacgaaatgcccccgtgatgttcgccccgctgcgaacccctccccctagatggaataagcagaggtccaatgcggatccgcggcccccgaccctccaccttggtgtgacagtcgcggctccgtggaggcaacttgctccctcgctcccacctcccacgccgccactgttgtcgccttcagcacgctgcccagcccacgccccccccccccccccgcctccaaatgtggatctgccaccccggccctccaccttggtgtgccttcagcacgccaccactgctgtttgattccttctcctttttgtttaggacgtcgccaaattccatccatctctcagcgccgtggtctcccgatgtggatgggggaaggaggaattaaccgagagcttgctgccgcaaagaagatttctcacatctgagatcgggagaagaaagcattttcaagccgatctgttgatgtgcttggccttaagactgcttttgcaaccttcatgggtaaggcaagtaaccttcctcctttgcctctctgatgctatgtgttatgtaataatggcctaaccccatcggtcgcttagtaagttgtcttgtctgttattaacttacattaaaattctgccacaaattcccatcaacaagaaaaacaagaaagatagctactag

SEQ ID NO: 199313 - DNA, 495 bp, Zea Mays
atcgacaaaatggaggtaccgcgcctcccccagggtgcccttccatccatggcgttgtcgcggctgtccccgcaatcaactcccagatctcgtgctcacctccccgcaatcaaggtcgtcacgcccgatgaggatggtcgccagtcgccgcacggcggttcgggccccagcgatagctccggcgcaggcgcgaggaagaagctccggctcaccaatgagcagtcgacgctgctcgaggacaccttccgcgcccacaacatactctccaacgcgcagaagcaggagctcggacggcaggtggatctcagcgccaggcaggtggaagtgtggttccagaacacacatgttcagataacacacatgttcatgctcatgctgaccccacacaggttcatattgtcttctgcgtgtatgtagttgtttcttcttcaattctctttgtggggaaaacattaattgggattttcccagcaatcagcttgataggcgacatca

SEQ ID NO: 199314 - DNA, 1362 bp, Zea Mays
attcaattgtattgtatgttctaactgaaagcactaaaagttgtaaaatgtggcctatattttgtttgtgctattggaaaagtagaaacagtctaagtgcctgttctgtttctttttggcacatattagttctgtgtttctgtttgcactgatgatattggaaggaatctgggataactgaaaatatcggtgtatgctgtcgaagcctgtgaaattgttgtccaggctcgtgaaattgtaaaagcaaacaacctaactgatcagattgtggtcatccatggacgtgttgaggatgttgaccttgaggaaaaggttgatgttataatatcagaatggatgggctatatgcttctctatgagagtatgctgccaagcgtcctatttgcaagagataaatggcttaagcccgggggtcttattcttccttctcatgctacgctcttcatggcccccgtaacaaatcgtgagagatatgaagacagcgtcgatttctggcgtgacgtctatggcataaacatgtctgctcttgtgccacttgccaaaaagtttacatctgaggaaccctccattgaaacaattggtggagagaatgttataagttggccatctgtgttcaagcgcttcgattgctataattttacagctgaggaattcaaatctatcacttcaaaatacaaagtttcatcaatgatgttagctcccattcatggctttggtttctggtttgaggtggagttcaacgagcctatagagtcctctcataattttccttccagtttggatccacttgagattatacagaagaaaaggagacgatcctcagaagatatagttctgtccacagccccagaggatgagccaacccactggcaacagaccattttgtatttcccggatcctatagaggtgaagcaggaccaaattatagaaggttctgtaacagtgtcccaaagcgaggagaatccacgttttctgaatattcatctagagtgcttgaggacagacattggttaaggactgcgccatgcgatgaactggtgtttttatgcttctagtggcttgatttcaggcgcgcaatggggtgttggcagggaggagctgacaatatttcagatttctttaatggaagtggagaatttgtactatttatgccaattatccgtctaatacgaaggcaggattttagtaattgtactccgtcttattctatagagtatatactggttgttgattttggatccgcacgctgtgacctaagtctcgcatccaagggtccctttggaacaaaggaaacatgaaggatttttttatgatccattccctatcggaaaaattcccacgtgagtctttagaccacattat

SEQ ID NO: 199315 - DNA, 1677 bp, Zea Mays
agttattactcaaaatccatgccattaaaaaggacttcaactccaagcggaacacttctactcccgttgttaaacggcactaccaacgaaacaacgaggaagaaggccgggagaggaaatcctttggcggcgcgcgcacgcgcggcagacacgtccacatccactgcagcgacgagccagccggtccgcggtcagcagcttggcagcagccccactctggctcccccctccgccatcactgcgcttgtgcgcgcgcacccacccccgcggcccgctcatcacccgcccggtcccgccgcctatttaacgccgcccccaccggggcactcggccctctccgtctcagaacgccccagccttccacctcgaactccgcggcgcccagcgccctcggtaaccgccccccgccccgccacagagacaggtcgacgagacagacaaaggccggccgccatgggagaggacaagaaggcgggcaacaaggacgccgccggcggcgacaagaagaaggacgccggcgccggggccgcgccgcagcccatcgtgctgaaggtcgacttgcactgcgccggctgcgccaacaaggtccgcaaggccatcaagcacgccccaggtgtggagtcggtgacgccggacatggcggcgggtaaggtggtcgtgaccggtccggcggacgcggtggagctcaaggagcgcatcgaggccagggcgaagaagcccgtgcagatcgtctccgccggcgccggcccacccaagaaggagaaggacaaggagaaggagaaggataagaaagcggacggcggcgagaagaaggccgacaaggagaagggtgccgacaagcccaaggaggagaagaagaagcccaaggaggagactgtgacgctgaagatccggctgcactgtgacggctgcatcgagcgcatcaagcgccgcatctccaagatcaaaggcgtgaaggacgtggcgttcgacgccgccaaggacctggtgaaggtgaccggcaccatggacggcgccgctctgccggcgtacctcagggagaagctcagccgggacgtggaagtggtggcgcccggcaagaaggacggcggcggcggcggtgacaagaaggacaagggcgcaggagacgggggagataagaagaaggacggtggcggcggcggcggcggctccaggcggctactacggtgccgccccaccgcccaaccaccacgccggcttctaccccaacggcggcggcgtccattacccgcccgcgccagcctacgcgtacggccccacccacctccacgcgccccagatgttcagcgacgagaaccccaacgcctgctccgtcatgtgaactcgctcgcttcgccggtttgccgccgccgccgcgccttggcacccccttcctccgtgtgagaccaagaaccatgggcttgtcctggattagcggtgtctttagttaaaattatcagtgagtagtagctagcttaagcagtgctccgatccgagatcagttcttccagcagacctgtgtaaatgagagtctcgccgccccgccccgccccgccccggtgtaacgcatcgtcatgtgtaaaatctatccggacccgataaagttttgcccttctgtcatcgctaatcgccatttgcgacgccgctgatagtgctcagttaacggccaagttggac

SEQ ID NO: 199316 - DNA, 1651 bp, Zea Mays
agttattactcaaaatccatgccattaaaaaggacttcaactccaagcggaacacttctactcccgttgttaaacggcactaccaacgaaacaacgaggaagaaggccgggagaggaaatcctttggcggcgcgcgcacgcgcggcagacacgtccacatccactgcagcgacgagccagccggtccgcggtcagcagcttggcagcagccccactctggctcccccctccgccatcactgcgcttgtgcgcgcgcacccacccccgcggcccgctcatcacccgcccggtcccgccgcctatttaacgccgcccccaccggggcactcggccctctccgtctcagaacgccccagccttccacctcgaactccgcggcgcccagcgccctcggtaaccgccccccgccccgccacagagacaggtcgacgagacagacaaaggccggccgccatgggagaggacaagaaggcgggcaacaaggacgccgccggcggcgacaagaagaaggacgccggcgccggggccgcgccgcagcccatcgtgctgaaggtcgacttgcactgcgccggctgcgccaacaaggtccgcaaggccatcaagcacgccccaggtgtggagtcggtgacgccggacatggcggcgggtaaggtggtcgtgaccggtccggcggacgcggtggagctcaaggagcgcatcgaggccagggcgaagaagcccgtgcagatcgtctccgccggcgccggcccacccaagaaggagaaggacaaggagaaggagaaggataagaaagcggacggcggcgagaagaaggccgacaaggagaagggtgccgacaagcccaaggaggagaagaagaagcccaaggaggagactgtgacgctgaagatccggctgcactgtgacggctgcatcgagcgcatcaagcgccgcatctccaagatcaaaggcgtgaaggacgtggcgttcgacgccgccaaggacctggtgaaggtgaccggcaccatggacggcgccgctctgccggcgtacctcagggagaagctcagccgggacgtggaagtggtggcgcccggcaagaaggacggcggcggcggcggtgacaagaaggacaagggcgcagccgcccctggccgacgccggctccaggcggctactacggtgccgccccaccgcccaaccaccacgccggcttctaccccaacggcggcggcgtccattacccgcccgcgccagcctacgcgtacggccccacccacctccacgcgccccagatgttcagcgacgagaaccccaacgcctgctccgtcatgtgaactcgctcgcttcgccggtttgccgccgccgccgcgccttggcacccccttcctccgtgtgagaccaagaaccatgggcttgtcctggattagcggtgtctttagttaaaattatcagtgagtagtagctagcttaagcagtgctccgatccgagatcagttcttccagcagacctgtgtaaatgagagtctcgccgccccgccccgccccgccccggtgtaacgcatcgtcatgtgtaaaatctatccggacccgataaagttttgcccttctgtcatcgctaatcgccatttgcgacgccgctgatagtgctcagttaacggccaagttggac

SEQ ID NO: 199317 - DNA, 1363 bp, Zea Mays
caaaaaatcggtaatgctagtgctgtactcagttattactcaaaatccatgccattaaaaaggacttcaactccaagcggaacacttctactcccgttgttaaacggcactaccaacgaaacaacgaggaagaaggccgggagaggaaatcctttggcggcgcgcgcacgcgcggcagacacgtccacatccactgcagcgacgagccagccggtccgcggtcagcagcttggcagcagccccactctggctcccccctccgccatcactgcgcttgtgcgcgcgcacccacccccgcggcccgctcatcacccgcccggtcccgccgcctatttaacgccgcccccaccggggcactcggccctctccgtctcagaacgccccagccttccacctcgaactccgcggcgcccagcgccctcggtaaccgccccccgccccgccacagagacaggtcgacgagacagacaaaggccggccgccatgggagaggacaagaaggcgggcaacaaggacgccgccggcggcgacaagaagaaggacgccggcgccggggccgcgccgcagcccatcgtgctgaaggtcgacttgcactgcgccggctgcgccaacaaggtccgcaaggccatcaagcacgccccaggtgtggagtcggtgacgccggacatggcggcgggtaaggtggtcgtgaccggtccggcggacgcggtggagctcaaggagcgcatcgaggccagggcgaagaagcccgtgcagatcgtctccgccggcgccggcccacccaagaaggagaaggacaaggagaaggagaaggataagaaagcggacggcggcgagaagaaggccgacaaggagaagggtgccgacaagcccaaggaggagaagaagaagcccaaggaggagactgtgacgctgaagatccggctgcactgtgacggctgcatcgagcgcatcaagcgccgcatctccaagatcaaaggcgtgaaggacgtggcgttcgacgccgccaaggacctggtgaaggtgaccggcaccatggacggcgccgctctgccggcgtacctcagggagaagcccttcctccgtgtgagaccaagaaccatgggcttgtcctggattagcggtgtctttagttaaaattatcagtgagtagtagctagcttaagcagtgctccgatccgagatcagttcttccagcagacctgtgtaaatgagagtctcgccgccccgccccgccccgccccggtgtaacgcatcgtcatgtgtaaaatctatccggacccgataaagttttgcccttctgtcatcgctaatcgccatttgcgacgccgctgatagtgctcagttaacggccaagttggac

SEQ ID NO: 199318 - DNA, 1302 bp, Zea Mays
aataagtcgtttattgaagaatcacatgctggaatcaaaatctcgccacaggataacaactatgttggtttgcatgataggcttgttacaatcacagggacctttgataaccaaatgaatgcaatagatttgatactgaaaaagttatctgaggatgttcactatccacctaatttgagctccccatttccttatgcaggccttactttcccaagctaccctggtgttcctgttggttatatgattccacaggtgccatatagtaatgctgtgaactatggacctaataatggttacggaggaaggtatcaaaataacaagccaactacacctatgagatcacctgctagtaatgaagcccaagaatctttgaccattggtatagccgatgaacacattggtgctgttgtaggtcgagcaggaaggaacataacagagatcattcaggctagtggtgctcggatcaagatatcagataggggtgactatatatctgggacatctgacaggaaagtgacgattactggaacacccgaagctatccggaccgcggagtccatgatcatgcagagggtgtcagccagttcagagaggtgatgagccccttctgaaggaagggcgtaggccattgctgtgtccgagcacagcagcgtgtttgatgcaagttaggaggatgtgggaactgctttccttttattttccccccttttttcttttttcctagcaagctcgagcagaaaaaagaaacaagctgttattgtttgttgcattgcgtccaaccgatggttttatgttagtataaactgctagtcgaagataattaggtgcagcgtttgaattgatttgggtttacggttgagttatatcccgtgtatgccataacaaaggcagtcgccgctctgttgctagtggcaagcgctgcctgtcctgtgtctgtttgtacgttgacaatttgattccgttgctcaaggatagaagaatattgatacaggagacccgaggactggtttggtttttgcagtgcttttgagtcgtgtgtgtagatctgtgctactgaggtgctatcttttacgtgatcaggaagagtatcggtggaagctttcaggtgttccattcacccatctgcgtgttgcgggtctcggcggttggcgaccgagcgtgtttgcctgcagtattgggaaacctgtctgactgagacgtctggctggatcgagctgcctggccgcggctcctatcccaggtcaagacaacgactaaacagcaaaaaccattaaatggatgtactgtgcaaaaaaaaaaaac

SEQ ID NO: 199319 - DNA, 2208 bp, Zea Mays
cacccatggcgataaaaaataaaaaatagaaatccatccaaaacccagctctgaaccgaaccgaaccgaaccccgccgtgctcgcttccactgccttcgattcctttggctctctctgtcgttggtcgtcctcgcccaccccaaccaaaaccccacggacggaacccaagaaagaagagaggggcacgagtccccatgaacgacgccggcgaggccgaggcgcaagaactcgccccacccggcgcctccgccgccgccggcctgcaaggcagggcggaggtcgacacctcgacgcccttcaagtcggtgcgcgaggccgtcgaccgcttcggcggcagcgccgcctggagctccgacctcatcaagcgtatgttcgcgctgcccccgagcccaaagaagcaggaggggggcgacgaactggccgatctggaggagcagaccgcgcagctagagaaggagctcggcgtcaaggaaagggagacgcttgatgtgctcaaagagttggagtccaccaagaaggtggtcgcagatttgaagctaaagatacagaacgaaggtgccggtgcattttgcatccctgaagagagtgttcggggtcaagccgagctgcccactgccgctgaagaggttgcagaagtgcagcctgagaatgctgaaactgatgtggttatgggcgcgcttcatgtgcagctgcaccagtctcctggtacttcagtgctgaagggccttgagcaggcaaaagccaatctaaacaggaccacgagtgatcttgcagctataagggcctccgtcgagtcgctgcggaacgacattgcgaaagagagaatcttggtggagagaagccgagagaagaagctgcagacgctgcgggatctgcagaggaggcgtgacgatcaatcggacatcttcatagagatcaagaagatgacatctgagctagagcagctcaggaatgcagcgagtgctgccaaatcggaagctgctatgctgtctgccgaaattgagcagatgagagctagcatcggcactgctgaggtgaggtgccgtgcagccaggaagatagaagaggcggcaagggcagcagaagctcttgcccttgctgaaatcaagatcctactacgcaatgaagcttcagttgaggatcttcagggcatggaagatgtgagcctttcattggaagagtactctgagcttgctgccaaagctcaggaggctgatgaacgctcaagaaagaaaatcgatgctgcaatggtgcaggtagatgaagctaacaggacagaatctgactccctcagaaagctggaggaagctcgattacaggttgaggaatgtaagaaggcgctacaggatgcccagaagagggtggatgctgctaaccgagggaagagcgcagtagaagaggctcttcgcagatgtcgatccacgactggacacaggaggaggtcggtccatgaccctcccaggttcaaacatccagctccccgttccagagattctcagaatatggatatcgtcggtgtttcaaagggtcccttgaaaccaacgttgtcaatagggcagatactgagtatgaagctaatgggaccagatgggtatgacaaaagcgtctgggacgacgcaagcgaagcttctactatgtcgctcggacatatcctgaaccgcaggcatgcagtcgtgtatagcagcgatgcaactgctcagaagaaattcccagggaagaggaagaagtttgcctttacaggactctctattttcttggcgagacaggccaagaggaagaaggaaaagggatcgcattagaaactgctgaagccaacttgggctgggaaaagagaagcattgtagtctaccttgctagctgttaactcagaccctagtgttactgttcttgtaatttactagtatgtgtcgttgataggtgcctagatcattggtttttccatagcaggctagtaagttgtagctgatatttctgtctagtggttatttcaggtgctgtgtgaacttgcaatgtagcagtatgactagtagctgatatcaagtatatgaggcatatgtggttcactgagattggaatcttcttctctgctacatgatttcacaactgatacctctctgttttgtgaacttggtcttttcaaccatggttctaacctgtcttgatgaaacgcgtgcttgcatgtccttcaagaaaataagaaaaaaaaa

SEQ ID NO: 199320 - DNA, 1552 bp, Zea Mays
tgctcacctgcttggtgttgtaatcaccttggtggcgacgatgtgagcgtgcaccacctccctaccaccaccctgcgtcacaaaggatccgtgaagcccttcaaagtctctccctccccctcgtgtacgacgcaaaggggagcaccgcaatccggcccgccaacggcgtgcctccacctcggccagccgccgccacgtcagcgcgtgatcggggaaaagcggcctggccaccatgcttctcgcggtctcgccgcggtcgcgggctttccctcgctgctccaaacagtcgtccaggacagccccggatcccgtgacaaaagaagcgtcgccaattcgccatggcccgtggccagcggcggcggaggcggcggaggccggagccgcgggcgagggccagtggcaaggggaagaaggccaggtacctgagcctcagcgacctcatggttaaggcggaggtgggagcgacgccgccgcggtccgggtgcgaggaggcgggcgtgaagcctgaggaggaggacgcccgcggcgacgggcagcagcggcaggtggagccgttcgcgccgcaccaccaccacgaggcgtccaccctgttcgaggccctgccggcgccttcgctctccgacatcctcggcccgtcgccgtcgccgtcgcccgacggggccggctccggggcctcggggctcccgggcgccgacgaggaggacctgccgcgccgcgcgctgcggggcagggagcgctgggtgtactgcagcggcgactcctcgttctcgccggcgtccacgccgcccgccaccgccacggccaccacgtcgtcgccgtcgccgccgtgctcgtcgtccgccgcgagcacgggcgcgtcggcgcgctcgctgctgctcaagctggattacgaggagatcctcgcggcctgggcggaccgggggccgctctacatcggcgccggcagcgacctgcaactcgacgcagcgcaggtggcttcggggagggcggagagggtgaggcggtacaaggagaagcggcggaggcggctcttcgcgaagcggatccgctacgaggttcgccgggccaatgccgtcaagcggccgcggttcaagggccgtttcatcaaggaggaggacgacgaaggcgagctccggcctacacagcctgcctccttcagtttgcttcttccatcatcgccagcctcgtccccgtgtgtatcactgcatggcaaaagaactcgatagctagctgcgatacgtacatgtatcttgtaaaacagtaaccaggaaaaaaaaagaaattgctacagccatggtctgggatttcgaggtccattgatgggaggcatctttgatgactcattgctttctccgtaacaagggctcattgttactcgttgttggtctcttccctttgcgttgagcttgtgtcctatactcctatcacagtcaatagaacgtcgtgaattgacattgttcgattatatggagctaccgttgtttaagttcaagttgggactagatcttttgctcattatcagcgtgtcaagcacaccacttgcaaagtgcac

SEQ ID NO: 199321 - DNA, 3613 bp, Zea Mays
catttttaaacaaagagagtatgcgcactattctctcccgatttatttcaaagacgggaaggacccccccttctggactggtgccggttgacggccatgaccaggcgtccttgtgggctgtggctgtacaccttgtccatggtggacgagagttccgccaggatcctgtcgacggcagccttgaagcggagagcggacgcgagcggcgctcacactcagagtcacagtcaccaacaaactgccagcgcaccaccaacaaaccctaattattccattccccaccggcgaccgcatctagcggtccagtgtagcccaagcggcagccggcaggcgcccagcagcagcattgcaggttgcagcaaagcgagcgagagtgagacagagctcacaagcctaacaccctctctccttcacctcccacatgcgctgatgcgccgcaagaagcacttggaccggggtggcggcggacgcggcggtggcacggagctcttcatctgcttcacctcccgctcctccaagctcctcagccccggccgcggtagtgccagcgcaagcggagctgagacagtgccggccccccctctgcacccctcactcagccgccgcctccgcaacagcggcagcctcaagggcggccagtccccaatgttcccgtccgggtccaccggcggtggccgccgcagccggggtggattcgaacctgccgagccgtcctctcccaaggtcacctgcatcggccaagtccgcgtcaagggcggtaagcgcaagcccaagcacacctcagccgccactctgcactcctgctccagacgcggcggagtcgggagcgcagaggtcagctttcgccgcgccggcgacgaccgggacggaccccagagcaagaaccagggctgggtgtaccagatcccggtcaacatctgcgaggcactcaagacatttggctcctgcggtggccgctcgctctgctcgccgtctcggcatggcggagccggcgagcggggcgcactccccaccgatgcaaactgtggcaagaagcggcggcagggcgctcctgctgggggtagctggctgtgcggtgctgccgtggcgaggtgccttctggcgatccaggaggaggacgacgacgaggtcggcaacggcaagggagctgcagttgtgccggcagaagagatgaggacatcggaagtggggctcgtcatggaagggtgggatgtcgaggaggagaaggctgtgatgatgggggatgtggaggtggagaagaaagatgagatcttggtagtggggaaggaagaagaggggagagtaagtgtctgcatccccccgaggaatgcactgctgctaatgcgctgccggtcagacccagttcgcatggctgctcttgccacccgcttctgggggtctccagctgcagctaccgtggagcaggtggacaatgaggtggctgggtgcctcaacgacaatgaggaagaagaagaaaaggaagaggaggctgaggctgagccactggagtgcaaagatggagctcgctgttcagctgtttctgtcaaagacttgaaatgtgaagagtgtggttctgatgaaaatgatggcgctgaagcaggggagataaatcaagaaaaggcagaagctgaagagagttctaaatgtggagatctagtggaagaaaaggagggtgcatcatgcagagtaggggtggaggaagcacaaattgttcggaaagatgccgagttggaggttcctttgggagaagttacagagatggaaaaccaagggccggacatggtggagttggtggtcagtgaggaagaagttccaggacatgagaaagttgacgaagagatgatggggaggagatcaatcaacagctattctccctcggcaactctgaaagaggaccgcaccaaattgcgacggttgagtagcaggatgtgtgttagcactagtagcagggcctcatcatccagtgatagggttggcaggcgacacagcttctcagctgagatggaggcacggcggtctagcttctcgagcttgaaggattcaaggagagctagtttctccattgatagagatggccggaggtggagcttctcaattgaacaggagcatcttgttgcgcagcctaaggtgctgatggcatccagaaaggggaagaagacgtcttctgaggcagagtcagaaaaggattgtgatgttgttgctccaaacagtgcagaggaaggtcaagaatcctatgacgatggaaaggaagaagacactactgagaatgtagcggaagaaggaaaaacaaagtctgcggaagcgaaccaggaagtagagaaagtagaaactagagcagaagagtgtgaaggtgggacagtaccagtgatacataggaggaagaagagtggtgagttaccagattgcctcctgttgatgatgtatgagccgaagctctccatggaggtctccaaggagacatgggtctgcagcaccgatttcgtccattggaagtcttaccagggcaagaataaccgcaatcactggcaacagaaggcttctgctgctggaacagtggagactaaggaaaaggagaatgctgaaggcaccaccattgcgaatgatgtacaagagagcaaagatccatcaacggtgaactcagctgtgcccatgccatgtccagttgtccagaagacaccaccactcaaaccagctaccacagaacagaagctgaagctggagttgccgccagttaccaatgcggcagcctatgctccatttgttctgaaaaggtgcaagtcagagccgatgcgatcatcggcgcgtttggcacccgatgcttgcttctggaaggaccgccatcggccgctgaatgcggctggagttgggttctgatccgtgccagacagctgctggaatgtgacatttagttaggatctggatgaagtaattggtgcagcactggaattttatgaagagaagaaactattacaaaatgacccccttcccttggcattggaaaaagacaaggatagtcgtttactaacttcgcctctcaaatttcctgggaaacttgctgttgatgtgcaaaacaatcgattattcatatcagacagtaatcataatcgaattgtggtgaccaacttggaagggcagttcatataccaagttgggagttctgaggaaggattgcttgatggcccatttgatgctgccctatttaaccgccctcaaggtattgcttacaattcaaaaaggaatatcttatacgttgcagacactgagaaccacgctctgcgagaaattaattttgtggacgagactgtgagaacactagctggaaatgggacgaaaggatctgattacagaggaggaggacaaggaacaaaccaggtcctaaattcaccatgggatgtatgctacgatcccgcagaggaggccgtgtatattgcaatggctgggcaacaccagatctggaagcacaatttacatgatggaataaccaaagttattagcggtgatggctatgagaggaatctgaatggctcaagaaatgcatgagttacttgttgctgatagtgaaagtagttccattcgagttgttaatctgaagacaggaggctcaagattgctg

SEQ ID NO: 199322 - DNA, 2350 bp, Zea Mays
  misc_feature (1)..(1): n is a, c, g, or t
ngtgctcttctcttctattgggacactttgtgataaactgaagcaaacagatccatataaatcagagcttgagacaatgctggtccgacatgtctttcctgaattcagcagtcgtgttggacacctgcgagcaaaggcagcatgggttgctgggcagtatgcccatatcaacttttcagacccgaacaattttcgtcaggctatgcactgtatagtttcaggaatgcatgatccagatcttcctgtgagggttgattcggtctttgcacttcgttcttttgttgaagcctgcaaagatttaaatgagattcgacctatacttcctcagctccttgatgaattttttaagctgatgaatgaggttgagaatgaggatcttgtgttcaccctagaaaccattgttgacaaatttggtgaagagatggcaccttatgcattaggtttgtgccagaatttggctgctgctttctggagatgtatggctagttcagaagctgatgatgaagctgatgattccggtgctttggcagctgttggttgcttgcgagcaatcagcacaatccttgagtcaattagcagcctcccacatctttttacgcaaatagaaccaacattgctgcctataatgcgcaggatgttgacatctgatggccaagatattcttgttccattagacaactacatttctcggggaactgatcactttcttgcatgcaaagatccagattaccagcaaagcctgtggaaggcacttcaatctattatgatggacgaaaacatggaagattctgatattgaacctgctcccaagctcattgaagttgtttttcaaaattgtaaaggcaacgtggatcactgggttgagcactatctcaggattacaattgagcggttacgtcgagcacacaaaccatacctgaaatgcctccttgtacaagtgatcgctaatgcgctctactacaatcctgcgctgacccttgagattttaaataagctcggggttgcagctgacatttttaaccattggtttgctatgctacgacaagttaaaaaaagtggggcacgtgttaatttcaagagggagcatgataagaaagtttgctgcttgggcttgacctcccttattgcgcttccagctgctaagattccagcagatgctttggatcggatcttcaaagcaacacttgagctgcttgttgcttacaaggaccaagttgcagaagctaagaagcaaaatgaagaggctgctgatgatatggatggttttgatgctgatgaagaagatgatgacgaagttgactctgataaggagatgggtcttgatgatgaagacggggatgaagtaagcagtcttcagctgcagaaattagccgcagaggctagaggcttccaaccagccgatgacgatgactcagatgatgatttcagcgacgatgagctacactcaccaatagacgaggtggatcctttcattttctttgtagaaactgtccaaggtttgcaggcatctgatcctgccaggttccagaaccttatgcatacattggatttttcttatcaagcgcttgctagtggcattgcacaacatgccgagcaaagaaaaaatgaaattgagaaggagaaatctgagaaggcaaatgcacagtgacgtcataaagcatttctggttcccttcgattgttttgccattttgccggtatagcattggtggacggttaatttcctgcgatttgcaggccgcaggtaagagtttttgcagccttagccaaagtgtaggacaaattcaatcttgtgagatagcatcttggataacctgtcacctcgaccatgttcgtcgtggccagttgtagacgtcttggttgtgcaagaaagtttctctcgaggacagttgctcgttttgttagggccatcaatttttttgggcggcttgtaagttatttgagaatcccacctcaggttgaggggttgtattctcgagtcgtcaaagtttagtaccggtgcggtgtagattgtatatggtttcagttgtctagaacgttgtggcttcatggacgggctgtggtataagtttttattattttttaatttttttgtcaacaagacattgtaattggggtttgtttgtttggtaagagcaagaaaggtcggcactgttatttcttcggtatcattgtccacttgtttcgatattagcagtttacctaatcctatatccaaactccactcttccatattcaaactccactctgaacaatgtaatctatagtgcttttgagtaaactatgaaaagattgctgcagatggttttacaatgatggaaaatgggtattgggataagtggtattgggat

SEQ ID NO: 199323 - DNA, 2377 bp, Zea Mays
ctcttctcttctattgggacactttgtgataaactgaagcaaacagatccatataaatcagagcttgagacaatgctggtccgacatgtctttcctgaattcagcagtcgtgttggacacctgcgagcaaaggcagcatgggttgctgggcagtatgcccatatcaacttttcagacccgaacaattttcgtcaggctatgcactgtatagtttcaggaatgcatgatccagatcttcctgtgagggttgattcggtctttgcacttcgttcttttgttgaagcctgcaaagatttaaatgagattcgacctatacttcctcagctccttgatgaattttttaagctgatgaatgaggttgagaatgaggatcttgtgttcaccctagaaaccattgttgacaaatttggtgaagagatggcaccttatgcattaggtttgtgccagaatttggctgctgctttctggagatgtatggctagttcagaagctgatgatgaagctgatgattccggtgctttggcagctgttggttgcttgcgagcaatcagcacaatccttgagtcaattagcagcctcccacatctttttacgcaaatagaaccaacattgctgcctataatgcgcaggatgttgacatctgatggccaagatgtttatgaagaagtccttgaaattgtttcctatatgtcattttactcgcctacaatttcactggacatgtggaccttgtggccagtgatgatggaggcgcttaatgattgggctatagatttctttgagaatattcttgttccattagacaactacatttctcggggaactgatcactttcttgcatgcaaagatccagattaccagcaaagcctgtggaaggcacttcaatctattatgatggacgaaaacatggaagattctgatattgaacctgctcccaagctcattgaagttgtttttcaaaattgtaaaggcaacgtggatcactgggttgagcactatctcaggattacaattgagcggttacgtcgagcacacaaaccatacctgaaatgcctccttgtacaagtgatcgctaatgcgctctactacaatcctgcgctgacccttgagattttaaataagctcggggttgcagctgacatttttaaccattggtttgctatgctacgacaagttaaaaaaagtggggcacgtgttaatttcaagagggagcatgataagaaagtttgctgcttgggcttgacctcccttattgcgcttccagctgctaagattccagcagatgctttggatcggatcttcaaagcaacacttgagctgcttgttgcttacaaggaccaagttgcagaagctaagaagcaaaatgaagaggctgctgatgatatggatggttttgatgctgatgaagaagatgatgacgaagttgactctgataaggagatgggtcttgatgatgaagacggggatgaagtaagcagtcttcagctgcagaaattagccgcagaggctagaggcttccaaccagccgatgacgatgactcagatgatgatttcagcgacgatgagctacactcaccaatagacgaggtggatcctttcattttctttgtagaaactgtccaaggtttgcaggcatctgatcctgccaggttccagaaccttatgcatacattggatttttcttatcaagcgcttgctagtggcattgcacaacatgccgagcaaagaaaaaatgaaattgagaaggagaaatctgagaaggcaaatgcacagtgacgtcataaagcatttctggttcccttcgattgttttgccattttgccggtatagcattggtggacggttaatttcctgcgatttgcaggccgcagttgtagacgtcttggttgtgcaagaaagtttctctcgaggacagttgctcgttttgttagggccatcaatttttttgggcggcttgtaagttatttgagaatcccacctcaggttgaggggttgtattctcgagtcgtcaaagtttagtaccggtgcggtgtagattgtatatggtttcagttgtctagaacgttgtggcttcatggacgggctgtggtataagtttttattattttttaatttttttgtcaacaagacattgtaattggggtttgtttgtttggtaagagcaagaaaggtcggcactgttatttcttcggtatcattgtccacttgtttcgatattagcagtttacctaatcctatatccaaactccactcttccatattcaaactccactctgaacaatgtaatctatagtgcttttgagtaaactatgaaaagattgctgcagatggttttacaatgatggaaaatgggtattgggataagtggtattgggat

SEQ ID NO: 199324 - DNA, 2461 bp, Zea Mays
ctcttctcttctattgggacactttgtgataaactgaagcaaacagatccatataaatcagagcttgagacaatgctggtccgacatgtctttcctgaattcagcagtcgtgttggacacctgcgagcaaaggcagcatgggttgctgggcagtatgcccatatcaacttttcagacccgaacaattttcgtcaggctatgcactgtatagtttcaggaatgcatgatccagatcttcctgtgagggttgattcggtctttgcacttcgttcttttgttgaagcctgcaaagatttaaatgagattcgacctatacttcctcagctccttgatgaattttttaagctgatgaatgaggttgagaatgaggatcttgtgttcaccctagaaaccattgttgacaaatttggtgaagagatggcaccttatgcattaggctgctgctttctggagatgtatggctagttcagaagctgatgatgaagctgatgattccggtgctttggcagctgttggttgcttgcgagcaatcagcacaatccttgagtcaattagcagcctcccacatctttttacgcaaatagaaccaacattgctgcctataatgcgcaggatgttgacatctgatggccaagatgtttatgaagaagtccttgaaattgtttcctatatgtcattttactcgcctacaatttcactggacatgtggaccttgtggccagtgatgatggaggcgcttaatgattgggctatagatttctttgagaatattcttgttccattagacaactacatttctcggggaactgatcactttcttgcatgcaaagatccagattaccagcaaagcctgtggaaggcacttcaatctattatgatggacgaaaacatggaagattctgatattgaacctgctcccaagctcattgaagttgtttttcaaaattgtaaaggcaacgtggatcactgggttgagcactatctcaggattacaattgagcggttacgtcgagcacacaaaccatacctgaaatgcctccttgtacaagtgatcgctaatgcgctctactacaatcctgcgctgacccttgagattttaaataagctcggggttgcagctgacatttttaaccattggtttgctatgctacgacaagttaaaaaaagtggggcacgtgttaatttcaagagggagcatgataagaaagtttgctgcttgggcttgacctcccttattgcgcttccagctgctaagattccagcagatgctttggatcggatcttcaaagcaacacttgagctgcttgttgcttacaaggaccaagttgcagaagctaagaagcaaaatgaagaggctgctgatgatatggatggttttgatgctgatgaagaagatgatgacgaagttgactctgataaggagatgggtcttgatgatgaagacggggatgaagtaagcagtcttcagctgcagaaattagccgcagaggctagaggcttccaaccagccgatgacgatgactcagatgatgatttcagcgacgatgagctacactcaccaatagacgaggtggatcctttcattttctttgtagaaactgtccaaggtttgcaggcatctgatcctgccaggttccagaaccttatgcatacattggatttttcttatcaagcgcttgctagtggcattgcacaacatgccgagcaaagaaaaaatgaaattgagaaggagaaatctgagaaggcaaatgcacagtgacgtcataaagcatttctggttcccttcgattgttttgccattttgccggtatagcattggtggacggttaatttcctgcgatttgcaggccgcaggtaagagtttttgcagccttagccaaagtgtaggacaaattcaatcttgtgagatagcatcttggataacctgtcacctcgaccatgttcgtcgtggccagttgtagacgtcttggttgtgcaagaaagtttctctcgaggacagttgctcgttttgttagggccatcaatttttttgggcggcttgtaagttatttgagaatcccacctcaggttgaggggttgtattctcgagtcgtcaaagtttagtaccggtgcggtgtagattgtatatggtttcagttgtctagaacgttgtggcttcatggacgggctgtggtataagtttttattattttttaatttttttgtcaacaagacattgtaattggggtttgtttgtttggtaagagcaagaaaggtcggcactgttatttcttcggtatcattgtccacttgtttcgatattagcagtttacctaatcctatatccaaactccactcttccatattcaaactccactctgaacaatgtaatctatagtgcttttgagtaaactatgaaaagattgctgcagatggttttacaatgatggaaaatgggtattgggataagtggtattgggat

SEQ ID NO: 199325 - DNA, 2526 bp, Zea Mays
tctattgggacactttgtgataaactgaagcaaacagatccatataaatcagagcttgagacaatgctggtccgacatgtctttcctgaattcagcagtcgtgttggacacctgcgagcaaaggcagcatgggttgctgggcagtatgcccatatcaacttttcagacccgaacaattttcgtcaggctatgcactgtatagtttcaggaatgcatgatccagatcttcctgtgagggttgattcggtctttgcacttcgttcttttgttgaagcctgcaaagatttaaatgagattcgacctatacttcctcagctccttgatgaattttttaagctgatgaatgaggttgagaatgaggatcttgtgttcaccctagaaaccattgttgacaaatttggtgaagagatggcaccttatgcattaggtttgtgccagaatttggctgctgctttctggagatgtatggctagttcagaagctgatgatgaagctgatgattccggtgctttggcagctgttggttgcttgcgagcaatcagcacaatccttgagtcaattagcagcctcccacatctttttacgcaaatagaaccaacattgctgcctataatgcgcaggatgttgacatctgatggccaagatgtttatgaagaagtccttgaaattgtttcctatatgtcattttactcgcctacaatttcactggacatgtggaccttgtggccagtgatgatggaggcgcttaatgattgggctatagatttctttgagaatattcttgttccattagacaactacatttctcggggaactgatcactttcttgcatgcaaagatccagattaccagcaaagcctgtggaaggcacttcaatctattatgatggacgaaaacatggaagattctgatattgaacctgctcccaagctcattgaagttgtttttcaaaattgtaaaggcaacgtggatcactgggttgagcactatctcaggattacaattgagcggttacgtcgagcacacaaaccatacctgaaatgcctccttgtacaagtgatcgctaatgcgctctactacaatcctgcgctgacccttgagattttaaataagctcggggttgcagctgacatttttaaccattggtttgctatgctacgacaagttaaaaaaagtggggcacgtgttaatttcaagagggagcatgataagaaagtttgctgcttgggcttgacctcccttattgcgcttccagctgctaagattccagcagatgctttggatcggatcttcaaagcaacacttgagctgcttgttgcttacaaggaccaagttgcaggtggagtgatccatgtttttagttgtgcttgtgtttttttccctggtgaatacacagaagctaagaagcaaaatgaagaggctgctgatgatatggatggttttgatgctgatgaagaagatgatgacgaagttgactctgataaggagatgggtcttgatgatgaagacggggatgaagtaagcagtcttcagctgcagaaattagccgcagaggctagaggcttccaaccagccgatgacgatgactcagatgatgatttcagcgacgatgagctacactcaccaatagacgaggtggatcctttcattttctttgtagaaactgtccaaggtttgcaggcatctgatcctgccaggttccagaaccttatgcatacattggatttttcttatcaagcgcttgctagtggcattgcacaacatgccgagcaaagaaaaaatgaaattgagaaggagaaatctgagaaggcaaatgcacagtgacgtcataaagcatttctggttcccttcgattgttttgccattttgccggtatagcattggtggacggttaatttcctgcgatttgcaggccgcaggtaagagtttttgcagccttagccaaagtgtaggacaaattcaatcttgtgagatagcatcttggataacctgtcacctcgaccatgttcgtcgtggccagttgtagacgtcttggttgtgcaagaaagtttctctcgaggacagttgctcgttttgttagggccatcaatttttttgggcggcttgtaagttatttgagaatcccacctcaggttgaggggttgtattctcgagtcgtcaaagtttagtaccggtgcggtgtagattgtatatggtttcagttgtctagaacgttgtggcttcatggacgggctgtggtataagtttttattattttttaatttttttgtcaacaagacattgtaattggggtttgtttgtttggtaagagcaagaaaggtcggcactgttatttcttcggtatcattgtccacttgtttcgatattagcagtttacctaatcctatatccaaactccactcttccatattcaaactccactctgaacaatgtaatctatagtgcttttgagtaaactatgaaaagattgctgcagatggttttacaatgatggaaaatgggtattgggataagtggtattgggat

SEQ ID NO: 199326 - DNA, 1913 bp, Zea Mays
agacactcttgccatattacttgctgccgcatataggaggattagatcagctatagatggaatccctctaatcagggagatctcttgatgtttatgaagaagtccttgaaattgtttcctatatgtcattttactcgcctacaatttcactggacatgtggaccttgtggccagtgatgatggaggcgcttaatgattgggctatagatttctttgagaatattcttgttccattagacaactacatttctcggggaactgatcactttcttgcatgcaaagatccagattaccagcaaagcctgtggaaggcacttcaatctattatgatggacgaaaacatggaagattctgatattgaacctgctcccaagctcattgaagttgtttttcaaaattgtaaaggcaacgtggatcactgggttgagcactatctcaggattacaattgagcggttacgtcgagcacacaaaccatacctgaaatgcctccttgtacaagtgatcgctaatgcgctctactacaatcctgcgctgacccttgagattttaaataagctcggggttgcagctgacatttttaaccattggtttgctatgctacgacaagttaaaaaaagtggggcacgtgttaatttcaagagggagcatgataagaaagtttgctgcttgggcttgacctcccttattgcgcttccagctgctaagattccagcagatgctttggatcggatcttcaaagcaacacttgagctgcttgttgcttacaaggaccaagttgcagaagctaagaagcaaaatgaagaggctgctgatgatatggatggttttgatgctgatgaagaagatgatgacgaagttgactctgataaggagatgggtcttgatgatgaagacggggatgaagtaagcagtcttcagctgcagaaattagccgcagaggctagaggcttccaaccagccgatgacgatgactcagatgatgatttcagcgacgatgagctacactcaccaatagacgaggtggatcctttcattttctttgtagaaactgtccaaggtttgcaggcatctgatcctgccaggttccagaaccttatgcatacattggatttttcttatcaagcgcttgctagtggcattgcacaacatgccgagcaaagaaaaaatgaaattgagaaggagaaatctgagaaggcaaatgcacagtgacgtcataaagcatttctggttcccttcgattgttttgccattttgccggtatagcattggtggacggttaatttcctgcgatttgcaggccgcaggtaagagtttttgcagccttagccaaagtgtaggacaaattcaatcttgtgagatagcatcttggataacctgtcacctcgaccatgttcgtcgtggccagttgtagacgtcttggttgtgcaagaaagtttctctcgaggacagttgctcgttttgttagggccatcaatttttttgggcggcttgtaagttatttgagaatcccacctcaggttgaggggttgtattctcgagtcgtcaaagtttagtaccggtgcggtgtagattgtatatggtttcagttgtctagaacgttgtggcttcatggacgggctgtggtataagtttttattattttttaatttttttgtcaacaagacattgtaattggggtttgtttgtttggtaagagcaagaaaggtcggcactgttatttcttcggtatcattgtccacttgtttcgatattagcagtttacctaatcctatatccaaactccactcttccatattcaaactccactctgaacaatgtaatctatagtgcttttgagtaaactatgaaaagattgctgcagatggttttacaatgatggaaaatgggtattgggataagtggtattgggat

SEQ ID NO: 199327 - DNA, 2688 bp, Zea Mays
cgcgacagtgcttgtgatgtgtccaagaagacttccaggagcactagtgtgtcgcaccgtgttctacggcctccaaaaattgaacaggtcctcccccctccaaaagttgaacccaatccagaagtgaagccagtacttgtaccagttccagttcatcaaaacaaaaaaattaaccttgacaagattaggcctcccagagttcaaagtgctgatgaggtggaaaaggctaaggcttgtcaacttgagtttgggagttactgtctctggtctatagagcacaaagaagttatgatagataccattgtgaaaaggctgaaagatcagctatttgtagcccgatcttactaccctagcattgcaaaacttaaaggaaaggagacattgactcgcgagctgaagcaaaatattcaagaacacgagagggtacttagtgaatccattgttgatgctgatctaccatcctttataaaaacgaagctagagaggatggaccaatcaatagcaagagccaaatcatgcactgtggattgtaacaatgttgacagaaagcttcgtcaaattcttcatatgacagaggatgaagctcattttcatatgaagcagagtgcatacctatacaaccttggtgttcacaccatgcctaaaagtcatcattgtcttaatatgaggttgacagtagagtactttaaatccatgccattggatccaaatgactcttctgcccataagtttaaccttccagacaataggcactatgttatattatctaaaaatgtccttgctgcttctgttgtcatcaactcaactgttagtagctctgaggatactgaaaatgtagtatttcatgtactgactgactctcaaaatttttatgccatgaagcactggtttgcaagaaactcctacagggaatcagctgtcaatgtcataaattatgaacaaattatttttgagaatttccctgagtttggaacccagcagttatatttgcctgaggaatttcgtgttctcatcagtagccttgagaggcctactgagaagagtagaatggaatatttgtcagtgttcagtcactcacatttctttcttgccgaaatattcaaagatttaaagaaggtaattgtgttggatgatgatgtggttgttcaacgtgatatttctttcttgtggaatcttgatatgggagagaaggtcaatggtgctatcagtttttgtggtttgaaacttggtcaactgaggaaccttttgggtaggacaatgtatgatcaacagtcatgtgcatggatgtctggggttaatgtgattgatttggacaaatggagagaacataatgttacagagaattacctgcaactcctgagaaagtttgggaacaatgatgacgaggcctcactacgagcttcagctttgcctataagtttgttgtcgttccagcatcttctatatccacttgatgagagattgattttatctggacttggatatgactatggaattaaagaagaacttgttcagaattctgcatcgttgcattataatggaaatatgaaaccttggcttgagttgggtataccagattataggaagtactggaagaggtttcttacacgagacgagagattcatggacgagtgcaatgtaagtccatagtgtgcttgagcttgggagccgaatcatttttgacagtagatttcagtctactgctgtactatatactaagaggaccaacacttgagaaaaacctgggaactgggaagcagtcactagccatcaattttgacagagtagatccagcaccatctgttcattgaacttgtgagctcgatggatgggtttttctgcagttagcggggtttagttaagttcgaaggataatgcagtagacaacgttggtcacgtgtggtggtgaggttccaagtaagagagagcatcacactcacgtaacaggaatgatcattgatggattgaggcgccttaattgaaattggtgccttccacctcatggatgcaggttaattcttttcttcgttgattttttgacccctcttgctttgtccttctgtcaataaggacatacacaggttaaaattcaaattctttgctcttagttgttgcacattgattgtcctatcactattatgttaatgcaaagtatattatgatgtcagagactcatctgttacaaaaacgagattaacaactattctatttggatgccttctgagcactcaaattatctcatgaaacagcaagtttgtatcgtgactgggtgtatccgcccccataggttctctacgtgctccactgcggcctaggaagaattaacaagtgcactgcggttcatagcaatacatatgctacagcataaaaaacatgctccaggcacttggtgaatgatctttgtcactgtaaattggctcgtaaaccatggtgtgatgcaataatcatgtaaaaactgcaaaacatgcaaatttgccaagcagcaataagcttcagattcgaggaaaccgttaatatggatgcacatgcaagtacgtttatgatctcagagtgtaaaaggtgactgagacagctcctgtatgcataatcgtacaccgtgtgtctatggccgaactttactatccaatattacgtgttcgtttgcaatgtaagagcatctcatattgaagaaaaccaattttcttttcc

SEQ ID NO: 199328 - DNA, 1942 bp, Zea Mays
cggatgcgggcgatcagggctggcggcggcggcgccaatcgcccccaggggcgccattccctttgtcaggcgctttagattggagagacagctagcttcttctcaagttcccaaggaacaacaaatcaatttaatgaaagatcttgagaggaaggaaactgaatacatgcgacttaaaaggcacaaaatttgtgttgatgattttgagctgctcactattattgggagaggtgcttttggagaggttcgattgtgtcgagagaggacctcaggcaacatttatgcaatgaaaaaactcaagaagtctgatatggttgtcaggggccaagtggaacatgttagagctgaaagaaacttgttggccgaagttgctagtcatcactgcattgtgaagctttactattctttccaagacactgagtatctttaccttattatggagtacctccctggtggtgatatcatgacccttctcatgagagaggataccttgactgaacatgtggcacgattctacgttgctgagactattcttgctatcgaatccatccataaacataactacatccacagagatattaagcctgataatttgcttctagataagaatggtcacatgaagctgtcagattttgggctgtgtaagccaattgattgttcaaagctctcaactttgaatgaagatgaacccatgagtgatgacaacttgagggaatcaatggatattgatagttctttgtctgatacagcaaatggtagaagatggagaagtcaacacgaacagcttcagcactggcagatgaacaggagaaaactggcattctcaactgttggaacaccggattatattgctccagaggttcttctaaagaagggatatggaatggaatgcgattggtggtctctgggcgcgatcatgtatgagatgctagttgggtatccaccattttatgctgatgatccaataactacatgcagaaagattgtgcactggagaaaccatttgaagtttcctgaggatgcaaagttgtcaaatgaagcaagagatctcattagccgattattatgtgatgttgaccacaggatcggcagtgcaggggcagatcaaataaaggcacatccttggttccgaggagttgcatgggataaactttatgaaatggaagcagcatttaagcctcaagtaaatgatgaactggacacacagaatttcatgaaattcgaggaactcatgaatcttgtttctccaacttcattattctctgtggcagttggaaaatcctccagccaaaacaggctctggaccttcaaggaagaagtacaaagcagtagagcactagagcgcactagtattactgctgtaagtgctgtttgtcctcggcaaatttctgaactaaatcagcatgcaaacgcctggatgatgtggctccagctggataacctgctcatttttagccaggtttctgctttctcaatcgtgggcaagcggtttgtagaaatccaccagagtttctagttgtaaaatagtattccacggactttaacaaaggtcccatgtactaagggctcatcatcagacaccgggacagtttttttctggagaaattgcaccttgcggctggctgcccaggttggtagagcaaattgcggccttctcttgtggcagttcccggtccgctaacatttgatcagggaagggaaataagatggtgttgttgcggcaggaattctcatgggggggagttagtgttgttgtttgatatgtatcaggaattttcacatttgtagtagggtttctgttagcatattttagaaacatcctttttgcagagttgctatttctcattgatgtatggaaaacaacataatttggagatcgaagctcgatctaacttttatgctgcatatctgatctagattacatcaaacatgattcatccag

SEQ ID NO: 199329 - DNA, 1908 bp, Zea Mays
gcccccaggggcgccattccctttgtcaggcgctttagattggagagacagctagcttcttctcaagttcccaaggaacaacaaatcaatttaatgaaagatcttgagaggaaggaaactgaatacatgcgacttaaaaggcacaaaatttgtgttgatgattttgagctgctcactattattgggagaggtgcttttggagaggttcgattgtgtcgagagaggacctcaggcaacatttatgcaatgaaaaaactcaagaagtctgatatggttgtcaggggccaagtggaacatgttagagctgaaagaaacttgttggccgaagttgctagtcatcactgcattgtgaagctttactattctttccaagacactgagtatctttaccttattatggagtacctccctggtggtgatatcatgacccttctcatgagagaggataccttgactgaacatgtggcacgattctacgttgctgagactattcttgctatcgaatccatccataaacataactacatccacagataagaatggtcacatgaagctgtcagattttgggctgtgtaagccaattgattgttcaaagctctcaactttgaatgaagatgaacccatgagtgatgacaacttgagggaatcaatggatattgatagttctttgtctgatacagcaaatggtagaagatggagaagtcaacacgaacagcttcagcactggcagatgaacaggagaaaactggcattctcaactgttggaacaccggattatattgctccagaggttcttctaaagaagggatatggaatggaatgcgattggtggtctctgggcgcgatcatgtatgagatgctagttgggtatccaccattttatgctgatgatccaataactacatgcagaaagggaagcttattgtcttatcatcaaaataaggctaagtcagcacagaaagctgctttatccctctttttagctgatattattgtgcactggagaaaccatttgaagtttcctgaggatgcaaagttgtcaaatgaagcaagagatctcattagccgattattatgtgatgttgaccacaggatcggcagtgcaggggcagatcaaataaaggcacatccttggttccgaggagttgcatgggataaactttatgaaatggaagcagcatttaagcctcaagtaaatgatgaactggacacacagaatttcatgaaattcgaggaattggaaaatcctccagccaaaacaggctctggaccttcaaggaagaagtacaaagcagtagagcactagagcgcactagtattactgctgtaagtgctgtttgtcctcggcaaatttctgaactaaatcagcatgcaaacgcctggatgatgtggctccagctggataacctgctcatttttagccaggtttctgctttctcaatcgtgggcaagcggtttgtagaaatccaccagagtttctagttgtaaaatagtattccacggactttaacaaaggtcccatgtactaagggctcatcatcagacaccgggacagtttttttctggagaaattgcaccttgcggctggctgcccaggttggtagagcaaattgcggccttctcttgtggcagttcccggtccgctaacatttgatcagggaagggaaataagatggtgttgttgcggcaggaattctcatgggggggagttagtgttgttgtttgatatgtatcaggaattttcacatttgtagtagggtttctgttagcatattttagaaacatcctttttgcagagttgctatttctcattgatgtatggaaaacaacataatttggagatcgaagctcgatctaacttttatgctgcatatctgatctagattacatcaaacatgattcatccag

SEQ ID NO: 199330 - DNA, 2445 bp, Zea Mays
acatcatcgccccccttccccgcggccccaccaaatagagaggcccagacaccgaggggaaaaaggagagagagtacacaggtgacagccgctgcaccgagggcacagagggacagctagacagggactgccagcggcgtaggcggtgtgggggatggagcgcgagatggcggacgcgcccgccgcggcgatccccgccgccgagccgctcgcggcggtggcggaggaaggggagggggaggcggccgccgaggcagtggggtccaccctcaccatggagcgcgtcgccgccgcgaagaagttcatcgagagccactaccgctcgcagatgaagaacatccaagagcgcaaggagaggcgctttagattggagagacagctagcttcttctcaagttcccaaggaacaacaaatcaatttaatgaaagatcttgagaggaaggaaactgaatacatgcgacttaaaaggcacaaaatttgtgttgatgattttgagctgctcactattattgggagaggtgcttttggagaggttcgattgtgtcgagagaggacctcaggcaacatttatgcaatgaaaaaactcaagaagtctgatatggttgtcaggggccaagtggaacatgttagagctgaaagaaacttgttggccgaagttgctagtcatcactgcattgtgaagctttactattctttccaagacactgagtatctttaccttattatggagtacctccctggtggtgatatcatgacccttctcatgagagaggataccttgactgaacatgtggcacgattctacgttgctgagactattcttgctatcgaatccatccataaacataactacatccacagagatattaagcctgataatttgcttctagataagaatggtcacatgaagctgtcagattttgggctgtgtaagccaattgattgttcaaagctctcaactttgaatgaagatgaacccatgagtgatgacaacttgagggaatcaatggatattgatagttctttgtctgatacagcaaatggtagaagatggagaagtcaacacgaacagcttcagcactggcagatgaacaggagaaaactggcattctcaactgttggaacaccggattatattgctccagaggttcttctaaagaagggatatggaatggaatgcgattggtggtctctgggcgcgatcatgtatgagatgctagttgggtatccaccattttatgctgatgatccaataactacatgcagaaagggaagcttattgtcttatcatcaaaataaggctaagtcagcacagaaagctgctttatccctctttttagctgatattattgtgcactggagaaaccatttgaagtttcctgaggatgcaaagttgtcaaatgaagcaagagatctcattagccgattattatgtgatgttgaccacaggatcggcagtgcaggggcagatcaaataaaggcacatccttggttccgaggagttgcatgggataaactttatgaaatggaagcagcatttaagcctcaagtaaatgatgaactggacacacagaatttcatgaaattcgaggaattggaaaatcctccagccaaaacaggctctggaccttcaaggaagacgatgctgaactccaaagatctgagctttgtggggtatacgtacaaaaacttcgatgcggtgaaagcaataaaaatttcagatctgcaaaggaattcatctctaacaaggccttccattggttcaatattcggtccaccaggcatggattctcccatggaaccaaacgggaggggcacacatatgcacacagtttcatctggtgatccaatgattccctaacctgcagtgctgtttgtcctcggcaaatttctgaactaaatcagcatgcaaacgcctggatgatgtggctccagctggataacctgctcatttttagccaggtttctgctttctcaatcgtgggcaagcggtttgtagaaatccaccagagtttctagttgtaaaatagtattccacggactttaacaaaggtcccatgtactaagggctcatcatcagacaccgggacagtttttttctggagaaattgcaccttgcggctggctgcccaggttggtagagcaaattgcggccttctcttgtggcagttcccggtccgctaacatttgatcagggaagggaaataagatggtgttgttgcggcaggaattctcatgggggggagttagtgttgttgtttgatatgtatcaggaattttcacatttgtagtagggtttctgttagcatattttagaaacatcctttttgcagagttgctatttctcattgatgtatggaaaacaacataatttggagatcgaagctcgatctaacttttatgctgcatatctgatctagattacatcaaacatgattcatccag

SEQ ID NO: 199331 - DNA, 2367 bp, Zea Mays
acatcatcgccccccttccccgcggccccaccaaatagagaggcccagacaccgaggggaaaaaggagagagagtacacaggtgacagccgctgcaccgagggcacagagggacagctagacagggactgccagcggcgtaggcggtgtgggggatggagcgcgagatggcggacgcgcccgccgcggcgatccccgccgccgagccgctcgcggcggtggcggaggaaggggagggggaggcggccgccgaggcagtggggtccaccctcaccatggagcgcgtcgccgccgcgaagaagttcatcgagagccactaccgctcgcagatgaagaacatccaagagcgcaaggagaggcgctttagattggagagacagctagcttcttctcaagttcccaaggaacaacaaatcaatttaatgaaagatcttgagaggaaggaaactgaatacatgcgacttaaaaggcacaaaatttgtgttgatgattttgagctgctcactattattgggagaggtgcttttggagaggttcgattgtgtcgagagaggacctcaggcaacatttatgcaatgaaaaaactcaagaagtctgatatggttgtcaggggccaagtggaacatgttagagctgaaagaaacttgttggccgaagttgctagtcatcactgcattgtgaagctttactattctttccaagacactgagtatctttaccttattatggagtacctccctggtggtgatatcatgacccttctcatgagagaggataccttgactgaacatgtggcacgattctacgttgctgagactattcttgctatcgaatccatccataaacataactacatccacagagatattaagcctgataatttgcttctagataagaatggtcacatgaagctgtcagattttgggctgtgtaagccaattgattgttcaaagctctcaactttgaatgaagatgaacccatgagtgatgacaacttgagggaatcaatggatattgatagttctttgtctgatacagcaaatggtagaagatggagaagtcaacacgaacagcttcagcactggcagatgaacaggagaaaactggcattctcaactgttggaacaccggattatattgctccagaggttcttctaaagaagggatatggaatggaatgcgattggtggtctctgggcgcgatcatgtatgagatgctagttgggtatccaccattttatgctgatgatccaataactacatgcagaaagattgtgcactggagaaaccatttgaagtttcctgaggatgcaaagttgtcaaatgaagcaagagatctcattagccgattattatgtgatgttgaccacaggatcggcagtgcaggggcagatcaaataaaggcacatccttggttccgaggagttgcatgggataaactttatgaaatggaagcagcatttaagcctcaagtaaatgatgaactggacacacagaatttcatgaaattcgaggaattggaaaatcctccagccaaaacaggctctggaccttcaaggaagacgatgctgaactccaaagatctgagctttgtggggtatacgtacaaaaacttcgatgcggtgaaagcaataaaaatttcagatctgcaaaggaattcatctctaacaaggccttccattggttcaatattcggtccaccaggcatggattctcccatggaaccaaacgggaggggcacacatatgcacacagtttcatctggtgatccaatgattccctaacctgcagtgctgtttgtcctcggcaaatttctgaactaaatcagcatgcaaacgcctggatgatgtggctccagctggataacctgctcatttttagccaggtttctgctttctcaatcgtgggcaagcggtttgtagaaatccaccagagtttctagttgtaaaatagtattccacggactttaacaaaggtcccatgtactaagggctcatcatcagacaccgggacagtttttttctggagaaattgcaccttgcggctggctgcccaggttggtagagcaaattgcggccttctcttgtggcagttcccggtccgctaacatttgatcagggaagggaaataagatggtgttgttgcggcaggaattctcatgggggggagttagtgttgttgtttgatatgtatcaggaattttcacatttgtagtagggtttctgttagcatattttagaaacatcctttttgcagagttgctatttctcattgatgtatggaaaacaacataatttggagatcgaagctcgatctaacttttatgctgcatatctgatctagattacatcaaacatgattcatccag

SEQ ID NO: 199332 - DNA, 1744 bp, Zea Mays
aactgaatttggttcgattgtgtcgagagaggacctcaggcaacatttatgcaatgaaaaaactcaagaagtctgatatggttgtcaggggccaagtggaacatgttagagctgaaagaaacttgttggccgaagttgctagtcatcactgcattgtgaagctttactattctttccaagacactgagtatctttaccttattatggagtacctccctggtggtgatatcatgacccttctcatgagagaggataccttgactgaacatgtggcacgattctacgttgctgagactattcttgctatcgaatccatccataaacataactacatccacagagatattaagcctgataatttgcttctagataagaatggtcacatgaagctgtcagattttgggctgtgtaagccaattgattgttcaaagctctcaactttgaatgaagatgaacccatgagtgatgacaacttgagggaatcaatggatattgatagttctttgtctgatacagcaaatggtagaagatggagaagtcaacacgaacagcttcagcactggcagatgaacaggagaaaactggcattctcaactgttggaacaccggattatattgctccagaggttcttctaaagaagggatatggaatggaatgcgattggtggtctctgggcgcgatcatgtatgagatgctagttgggtatccaccattttatgctgatgatccaataactacatgcagaaagggaagcttattgtcttatcatcaaaataaggctaagtcagcacagaaagctgctttatccctctttttagctgatattattgtgcactggagaaaccatttgaagtttcctgaggatgcaaagttgtcaaatgaagcaagagatctcattagccgattattatgtgatgttgaccacaggatcggcagtgcaggggcagatcaaataaaggcacatccttggttccgaggagttgcatgggataaactttatgaaatggaagcagcatttaagcctcaagtaaatgatgaactggacacacagaatttcatgaaattcgaggaattggaaaatcctccagccaaaacaggctctggaccttcaaggaagaagtacaaagcagtagagcactagagcgcactagtattactgctgtaagtgctgtttgtcctcggcaaatttctgaactaaatcagcatgcaaacgcctggatgatgtggctccagctggataacctgctcatttttagccaggtttctgctttctcaatcgtgggcaagcggtttgtagaaatccaccagagtttctagttgtaaaatagtattccacggactttaacaaaggtcccatgtactaagggctcatcatcagacaccgggacagtttttttctggagaaattgcaccttgcggctggctgcccaggttggtagagcaaattgcggccttctcttgtggcagttcccggtccgctaacatttgatcagggaagggaaataagatggtgttgttgcggcaggaattctcatgggggggagttagtgttgttgtttgatatgtatcaggaattttcacatttgtagtagggtttctgttagcatattttagaaacatcctttttgcagagttgctatttctcattgatgtatggaaaacaacataatttggagatcgaagctcgatctaacttttatgctgcatatctgatctagattacatcaaacatgattcatccag

SEQ ID NO: 199333 - DNA, 2282 bp, Zea Mays
aactttgaatatgtcccttgttctcgaagattggtactaatgtactccactcatcgggcattctatttgatcgaaaaatatggttgaacaacttggttagccaaacgatagcaatatccccaaggcatttccacacctctattgggataccattcgggcccatcttctgccccctttcatctgttgccacctgttattaattaattaaccaagcttacagatgaattggagaagatggctgagaaactcaagctgacagaatctctcctcgaaagcaaaaatcttgaagttaaaaagataaatgatgagaaaaaagctgcattggctgcccagtttgcagcagaagcaactttgcgaagagtacatgcagcccagaaagatgatgacatgccaccaattgaagccattcttgcaccgcttgaagctgagctaaagctttctcgccaagagaatgcaaagctccaggatgataacagagctttggatcgtctaacaaaacaaaaggaggcagctctactagaagcggagaggaccgtgcaaattgccatggcaaaagctgctatggttgatgatttgcaaaacaagaaccaagagttgatcaaacaaattgagatctgccatgaagaaaataaaatcttagacaagctgcatcgccaaaagattgcagaagttgaaaagctgagccaaactgtgagagagttggaagaggctgttcttcaaggtggtgcaacggctaatgttgtccgtgattaccagcgcagatttcaagaaataaatgaagaaaagagaacacttgaccgtgaacttgcacgtgcaaaagttacagcaaacagagttgcttctgttgttgctaatgagtggaaagattctaatgacaaggtgatgccagttaaacagtggcttgaagagcgtaggttcttccagggggagatgcaacaacttcgtgacaagcttgccattacagaacgtacagcacgatctgaagctcaactgaaggaaaaatatcagttacgtctaaaagtactagaagatggactaagagggccaccaagtggctctattcgtccacctactgaaggaaagagctttagcaatgtcccttcccgccggttgtcactcggtggagctgataatatatcaagattgtctcctaatgggttattgtcaaggcgatctccttcttttaattcaagatcatctcttacgtcaaacagcagcttggtcctgaagcatgctaaaggcacttcaaagtcatttgatggcggaactaggtcactagataggagaaaggtacatggaaatggagctcatttactcaacagatctacagatgctgttagagataaagagactaatgatagttggaagggcgatatggatgagaaaactaatgagagtgcagacagcaacacagatgggaaaagtaatgaaaccatgaataataattcagctgagacagtttctggtttcctatatgatatgctgcaaaaagaggtaatttctttgagaaagacatgccatgagaaggatcagattctaaaagataaagatgatgctattgagatgttagcaaagaaagtagacaccttaactaaagcaatggaagtggaagctaaaaaggtcagacgggaggttgcatccatggagaaagaagttgcagcaatgcgtgccagtaaagaacaagaaatcagagccaagcggcttggtacgaaaggctctggtagttcacaactgcttcctggaagaaacgcaccacgaagtgggtccatgcgcaacttccaatgatggcagcactaacaccaagcagcattcttggataggtcctctgttccaccatttgttctgttcctatcctattaattttgtggctaaaatcgtagcacagtgagatgacccaacaatacctagatctgggtaagagtaggctcggatctgatgagaccattgtgggagtgaagctgagcctgttgtctaaccttgtggcgcgccctcttgtttattttagtccaggcagtgcacctgatgcttgtataggccagggatcaccgcatggccaatctgtaatgtatagcctgagtgctcagttacatagacacccgttgcccaggttgtgaatactgtttcctcgcacatgcttctttgcgctgctctatttgccctgtgtttgggttggaatttttaacatggcttctagcctgtctgagttctgttgattataaatagtgacacatgttcatctgcatatgtacatctagtggcgactgtcaactgatgtttatcct

SEQ ID NO: 199334 - DNA, 2629 bp, Zea Mays
ctcttcccccttcgccaccctagttttttttttaaaaaaaatcgctatctccaagtccaagactccaacagctctcgcacacagccgcagctgctactggctagaccaacacgcactctcgcacacagccgcgggcacagtgacgcaggcggaggagcggcgccggagctagggtttccctgatccggtggggccggggagggggtggaatatcttgctcgatttcggcgctggaggcgcagtgccggtgtccccgaagccggcgggcgcgaggcgggttggggagctggggtacggcgccgggggctcagatctggtatgaccgacggcggcgaagacgggaatgtggcgttgcccaggggccccgcgcgccggaggggccccgtgcgggccagcttcgacgccgacgagttcatcgcgctgatgcacgggtcggatcccgtcagggtcgagctcacgcgcctcgagaacgagctcagggacaaggagagggagcttggggaggcgcagacggagatacgcgcgctgcgcctatcggagagggcgcgggagaaggccgtcgaggagatgaattggagaagatggctgagaaactcaagctgacagaatctctcctcgaaagcaaaaatcttgaagttaaaaagataaatgatgagaaaaaagctgcattggctgcccagtttgcagcagaagcaactttgcgaagagtacatgcagcccagaaagatgatgacatgccaccaattgaagccattcttgcaccgcttgaagctgagctaaagctttctcgccaagagaatgcaaagctccaggatgataacagagctttggatcgtctaacaaaacaaaaggaggcagctctactagaagcggagaggaccgtgcaaattgccatggcaaaagctgctatggttgatgatttgcaaaacaagaaccaagagttgatcaaacaaattgagatctgccatgaagaaaataaaatcttagacaagctgcatcgccaaaagattgcagaagttgaaaagctgagccaaactgtgagagagttggaagaggctgttcttcaaggtggtgcaacggctaatgttgtccgtgattaccagcgcagatttcaagaaataaatgaagaaaagagaacacttgaccgtgaacttgcacgtgcaaaagttacagcaaacagagttgcttctgttgttgctaatgagtggaaagattctaatgacaaggtgatgccagttaaacagtggcttgaagagcgtaggttcttccagggggagatgcaacaacttcgtgacaagcttgccattacagaacgtacagcacgatctgaagctcaactgaaggaaaaatatcagttacgtctaaaagtactagaagatggactaagagggccaccaagtggctctattcgtccacctactgaaggaaagagctttagcaatgtcccttcccgccggttgtcactcggtggagctgataatatatcaagattgtctcctaatgggttattgtcaaggcgatctccttcttttaattcaagatcatctcttacgtcaaacagcagcttggtcctgaagcatgctaaaggcacttcaaagtcatttgatggcggaactaggtcactagataggagaaaggtacatggaaatggagctcatttactcaacagatctacagatgctgttagagataaagagactaatgatagttggaagggcgatatggatgagaaaactaatgagagtgcagacagcaacacagatgggaaaagtaatgaaaccatgaataataattcagctgagacagtttctggtttcctatatgatatgctgcaaaaagaggtaatttctttgagaaagacatgccatgagaaggatcagattctaaaagataaagatgatgctattgagatgttagcaaagaaagtagacaccttaactaaagcaatggaagtggaagctaaaaaggtcagacgggaggttgcatccatggagaaagaagttgcagcaatgcgtgccagtaaagaacaagaaatcagagccaagcggcttggtacgaaaggctctggtagttcacaactgcttcctggaagaaacgcaccacgaagtgggtccatgcgcaacttccaatgatggcagcactaacaccaagcagcattcttggataggtcctctgttccaccatttgttctgttcctatcctattaattttgtggctaaaatcgtagcacagtgagatgacccaacaatacctagatctgggtaagagtaggctcggatctgatgagaccattgtgggagtgaagctgagcctgttgtctaaccttgtggcgcgccctcttgtttattttagtccaggcagtgcacctgatgcttgtataggccagggatcaccgcatggccaatctgtaatgtatagcctgagtgctcagttacatagacacccgttgcccaggttgtgaatactgtttcctcgcacatgcttctttgcgctgctctatttgccctgtgtttgggttggaatttttaacatggcttctagcctgtctgagttctgttgattataaatagtgacacatgttcatctgcatatgtacatctagtggcgactgtcaactgatgtttatcct

SEQ ID NO: 199335 - DNA, 1406 bp, Zea Mays
ggcttggttccccgtgacgacttgccagccgcgctagatacacactcttcatcacccggagtcccggacggacgcacacgcatcgcttgcttgtcgttctccactcctcttcccccgctgctcgcctctcgattccgcctcatcgcgtccgcgaactccatgtccactgcgaccgcgaccctggccgccgcgcgatccccggctgtcgcgcttctcagcctgcgccgccgcgcacccgcggctgcccccattcgcttccccggtctccgcgtcggctctggttgccgtcacatagctatggcttccgcggcgcactcccgcgcccccaccgacccgcttcccaagggtgctgatttatttttccgggcagtaatctcgaacatggaaaaggtttatttgagcaggaatcctacagccaaaaccattctggagcttgtacgatcttatgatggtcaatggttatggtataaactcactttctgattttttcactgattttggttatttacctcgcgaagaactcagatttccagctaaaaagcttagggcactatggttttccccgcccactaatgatggctactctggaactggtacatatggacctttgccaaggatattcatttcagaacttcttgtggatgagttgactactcaaagccaggaaattatacataaatacattaaaacttctggcaatggaaataatcatgctgctattgcaagtacatctggggagctaacatgggagaagcccatttattcagatttccagattttgtctagggaaagtgaatatgctgcatggactcttgttaatggctatgcactaaatcatgccacaattgccacccatcgcctagaatcagatatcagaagtattaataagttcaacaaatttgtggaggacaatggcttcaagttaaattcagaaggagggattctgaaagtgagtcctgatggtctccttcaacaaagttcaacagtagctgactcatcattgtttacgtttgctgatggaataactgaatctattcctcgatcatacattgaatttgctgaacgtctcctgttaccacagttcaaagatttacaagatgaagaggtgaaagaataccacaggcgtgatggttttgaggtgggcaatgcggacaagatattcgaaagtacatcgaaggatcagctgacgcggagatctgcatgaacagtgaactctagatctgcatatgaccccgtgaactctctagatctgcaaacaacccagtgtgcctcttggaagtgtgttggtgactgtgaaatgattgtacctacttgggtgaaataaagcatgggagtcaataaaaagtaactgtttctttattctacatctgttgaatccaaagagagaattagttactgtttccctt

SEQ ID NO: 199336 - DNA, 422 bp, Zea Mays
gctgcttcaaatccatgacatgtcatcctttggtttcattgactaccatgatcgcagatatgctgcactagcaattttatctctcaatggcagacaactgtatggtcagccgattaaagtcaattgggcatatacaagtactccgagggagggcacatcaggtcattttaatatttttgttggggatctttgcccggaagtcactgatgctactttgtttgcatttttctctggttactctacttgctcagatgctagtgttatgtgggaccagaaaacaggacgatccagaggatttggttttgtttctttcaggaaccagcagtcatcctttggtttcattgactaccatgatcgcagatatgctgcactagcaattttatctctcaatggcagacaactgtaagttttttattggtttg

SEQ ID NO: 199337 - DNA, 508 bp, Zea Mays
cttctacctgcaaatgcggagaggctgcttcaaatccatgacatgtcatcctttggtttcattgactaccatgatcgcagatatgctgcactagcaattttatctctcaatggcagacaactgtatggtcagccgattaaagtcaattgggcatatacaagtactccgagggagggcacatcaggtcattttaatatttttgttggggatctttgcccggaagtcactgatgctactttgtttgcatttttctctggttactctacttgctcagatgctagtgttatgtgggaccagaaaacaggacgatccagaggatttggttttgtttctttcaggaaccagcagatacgttaattgatcacgaaatacggagggcacgagatggattaatctcaagtgaagctgatgaatgaacttgaagattggatgatctgatcaagtgccaggatgggacatgctcgacaagcgagtatcatctaacaacactaacttagtgttatcacag

SEQ ID NO: 199338 - DNA, 1559 bp, Zea Mays
atggcggggtgcctgacgccggcgatgtactcccagatggtcgccgtggccggcctcagcgacgggctgaggcggcagtcccccgccctggccgacgtcgcgagctgcgtgaccgtgcggcgcgcgttacggacggagcaggagcttcacattcgccaggagctgggacacggcctccgactccgtcgccgggattatgaacgcccaatcggagctggatgtcttgctggatgggatgcagggagccgcgacggtcgcggaggacgacgacgacgagaagctgtcgtccgaccagcacacgctctcactgcggaacgccgccgaagcgaggcggcagccagtctgcagcagcaccatagcgtcctcgatgaggccgaggtggaagcaaacttggccgaggaccaagtacgtgtacgtggatgtgggcatcgaccatcaggaaaccacttggtcggattctcattctcgccaaatcaaggcaccaattcgtgcaatgctcaaggtcccgtacctcccctgggtataggtgtttgggttcttggagaggctggtaaggacgcgacgcttgagatcggagatgtcgaagcagcggaaggagcggacggggaagcagcagaaggggcgagcgtcaggttctgcgtcatcggagcggtggcggtcgggcgagaggagcttggcgcgggagatcgtgccgagatcaccggagaaagggaaatggcgctgcgaagacagagaagaaagggaaatggaggagatggcgtgcgtgaaaccatagagcccatagtcagtggaaacctgcctcctgggtttgattcaagtacatgccgcagcgtgtatgtttgcaatatccatcttcaagtgacggacgcagtactgcaggaagtcttccaaagcattggtccagtagaagggtgcaagctcatcagaaaagaaaagtcatcctttggtttcattgactaccatgatcgcagatatgctgcactagcaattttatctctcaatggcagacaactgtatggtcagccgattaaagtcaattgggcatatacaagtactccgagggagggcacatcaggtcattttaatatttttgttggggatctttgcccggaagtcactgatgctactttgtttgcatttttctctggttactctacttgctcagatgctagtgttatgtgggaccagaaaacaggacgatccagaggatttggttttgtttctttcaggaaccagcagatacgttaattgatcacgaaatacggagggcacgagatggattaatctcaagtgaagctgatgaatgaacttgaagattggatgatctgatcaagtgccaggatgggacatgctcgacaagcgagtatcatctaacaacactaacttagtgttatcacagatacgttaattgatcacgaaatacggagggcacgagatggattaatctcaagtgaagctgatgaatgaacttgaagattggatgatctgatcaagtgccaggatgggacatgctcgacaagcgagtatcatctaacaacactaacttagtgttatcacag

SEQ ID NO: 199339 - DNA, 482 bp, Zea Mays
ggctgcttcaaatccatgacatgtcatcctttggtttcattgactaccatgatcgcagatatgctgcactagcaattttatctctcaatggcagacaactgtatggtcagccgattaaagtcaattgggcatatacaagtactccgagggagggcacatcaggtcattttaatatttttgttggggatctttgcccggaagtcactgatgctactttgtttgcatttttctctggttactctacttgctcagatgctagtgttatgtgggaccagaaaacaggacgatccagaggatttggttttgtttctttcaggaaccagcagatacgttaattgatcacgaaatacggagggcacgagatggattaatctcaagtgaagctgatgaatgaacttgaagattggatgatctgatcaagtgccaggatgggacatgctcgacaagcgagtatcatctaacaacactaacttagtgttatc

SEQ ID NO: 199340 - DNA, 2270 bp, Zea Mays
ccatccgtccacggaaagggaaagacatgcatcccagtccggcggccaccacggatgggtctctttgatcgcctcctcctcggcggcggcgatcgcagcagggggacggaggaccaggagcgcggcggcgccgaggcggccgccatggggtcagacgtgccgccgccgtcggccatccctcccctctcagccgccgcggcctccgtcgttcgccagtgcgcccggatcgcgggcgtgccggtggaccagctcctccggcgggtggacgcggaggagcaggcccgcgggccgctggagtacgccaggagcgtcgtggagtactgctcccacgtcgccctgcgcgtggaggccaggcgcccggaccacctcggcgacagggagttccacacgctcacctacgacatgatgctcgcctgggaggcgcccgacgaggagaccgacgccgtgttccagaaaacggcattcagtgttctccgtggagacgacgcggacgacgacgacagtgggtccatcttctattcaagcccgacgcagatggccattcaggtcgatggcaggcggacagttggacccgaggcatttgccaagattgctcctgcatgccctgccatggcacaccccatcaccgtccgtaacctgttcgacgcgatcaccaactccaccggaggacggctgcatttccttatctaccacaagtatctcagaatcctgaacgaggcgttctgctctgcgaagcgtgtgctaggggggcacagagccccagccctccagctctccgacgacgaagtgatccttgacatccacggcgctgcgacgaccaagccagttctccagcacatcggcacgtccacatggcctgggaggctcacgctgacgaaccacgcgctctacttcgaggctatcggcgtcgatttctcgtatggagaggccgtcgtgtatgatctggcaagggacttgaaacagtcggtgaaacgagagtccactgggccatggggtgctcacctcttcgacaaagctgtcatgtacaagtccagcctgacaagtgaacccgtgttctttgaattcccacaattcaaaggccacacccgccgagactactggtttgcggccatcaaagaggtgctgcacgcacacaagttcatcaggaagtacaagctcgccggtttccagaaggcggaggcgctctccgtcgcaacgctagggattctgcggtaccgcaccgtgaaagaggggttccacatactgccggcgcatttcaagaccatcctcgccttcaacctggcggagaaactgcccaagggggacaagattctggaggcactgtatggccagctcaagcagcactgcccgaggttcagaggaggccaggatcttggccagagcagttccgaggaactgatgcttgctgaccccttcccgctctctgcgtataccatggtgacgatgggtttgctgaagctgaaagaggaggacaacgccgaggagagggatttcgctgtgcgtgacgtgcagattggagggactagctcagttcagatggctctagagcgttcggttgggtattcgggtagagtggaagcggcaagggctacgcttgatcaggtcagagtggaagacatagacactaatgtagctgtcctaaaggaactactatttcctctgattgaaataggcaaaaggttgctcgctttgtctgggtgggaagagcccttcaagtcttatgtcttcttgttatgtttcctctacatggcttacagtggttggatctggctcatgtttcctggcttcttgcttggctctactatcttcatgctatggaacaaacactataggcatgggcgctcggtaggagcgtttgagatcataactcctcctcgaagaagaaccgtggaacagctcttagctctgcaacaggccatctcgcagctggaagcgcacgtgcaagcaggaaacatttttctcctgaagctccggtccctcatgcttgcagcgtttcctcagagcaccaacagagttgcagctgcactggttgctgtggctgcgatattcacgttcgtgcccttgaggaccatcgttctactaatccttctagaagaatacacaagacagatgccggtgaggaagaagagcagtgagaagctggtgaggagattgcgggagtggtggctccggatcccggctgcgcctgtacagcttgtaaagcctcgggagacgaggagatggagatccaggttgagatgagataaactgcagcagcagtgggctcaagt

SEQ ID NO: 199341 - DNA, 1074 bp, Zea Mays
gtttgccacggtagtatcgtaggagcagcacatcgaagatgctacggcctcaagcccgtccggcccacgggatactggactggcccacctatacaagtatgcgtagtttgggcttccgtctgcagcattgtaaagtttgttctgcagcccatggcctggcctccgctaccacgagtagggttgatcaaacttgatcggccgctctatcatgagctgtgtctatcttgaatttgagcccgtcgcacttgccaggtcgggcgtgggccaacgtaaaaagagtgacgtttcttcaccaatcaccctgcgtttcttctcctgttcatcacccgtgcgtgcgctctctctctttctcgtgcggcaactgcgaggccgccgacgcccgacggcagggtgcccaggccttcttcggtcccatcgcgaggccatagttgcatcattcgcctgagacgactgcccaccgccaggactgatctcctcactaggcgcgtagaggtgaagagaataacttgacaatgagcagcataggcacaggttacgatctgtctgtcaccaccttctccccagatggtcgtgtcttccaggtcgaatatgctaccaaggccgtcgacaacagcgggactgttgttgggatcaagtgcaaagatggcattgtcctgggtgttgagaagctggtaacctcaaagatgatgctggaagggtcaaaccggaggatccattcagtgcaccggcactctggcttggctgttgctggtttagcagcagatggcaggcaaattgtttcaaggacgaagtcagaagctgccagttatgaaaaggtctatggagaacccattcctgttaaggaattggctgatcgtgtggcaagttatgttcatctttgcacgctgtactggtggctcaggccttttggctgcggtgttattcttggaggttatgatagggatgggccacagctctacatgatagaaccctcaggagtttcttataatactttggtgctgcattagggaaggggagacaggctgcaaaaacatggacctcaaaatgattctgaacccaactatttgaatgtgg

SEQ ID NO: 199342 - DNA, 2503 bp, Zea Mays
ctgtatgttgccgtggcctagaagagaccaggcagggagtacctgccgagacaagtggagtgctccctacgcaaaaagtgtagcaaccggtctactataaacaacaacgcctcgtgtcgtgccgatcgaactgagattgtgtattacacgagtatgaacagacgggggctcttgggtgggtctgggcagggcatctccggactcccacacagctcctcttggtggcgccctctgacatctcctttttcctcgccttcgatcggtggccgccgccctcctcgacttccgtcccgccgccatgaagggacccggcctcttctccgacatcggcaagaaggaaggatctactcacctacgactagaagctgtccatctccaccgccagcgcctctggagtggcgcccagacccggcaatccgttagaatccgttcgtcgcagaggccatgagctcggcgcaggatccgttctacatcgtccgggaggagatccaggagtcgattgataaattgcaaagtaccttccaccgctgggagcaaactgcttcaaacacaggagaatatgttcatctgacaaaggagcttctgatcagctgtgaaagtatcgagtggcagcaccctcactcttttctattatactttaccactttacaaatagacccttcaacttgttcataatacaccaacactccccctcaagatgggccaaatatatttaacattctcatcttgttacatgccaactcattatccttaggacctaaaccttttgtgagactatccgctacttgattacgagattttacatacttcaacttcaaagccccactatcaatcttctctttgatgaagaacttatcaatctccacatgcttcatgcgatcaaactgaactggattacttgctatgttgattgctgccacattgtcacaatggagcaacattgtctcattcttcaacacttgaagctccttcaagagactcttcaaccatatcatttcacaaactgctagagccattgctctatgttcagcctctgcagtggatcgagataccacagcttgcttcttgcttctccatgaaaccagattacctcccacaaatacacaatatccagaagtggatctccgatcatccctactgctcgcccagtccgcatcacaatacccatccaaattcatatgttgatttggtctaaaacacaatcccttgccaggggttcccttcaggtatctcatgatttgataaactatcttcatatgcccagttctaggatcatgcatatacctactcaccacacttactgcataagcaatgtccggtcttgtatggcaaagatatatcaaacgaccaactaccctctgatatctttcccgatctatagggtcacctgactcagcacaagtttggtgattcctatcaatgggtgaaccacatgggcgacacccaagcattcctgtctctgacaaaaggtcgaggacatactttctttgggagagaataattccttgagatgatctagctatctcaatcccaaggaagtatcgaagtggtccaaggtcctttacctcaaaggctctacttagcctttccttcagtttcttgatctccttcgcatcatctccagtgatcactatatcatcaacataaaccgctagaatagtgatacacgagccctgatgtttgtagaagactgtgtgatctccattgcattgatgataacccatatcacacacaactcgcctgaatctatcaaaccacgcacgtggtgactgctttaggccatagagcgacttcttaagtctacacacttttccaatagtctgtttatttgcaaatccaggtgggatttccatatagacctcttccttcagatcaccatgaagaaatgcattcttcacatccagttgatgaagaggccaaccaaagttggccgcacatgagattaaggtcctcactgtgcccatttttgccacaggtgcaaaggtctcatcatagtcgatcccatatgtctgactatatcccttcgccaccagtcttgctttgtacctgtcaatctttccttcaggagtctgctttactgtgaagacccacttgcaccccaccgccttctttccttcaggaaggtgaacaagttcccatgtcttgttcttctgcagggcaagcagctcttccttcatggcatccttccactttggatcctgtttggcacacctccaatccttcggaatagatattgtttgtagagatgcaatgaaagttctatatgcaggagagacactagagtatgagacatacttagcaatgtcatgttcataacaataacgagaaggaggtttcccagcatttaatctaggaactcttctttgcgcaagaggtaattcttcatgttcaggaatgggagaaatatggattcgagagacattaccagctgggtctggagaggagtctgaagagagatatgggactggagcttcaacacatccaggttgtggttgctccccct

SEQ ID NO: 199343 - DNA, 1736 bp, Zea Mays
ctgtatgttgccgtggcctagaagagaccaggcagggagtacctgccgagacaagtggagtgctccctacgcaaaaagtgtagcaaccggtctactataaacaacaacgcctcgtgtcgtgccgatcgaactgagattgtgtattacacgagtatgaacagacgggggctcttgggtgggtctgggcagggcatctccggactcccacacagctcctcttggtggcgccctctgacatctcctttttcctcgccttcgatcggtggccgccgccctcctcgacttccgtcccgccgccatgaagggacccggcctcttctccgacatcggcaagaaggaaggatctactcacctacgactagaagctgtccatctccaccgccagcgcctctggagtggcgcccagacccggcaatccgttagaatccgttcgtcgcagaggccatgagctcggcgcaggatccgttctacatcgtccgggaggagatccaggagtcgattgataaattgcaaagtaccttccaccgctgggagcaaactgcttcaaacacaggagaatatgttcatctgacaaaggagcttctgatcagctgtgaaagtatcgagtggcaggtagatgagctagaaaagacaatctcagttgcatcaagggatccggcatactatggacttgatgaagttgagctttccagacgaagaaactggactggttcttctcataagcaggtcggtacagtcaagagagctattgaaaagggcaagagcaatgcagcaacttcaaaataccaggatacaagcaggaccaaccactattctgcccaagataatgatgactttctttcttcagaatcagatagacagcttctactcatgaggcagcaggatgaagaacttgatgagctcagtgaaagtgtccaaaggattggtggcgtgggactaaccatacacgaagagctgtctggacaggaaaggatcctaaacgacctaagcttggagatggagactacttccaacagacttgatttcgtgcagaaaagagtggccatggtgataaagaaggccggcatcaagggtcagatcatgctgatcgtgttcctgattgttctgttcatcattcttttcgttttggtgttcttgacatagccaagtgcaccagggtcctcggttttctctctcatttgttgtgcctccctagtacgaacactagtaaattggtcgcgctccgcgtgagttgttgcttgatgtgcttacataagatgtagaatcttgttgctataggcatgtatcaacaggtgctagcagcttgcagttctcctaacagaaacaggtcgaagcagattttttgttctccaagtgatcagtttgtccaaggttgttaggctttccgtaatcgcttcgagtttgcttttcaagatcatcattcacatgttgcttgttagactttggctcaacataaggaggcagcatggttagtgccctgtccaggtctccttgtcctttttgcactggatatctgtcatggtcgggcgcacgtatgtgaggcgacatcgtgcccgtgacgtgcgccgcgccctagagcaagcagcggccaggcaggacagctaagggataggataggatagcctgctgttatccagttccttagattgtggagtgctgttattcagttccttagattagggagttccttagattatggagtttgttgctcctttcggttgggcctctggccatat

SEQ ID NO: 199344 - DNA, 1294 bp, Zea Mays
cggcgggctgcggcggagaaacctagctccgtataccatgttgattttctggtagatgagctagaaaagacaatctcagttgcatcaagggatccggcatactatggacttgatgaagttgagctttccagacgaagaaactggactggttcttctcataagcaggtcggtacagtcaagagagctattgaaaagggcaagagcaatgcagcaacttcaaaataccaggatacaagcaggaccaaccactattctgcccaagataatgatgactttctttcttcagaatcagatagacagcttctactcatgaggcagcaggatgaagaacttgatgagctcagtgaaagtgtccaaaggattggtggcgtgggactaaccatacacgaagagctgtctggacaggaaaggatcctaaacgacctaagcttggagatggagactacttccaacagacttgatttcgtgcagaaaagagtggccatggtgataaagaaggccggcatcaagggtcagatcatgctgatcgtgttcctgattgttctgttcatcattcttttcgttttggtgttcttgacatagccaagtgcaccagggtcctcggttttctctctcatttgttgtgcctccctagtacgaacactagtaaattggtcgcgctccgcgtgagttgttgcttgatgtgcttacataagatgtagaatcttgttgctataggcatgtatcaacaggtgctagcagcttgcagttctcctaacagaaacaggtcgaagcagattttttgttctccaagtgatcagtttgtccaaggttgttaggctttccgtaatcgcttcgagtttgcttttcaagatcatcattcacatgttgcttgttagactttggctcaacataaggaggcagcatggattctttatgtttgcaacatttagcttagtgtaaggagccttgtttctagtggtaccaccacccggtatactaagaagactcaatgaacgcccttgattctctgggtgctgagctcttacccctgaatctgcatgtctcccattgtgttcatgaccaccaggccattgagatcaagttctactacctccatcagcttcttttccaaagggcgaacaactcttctgtttagcttctgaacatccttttttgggtcctgttagtgtccacaggagacactggtttatgcaaatgttcattttcaacagacacatcaggttgttgcttcctcgaattcttatcaattgtatggtgtgcgttagcaacagaacgaatatctttttggatc

SEQ ID NO: 199345 - DNA, 432 bp, Zea Mays
ttcgtggccctgctcgtagcttggaggcggcgacattctccggcaatgggggtcaaggggggcgacaagcccaagcccaactaccgcaagggcctgtggtcgctggaggaggaccagaagctccgcgactacattctcctccacggccacggctgctggagcgcgctccccatgaaagccggtaccaatgtcaagatagctgccattccttcaagcgtcgtggttctgacttcagagacctttgactcaattgtccttgatgagttttatgccccatggtgtggtcactgcaagcatcttgctccgatttatgagaagctggcttcagttttcaagcaggacgacagtgttgtgattgccaatcttgatgctgacaagcacactgacttggctaaaaaaagtgattctctcgttgtttgacagactgtaagg

SEQ ID NO: 199346 - DNA, 4563 bp, Zea Mays
acaaatctctctaatccccttgctgcaaacaacaagaccgtaggtatttctgctggctcgctgatggaaacagtggaaacgcaggtcaactagtcttacaccacaggagagcaaccgtttagagacttcgggtaagacacgagcccaataccacggccctgccagcgatggccacattggcgccaccggcggtggaggtggagccggaggccgatgccatggccctggcgtcggaagccgcggcgcctgagctcccatcgtcgcattcgcagctcgattttttcaagaccagagttcaattattgtgtgaaagtaacacgagagattttgatgcttgggtatcattaataaatgctgcagagggaacatcagcagatgacatagaagttatgagcttggtataccataacttcttgttggaatttcctttgtgctacggttactggatcaaatatgcagctcataaggcacgactatgcacaaccagatatgtaatggatgtttatgaacaagctgtccatgctgtacctcattctgttgatatttgggtcaactactgtgagtttggtatatgtgcatttgaagaacctgctcatgtcagaagtttatttgagagggctttatctcttgttggaaaggactatttgtgttatcacctgtgggacaagtatatagaatttgaaagctctcagaagcagctgattcatcttgccaccatttttatcaacacactaaaatttcccacaaagaagttgcacatgtattatgaaagttttagaaagtttgtaacattattggaacaagaggtgacaagttgtgttgctgaaatattatcagaaaaagtgcatgcttctgaaatggtaggcactgaaggttctgaattagatatatcaactattattgctgacttatttgaccaaaaaggtgggcatcttagtcctgaagcattgaagcattacttatctgctggggagaagctctacaaaatgtccagcaagatttacaaagaaatctgttatttcgaggcatccataaaaaggcctttttttaatgtcaagacacttgatgatgatcagcttgaaaactggcaccagtatcttgactttgttgagaagaatggggattttgactgggctgtaaaactttatgagaggtgtttgatcccttgcgctaattattcggaattttggatccgctattcagagtatgttgacgctaaaggtggccgagaaattgcaaaccatgctctgggtcgagcatcatcatgttttgcgaaggaggttccagctttctgcatgtattatgcgttgtttaaagagcaaattggtgatgcactggttgcacgctctgtttttactaaaacaagaagttacttcacttcagggttttatgcaaatattaataggctggccaacatggaaaaacgaatgggaaatactaaagcagcttctgagatatacgagacagcaattgaggatgcaatgcagaagaacaacatagagttgcttcctgacctgtacagcaattttgctcagttcatatatgtggcaagtcatagcattattcaggctaaacaagtctttgtcgacggaataaatcgtgcaccttgtaaaccattgattaagggattcatacagttcatgagtacacatggagggcctaaagacatacctcttcttgattctgttatttctaatgccgtgactccaggatctgacgtatccacagctttaagcagagaggaccgcgaagatatctcactgttgtttttggagtttgttgatctctatgggggtattaaagaactcagaaaggcatgggctcggcatagtatactgtttcctcacagcactgggaacatttcacgacattattctactatggggaatagccttcaagagactaagaagaggagaaacacagaacctttgatgattgctcgtgatcattctttagaagatacaatgaaactgaaacagacactcaaaaccgatgatttttctcttatagttgataaagagagtgagccacaagtagacaaggacattgtggattcaggaaaaagacatggggatgcgggagcgcagaaagctttagatttggtcaattcacacaaagagaccatcacgacagctcaggaatgcactgacatggtttacagtgaacatatcctggacaaaaacagaatagagaagcaaatgaattcacatgccaaagaagatattaatcaagacctaatcttgcatgaacaaaatgatgagaaaacaaattctcatgaggcggagactcctgtagctgagtcaggtgactgtgattctccttccaaagcaattgctagctctgagaacatcaattttcagggcaaggtcattgaggtatctgcaagcagccatctagaaacagtatgctcaaaatatgactcgccgtctggaccaaacatgcacaaagaaggaagttcttctggtccagctcgaatatctccagagctggaggaaaggcaccatgtggaggttcaggtaaaagtcgacacagagcatcatttttctgtcagtaatgcaaacctagagatatcttttgatggtccaaatccaactgaatgtgacaaggaaatctctgccattggtcatgggagtcaagactatattcaatcttcgcagtcacatcaactctcagcctgtgcaaaaccttggagcttggactcagcgaaaacaaaatcggatactgtcagtattcaagctcaacttcgaaaccagttggagaatgctcaaacatatcaatctaataacctttcacaaaacatgcaacaacaagagcttacaatgcctcacaatgttcaaacatctgcacaaattcaagatcaattgcttgcacagcctaatcacagaaaccaacagtatctccaaatgatgcaagggtatgcaacacaaatgggggaatattaccaacaacaactgtattacctgcaggctcagcacaatcaacagatgcagagtctgcaacagcaacagctcccgactgagcatcttcagcaaacttttatgcagcaagtacagcagctgaaccagcaattggtactttggcagcaacaagtgcaacagcagccacaagtagtactgcaacaggcactgccagttcagcaacttcctgacgaaaaacagggtcagtgtccttccggggatagcaaacacggccaaaataaacagcagcaacaagcacctcaaatggatcaacaaagccagcagttgcagcaacaacagcttctttatcttcagcagcaacaacaaatgtatcttatacagcagcagcagatgtatcaacaacagcaagctcagcagcaacagctcttacagcagcagttaatgcaacaacaacagtatgtactgcagatgccacagcaccagcaagactcagttcggcagcaacaacagcaactgtttgagcaacagcagcagcagatgatgcttcttcagcgacagcaacaacatattatgcaacaacagatccaaccgtacgtgcaacagcaacaaaaccaacaagggcccaaggatcagacttacaagtcaaatcatcagacttgtgaggtccaggggcaccacaataagcaacaaagctgcgcctatggaccgtcaggatggaaggaacaggcaaatggagcatggacaactgtctgaagcttcacagagcgatggttccaaactgcgcagcggtgagcaatctgagttatcctacccgtcaactcctcagtcagaacgctcaaatcactaaggccttgttcggttattcccaatacacatgaattggatgagattggaaaaaattaagaagtttgacttgtttgggattcaaacccatccaatcctactcaatccacatagattgagagctaaccgaacaagcactaaatcactcaggatcatgtatcaaggaacatacttaagaaacatggaagcatgcatccatttccttgccctgctgccagtggaggctgattccatactgtgtcagagtgatgatgatgtgctgaccttcccgaatggtgatgaagctccatctccacggtgctctcttctttctaaattataaggcatttcaactttttttgagagtcaaaacatctcaattataatgccagctatggtttgatagcttggtattagattctcagtaatgctcgcatgtaaggggcgatgtgatgtgttggagacttcagtcaagcagttacatatcaagaacatatttggatgaagcgtgtgatatcttgtcatgactcatatgtatatgtatacgatatcctttatggtatagctctcggcatctgcactggcacgatagggctgattagacagcaactagcataagcctggaaatttacagttctgtcgtcagcctggtggtacacatttttgcctggatcaaactgccgttgtgctcattcattcacaggaattcacctcggcatattagcgatgtgtcaacgtcatgggtggatgcgcgtgcgatgaagccggaagagcaagcttgtaaaccattatggtccaatgaatccaaactgatgattagttg

SEQ ID NO: 199347 - DNA, 640 bp, Zea Mays
aggatgaaggacgctgctgcaacacgtgcgagtgttcctggggaagcaagccgactccacaagggacagcatccttgcctctgcctcctccagcactggcaccattctccactggagtgtcggccaccgacttgctggcctaccagcgcctggctctgagcaagatggcctcgaaccacccagccctaatgggtcagcactccttgaagcaggtcgctgcattggggattggcggcggagccagccagtccatctatgatggcggcttccagggcatcaatactgtcaccggcacaacttccgcccagcagcagcagcagctcatgtactactagagtactactactccatgaggtacccagctacctatcccttcaagaggatggcgaggatgaatggatgatgccccttactatacccctatacatatagtagatgatgaagtcattactaggaccttttttccctaatctttttaagacccatctaagtaacatgtcctctctatgctagctatataattgtgcatttctggatacttaaagccaaggttcttagtagtataatcttctgtgtttgaccatcttttattgtgatgtatggattttcgttggcaattactgtatatgtcactggatag

SEQ ID NO: 199348 - DNA, 974 bp, Zea Mays
atatacaagtactccgagggagggcacatcagatgctagtgttatgtgggaccagaaaacaggacgatccagaggatttggttttgtttctttcaggaaccagcagaatctggaaaagagaatccaaatgatgatggtcctgaaaataaccctcagtttactactgtttatgttggcaatcttcctcacgaggctaccatgaatgatgtgcgcctgtttttccattcactgggggctggttcaattgaggaagtccgtgtaactcgtgataaaggctttggctttgtgaggtacagcacccatgaggaggctgcattggcaattcagatgggtaatggccaacttattggcgggaggcagataaagtgttcctggggaagcaagccgactccacaagggacagcatccttgcctctgcctcctccagcactggcaccattctccactggagtgtcggccaccgacttgctggcctaccagcgcctggctctgagcaagatggcctcgaaccacccagccctaatgggtcagcactccttgaagcaggtcgctgcattggggattggcggcggagccagccagtccatctatgatggcggcttccagggcatcaatactgtcaccggcacaacttccgcccagcagcagcagcagctcatgtactactagagtactactactccatgaggtacccagctacctatcccttcaagaggatggcgaggatgaatggatgatgccccttactatacccctatacatatagtagatgatgaagtcattactaggaccttttttccctaatctttttaagacccatctaagtaacatgtcctctctatgctagctatataattgtgcatttctggatacttaaagccaaggttcttagtagtataatcttctgtgtttgaccatcttttattgtgatgtatggattttcgttggcaattactgtatatgtcactggatag

SEQ ID NO: 199349 - DNA, 1066 bp, Zea Mays
cggacgcacacgcgcgcgcgcagggaatcaatcacgcacacgcgcacgcaccgccacccttcccgaaaagtctcctcacctcccggtcccggcctcccttcctctctctccccccctctcaaacatccccgcgccgatggatctccgcctcgcccactaggcctccggcgcgaccgagggtgggcagggggatggggctcctcgggcggaggacgttgctgcggctcctcgccctcgcttccgcggccgtcgccgtcgccgtcaccgtggaagcctacgagggcgacgctgatccgctctacagtgacacaatttggacagaaaaactatatttttcatcagatgctgcctttctggggtattccctcattttggcgatactgcggactttaaatttaagagacgaagcatctagagttatggttgccgctcctattctagcatttgtgacaacccacattctgtacctcaacttctacgaacttgacaaaggcctgaacatgaaggtttgtactgtgataatcattgctcagtgtctcctatgggcactgtgggctgtcatgactcggcatccttcacggctgaagatcatatttgttgccatcggaggtgcggctgcggtacttctggaagcttctgacattcctccgcgatggggatatgtggatggccgtgctatatgccttgctgtggctatccccctttcgtacctttggtggagctttgccaaggaagatgcggagatgcgaacgtcagcaatcctgaagaaggcacgttaacaagtcgcctgtgtgataatttcatgcctgcgcccagccattgtaaagataaaagtttcacttgtaatcttaggtaactactaacttagcatgtgaattaccgtcttatttttgttccacgatgttcttgtcccagttcagaaggccatgttgtttaaggggccacttctattctttaatttatacagcaactgccacttggtaggctcgtgctcatcaactataatctcagaagattgttaccatgggttatcagtgagtggctatcataataatgtctttttttt

SEQ ID NO: 199350 - DNA, 1841 bp, Zea Mays
gcgcacacccagacgcgcgacggcgcgagtcacttcctccacccggggccggcgcccggctgcctgttgtgctgtcatcgtcgtcgtcgcatcacgcccccgaccgatctgctcccccaaacaacacggacgcacacgcgcgcgcgcagggaatcaatcacgcacacgcgcacgcaccgccacccttcccgaaaagtctcctcacctcccggtcccggcctcccttcctctctctccccccctctcaaacatccccgcgccgatggatctccgcctcgcccactaggcctccggcgcgaccgagggtgggcagggggatggggctcctcgggcggaggacgttgctgcggctcctcgccctcgcttccgcggccgtcgccgtcgccgtcaccgtggaagcctacgagggcgacgctgatccgctctacaggcgaaccttcggggttactccgttttaggcctcgctggacatcccagtgctgtccgtctcggtgcctctggtggtttcagcgaaggcgagcggttccggaaaggaataaaaatggtgctgtctgtcttcgcctcttggctactggcattgggggtgtataagttctgattacgctacatgattcagaagcttgtgtggaaggatgccaaaagacaggctccctgaaggagacttctattaaacattgtatggtgccaaccgatggccaacctgttgacaagtcatggtacacgcatgagccactgtacttgcaatggaaggactggaactgcaagagtgaatgcagataccactgtatgatggaaagggagaatgaaagggcaaagcttggcctccagcctgttaagtatcatggaaaatggcctttgaagcgtgcctctgtgtttcaggaacctttatctgcagctctctctgcgcttactcttgttgtgcaatttaatgggtggctatcatttttcctcttgctttattataaacttcctctgcggccagaaactcacaagacatactatgaatacactggcttgtggcacatctatgggctccttgccatgaattcatggttctggagtgccatatatcacagttgtgacacaatttggacagaaaaactatatttttcatcagatgctgcctttctggggtattccctcattttggcgatactgcggactttaaatttaagagacgaagcatctagagttatggttgccgctcctattctagcatttgtgacaacccacattctgtacctcaacttctacgaacttgacaaaggcctgaacatgaaggtttgtactgtgataatcattgctcagtgtctcctatgggcactgtgggctgtcatgactcggcatccttcacggctgaagatcatatttgttgccatcggaggtgcggctgcggtacttctggaagcttctgacattcctccgcgatggggatatgtggatggccgtgctatatgccttgctgtggctatccccctttcgtacctttggtggagctttgccaaggaagatgcggagatgcgaacgtcagcaatcctgaagaaggcacgttaacaagtcgcctgtgtgataatttcatgcctgcgcccagccattgtaaagataaaagtttcacttgtaatcttaggtaactactaacttagcatgtgaattaccgtcttatttttgttccacgatgttcttgtcccagttcagaaggccatgttgtttaaggggccacttctattctttaatttatacagcaactgccacttggtaggctcgtgctcatcaactataatctcagaagattgttaccatgggttatcagtgagtggctatcataataatgtctttttttt

SEQ ID NO: 199351 - DNA, 1271 bp, Zea Mays
atcctatcatcaacgccatacaggtaccaagcctatgagctgatccatgccatataggccatgcttggtgccgctggcgctgtcatcccagaggcctgcaacaagtttggcgctaactgcgacccttaggccgtttcgttcaagactgatactctactcctggatgacaatactaaactacttcggcaacaacattcccatcaacggatctatgtctggctgtcatcgcgaagatcatcctcgtcatcggtgccccagtgggccctttaacatcctaggcctggccaacgacccctaccaaactgccatcctcaaggtgaaggagatcaagaacggccgactggccatgttctccatgttcgccttcttcatctaagcctatgtcaccgacgaaggcccccgtgtagaacctcgccaagcagaagagacgtacaacaagttgcaaaacgaccatattacagcaaaagaacgactttagtaagagcatggtactaatatggcatgttgtgtttagtggaaacctccctatcttgaggtttcttcttgatcatggtgatgatctccatgaagaaggcagcctggaaggtcatgacaggttcaccgttctacatatagctacagagaaagatataattattttgtagttcattatcaagtatcaacctatctctttgctttgtctaatccgagatcaaggacttccttctgaccgtgaggaggaaggatgcccgatcagtgaaggtcaagaggatcaaggatgttgttaaattcaagttacccaaatggtgcattgcctgatatcataattggacataagtttcagagatatcgtctaagtcttctggttggtttaaactgtcactggcataaggccataacacctctgttgtctgaatgtttatatttcattcacctatatactatttattgactcaatcattgtagcaaaaaaaattaattgcattggcaaatatgattttcttatattctctagcagatgtttaaggtatgtaaacctaaacttttaaaagatgctaacgagagcatatagcgataaatagtgcttttgtacctcaatgtatctttattacattttggttagctccgtagcaaagcacgggcatatacctattagacaataaaaagaaagctaacaaaaaaggtaagagcaaatagaaagccaaacacaagcacagtaaacatagacagcagccgttccattggaagagtaatacctcgtgaggaagattgccaacataaacagtagtaaa

SEQ ID NO: 199352 - DNA, 3123 bp, Zea Mays
ccaaacgggccaactaacaaacctgacggacacgccagccacgagagacgagaacgagacccagcccgactccaacgcctcacgttcgttgacggcttgacgccacggcctccccgggtcgccttttcccatcctgcccctctcctctcacctctacgacgcggaatcccatttttacccttctcacctcctccgctccctcccatggcttccacctccgcctcctcggcccccgtctccccctcccacccaaaccctaaccctacccccgacgcagatctcccatctgatcgccccatgcccgacgccgacggcggaagtggaggcgcctcgcccgcttccccggagaagcgggaggaggaggaggaggtgccgggggaggtggcggcggcggcggcggccgtggagcagccgaccccgcggaagacgcgccttccgcgtgcttgcaacaacaagcccaaacctcctcctccgccgccgccgcccgagcgtccgcgccgccgtgccgcggcggcgggcggcgcggacgagacgccgcaatgccgcgtggtcacgccgctcgtgtcggagcccgaggcgcccgcggagctgccccgctggcggctccgctgcatgtgggagctcggctccgtcctcaacttcctccacgtgttccggcctctgctgaacatcactggtgatttcacggctgaggagctcgaggtggcgcttatcactcccaacgagattctagatgatgtgcatatgccactgctaaagtcaattcctcctgtaactcgcatggctatgggacgtggaacctgggtgactgtcctgtgcagaaagctgaaggattggtggcattgggttgcagaaggtgatctgccaattgttgcatctcatggaactgaaattgagacgtacaaaactatagaaccagctattcgtttactaatcttgaaagcgatatgtgatatccgtgttgagcaagaggatattcggaacttcattgacagttctcttaagcatggacagaacttttctacctttcgtaaagatcggattggaggggattcccttggaatctcatactggtactagtttatttatcttgaatgtaaagaatttccattattttattttcatgcaaggccatgcaaaacaggtatgaagatgatgagattctcgggcatagattgtatcgtgaaattagacgagtagagcaggtcaagaaggagccaggaaagaggtctaggggaaaaggaggatcttcagctatttcagtcgtgtcctaccagtgggaaactgttgcgtccactttcgacgagtttgatgatgtggcagaaaaactcttttcaagtcggaacaggacagaggtttcacttggaaagaagctgaagattgaatatcttccagagatagaaaagatccataaaaagaaagagaggttgctcaaaaagcaacagagagaagctctccttcttgatagctacttgacatcagatggacttaccaccggccgttctctccgtgatagaaagcccgtgacttatacatttgatgactatgatcgctcaataaatgaagccatcaaaattacgaaaaaaagagaggagaactcagctgagcctgttgctactactgccaatagaagggtgcttcctccaagagcggaggcagcaagcaatgggaagctaaataatggtccctcaccaacaaccaacgactcggatgatggaaattcttcaaaatcagatgacgaccgagacagcgacggtgaacaagaaaatgaggcacttgatcgcagcaaccggaggaggaaaagatctcagagatacacacaggactttgttgaggctgtctcggatattgatcctaactttgacagtgacgacgatatcatgggagaagcagtgtatgatgaggaatatctgagaagtcgcaaacagaataagacatcaagcgcttctgaagaggatgaggagttccggttggaagaagatggtgaagatgatgatgaagaagaggaatattcattgagtaccagtgaagatctagaggagccgcaacggcataaaaaattggaaactcgtggccggcgaggtaccaagctgaggtcagttgatgaaatccaaacaggtctcagacgcagcaagcgttcttctcgtcctcgtattaactatcaccaatatgatttttctgactcggatacggggcctggaaaggcaaagaaatctgatgcatcagattctgaagctggctctgatgccgagaatgatatggagctctcgacatcgagtcaagagggagaggaagaagaggatgatagtcatgatgaagaaaatggtaataatgtgaatgataaaatggatgaggaccacaccgtggcagaaaataaagtagaaccagaggaggaggagcagaaggagcagccgcctatagagaagatggatgctcccagcacggaaagtagacgtgtaggaagaacattcctagatctaaacgagcttgcacctggaggtggctttgatgagagcccaagcttgacagtgaaagatgacatagacaacatttagggaataaagttttttttgatacatttgagtgctgttggtcagttttctgacttcgaagcaagggtggcagatcgatgggtttgagcttatggctgttttcattgatttgcagtaacaggacaagcgaggttccacttgaagtgactttgagcttcttcggtgcttatgtcatactcggagctgacactgagctgtccttgatggagaagatgctgcatgtattgagctgatgttgtagcctatggacatgtccattacactgactgagagtggctggcctggactggagattgctaatttgctgtatggttcataaaatccgtatcctctctgcatatttggttagtcacaaaactatgcaagataaatgatctaggtgctctgttccattaagcactgcaaaattatgtcaaatgtttggtgaatctaggtgcgcttcatgttcccagtgatgattcgtggaggctactcattactggacaaagaagcctgcttgatgactgagttgtagtgtccccaaacccaaaaccgatgatgattcgtggcggcccgtgatccatatatctcc

SEQ ID NO: 199353 - DNA, 3312 bp, Zea Mays
ccaaacgggccaactaacaaacctgacggacacgccagccacgagagacgagaacgagacccagcccgactccaacgcctcacgttcgttgacggcttgacgccacggcctccccgggtcgccttttcccatcctgcccctctcctctcacctctacgacgcggaatcccatttttacccttctcacctcctccgctccctcccatggcttccacctccgcctcctcggcccccgtctccccctcccacccaaaccctaaccctacccccgacgcagatctcccatctgatcgccccatgcccgacgccgacggcggaagtggaggcgcctcgcccgcttccccggagaagcgggaggaggaggaggaggtgccgggggaggtggcggcggcggcggcggccgtggagcagccgaccccgcggaagacgcgccttccgcgtgcttgcaacaacaagcccaaacctcctcctccgccgccgccgcccgagcgtccgcgccgccgtgccgcggcggcgggcggcgcggacgagacgccgcaatgccgcgtggtcacgccgctcgtgtcggagcccgaggcgcccgcggagctgccccgctggcggctccgctgcatgtgggagctcggctccgtcctcaacttcctccacgtgttccggcctctgctgaacatcactggtgatttcacggctgaggagctcgaggtggcgcttatcactcccaacgagattctagatgatgtgcatatgccactgctaaagtcaattcctcctgtaactcgcatggctatgggacgtggaacctgggtgactgtcctgtgcagaaagctgaaggattggtggcattgggttgcagaaggtgatctgccaattgttgcatctcatggaactgaaattgagacgtacaaaactatagaaccagctattcgtttactaatcttgaaagcgatatgtgatatccgtgttgagcaagaggatattcggaacttcattgacagttctcttaagcatggacagaacttttctacctttcgtaaagatcggattggaggggattcccttggaatctcatactggtatgaagatgatgagattctcgggcatagattgtatcgtgaaattagacgagtagagcaggtcaagaaggagccaggaaagaggtctaggggaaaaggaggatcttcagctatttcagtcgtgtcctaccagtgggaaactgttgcgtccactttcgacgagtttgatgatgtggcagaaaaactcttttcaagtcggaacaggacagaggtttcacttggaaagaagctgaagattgaatatcttccagagatagaaaagatccataaaaagaaagagaggttgctcaaaaagcaacagagagaagctctccttcttgatagctacttgacatcagatggacttaccaccggccgttctctccgtgatagaaagcccgtgacttatacatttgatgactatgatcgctcaataaatgaagccatcaaaattacgaaaaaaagagaggagaactcagctgagcctgttgctactactgccaatagaagggtgcttcctccaagagcggaggcagcaagcaatgggaagctaaataatggtccctcaccaacaaccaacgactcggatgatggaaattcttcaaaatcagatgacgaccgagacagcgacggtgaacaagaaaatgaggcacttgatcgcagcaaccggaggaggaaaagatctcagagatacacacaggactttgttgaggctgtctcggatattgatcctaactttgacagtgacgacgatatcatgggagaagcagtgtatgatgaggaatatctgagaagtcgcaaacagaataagacatcaagcgcttctgaagaggatgaggagttccggttggaagaagatggtgaagatgatgatgaagaagaggaatattcattgagtaccagtgaagatctagaggagccgcaacggcataaaaaattggaaactcgtggccggcgaggtaccaagctgaggtcagttgatgaaatccaaacaggtctcagacgcagcaagcgttcttctcgtcctcgtattaactatcaccaatatgatttttctgactcggatacggggcctggaaaggcaaagaaatctgatgcatcagattctgaagctggctctgatgccgagaatgatatggagctctcgacatcgagtcaagagggagaggaagaagaggatgatagtcatgatgaagaaaatggtaataatgtgaatgataaaatggatgaggaccacaccgtggcagaaaataaagtagaaccagaggaggaggagcagaaggagcagccgcctatagagaagatggatgctcccagcacggaaagtagacgtgtaggaagaacattcctagatctaaacgagcttgcacctggaggtggctttgatgagagcccaagcttgacagtgaaagatgacatagacaacatttagggaataaagttttttttgatacatttgagtgctgttggtcagttttctgacttcgaagcaagggtggcagatcgatgggtttgagcttatggctgttttcattgatttgcagtaacaggacaagcgaggttccacttgaagtgactttgagcttcttcggtgcttatgtcatactcggaggtgcttatgttatacttggaggccatgaggagggtagttttgcttttgattatgtatactacatgacggtcgcaatcgatcacagctgtattatggccaggctgatgctgcgttgaggccggtctgtaggatataaatttattgcctccacttatttagtcttaggcatggtgatgtcaatgagatcatggagggaaacctgtactccgagtgcagtgcagttcgtccgtcggcattcgcgagaccttttccacttgtagattgtaggttttgagaccgagcaggattagttctgtatctaaatctgacagtctgattttttcccccgtcacacctgtgacctgtgtagctgacactgagctgtccttgatggagaagatgctgcatgtattgagctgatgttgtagcctatggacatgtccattacactgactgagagtggctggcctggactggagattgctaatttgctgtatggttcataaaatccgtatcctctctgcatatttggtgcgcttcatgttcccagtgatgattcgtggaggctactcattactggacaaagaagcctgcttgatgactgagttgtagtgtccccaaacccaaaaccgatgatgattcgtggcggcccgtgatccatatatctcc

SEQ ID NO: 199354 - DNA, 2462 bp, Zea Mays
ttaagtgcgtttgacattagctgattgcaagaggatattcggaacttcattgacagttctcttaagcatggacagaacttttctacctttcgtaaagatcggattggaggggattcccttggaatctcatactggtatgaagatgatgagattctcgggcatagattgtatcgtgaaattagacgagtagagcaggtcaagaaggagccaggaaagaggtctaggggaaaaggaggatcttcagctatttcagtcgtgtcctaccagtgggaaactgttgcgtccactttcgacgagtttgatgatgtggcagaaaaactcttttcaagtcggaacaggacagaggtttcacttggaaagaagctgaagattgaatatcttccagagatagaaaagatccataaaaagaaagagaggttgctcaaaaagcaacagagagaagctctccttcttgatagctacttgacatcagatggacttaccaccggccgttctctccgtgatagaaagcccgtgacttatacatttgatgactatgatcgctcaataaatgaagccatcaaaattacgaaaaaaagagaggagaactcagctgagcctgttgctactactgccaatagaagggtgcttcctccaagagcggaggcagcaagcaatgggaagctaaataatggtccctcaccaacaaccaacgactcggatgatggaaattcttcaaaatcagatgacgaccgagacagcgacggtgaacaagaaaatgaggcacttgatcgcagcaaccggaggaggaaaagatctcagagatacacacaggactttgttgaggctgtctcggatattgatcctaactttgacagtgacgacgatatcatgggagaagcagtgtatgatgaggaatatctgagaagtcgcaaacagaataagacatcaagcgcttctgaagaggatgaggagttccggttggaagaagatggtgaagatgatgatgaagaagaggaatattcattgagtaccagtgaagatctagaggagccgcaacggcataaaaaattggaaactcgtggccggcgaggtaccaagctgaggtcagttgatgaaatccaaacaggtctcagacgcagcaagcgttcttctcgtcctcgtattaactatcaccaatatgatttttctgactcggatacggggcctggaaaggcaaagaaatctgatgcatcagattctgaagctggctctgatgccgagaatgatatggagctctcgacatcgagtcaagagggagaggaagaagaggatgatagtcatgatgaagaaaatggtaataatgtgaatgataaaatggatgaggaccacaccgtggcagaaaataaagtagaaccagaggaggaggagcagaaggagcagccgcctatagagaagatggatgctcccagcacggaaagtagacgtgtaggaagaacattcctagatctaaacgagcttgcacctggaggtggctttgatgagagcccaagcttgacagtgaaagatgacatagacaacatttagggaataaagttttttttgatacatttgagtgctgttggtcagttttctgacttcgaagcaagggtggcagatcgatgggtttgagcttatggctgttttcattgatttgcagtaacaggacaagcgaggttccacttgaagtgactttgagcttcttcggtgcttatgtcatactcggaggtgcttatgttatacttggaggccatgaggagggtagttttgcttttgattatgtatactacatgacggtcgcaatcgatcacagctgtattatggccaggctgatgctgcgttgaggccggtctgtaggatataaatttattgcctccacttatttagtcttaggcatggtgatgtcaatgagatcatggagggaaacctgtactccgagtgcagtgcagttcgtccgtcggcattcgcgagaccttttccacttgtagattgtaggttttgagaccgagcaggattagttctgtatctaaatctgacagtctgattttttcccccgtcacacctgtgacctgtgtagctgacactgagctgtccttgatggagaagatgctgcatgtattgagctgatgttgtagcctatggacatgtccattacactgactgagagtggctggcctggactggagattgctaatttgctgtatggttcataaaatccgtatcctctctgcatatttggttagtcacaaaactatgcaagataaatgatctaggtgctctgttccattaagcactgcaaaattatgtcaaatgtttggtgaatctaggtgcgcttcatgttcccagtgatgattcgtggaggctactcattactggacaaagaagcctgcttgatgactgagttgtagtgtccccaaacccaaaaccgatgatgattcgtggcggcccgtgatccatatatctcc

SEQ ID NO: 199355 - DNA, 3188 bp, Zea Mays
cgccttgcgcctgccacgttatccgaactgtctggctgaacaaaacctcaccccgtccgtccatccatcgagaaggcgagaaccacagccggtgcacgagctccgcctccgcaatggcatcgcggctcgctgtacaggcgctgtccgcgagcctgttgtcgcttgcggaaactacgtcccccaaaccaccgaagcaacagtcgcagaggccaagggcagccagcagcagcagcagcagccggaggaggctagcagcgacggcgggggcgataatcctggcgtcccagctactgccgcccgtggcgagtagcgccgccggcacgttcgacctgcagctcatgctgccggagaagtccagcgaggaggccgaggccgtggtgcggatccacgcgcgcaacctgctgggggtgaagcgcttcatcgacgccggggcgtggcgggagctgcaggcggcgctgcgctccaatgcgtccaacctcaagcaggacctgtacgccatcatacaggcgaggcccacggggcagcgctctgagctccgcaggctctactccgacctcttcaacagcgtcaccagcctggattacgccgccagagacaaggacgcgctccaggtgcaggagcactacggcaacatcgtctccgctctcgacgagattttctccaagatcacgtaggatactcagaaatctatatttccagttcgtggatacaaaggcggagcacggataagagagaactaggaacttagatcacgttcacatgaaggaagaactagcagcaaatggcgacaggcaaaaaggatccttcttgctatgtagcgacattttttttcttctagagagaactatttagctagttcttgtgagcttcctccgctacatctatttaccctactgtctgaaggggaaaccagaaagaatcacagttttttacaggtgcagcaaggccacaaaaactgcagttcctaaaaccctcgctgtgtagccaccaacgtctaagggtagctgcagggcagctgaacggtttcatccacctctcctttcgctttcagatagagaaagcagggggtccttggtgaatggtgaccctattcaccgccacttggtgtgcaaaatgaagcagtagttctccatatggtccatccatctaccaataaactgaaacatgctggcagtggatctaccatcctcttggctcctccttcaaatcgttgcttccaagaacttgatcctgataataaggaacataaattgggcagtaagccaagaagaacacatgtgtgcaatttgaagtaaacaaaaaaaacatgaaaggacctgaaatctcaagataaaatgcagctgtctgtgcgaaaagagtgctaattagcgttacgtcacttcaaattcttaccattgtaatgccaggaagcacgaagctagcaagattttcatctattgccacagtaagtggaggcatcttggtcctcagcccaggcagttgggtcgtgctgtttacataagcattatcatcagtgagagaagcagctgtatcacaaaaccaaacccttacaagcataactctagtattcgtgcaaaacaaaccgccaacatgtttcattagatgatgcttacatttgtacaagatcattaatgttccttcttgcccgatggaagagatcgatgttgttatgaggctgaaatctctgaatatttgtttcgatttgattaagaagcctattattttcctccagcagatgcagcactggacgatctatctctgaggctacataatacaaaaaacggcattgtcatatcatattacagacaaagcattggttaaatcttgccaaagtttaggacatgaatctgttatggtgcactactgaaaagtacaaggatctaaagtgcaatttatatgatgaacaaaatcaactgattaatcaaggaagaaacagcacgctacatgtttgtgtgtacttttgaatagtagcaagtagaaggctgtgtaatcccaaatttgttctaacaagttccacatgcccaaagctattctcattcatgttcttgaacagtaaacatccaaagtgtcaactttttttatccctttcagccactcgacactagaaactctgacaatatatatcattacaggcatacaggacttacaagtaaaaacagatgcattatgattatatattaaatatcaagctccggtggggtgcctacctgcgataaacttggcaatggagtcattaataaaatgaagtagttcagtcactctagtattggcagcagtatttatatatcctctcaaatgcaaaaaattcaaatgccggatcatgatattgataattgcacgagacagttaacagcatataacaagaaacaaagaagatagatggaagcaaacaattagacatgatactcatgtaatcaagtgacctaccaacctccagatataaacatagcgttttggccattatgcggcacaaatgaagaggctgtcatgcctgtttgaagaggatgatttgttccccacagcgcaggctctacaaatttatcctgataaacaaccataacggccaccatttaaaaacatataaatgcaaatgatgtatgaatagacccaatagagaactgacatggtatatattgatgggaatgaatttgagctcaacccccttaggctatctccagcagcgttcctatcccacccatatctcactacttattttaaacttcactctacaaacaatacactctacagtacaaaacaatgttttgcacgaccatatgcacgctctgttgagcacgatcttaggtgctccaatgatttcacaaaataaaaaagtgcacgaacacttccaccagaaacatggacggatagtgatgcaatgatctatgatgcaaactttgagattgaacaaaactttgtgcaaacgaaaagagaaaaaaaaaactaaaggtcagcatgcaattgggtcgggtgcagttttatctggatcagcaacccacaccaaatcacatgctgatcctctttttttttgtttcttcttgaaatttttttgaacttcaatattgttttcccttgaatctatcattgcatcatctaaattctaaacatccatattttggtggaaccgtaatgtgcatcgacctcaaaattggatttggaaacacgccttaacttttcgaactgaattattt

SEQ ID NO: 199356 - DNA, 3313 bp, Zea Mays
caagctcgaggatacgatttgccagaccaccgagtccccatatcgagcgtgacctacgccttgcgcctgccacgttatccgaactgtctggctgaacaaaacctcaccccgtccgtccatccatcgagaaggcgagaaccacagccggtgcacgagctccgcctccgcaatggcatcgcggctcgctgtacaggcgctgtccgcgagcctgttgtcgcttgcggaaactacgtcccccaaaccaccgaagcaacagtcgcagaggccaagggcagccagcagcagcagcagcagccggaggaggctagcagcgacggcgggggcgataatcctggcgtcccagctactgccgcccgtggcgagtagcgccgccggcacgttcgacctgcagctcatgctgccggagaagtccagcgaggaggccgaggccgtggtgcggatccacgcgcgcaacctgctgggggtgaagcgcttcatcgacgccggggcgtggcgggagctgcaggcggcgctgcgctccaatgcgtccaacctcaagcaggacctgtacgccatcatacaggcgaggcccacggggcagcgctctgagctccgcaggctctactccgacctcttcaacagcgtcaccagcctggattacgccgccagagacaaggacgcgctccaggtgcaggagcactacggcaacatcgtctccgctctcgacgagattttctccaagatcacgtaggatactcagaaatctatatttccagttcgtggatacaaaggcggagcacggataagagagaactaggaacttagatcacgttcacatgaaggaagaactagcagcaaatggcgacaggcaaaaaggatccttcttgctatgtagcgacattttttttcttctagagagaactatttagctagttcttgtgagcttcctccgctacatctatttaccctactgtctgaaggggaaaccagaaagaatcacagttttttacaggtgcagcaaggccacaaaaactgcagttcctaaaaccctcgctgtgtagccaccaacgtctaagggtagctgcagggcagctgaacggtttcatccacctctcctttcgctttcagatagagaaagcagggggtccttggtgaatggtgaccctattcaccgccacttggtgtgcaaaatgaagcagtagttctccatatggtccatccatctaccaataaactgaaacatgctggcagtggatctaccatcctcttggctcctccttcaaatcgttgcttccaagaacttgatccattgtaatgccaggaagcacgaagctagcaagattttcatctattgccacagtaagtggaggcatcttggtcctcagcccaggcagttgggtcgtgctgtttacataagcattatcatcagtgagagaagcagctgtatcacaaaaccaaacccttacaagcataactctagtattcgtgcaaaacaaaccgccaacatgtttcattagatgatgcttacatttgtacaagatcattaatgttccttcttgcccgatggaagagatcgatgttgttatgaggctgcaagggagaataaagataactattaaataatgcctgtcatgtattattggagggaaaaaaaagtaattttccttatgcagtctaactgaaatggaaggggtcatgctgttctaaaagcaatatatgcttttctatcagacgtacatttctcataatgttgtataatggaaaggatgaataaaaaaactgtaaaacagagtaaaataagaaaagggggactatacaaacctgaaatctctgaatatttgtttcgatttgattaagaagcctattattttcctccagcagatgcagcactggacgatctatctctgaggctacataatacaaaaaacggcattgtcatatcatattacagacaaagcattggttaaatcttgccaaagtttaggacatgaatctgttatggtgcactactgaaaagtacaaggatctaaagtgcaatttatatgatgaacaaaatcaactgattaatcaaggaagaaacagcacgctacatgtttgtgtgtacttttgaatagtagcaagtagaaggctgtgtaatcccaaatttgttctaacaagttccacatgcccaaagctattctcattcatgttcttgaacagtaaacatccaaagtgtcaactttttttatccctttcagccactcgacactagaaactctgacaatatatatcattacaggcatacaggacttacaagtaaaaacagatgcattatgattatatattaaatatcaagctccggtggggtgcctacctgcgataaacttggcaatggagtcattaataaaatgaagtagttcagtcactctagtattggcagcagtatttatatatcctctcaaatgcaaaaaattcaaatgccggatcatgatattgataattgcacgagacagttaacagcatataacaagaaacaaagaagatagatggaagcaaacaattagacatgatactcatgtaatcaagtgacctaccaacctccagatataaacatagcgttttggccattatgcggcacaaatgaagaggctgtcatgcctgtttgaagaggatgatttgttccccacagcgcaggctctacaaatttatcctgataaacaaccataacggccaccatttaaaaacatataaatgcaaatgatgtatgaatagacccaatagagaactgacatggtatatattgatgggaatgaatttgagctcaacccccttaggctatctccagcagcgttcctatcccacccatatctcactacttattttaaacttcactctacaaacaatacactctacagtacaaaacaatgttttgcacgaccatatgcacgctctgttgagcacgatcttaggtgctccaatgatttcacaaaataaaaaagtgcacgaacacttccaccagaaacatggacggatagtgatgcaatgatctatgatgcaaactttgagattgaacaaaactttgtgcaaacgaaaagagaaaaaaaaaactaaaggtcagcatgcaattgggtcgggtgcagttttatctggatcagcaacccacaccaaatcacatgctgatcctctttttttttgtttcttcttgaaatttttttgaacttcaatattgttttcccttgaatctatcattgcatcatctaaattctaaacatccatattttggtggaaccgtaatgtgcatcgacctcaaaattggatttggaaacacgccttaacttttcgaactgaattattt

SEQ ID NO: 199357 - DNA, 1987 bp, Zea Mays
ttaaccctaaccttaactttacttgtcctcttgttcctccgcatctcttgccatccgctggagaagagtcaatcgcggcggccccgttcaatggtctcacgacggctaccgtgaacacgacgacgcacccgcgcgagatggcgacctcctcggcgtctatctatggcttggttgctggcgaggctagtggcgatcttgttgccctccctcaggcgggtgagtcttgcggcgggcgcaaacacagcgggtgagctaatggcagccaatgcaaccggttaagggcacacgtccggcaatggcgccccgtactgtagtgcctatagtggtcagcgccaagccctatcaggccatgtgcacaccagtaccgcggtgcctgctgcatgctcctgcgcccaacgccaaaggaaaaaaaaggaatacggtctactactagagtagtagttctccattcatcactttgcactttgcagtcgatctcagccagccatcctcctgcagtcctgctatcgtcaccctgcaggctctttcttgattccgaggtctggataaatcttggatctggagcccagactcgctctcatgaactcaggtaacagtacataaatctgcaacgcacggacttgttcttctgaactcacctgcctgatagcgcttaaatctgcaatgtgatggcggtcagactacaccaccaacaagggcgccaacgggcggccgcatggcaagaagaatcaagcgttggctcggcccaaggcgacgccgtccaagtgggacgacgcgcagaaatggcttgtgggcatgtcgaacggccacgcggacggaacccacggtgccagagtcaagcctaggagctctaacgccgacgacaggcgcctcctcggctcggcctcgcagaacggccgcgtgtcctgcagcagcgtggatggcgccttggagtacagcatggtggtggccgcgccctcgacaccgccgcaggccgccgagggcggcggcgacatggaggaaaccaagaagatcgactgcatggtgcagctgcatgactcgccccaagcggtgatgcggtccgtgtgcctgcgggacatggggacggaaatgacccccatcgccagcaaggagccgtccaggacacccacgccccggcgcgcctgcacgcccgttgcgctgagcccgatggcctcaaggtcgtccaccccggtgagaagacgccaggaagggcccgtgggcgtgaccacggccattgtagcagggacgctgaccgagcaggtagcggcagcagacgaggtcgcttgcgtcggggacgagcgccccgtggctggtcatgtgcccagcgtgaactctctggagtctcgcgcggcagcctgggatgaggctgaacgggccaagttcatggcgaggtataaacgtgaagaggtaaagatacaggcctgggagaaccatgagaagagaaaagccgagacaaagatgaagaaaatgcagatgaaggctgatcagatgaaagcacggggccaagaggagctgtccaaccggctggccaccacgcgtcggatggctgaggagaagcgggcgagcgctgaggcgaagctcaatgagcgtgcggccaggacatcggagaaggccaactacatcaggaggactgggcacctgccgtcctccttcaagatttcttgcttgtgcggctcgagctttgagtaacagaataacaattattagtccaaataatacaatgaagatagtccaactcaacttcaaattcttcctcttcaacatggtgcttctcattcttctacctgaacgatgacaaatatgtggtctctatttttctcttatgatggatttattaaattttgtgcagttgagaataaacaatatacccccgatggtctagccaaaatacgcctgaattgtacatgttaattatgctacaatttgaatacttatgtagtgaaactctacaatacaatctacaacaacgtaaaactgtgttttgtaa

SEQ ID NO: 199358 - DNA, 1704 bp, Zea Mays
ttaaccctaaccttaactttacttgtcctcttgttcctccgcatctcttgccatccgctggagaagagtcaatcgcggcggccccgttcaatggtctcacgacggctaccgtgaacacgacgacgcacccgcgcgagatggcgacctcctcggcgtctatctatggcttggttgctggcgaggctagtggcgatcttgttgccctccctcaggcgggtgagtcttgcggcgggcgcaaacacagcgggtgagctaatggcagccaatgcaaccggttaagggcacacgtccggcaatggcgccccgtactgtagtgcctatagtggtcagcgccaagccctatcaggtctggataaatcttggatctggagcccagactcgctctcatgaactcagactacaccaccaacaagggcgccaacgggcggccgcatggcaagaagaatcaagcgttggctcggcccaaggcgacgccgtccaagtgggacgacgcgcagaaatggcttgtgggcatgtcgaacggccacgcggacggaacccacggtgccagagtcaagcctaggagctctaacgccgacgacaggcgcctcctcggctcggcctcgcagaacggccgcgtgtcctgcagcagcgtggatggcgccttggagtacagcatggtggtggccgcgccctcgacaccgccgcaggccgccgagggcggcggcgacatggaggaaaccaagaagatcgactgcatggtgcagctgcatgactcgccccaagcggtgatgcggtccgtgtgcctgcgggacatggggacggaaatgacccccatcgccagcaaggagccgtccaggacacccacgccccggcgcgcctgcacgcccgttgcgctgagcccgatggcctcaaggtcgtccaccccggtgagaagacgccaggaagggcccgtgggcgtgaccacggccattgtagcagggacgctgaccgagcaggtagcggcagcagacgaggtcgcttgcgtcggggacgagcgccccgtggctggtcatgtgcccagcgtgaactctctggagtctcgcgcggcagcctgggatgaggctgaacgggccaagttcatggcgaggtataaacgtgaagaggtaaagatacaggcctgggagaaccatgagaagagaaaagccgagacaaagatgaagaaaatgcagatgaaggctgatcagatgaaagcacggggccaagaggagctgtccaaccggctggccaccacgcgtcggatggctgaggagaagcgggcgagcgctgaggcgaagctcaatgagcgtgcggccaggacatcggagaaggccaactacatcaggaggactgggcacctgccgtcctccttcaagatttcttgcttgtgcggctcgagctttgagtaacagaataacaattattagtccaaataatacaatgaagatagtccaactcaacttcaaattcttcctcttcaacatggtgcttctcattcttctacctgaacgatgacaaatatgtggtctctatttttctcttatgatggatttattaaattttgtgcagttgagaataaacaatatacccccgatggtctagccaaaatacgcctgaattgtacatgttaattatgctacaatttgaatacttatgtagtgaaactctacaatacaatctacaacaacgtaaaactgtgttttgtaa

SEQ ID NO: 199359 - DNA, 1900 bp, Zea Mays
ttaaccctaaccttaactttacttgtcctcttgttcctccgcatctcttgccatccgctggagaagagtcaatcgcggcggccccgttcaatggtctcacgacggctaccgtgaacacgacgacgcacccgcgcgagatggcgacctcctcggcgtctatctatggcttggttgctggcgaggctagtggcgatcttgttgccctccctcaggcgggtgagtcttgcggcgggcgcaaacacagcgggtgagctaatggcagccaatgcaaccggttaagggcacacgtccggcaatggcgccccgtactgtagtgcctatagtggtcagcgccaagccctatcagtaggccatgtgcacaccagtaccgcggtgcctgctgcatgctcctgcgcccaacgccaaaggaaaaaaaaggaatacggtctactactagagtagtagttctccattcatcactttgcactttgcagtcgatctcagccagccatcctcctgcagtcctgctatcgtcaccctgcaggctctttcttgattccgaggtctggataaatcttggatctggagcccagactcgctctcatgaactcagactacaccaccaacaagggcgccaacgggcggccgcatggcaagaagaatcaagcgttggctcggcccaaggcgacgccgtccaagtgggacgacgcgcagaaatggcttgtgggcatgtcgaacggccacgcggacggaacccacggtgccagagtcaagcctaggagctctaacgccgacgacaggcgcctcctcggctcggcctcgcagaacggccgcgtgtcctgcagcagcgtggatggcgccttggagtacagcatggtggtggccgcgccctcgacaccgccgcaggccgccgagggcggcggcgacatggaggaaaccaagaagatcgactgcatggtgcagctgcatgactcgccccaagcggtgatgcggtccgtgtgcctgcgggacatggggacggaaatgacccccatcgccagcaaggagccgtccaggacacccacgccccggcgcgcctgcacgcccgttgcgctgagcccgatggcctcaaggtcgtccaccccggtgagaagacgccaggaagggcccgtgggcgtgaccacggccattgtagcagggacgctgaccgagcaggtagcggcagcagacgaggtcgcttgcgtcggggacgagcgccccgtggctggtcatgtgcccagcgtgaactctctggagtctcgcgcggcagcctgggatgaggctgaacgggccaagttcatggcgaggtataaacgtgaagaggtaaagatacaggcctgggagaaccatgagaagagaaaagccgagacaaagatgaagaaaatgcagatgaaggctgatcagatgaaagcacggggccaagaggagctgtccaaccggctggccaccacgcgtcggatggctgaggagaagcgggcgagcgctgaggcgaagctcaatgagcgtgcggccaggacatcggagaaggccaactacatcaggaggactgggcacctgccgtcctccttcaagatttcttgcttgtgcggctcgagctttgagtaacagaataacaattattagtccaaataatacaatgaagatagtccaactcaacttcaaattcttcctcttcaacatggtgcttctcattcttctacctgaacgatgacaaatatgtggtctctatttttctcttatgatggatttattaaattttgtgcagttgagaataaacaatatacccccgatggtctagccaaaatacgcctgaattgtacatgttaattatgctacaatttgaatacttatgtagtgaaactctacaatacaatctacaacaacgtaaaactgtgttttgtaa

SEQ ID NO: 199360 - DNA, 566 bp, Zea Mays
gacacgttcgcatcgcacgtgaacgccgcagcggctacctcgcctctgacaggcagggcccaccagaagtgggggagggagaggaagatatcccgtgcccagtgccctcgccgtcgccgacctaccacacccgtttccgggaggagagagagggcgggggcgaaggggatggcaaagcgccggcgccacgagttggcgccggtcgtggaggagctgatttcgccgatgaacagcctggacgacggctgcctcatgcacatcttcagcttcctgagcccaatcccagatggcgcttccttgcatgccaccctcggctatggctgcgtgtcgagaggccaatcagagatgcgatggagcctggagtttatccagatctcgaggctgctgtttctgctgctaggccgggtgacaccattcttattgcggctggtggttcccatgttgcatgtaacatccaaataaagaagcctatttgcataattggcgggggcgatcttcctgatgacactgtattgacctgctcacgtggtttcgacaatcttacctaggtttccattgattggcct

SEQ ID NO: 199361 - DNA, 3283 bp, Zea Mays
gtttgttctaacgattcgaaattctctcctcacttgtcttccttataaaaccagactctgcataacatcttggcatgagtagccatagtttgttagagcattcccccaaggaatataacaccattgtgtgacgagcaacccttcaccaaaaactaaggactgataaactgcaagagaccgttcctatcaggattgtggagtctgcaaccagatatcaatgcataacagaattgaagaggtatgagatgtaatgtgtgcatgttatttggtttgctcaaacaaaggagaaaaaaagagagatctcctcatgcgtcctaacatttgagactgcaatgtcttcatgccagatgtatcatcatcaacaacagcttcagagccacagtcatttcctgtcttctaggcagacattccctccagaaaggcacatgcttctgcaaggagggagcattccagcagagccagggcttgtgctttccactgatgctaaacctaggttaaaatggacacctgaactacatgagcgttttgtggaggcggtaaaccaacttggtgggcctgacaaagctacaccgaagacaatcatgagactcatgggtgtccccggactaacactataccaccttaagagtcatcttcaggctaagcaaaaacatccatgcccaagctaatggtgtaaatgcaaaaaatgtgattggttgcaccatggcaatggacaaaccacttgaaggaaatggatcaccagctagccacttaaaccttggaacccagacaaacaaatctgtgcacataggtgaagcccttcagatgcaaattgaagtacagcgccgactgcatgagcaactagaggtacagaagcataaaaaataaatcatattactaactaaattaccatttaaacattccttacaaagacataactgattcatccctagcagagttattgtgtaaaagactggagtagattgtctggacaaatatatagcaaaatttatcccaaaccaggctttaagtagatctaggacactcatcaaatgaaggtttattttgccatgaaagtacctgatgtacagacatccaaataaagaaaaattacgtagcttcaccatcagttggtaaacttcagggacatggtcagatcatatataatgttacatgtcaaaaaaatggcatcccaatcaccattcctttaagaaaaaaacatcacttataattgctccaatagtccaatcaactcaattgttttagccaagcactagttcctatattaccgatagagtaaaaagtccaagagaaagtatgtaatatatgtaggggtggtaatggatcacgatccaaatatttcttcacaatttgtttgagcctttaatcaattttagttcaaagatgaataaaaatagagccgatccaatctgatttttaaattttatagtgtaaaatttagagcctattgccacccctaaatgtatgcatatctttagctttagagcatccacatattttgtccttcacacaatgaacatctatagctcatttatcaacaaaagtatatgctggacaccagcatatgacttctaagaggctcacaatgcaagagggcctagtcatggtggtctaggaacataatcttgtcatacgtttaactgaacacagttttaaaaagaacaagtaaaaactaatgatgctaaaataagtttaaacaaactgaccaattgtaaatccagattttattcttttcatgtcacaagctctttactgttaatggtcaagtactgataatgtgataccttacacataaacgacgcctttcaacaggtacaaagacatttgcaactccgcattgaagcacaagggaagtacctacaatctgtgctagaaaaggcacaggagacactttcaaagcagaatgcagggtcagtcggtgtagaaaccgcgaagatgcaactgtcagaattagtctcaaaagtatcgacagaatgcctccagcatgcatttacaggctttgaggagattgatggttcccaaattctacaaggccataccatccaacttggcgatgggtcagttgacagctgcttaactgcctgtgacggctcacagaaagatcaagatatcctgtcaatcagtctttccgctcacagaggaaaggagataggaggcatgacctttgatatacaagagaaagaaagaggaagagaggatttgtttcttgacaagctaagcatgacgcctccaggccaactagacaggcgtgagagaggaagttttagtatgacacggaaggcagcaaaactggatctgaacatcaatgataccactgatgggccacagaactgcaagaaaattgacttgaatgggttcaactggacctaggaagagttagcaaaagaccttgcaaattaaatctgacttgattcatcaagagtgacaagcttataagcttgagattggctccttctgccaagatagcagcaaagagaggaagtgaaaccgaatgagttattccaaagaccagcagcatcgacatatcctccatggcaggacctgggtgatcctcggaacagctgcgctgtcggcccatcacgattcagcgaaataagtgatgaaattacaataagtagggcatgtagattggtagagtgtatttgagagagtctagtgttctcctccggctataccttattgtgattctgtacacaagcatataaatacaacgatttttgtcacaagtgattgttgctgggattggcaaatgcccaggaatgttttgccatcagctaagcgtgcctacaccctgctgccaaatcatgaatctacaagacagcaactggtgcacaaaacataagggacggacggatgcatatgcatcgtacaaaacacctgcaccgtgtccttgttggattatacataatggtttcaatgtttcgtttcatgcggctatgaagcgggaatgggacagatttactcccaacacgcaaatccaataaggtatcacgaccgctcttcgatgacaaggcagataaatcgtaaatcagctgctaagctgcgaaggtaaataaatcgatcgtacctcccaactgatctaggtggcggcggccgttcgatgagtgcagaaggggatcttctcctgctaaacaatcaccgccgccgccgccgcctctttcctcacaaaagctaaacaacatttgctccaaccaatttgtcggtttgatatgaagttcgtgattcgccaacctgcaactgcaatagaagccgtcggagtcggacgatgaatgctcaagggctc

SEQ ID NO: 199362 - DNA, 2329 bp, Zea Mays
ccaggcttgagtgtttgttctaacgattcgaaattctctcctcacttgtcttccttataaaaccagactctgcataacatcttggcatgagtagccatagtttgttagagcattcccccaaggaatataacaccattgtgtgacgagcaacccttcaccaaaaactaaggactgataaactgcaagagaccgttcctatcaggattgtggagtctgcaaccagatatcaatgcataacagaattgaagaggtatgagatgtaatgtgtgcatgttatttggtttgctcaaacaaaggagaaaaaaagagagatctcctcatgcgtcctaacatttgagactgcaatgtcttcatgccagatgtatcatcatcaacaacagcttcagagccacagtcatttcctgtcttctaggcagacattccctccagaaaggcacatgcttctgcaaggagggagcattccagcagagccagggcttgtgctttccactgatgctaaacctaggttaaaatggacacctgaactacatgagcgttttgtggaggcggtaaaccaacttggtgggcctgacaaagctacaccgaagacaatcatgagactcatgggtgtccccggactaacactataccaccttaagagtcatcttcaggctaagcaaaaacatccatgcccaagctaatggtgtaaatgcaaaaaatgtgattggttgcaccatggcaatggacaaaccacttgaaggaaatggatcaccagctagccacttaaaccttggaacccagacaaacaaatctgtgcacataggtgaagcccttcagatgcaaattgaagtacagcgccgactgcatgagcaactagaggtacaaagacatttgcaactccgcattgaagcacaagggaagtacctacaatctgtgctagaaaaggcacaggagacactttcaaagcagaatgcagggtcagtcggtgtagaaaccgcgaagatgcaactgtcagaattagtctcaaaagtatcgacagaatgcctccagcatgcatttacaggctttgaggagattgatggttcccaaattctacaaggccataccatccaacttggcgatgggtcagttgacagctgcttaactgcctgtgacggctcacagaaagatcaagatatcctgtcaatcagtctttccgctcacagaggaaaggagataggaggcatgacctttgatatacaagagaaagaaagaggaagagaggatttgtttcttgacaagctaagcatgacgcctccaggccaactagacaggcgtgagagaggaagttttagtatgacacggaaggcagcaaaactggatctgaacatcaatgataccactgatgggccacagaactgcaagaaaattgacttgaatgggttcaactggacctaggaagagttagcaaaagaccttgcaaattaaatctgacttgattcatcaagagtgacaagcttataagcttgagattggctccttctgccaagatagcagcaaagagaggaagtgaaaccgaatgagttattccaaagaccagcagcatcgacatatcctccatggcaggacctgggtgatcctcggaacagctgcgctgtcggcccatcacgattcagcgaaataagtgatgaaattacaataagtagggcatgtagattggtagagtgtatttgagagagtctagtgttctcctccggctataccttattgtgattctgtacacaagcatataaatacaacgatttttgtcacaagtgattgttgctgggattggcaaatgcccaggaatgttttgccatcagctaagcgtgcctacaccctgctgccaaatcatgaatctacaagacagcaactggtgcacaaaacataagggacggacggatgcatatgcatcgtacaaaacacctgcaccgtgtccttgttggattatacataatggtttcaatgtttcgtttcatgcggctatgaagcgggaatgggacagatttactcccaacacgcaaatccaataaggtatcacgaccgctcttcgatgacaaggcagataaatcgtaaatcagctgctaagctgcgaaggtaaataaatcgatcgtacctcccaactgatctaggtggcggcggccgttcgatgagtgcagaaggggatcttctcctgctaaacaatcaccgccgccgccgccgcctctttcctcacaaaagctaaacaacatttgctccaaccaatttgtcggtttgatatgaagttcgtgattcgccaacctgcaactgcaatagaagccgtcggagtcggacgatgaatgctcaagggctc

SEQ ID NO: 199363 - DNA, 2402 bp, Zea Mays
cttttatctgcaagaagaataaacttaacaaatatgtatgcttgcaaaccccttactcctcttaatatcaactatatttgttagtgctggaatcagaatactaatgtgtttgcagaattgacaaataaaaagattggtgcgcatagggtccacaggtaccttaaggaataaggataatatctttatacctcttttcagttgctgccaggattggtccaggcttgagtgtttgttctaacgattcgaaattctctcctcacttgtcttccttataaaaccagactctgcataacatcttggcatgagtagccatagtttgttagagcattcccccaaggaatataacaccattgtgtgacgagcaacccttcaccaaaaactaaggactgataaactgcaagagaccgttcctatcaggattgtggagtctgcaaccagatatcaatgcataacagaattgaagaggtatgagatgtaatgtgtgcatgttatttggtttgctcaaacaaaggagaaaaaaagagagatctcctcatgcgtcctaacatttgagactgcaatgtcttcatgccagatgtatcatcatcaacaacagcttcagagccacagtcatttcctgtcttctaggcagacattccctccagaaaggcacatgcttctgcaaggagggagcattccagcagagccagggcttgtgctttccactgatgctaaacctagcagttatcggcctccaattaagcttaatactgaatgccctttctgctcttcagtgattggttgcaccatggcaatggacaaaccacttgaaggaaatggatcaccagctagccacttaaaccttggaacccagacaaacaaatctgtgcacataggtgaagcccttcagatgcaaattgaagtacagcgccgactgcatgagcaactagaggtacaaagacatttgcaactccgcattgaagcacaagggaagtacctacaatctgtgctagaaaaggcacaggagacactttcaaagcagaatgcagggtcagtcggtgtagaaaccgcgaagatgcaactgtcagaattagtctcaaaagtatcgacagaatgcctccagcatgcatttacaggctttgaggagattgatggttcccaaattctacaaggccataccatccaacttggcgatgggtcagttgacagctgcttaactgcctgtgacggctcacagaaagatcaagatatcctgtcaatcagtctttccgctcacagaggaaaggagataggaggcatgacctttgatatacaagagaaagaaagaggaagagaggatttgtttcttgacaagctaagcatgacgcctccaggccaactagacaggcgtgagagaggaagttttagtatgacacggaaggcagcaaaactggatctgaacatcaatgataccactgatgggccacagaactgcaagaaaattgacttgaatgggttcaactggacctaggaagagttagcaaaagaccttgcaaattaaatctgacttgattcatcaagagtgacaagcttataagcttgagattggctccttctgccaagatagcagcaaagagaggaagtgaaaccgaatgagttattccaaagaccagcagcatcgacatatcctccatggcaggacctgggtgatcctcggaacagctgcgctgtcggcccatcacgattcagcgaaataagtgatgaaattacaataagtagggcatgtagattggtagagtgtatttgagagagtctagtgttctcctccggctataccttattgtgattctgtacacaagcatataaatacaacgatttttgtcacaagtgattgttgctgggattggcaaatgcccaggaatgttttgccatcagctaagcgtgcctacaccctgctgccaaatcatgaatctacaagacagcaactggtgcacaaaacataagggacggacggatgcatatgcatcgtacaaaacacctgcaccgtgtccttgttggattatacataatggtttcaatgtttcgtttcatgcggctatgaagcgggaatgggacagatttactcccaacacgcaaatccaataaggtatcacgaccgctcttcgatgacaaggcagataaatcgtaaatcagctgctaagctgcgaaggtaaataaatcgatcgtacctcccaactgatctaggtggcggcggccgttcgatgagtgcagaaggggatcttctcctgctaaacaatcaccgccgccgccgccgcctctttcctcacaaaagctaaacaacatttgctccaaccaatttgtcggtttgatatgaagttcgtgattcgccaacctgcaactgcaatagaagccgtcggagtcggacgatgaatgctcaagggctc

SEQ ID NO: 199364 - DNA, 2850 bp, Zea Mays
tatgcttattccaatattccatgctttgcttttgtgcagtcccaaggaaggcatcactaaggaaataagttcctttcactttatttatatgaagaacttttattgaattcttcttctagatgaatctggtcaaaaagaaatttaaaacttgctctcgtatggatgataaaaattattctcctgtcgtctatgtgccatgcttgtataacctgaaggcatacatttgctattgaatccatgattgcttaacatacagaatcctaaccaatgctgtcctttgatttcatgatacaggtatggtggagagtggaattagtgctgaacatataagatatagtaggcctacaagtgcaaaggcattattacaaactacatctcaaaagttcttcctgagaacaaggttcccacttttatctgcaagaagaataaacttaacaaatatgtatgcttgcaaaccccttactcctcttaatatcaactatatttgttagtgctggaatcagaatactaatgtgtttgcagaattgacaaataaaaagattggtgcgcatagggtccacaggtaccttaaggaataaggataatatctttatacctcttttcagttgctgccaggattggtccaggcttgagtgtttgttctaacgattcgaaattctctcctcacttgtcttccttataaaaccagactctgcataacatcttggcatgagtagccatagtttgttagagcattcccccaaggaatataacaccattgtgtgacgagcaacccttcaccaaaaactaaggactgataaactgcaagagaccgttcctatcaggattgtggagtctgcaaccagatatcaatgcataacagaattgaagagatgtatcatcatcaacaacagcttcagagccacagtcatttcctgtcttctaggcagacattccctccagaaaggcacatgcttctgcaaggagggagcattccagcagagccagggcttgtgctttccactgatgctaaacctaggttaaaatggacacctgaactacatgagcgttttgtggaggcggtaaaccaacttggtgggcctgacaaagctacaccgaagacaatcatgagactcatgggtgtccccggactaacactataccaccttaagagtcatcttcagaaatacaggctaagcaaaaacatccatgcccaagctaatggtgtaaatgcaaaaaatgtgattggttgcaccatggcaatggacaaaccacttgaaggaaatggatcaccagctagccacttaaaccttggaacccagacaaacaaatctgtgcacataggtgaagcccttcagatgcaaattgaagtacagcgccgactgcatgagcaactagaggtacaaagacatttgcaactccgcattgaagcacaagggaagtacctacaatctgtgctagaaaaggcacaggagacactttcaaagcagaatgcagggtcagtcggtgtagaaaccgcgaagatgcaactgtcagaattagtctcaaaagtatcgacagaatgcctccagcatgcatttacaggctttgaggagattgatggttcccaaattctacaaggccataccatccaacttggcgatgggtcagttgacagctgcttaactgcctgtgacggctcacagaaagatcaagatatcctgtcaatcagtctttccgctcacagaggaaaggagataggaggcatgacctttgatatacaagagaaagaaagaggaagagaggatttgtttcttgacaagctaagcatgacgcctccaggccaactagacaggcgtgagagaggaagttttagtatgacacggaaggcagcaaaactggatctgaacatcaatgataccactgatgggccacagaactgcaagaaaattgacttgaatgggttcaactggacctaggaagagttagcaaaagaccttgcaaattaaatctgacttgattcatcaagagtgacaagcttataagcttgagattggctccttctgccaagatagcagcaaagagaggaagtgaaaccgaatgagttattccaaagaccagcagcatcgacatatcctccatggcaggacctgggtgatcctcggaacagctgcgctgtcggcccatcacgattcagcgaaataagtgatgaaattacaataagtagggcatgtagattggtagagtgtatttgagagagtctagtgttctcctccggctataccttattgtgattctgtacacaagcatataaatacaacgatttttgtcacaagtgattgttgctgggattggcaaatgcccaggaatgttttgccatcagctaagcgtgcctacaccctgctgccaaatcatgaatctacaagacagcaactggtgcacaaaacataagggacggacggatgcatatgcatcgtacaaaacacctgcaccgtgtccttgttggattatacataatggtttcaatgtttcgtttcatgcggctatgaagcgggaatgggacagatttactcccaacacgcaaatccaataaggtatcacgaccgctcttcgatgacaaggcagataaatcgtaaatcagctgctaagctgcgaaggtaaataaatcgatcgtacctcccaactgatctaggtggcggcggccgttcgatgagtgcagaaggggatcttctcctgctaaacaatcaccgccgccgccgccgcctctttcctcacaaaagctaaacaacatttgctccaaccaatttgtcggtttgatatgaagttcgtgattcgccaacctgcaactgcaatagaagccgtcggagtcggacgatgaatgctcaagggctc

SEQ ID NO: 199365 - DNA, 487 bp, Zea Mays
agtcgctgccaccagctgcactgcacgggccagggaagggaactccggacgacgacacggacgctgtgatccgtaacttgcaggttggatccgtggcgctcgtggcgctaagcggcctcctgatcctcgtcttcttcgtggtggcggcggcgacgaacgccatcgccttttccgtcgtcgtgtccttggccggcgccggggggttcctggccgtgctgctggctttcctggccgcgatgtacgtcggcgcagtgtccgtcgccgtgtttgttatcttggccaccacgatcgcgacagtcgttgccatcacgatcgccaccggttgggttgcattcttctggtttgtttggtttaccgccagagaatgcctgagcctgacgactaagcgaagaaccggcaccacaagtccatgatctgagccagtttctgggtcgtagcagctagcagctaggttacgagtcacttgaagagcaagttggtacctgga

SEQ ID NO: 199366 - DNA, 736 bp, Zea Mays
catccacagcgcgcgcttgactcgatcactgcactcccccccgcgccaaggagatggacgagcgccccgacgcctgcgccgtggcttcctctacctcctccgcctcagtgtcgagcgccgaggaggacgcgtcgatccaggaccagctcggcgggcacggagcgttcgcgccaccagccgtcgacgccgcccagccagtaccaccgcggcggcggttctgggcgtgggccaccctcaccgcgcgcgccgccgcgcccaggctgcacgaggcgtgcggaaccgcggcgcggggactcgtggcgtggacaaggcggggcggcgcgcctcgttgcctcctcgtcgtgtcggttggatccgtggcgctcgtggcgctaagcggcctcctgatcctcgtcttcttcgtggtggcggcggcgacgaacgccatcgccttttccgtcgtcgtgtccttggccggcgccggggggttcctggccgtgctgctggctttcctggccgcgatgtacgtcggcgcagtgtccgtcgccgtgtttgttatcttggccaccacgatcgcgacagtcgttgccatcacgatcgccaccggttgggttgcattcttctggtttgtttggtttaccgccagagaatgcctgagcctgacgactaagcgaagaaccggcaccacaagtccatgatctgagccagtttctgggtcgtagcagctagcagacttttgcttcgagttggagcatgt

SEQ ID NO: 199367 - DNA, 795 bp, Zea Mays
ccacagcgcgcgcttgactcgatcactgcactcccccccgcgccaaggagatggacgagcgccccgacgcctgcgccgtggcttcctctacctcctccgcctcagtgtcgagcgccgaggaggacgcgtcgatccaggaccagctcggcgggcacggagcgttcgcgccaccagccgtcgacgccgcccagccagtaccaccgcggcggcggttctgggcgtgggccaccctcaccgcgcgcgccgccgcgcccaggctgcacgaggcgtgcggaaccgcggcgcggggactcgtggcgtggacaaggcggggcggcgcgcctcgttgcctcctcgtcgtgtcggttggatccgtggcgctcgtggcgctaagcggcctcctgatcctcgtcttcttcgtggtggcggcggcgacgaacgccatcgccttttccgtcgtcgtgtccttggccggcgccggggggttcctggccgtgctgctggctttcctggccgcgatgtacgtcggcgcagtgtccgtcgccgtgtttgttatcttggccaccacgatcgcgacagtcgttgccatcacgatcgccaccggttgggttgcattcttctggtttgtttggtttaccgccagagaatgcctgagcctgacgactaagcgaagaaccggcaccacaagtccatgatctgagccagtttctgggtcgtagcagctagcagttcgtgaacagtgacctgaacctgaaacttgccccagtttagaacctgaagctgaacactgccgacagtttaggcccactttggaac

SEQ ID NO: 199368 - DNA, 1741 bp, Zea Mays
gaccgtccccgcgtcggcgcgtcccgcacaccgcgctcccgctcggccgctcctgcctgcgcgctgcagcagctcggctgctcgcggtcgcttgtcccgtgcgcccggcggccggctgcttgccccgccgacctattcggctgcttcctgcttgagtgcttgtcccatccggcggcccggctgcttctgcttgttcgcttagtatcaatccaggctctgatttggtggctgaagctctgtttctccatggcgcttcgtttcgagatattaggaagattcaatcgcgcccgcgcagctcgcttaactcttcccccactttacttgtcaaacaccactttttatgcctgttggaactcaaggtttcgttgctgcatttggctgatattactgaggaaggagttacgtttcagtcacctgttgatgggaagcccatgctcttgacacctgaggaatctattcatattcagaacaatattggagctgatatcatcatggcacttgatgatgttgtaaagaccacaattactggcccgaggataaaagaagctatgtatcgcaccattcgttggattgacaggtgcatagctgctcacaagaaacctgatgtccagaatttatttgggattgtgcaaggaggattggatcctgttcttagagatatctgtgttaggagcttggttgagcggaatcttcctggatatgcaattggtggtcttgctggtggcgaagacaaggattcattttggcgtgttgttgcccaatgcactgctggattgcctgaaaataaaccacgatatgtcatgggtgttggctatccacttgatattgtagtatgcagtgctttaggtgcagatatgtatgactgtgtttatccaacacggactgctcgttttgggactgcacttgtgcctgagggtgtcctaaagttgaaacataattcaatggcgactgatgaacggccaattgatcatacgtgttcatgcatggtctgcaaaaaatatacgcgcgcctacttacattgcctggtcacaaaagatgctatgggttctcagctgctgtcatatcataacttatcatttatgatgcggttaagtagagacctccacatgtctattcttgaaggacgatttccagaattcgtgcgaggattcttgagggtgcagtttccaacgggagacgttccgcagtgggttcgcaacgcgatggaggtcgctggcattgacatatccgagtgctgtgcttccaccaatgtctgacaccaagcgtataggggccacctttaactgtaccggttgactgcaaatggagttgtgccgagttaagactcttcggcaagcaaaagacgacgacaggctttcacaaagaagtttttttccgtcatacatgtagggtctcacacggattcagcataggattttccaatagtatgctgaagcttggcgacaggttttgttagtgttttgtgttgtgtttggaaaccgcagaggtatgctatgctattcttctggggtctaggttatgcttcgtcttaatcactggatgtgatttttagtggtacggtcagatcaaaggaaggtgtacccaactctgacgaatattttttgttataacgaaaagaatgttatagtccttgcaatgatctgaacctgactggctgactgggtctgcagcatgcagcagctggaacagtccagtcccggcgtgctgctgctgcctctccctatgacaattgacaagcgag

SEQ ID NO: 199369 - DNA, 2666 bp, Zea Mays
gaagagtacaaagcttattgtgatcttgctacaaattgttttaaactatgtcataattttttttaaactgtgtcataattttttttcttcgttgcgtcagcaacacttaaattttttggcgtcctccgccactgtgcacggccggcactttctaggtgcagtgttggccctccctctcccacatccgattgaagcttcaagtgcaagctggttaataggggtaaaaacggtgctgtactaaggttagactgttaaataaataacagtgagttaatctagcgagaaacatttagctattgataattaaaagtattttagctattgacaatgtaggagcatctgcaagtgactcttcatttttacctctctatttaactttctatttcttttttcataaagattacattttatatgtagcatttcactccaacatgccatatatctagtttcgctagttagagtggctagccaaatttgactagttaggggatcaatttgaaaagttagatagattgacgggttagatgattaatctgttgaaaagttgttttgctgttgagtatttaaaatttaaattaacaaatcatttagctagtctattgaagatgctataaacgagcggcaatgtaccggtcgacccaaataagcaaatttgcccagctccgggcccaactgagtccaaacgtccaagtggacgcgaaccactcttctgaaccctaaaccctcgcgctttcgcctcccataccgccgaaactgacaacccatgaccacctcgcttcccctccttcctcgtcctctttggttggactgaggtgtggattcatccatcgctggtgaggacgccgggcttgtttttgttgttttttccctttctcttttcgtttatcgattttgtgggtcttcaaattcaatgtattgtttattggattggcgcttcagtttgtggcgggtttattttcaggttcgcttagtatcaatccaggctctgatttggtggctgaagctctgtttctccatggcgcttcgtttcgagatattaggaagattcaatcgcgcccgcgcagctcgcttaactcttcccccactttacttgtcaaacaccactttttatgcctgttggaactcaaggtacaataaaagggttaaccactgaccagttagaggagataggttgccagattatacttggaaacacctaccatcttgaattacgtccagggtctcaacttattgatgatttgggtggcctgcacaaatttatgaattggaaaagggcattgctgactgactctggtggtttccaaatggtttcgttgctgcatttggctgatattactgaggaaggagttacgtttcagtcacctgttgatgggaagcccatgctcttgacacctgaggaatctattcatattcagaacaatattggagctgatatcatcatggcacttgatgatgttgtaaagaccacaattactggcccgaggataaaagaagctatgtatcgcaccattcgttggattgacaggtgcatagctgaatttatttgggattgtgcaaggaggattggatcctgttcttagagatatctgtgttaggagcttggttgagcggaatcttcctggatatgcaattggtggtcttgctggtggcgaagacaaggattcattttggcgtgttgttgcccaatgcactgctggattgcctgaaaataaaccacgatatgtcatgggtgttggctatccacttgatattgtagtatgcagtgctttaggtgcagatatgtatgactgtgtttatccaacacggactgctcgttttgggactgcacttgtgcctgagggtgtcctaaagttgaaacataattcaatggcgactgatgaacggccaattgatcatacgtgttcatgcatggtctgcaaaaaatatacgcgcgcctacttacattgcctggtcacaaaagatgctatgggttctcagctgctgtcatatcataacttatcatttatgatgcggttaagtagagacctccacatgtctattcttgaaggacgatttccagaattcgtgcgaggattcttgagggtgcagtttccaacgggagacgttccgcagtgggttcgcaacgcgatggaggtcgctggcattgacatatccgagtgctgtgcttccaccaatgtctgacaccaagcgtataggggccacctttaactgtaccggttgactgcaaatggagttgtgccgagttaagactcttcggcaagcaaaagacgacgacaggctttcacaaagaagtttttttccgtcatacatgtagggtctcacacggattcagcataggattttccaatagtatgctgaagcttggcgacaggttttgttagtgttttgtgttgtgtttggaaaccgcagaggtatgctatgctattcttctggggtctaggttatgcttcgtcttaatcactggatgtgatttttagtggtacggtcagatcaaaggaaggtgtacccaactctgacgaatattttttgttataacgaaaagaatgttatagtccttgcaatgatctgaacctgactggctgactgggtctgcagcatgcagcagctggaacagtccagtcccggcgtgctgctgctgcctctccctatgacaattgacaagcgag

SEQ ID NO: 199370 - DNA, 1691 bp, Zea Mays
gccttcaaagcgtggactcattcaacaggaatacagggctatgtatcatgaggaactctcccaccgtatttcatctgaactcagtggaaaccacaagaaagctatgtcgctgtggattcttgatcctgctggacgtgatgcaactgttttgagagaagctctaaatggtgacactatggatctgagagcagccactgagattatatgttccaggacaccatcacagttgcaaataatgaaacagacttattatgctagattcggtacttatcttgagcatgacattgctcaccacacatccggtgatcaccagaagcttttacttgcatatatggggattccacgctatgaaggtcccgaggttgatcctacaattgtgacacatgatgcaaaggatttgtacaaagctggtgagaaaaggctgggtacggacgagaagatttttatccgtgttttcactgaacgcagttgggcacacttggcatctgtttcttctgcttaccatcatatgtatgaccggaaattagagaaggttatcaagagcgaaacttctggaaactttgaatttgcacttttgactatcctcagatgcgcggaaaacccagcaaagtattttgctaagctcttacgaaaggccatgaaaggtttaggcactgatgacatgacacttataagggtggtggtgacgaggaccgagattgacatgcaatatatcaaggcagagtacttgaagaagtacaagaagccattagctgaggctatcaactccgagacatcaggaaactatcggacgttccttctttcacttgttggtcatggccattaggctatgtttcgaccatgggacatgatatttctatcgatccaccctaaatgcagcgacctacctggaaaacttatgatgttgccatttatctgtcgtgactcctggatctaactgccacatatcacatatgcggttcctagtatgcttgtttaaagtattcgtgtatatatttccatccgggtttcttgttggaagattctggatgggataccagatcagctgttgctggtcacagtgggcttgactggtgtctctatgacgccaatattattatgtcatgttcttgtggtatttccttcatttgttattctgtttttcgctgcttatcccatatccctgttttctccgtccttcacggagaccaacgtcttaggacataacccagagatataggggtacgtttcttggagtataaaagataggttttgtatcttattgtaagatatgactcatacgagggttgtatatatgaagctgtttgttggacttaaaagaaccgtgttaaagatatgtcattgttagaacaactactccctccgtttctttttatttgttgctggatagtgtaattttacactatacaccgacaaataaaaagaaacagagggagtacaagagcttcctaaaaagttgttccccaaaacatcatattaggggctgctgaaaaacaaactcctctaaaaaaaatctaaacccacatcagaatgctaataacttgtacctaaaacttttcaaaggggtaggcccacggtatggtagcaggtagattatttgacaattcagtccgcagactgctaggtattggagttcatagtgtcaagtgtaattggaaagtaggctaaacctgaaccatggtcttctttag

SEQ ID NO: 199371 - DNA, 977 bp, Zea Mays
gcaaaaggcattcgttcgttcataaacatcgcctgaacaccaaagtcaccctccagcagtttcgctttcttgcttcaccctgcgatcgagatcgagctcaacaaccatggaggatttagtgagtagcccatctttcaggagcgtcctcagcagcagtagcgaagggcaggctcagtcaggagagagttcttggacggattacttcgtggatttcatgttatccgaggaggagaggaagagacaggcagatgctagctcatactcatactgcgctaccgaagacgaaggcggcagcaaatacggtggcgatggaagcaaccgcgatgaggaggaggaggaggaagaagaggagtccatggtctccgatgccgcctctcatgcccctacgactgcaggcgccaccgcactgataccagctggcaggtacaaggagctgaagaagctcaagaaaaagcctttcggcaaagccctggatcatgacggttccctggaggataccgcaagctctccggtgaatagcccaaagtgttgtgtcacagctggaattgagtgctaaaaggaggtgcaacatcagggacctcaccaagggagtcgttggaattggcgatgatcacggcggggaggggatggacgtctgtacagatgcaacgaccacggaaggagcgaggcttggtgatcagtaccacacgagcatagctccatgtgcggagctgaaggacaaggggatttgtttgttccccttttccgtgctgctgcactaccatgggccaaactgaggaaaaaagcaatgtgcgaatgaacagcatatgtagtgtttcgcaacttacactctatgcgcgcatgcatgtgtggtatgaacgaataccagaagaatgtgatactgtggatatatatatgtttttccttaattaatatatgtgaatactactatgaaattgttactcgtacacgtgtgttcctgctggtggtttcatttc

SEQ ID NO: 199372 - DNA, 2183 bp, Zea Mays
tggcgaatcacgaacttcatatcaaaccgacaaattggttggagcaaatgttgtttagcttttgtgaggaaagaggcggcggcggcggcggtgattgtttagcaggagaagatccccttctgcactcatcgaacggccgccgccacctagatcagttgggagtgtctcctgtgccttttctagcacagattgtaggtacttcccttgtgcttcaatgcggagttgcaaatgtctttgtacctgttgaaaggcgtcgtttatgtgtaaggtatcacattatcagtacttgaccattaacagtaaagagcttgtgacatgaaaagaataaaatctggatttacaattggtcagtttgtttaaacttattttagcatcattagtttttacttgttctttttaaaactgtgttcagttaaacgtatgacaagattatgttcctagaccaccatgactaggccctcttgcattgtgagcctcttagaagtcatatgctggtgtccagcatatacttttgttgataaatgagctatagatgttcattgtgtgaaggacaaaatatgtggatgctctaaagctaaagatatgcatacatttaggggtggcaataggctctaaattttacactataaaatttaaaaatcagattggatcggctctatttttattcatctttgaactaaaattgattaaaggctcaaacaaattgtgaagaaatatttggatcgtgatccattaccacccctacatatattacatactttctcttggactttttactctatcggtaatataggaactagtgcttggctaaaacaattgagttgattggactattggagcaattataagtgatgtttttttcttaaaggaatggtgattgggatgccatttttttgacatgtaacattatatatgatctgaccatgtccctgaagtttaccaactgatggtgaagctacgtaatttttctttatttggatgtctgtacatcaggtactttcatggcaaaataaaccttcatttgatgagtgtcctagatctacttaaagcctggtttgggataaattttgctatatatttgtccagacaatctactccagtcttttacacaataactctgctagggatgaatcagttatgtctttgtaaggaatgtttaaatggtaatttagttagtaatatgatttattttttatgcttctgtacctctagttgctcatgcagtcggcgctgtacttcaatttgcatctgaagggcttcacctatgtgcacagatctgataaaaatacaaatccatgttatcttatgcaaacatgttgaagaaaacatttattcatctcttacttgtttgtctgggttccaaggtttaagtggctagctggtgatccatttccttcaagtggtttgtccattgccatggtgcaaccaatcactgaagagcagaaagggcattcagtattaagcttaattggaggccgataactgctagagtctggttttataaggaagacaagtgaggagagaatttcgaatcgttagaacaaacactcaagcctggaccaatcctggcagcaactgaaaagagggaaacggaaagtgggtagacgaatccgatgggctgtgcatctgtatggagtcctctgagtttggctactatctgttctacataaggcgcagaaagttggggcttaaaaatgacggcgagcgcgcacgcgatcccgcgggaagggaataaggaaaagcgatgttgacaaagctggatgggaatcctgcgcttttttggaggcgaagatgagaaggaatatatcgcctgtgtcgacctcgccggcctgcttcttctgttccgtggcttggttgtgctcccgctggatcgtgccagccgccagcaggatgatgagcacgtgtgaaccctggcgtgggtatgttgttgtttgctctgggagtgttttgctcagtagtcgttctttgtttatttgtacaaactcgtccatttgtgtcggttgcagaaatacgaaaacacttcaaatggtacgaattggaatttggaaagtacagagtatagaccgctggataagctgtttttattgtttggcgtaatgaactggtgatccatatgttcgccttaaaaaaaaagacctgatggttcaagtatctatactactagtacccttgtggatgttttt

SEQ ID NO: 199373 - DNA, 854 bp, Zea Mays
cattgcagtctcaaatactccacaatcctgataggaacggtctcttgcagtttatcagtccttagtttttggtgaagggttgctcgtcacacaatggtgttatattccttgggggaatgctctaacaaactatggctactcatgccaagatgttatgcagagtctggttttataaggaagacaagtgaggagagaatttcgaatcgttagaacaaacactcaagcctggaccaatcctggcagcaactgaaaagagggaaacggaaagtgggtagacgaatccgatgggctgtgcatctgtatggagtcctctgagtttggctactatctgttctacataaggcgcagaaagttggggcttaaaaatgacggcgagcgcgcacgcgatcccgcgggaagggaataaggaaaagcgatgttgacaaagctggatgggaatcctgcgcttttttggaggcgaagatgagaaggaatatatcgcctgtgtcgacctcgccggcctgcttcttctgttccgtggcttggttgtgctcccgctggatcgtgccagccgccagcaggatgatgagcacgtgtgaaccctggcgtgggtatgttgttgtttgctctgggagtgttttgctcagtagtcgttctttgtttatttgtacaaactcgtccatttgtgtcggttgcagaaatacgaaaacacttcaaatggtacgaattggaatttggaaagtacagagtatagaccgctggataagctgtttttattgtttggcgtaatgaactggtgatccatatgttcgccttaaaaaaaaagacctgatggttcaagtatctatactactagtacccttgtggatgttttt

SEQ ID NO: 199374 - DNA, 4086 bp, Zea Mays
ccctgcagtggtgaacgcgttcctgggctgcttcatgcacgtggggctggcgctggtgctcgccgtctacctccccgtggcctttgtgtgccgcctcctccaccgcctcctcgtccgccccttcgccaggggcgaggacctccgcggcaaggtcatcctcgtcaccggcgcgtcctccggcatcggcgaggtcagccagccagccactctcttcttcttgcttgcttcgttatcccccgcgccctctctctgccgctgctggccttatcccccgcgtcgatcggccactacgtaactgaggaaatgcatgcttcgtatagtactctctttgcagagtgcagagacacatatacctagcagtgtaatacacacaaataagtaaataaataaataaaaacattccggccggtgcagtggttgttggtacgtgaaaaatctggccagtatgtgtagcgcgtctaagttattattgtagccttgtacaggagctaagcgcctaagctagcaagaattatgcaccacaaataaaccgatcgactagctacctggtgtgtggcagcaatgcatggaatggttgcccccgttcgttcatgatgatgataacgacgacgaccaccggtcgatcgacgcgcgcactactcgtatctatatacgtatctatctatcttgttcaattcattctcgaataaatgtcgctgtgaccgatgatggcgctcctcatgcatgtgggtctacagtcgctggaataaaagcccattatattcatggtcatggcccccctgaacccactcactgctgcgtctttactcctagctagctaggctagctagctacagtggaagggtacgcgtcagtcgaggcatgcatcccgatcgacagtcagaacaaaacaaggcgtacggcgtaccgaacaacaaaactactacacagtcgtatactaatatatgtttttgcttgtacgttgttgttatgaattttcagcacctggtgtacgagtacgcgaggcacggcgcgtgcgtggcgctggtggcgcgcacggaggtggcgctgcgcgccgtggccaaggcggcgcgcgacctgggcgcccccgacgtgctggtcgtgccggccgacgtcaccaaggtcgacgacgccaagcgcgccgtcgaggagaccgtcgcgcacttcggcaaactgaatcacttggtggccaacgccgggatctggtccagctgcttctttgaagagatcaccaacataaccgccttccataatgttattgatctcaacttctggggtgccgtgtacccgacctacttcgcgctgccgtacctcaaggccagccggggcaacatcgtggtgaccgcctccgtcgccggcagggtgccgacagccaggatgagcttctacaacgcaagcaaaggcgccgtgatacgtttctacgagacgctgagggctgagctggggtcccacgtgcacgtcaccatcctcacgcccggctacgtcgtctccaacctcaccaagggcaagggcctccagaaggacggccatgtcggcatcgacgaggaggcccgcgacatcaacgtggggccgatgccggtgggcaagacggagtcgctggccgaggtggtggtggcgagcgtgcgccgtcgggactactacgtcacgtggcccggctggtactggcccttccacatggtcatgtgcgccgcgcccgagctggtggactggttctcccgcaccttctacgtctccaagtccggcgaccaggacggcggcggcggcgcgctcagcaagaagatcctggaggccgtcggcgggaagaagttcctctacccccagaccatacgctcacagaccgccatggcacccaataactgacaacctacatatatatatatatatatatatatatatatgtcatttatgagaatgcacggtcgatctgttgttggattagaacagtacgtgatgatcgaacgtacgggccggcacgggtgaaattgtttattcgtttcgtttcggggttttttcttcttcatttcctctgccttttctccacttccgattttacaaatggtcaatgtgtatgaagtaattaatacgaatgttcattcgtggttggcttgcattgtacgccccgtgatattggggcatgcatgggtgcaaattgcaaagttgatgtacctatataggttttgtttgaatttaacatctcaagttagaactcacgaaagttgacatacaattggctatatttactagggtttactcgaagttacaccgttaatatacaataggataagttttgcttgaattgcatggacaaactgctaggttggactatgttattagaaaattgtttaagatttgtatacctgaactggtgtagctatcatagggctccattatggtgtggcaacaacggtggcagtcaaaactctaggagaactatgtttagaccatattgctggaatggtacatattaaacaaatgtattagtattacagatgttgttttcaaatctatgaatgaaaaataagcatcaatcatggttacattgaatcattgccgtggctctttctagagcgatgttggcgtggcacactagagccttcggaagccctgtcctgaggctcgtcctcctcctggtggtcggtctcatcatcctggtactccttgtccccctcactggtgctccttgtcctcctagtacatcaagttcaatatttatatcgatgttaacaaattcattagaagcgttgaggaggtcaaagaacttctaaacctcaactgtagtcggatcctgacgatctggttccaactttgtccgtagatcctcatgcatctgatacatcctatcatctccaatgccatcaactttcatttgtgtgtctctttcaaagcgtgactctccatggagataccatatctcatagcctggcacgaaaccatgtgtacacaagtgtagtgtgacctgtctcttatcataggccgtcatatttccgcatttgttgcatggacacctaatattatctatttgtgataaagcagcagcatgatctagaaactctgagtcttgacaaaccactcctctgagtgagccttagtctttttgttgaaaccagtatacatccacccgcgactgcccattcttacagctgtatacaagaattatccataaggtttgcacgtttctacatgttatggacctacatctatatgtttgtacatatcatggaccaaccatttttagacaagtcttaccatcgtaattaacaaccacgcattcgttcgctccatacgacgactccgcagcagctctttctttccgctttgcattgccctgcgttgcagacctgctacctcgttccatcacaatcaaatctgcaaacggagagaacggaagtggcaccattgtaaacaaattctctcaaggttacataatgagcaacgatttcacaacgaaatcgatgagtaacctgctgaattgctcgattactgtactgagtgccgaatgcggacataaatcgcaaaggcgatgctctgcttctgggcaacagtgcaacactaaaaagagaaagaagcacgcttattcatgaataggaaacaagcatataagccaaacatgtgccatagcatcccgtactaccgcaaatcacaagtaagcacactggacaaaaagtactttttatcctgcttacactaaccgatcaggttactatacctagtgcaaaacccagatgcagtagaagtccaggatgaagatcttgtgcaccggggcgtcgaggttgatgaagacctgttgctgttctgcaatggggcgtggagttcagtgtccagaactccagaccaccaaaccgctagtttgcgctccgccgtccaatgccgctccgctcggtctgcaggagctcgcgaggccgagaatcaacagtgagacaccggcgcgtggcagttaagcaaccctacgagatggcatagctgagtggagtcgtggacgtgcaggaggacaggaggaacgacgaccaggacgcacaggagcagcgtaccgagccgccgccgccgccgcggctcgcaatgcacaggaacgttgaattttggggaagg

SEQ ID NO: 199375 - DNA, 883 bp, Zea Mays
cctaaagtattttcatttctgtacatccgtgcttggcagcttgggccaggagctgtatcagataagaataaaaattaaaaatatgccagtagcccagtacgtttcttttacataaggggggaaaggtagaaaaggaactaggtattatatggcctacacatatcacaagaaggccagattcagatttcaagcgaaggttgatcaaggcccttacaaaaccagttgctcggaaggaatactatagattgtttgacacggttactatccgtactccgttaatgaagctgcggcaggtccgcaacgaaacaaaattctatcctaccgaagagatgggcagttcatatttggaccattacccagatctggcggagcaaattatgaacaatggccgtcgtaatggcctagctctgatgcgcgggtttctcttctggttgcagaacgcagtacatgaagatcagttcaagccatgggtagatgattctaataaagaacatgaagttatttatttggtggattgagctcgcactgacttggtggctatatcattcgtttgcttgatttcgcccgatggtggtaataactctgcgcgcgtgacaaattgtcctcagcggagactgtacggattccaacatgcgatggaaacctcgatcctgggacctggaataccatgttcacgagtatctattggatagcaatgcacatacattccagctgttgagtgaataaacggttcctcattgaaaataatacatgaacgctctatcttatgcattgtgtgattacgtctgggatgtgacccctgtagagttttcccaagactggagttagggtttggtcaatccgatgagttgttgcacttgatctccctatcatttaggatgct

SEQ ID NO: 199376 - DNA, 2216 bp, Zea Mays
gctctctgtgcttccatctttgacctcccgctaatcacaaccaccgccattaaccacagcctaaagcaggcggttgctccccccgcttaaaccctcgaaagattggattgcactatttgcagggactggctggattccagcatccagctcccgcacggccacaccgacgaggcgaacgggccagagtcggcgatcggcgtgtctccactctacaggcgacgacgaaaccagcagcctcagcgccgaccactccgggagcggggcctcacaccctcaggatcaacgggagatgccggtcgccgccgcctcaccctcgcactcgtgaactggcttcctctgcgacgagccggggcgggctcggattcggcggatcttgtgggtgcgtggcgtcgggctggtccggtgctagattgatcccgcattcgagctgcggcaagcgtctgggtagtcgcttctcccgagggaaaggaaaacaaagttgcttggccgactttgggatcaaggatcggcgaaaagaaagagaaaggagggatctttttgggaggttctgtttgagctttcagggtttatatcgtagccttgggcaactccgtgctgatggatttcttcaagattaagaagttcaggaaggggaataagagcgcccggggcgggggagaggtaatagaatccgacgacgacgccagcgctgggaatgtgacccctcggggcctggtggagcagaagcctggcatcggggaggggaacaatgccgaggtggcggtggatggtggaggcgcgggcaatggggtggttgaagaagaggaggacgacgacgatgatttcatcacgaatgaggtgaagcggaggctcaaggagctcaggaagaacagcttcatggtgctcatccccgaggacgagtgcgccgaggtcgaggaggatggcgacgaggaggaagggggcagccccacggagtggctggagtcgggtgtcggtgacggcttcccgctgtgtgggttggattcactgtatgataagtactgcgagagtatgctggtgtttcataagatgatcgcacagctcatgaaggatccagagtcactgaacatgtccaaaaagtctccaagatcagcatcaaaattggcgtctaccctgcgcaacctctcattcaaaagaaaagatgagctcccggaggattgtgaacaacttcaacaacagcaaagcggatatgatccttaccagacacttgagactgcatatgttgctcatattgcattaagctgggaggctctgcattgcacctatgtgcacctgagccttatcgttgcagcacaacctgataatcctacaacctataattctgctgctcaagcattccagcaattccaggtcctgctgcagagattcattgaaaatgagccatttgagcatggtacccgtgttgagatatatgcacggtctcggagcttgttgtcaaagttgcttcaggtccccacttttcaagaaggacaagagaaagggtggtgtccttatgagtgctcatggccacactggaagctcgatccaacaggtgcagtcttcgctcgataagaaagaggcgaaggtgaaggagctgctgaagaagaggaaagggtggaagagcaagacctggccaggcacagtggaggaggtgcagctgctgctcgccctgatcgatgtcaaggtcgtgtcgcgggtgctccgggtggggaagctgagcagggagcagctgctgtggtgcgaggagaagctgagcaaggtgggcctcacggagaaccggctgcgccgcgacgggtccccgatcctcttcccctgttgaccgacgcagcatgtcatgccgcgccagagatctcccttgccattcacttcgtttaccttctgagatatgtacatgccttcaggttgaattgaggatgcacataccaaaccaaagtagggcttacacatgtgttgctgcacgctgatcactgagtttagtttatacagtgcagcatggggcaacatgcttcgtttcacttcaccggaagcatatggtttcttaaaccctcgtgtaatctgtgttgaacaaggaggatgcagtgcagcacatgcagtatgcagaggctgccgtgctgcgttggttggttggttggttgcaccgaactttttttttgttctctgaagcctccggtgattgcattgcgtctgcacggctgcaactgcacgcagacagacccagg

SEQ ID NO: 199377 - DNA, 1379 bp, Zea Mays
gaggtgtggtggaggtcgatggaagtgattttcggcctagaggttccccatggcatcagttacttatattgatgatagccatgctgaggttattgatcctccaaagaatgaggaaatgctggatgccactgaacttgttggtgatcatattcagaattcaccaaaaccaaatgtggcaagctatggcaacgtgcgtgagctactggaatgccctgtgtgtttgagtgccatgtatcctccaattcatcagtgctccaacggacatactctgtgttctggatgcaagccaagggttcataatcgctgtccaacatgcaggcatgaactgggtaacataagatgccttgctctggaaaaggtggctgcatcactagagcttccatgcaagtaccagaactttgggtgcttgggcatatatccttactattgcaagctgaaacacgaatcgcaatgccaatacagaccatatacttgtccatatgctggatctgaatgcacggttgctggtgatattccgtatctagtaaatcacttgaaagatgaccataaggtcgacatgcacaatggaagcaccttcaatcatcgttatgtcaagtcaaatcctcatgaagtcgagaatgctacctggatgctcacggttttcagctgcttcggccagtacttctgcctgcacttcgaggctttccagctgggcatggcgcccgtgtacatcgccttcctccggttcatgggggacgacgctgaggccaagaactacagctacagcctggaggtcgggggcagcgggcgcaagatgacatggcagggcgtgcctcggagcatcagagacagccaccggaaggtccgggacagctacgacgggctcatcatccagcgcaacatggcgctcttcttctcgggtggcgacaggaaggagctcaagctgcgggtcaccgggaggatctggaaggagcagtgagtcgcgtgcatgcagtgcaggtgcaggcagcagctcgacgcatgcggcgttgcgtgtgttccttctccggtgttaccatgacctgaagcatggaatccaggaaccttgtagggtggtgtaggtggtagttggaatctttgagtcgtgggtggttcttgtgtcgttgtgtggtagtggtaccgactgatttagagaactggaggcaattctctcctttgctttgaacctgtcgagagctggtcatgatgggcacggctgtggactccatgaaatgtaaatgatgtatcccggctcactctgtctgtggatcagactcgctctctatcggcggaccacaattgttcctgagtttggccaatgagttaggtcccaaccattctctgctccagctggtacacgtagttttagtgagatctgtttg

SEQ ID NO: 199378 - DNA, 1349 bp, Zea Mays
ttcagttttgtctatccattgttagtgattttcggcctagaggttccccatggcatcagttacttatattgatgatagccatgctgaggttattgatcctccaaagaatgaggaaatgctggatgccactgaacttgttggtgatcatattcagaattcaccaaaaccaaatgtggcaagctatggcaacgtgcgtgagctactggaatgccctgtgtgtttgagtgccatgtatcctccaattcatcagtgctccaacggacatactctgtgttctggatgcaagccaagggttcataatcgctgtccaacatgcaggcatgaactgggtaacataagatgccttgctctggaaaaggtggctgcatcactagagcttccatgcaagtaccagaactttgggtgcttgggcatatatccttactattgcaagctgaaacacgaatcgcaatgccaatacagaccatatacttgtccatatgctggatctgaatgcacggttgctggtgatattccgtatctagtaaatcacttgaaagatgaccataaggtcgacatgcacaatggaagcaccttcaatcatcgttatgtcaagtcaaatcctcatgaagtcgagaatgctacctggatgctcacggttttcagctgcttcggccagtacttctgcctgcacttcgaggctttccagctgggcatggcgcccgtgtacatcgccttcctccggttcatgggggacgacgctgaggccaagaactacagctacagcctggaggtcgggggcagcgggcgcaagatgacatggcagggcgtgcctcggagcatcagagacagccaccggaaggtccgggacagctacgacgggctcatcatccagcgcaacatggcgctcttcttctcgggtggcgacaggaaggagctcaagctgcgggtcaccgggaggatctggaaggagcagcagcagctcgacgcatgcggcgttgcgtgtgttccttctccggtgttaccatgacctgaagcatggaatccaggaaccttgtagggtggtgtaggtggtagttggaatctttgagtcgtgggtggttcttgtgtcgttgtgtggtagtggtaccgactgatttagagaactggaggcaattctctcctttgctttgaacctgtcgagagctggtcatgatgggcacggctgtggactccatgaaatgtaaatgatgtatcccggctcactctgtctgtggatcagactcgctctctatcggcggaccacaattgttcctgagtttggccaatgagttaggtcccaaccattctctgctccagctggtacacgtagttttagtgagatctgtttg

SEQ ID NO: 199379 - DNA, 2504 bp, Zea Mays
aacacacgcccctcggataccgccacgtcagcgatccgcgcctctcgatccgagcactcgcattggccgcgcgcgagacccactagccaacctccctgcgcctggtccagggcgcgccccgtgaaccgctcccctcttcccccaatggcgaggaaaacacccaccccgtataagatcactctgtatttcaaatcccctcgcatccaaacacttccgtggaaaaaaaacaattaataatttattactggcagaagggggaagaagagatggtggacgaggcatgggagcgggcggtggaggcggcgctgcacgccggcggcgaggggagctcgtcgccggcgcggagcctgacgcttgacggcgccgtcaagtgcacgcacgggcggctgccggcggcagagatactggagcggcaccagagcctggagcacctttcgatcgctggcgtcggggtcacgtcgctcgagggtttcccgcggctgcggaacctcacgcggctcaccctctccgacaaccgcatcgccggcggtctcgaccacctcgtcgccgctggcctgtcctcgctgcgggacctcgacctcagcaacaaccgcatccaggacgttgacgacctcgcgccactcgccgacctgcgcctcgtctcgctcgacctctacgagtgccccgttacccgtgtcaaggactacagatccagggtcttcgagatgatccggacgctcaaatacctggacaagatggatgccgacgagaacgagcgccccgagtccgatgacgacgatgacgacggcgagggcgatggcgagggcgatggcgacgatgatgacgaagatgaagaagacgaggaagaccctgggagcggcgaggtagcgaacggcggcgtcgcccatgcgcgcgcgggcgtgccctcgcacccggtggaggtgaatggggtgatcgatgtggacgaggaggagagcgacgctgacgaggtcatcccgaacggtggtgtcgagcacagccatggcgcaaacgggtttcgtgtcgcggctgctggcgaagcccgtggcgaggaggatgaggacgtggaggaagatgacgacgacgacgatgactttgaggaggaggatttgggggaggagattgatgaggatgttgatgacgaggatgctgttgtggaggtgcatgatgtaccaagtagtgacgaggaggaagatggcgtggaggaggatgaggaagaagaggatgaggacgaagatgatgaagaagaggaggaggttgaggatgaaggtgaagaggcggagccacagagcagtggtagggttgccatgatgacaggcgaggatgaaggagaagagatagatgggcatgaacatggagaaggggacgatgaggatgaaaatggtgagattggtgaagaggatgaggagggattggaggtggggaatgatgacgacgaagacgacgcagatgcggatgatgaggatgaagatactgaatatcttgtgcaaccaatcgctcagcctcaagccatggctattggaagtgaattagatggagttgaccctgatgatgctgacgaggacaaggaagaagtcgacaacgatgatgatggggccacagatcagccttcatcctcgcatggagccaagcggaagagagatgatgatgatctgtcaggcagtggtgatgacagtgaggatgacggtgttgaggacttgaggcccttcaagcacaagtgatggagcagccaatgtacatggatccctccctcccccttcttcagctagaagtaagcagcaagatcagcagcagcaggaggaggcagcaggaacagaaatatgttagcaagaagaaggatgccgcggacggggccaaggaggccacagcggaggcggcgaagccggccgcggccgccaagccaaagaaggccgcggcgctgccgctgccggagatgatgcagcaggagatcatcccaccgctgaaggatgccttggaggcggaggacgacgtgtcccaggtgcagctcgccttccaaaacaacacgctggagggatccttcataaagaacgacgtcccttattatttttgggccttctttccaaaaggagacctcacaggaccgaagggctttgcgctatcgtcctacagcaacgaagtgagcaccatcgagccgttcctgatcgatgagaagaggataacggccaagtacgtggtgttctgggtctacaagaggctggctgggcaaggcatccttccggtctggaaggaagaggagggggaggaggaggccgcgaagtagtaggttgcgcaggcgcatacgcatacacatacacacacacagggtgctgccgtgaacatacacatgtaacgctgtaaagttcatctgctagtaaaagttcatctgctgtgaacatacacatgtaacacagatacttcagtttcagcagttaaaaacctaccgtcgttattcttctggtgtgagataagaattcgtgggcctgaccttcgtgggccgggccggctcg

SEQ ID NO: 199380 - DNA, 1088 bp, Zea Mays
tgcagcccgcagccgcaggtgcaggtgccgatcagatagcgtggcgccaaaccactgccgtccaactgaaccagtggacaggagccacccctgcacggctgcactagactacacgagggacccccgtccggtctggccgtctccgccctccgccgatcgtgaaacacaaccgtcggtggtttgcttgcttgatcgctgatcctcgcggacgctcacggtcatggcgcctcagcctttgcgcgctccgaggctgagcgcccccgctggccacgcggcgtgcaggtgctcggccgcgccgctattcgggaagcgggcgccccccgtcgtcgcgttcccccgcgcccgtagcggcggcgccgtcgcctcgtgctcggccgtgcaggagtcgtccacctccaccactgttagcaagaagaaggatgccgcggacggggccaaggaggccacagcggaggcggcgaagccggccgcggccgccaagccaaagaaggccgcggcgctgccgctgccggagatgatgcagcaggagatcatcccaccgctgaaggatgccttggaggcggaggacgacgtgtcccaggtgcagctcgccttccaaaacaacacgctggagggatccttcataaagaacgacgtcccttattatttttgggccttctttccaaaaggagacctcacaggaccgaagggctttgcgctatcgtcctacagcaacgaagtgagcaccatcgagccgttcctgatcgatgagaagaggataacggccaagtacgtggtgttctgggtctacaagaggctggctgggcaaggcatccttccggtctggaaggaagaggagggggaggaggaggccgcgaagtagtaggttgcgcaggcgcatacgcatacacatacacacacacagggtgctgccgtgaacatacacatgtaacgctgtaaagttcatctgctagtaaaagttcatctgctgtgaacatacacatgtaacacagatacttcagtttcagcagttaaaaacctaccgtcgttattcttctggtgtgagataagaattcgtgggcctgaccttcgtgggccgggccggctcg

SEQ ID NO: 199381 - DNA, 1963 bp, Zea Mays
atactcagtttttctctttcaattatatgttctaactacctattaagaaatagaaggaacagtaccagttcaagatggtaatgtaatagtataccatagaaagataaggaaacacattgctcaacttgtaattgtatttttctcttcagaaatagatcttttggtttttgaatagcttgggagagtacattattatagtagtgcatgttgttaatccatcaatggagttctaccaagctcatttgatgaactgaatctcacacaggtaaatggcagcgcaacaagtatgttggtgtatctcttgtgggcaaaactctcgcgattcttgggttcgggaaggttggttcagaagttgctcgtcgcgctaaaggtttaggaatgcatgtgattgcacatgatccatacgcttctgctgatcgggcccgtgcaattggagttgagctagttagtatggaggaggccatgacaactgctgacttcatctcattgcacatgcctcttacccctgcaacaaacaagatgctcaacgatgaggcctttgctaagatgaagtatggtgttcgcattataaatgttgcacgcggtggtgtgattgatgaagatgctctagtcagggctcttgattcaggaatagtagcacaggctgctcttgatgtgttcactaaagaacctccagctcctgataacaagttggtgctgcacgagaatgttactgtcacacctcaccttggtgccagcacagtggaggcacaggaaggagtggctattgagatagctgaagctgtcattggagctctgaaaggggaacttgcagcttctgcagtcaacgctccaatggttcctgctgaggtgctgtcagagcttgcaccttttgttgtgcttgcagaaaagcttgggcatttagctgtgcaactagttgctggtggtggtggcatcaagtctgtgaaagtgacctatgcatctgcacgggcccctgatgatcttgacacgagacttctccgtgcaatgatcaccaagggattgattgagccaatctccagcgtttttgtcaatcttgttaatgctgacttcaccgcaaagcagaggggagttcgcatcactgaggagaggatcatcttggacggctcacctgagacgcctatcgactacattcaagttcagattgccaatgtcaagtccaaatttcctagtgcgatatctgagactggagagatcacagtggaggggagagtgaaggatggcgttcctcatctaacaaaggttggagcattccaggtggatgtgagcttggaaggaagcctgatcctttgcaggcaggttgatcagccaggtatgattgggtcggtaggaagtgtcttgggtgaggagaacattaatgtcagtttcatgagtgtcggaaggattgctcctcgcaagcatgctgtcatggcaatcggtgttgatgaggaaccaagcaaggtcacactgagaaagattggggagattccagcaatcgaagagtttgttttcctcaagctttaggcaactaagcgcaaatgtatgtttcaagttgcaagcatgctgtgcaattttgatgtagcttagcaatatagaggacggatggttctccttaaataagcttttaggattatttttgtagtggcgctcttgaatttggtgcaatattgatgccatcttttgaacggggtgttattctcagctactgtttcccaggttataaaaaataatatgtactccacgttccaatttataattcgtttgactttttttatctaatttataattcgtttgatttttttatctgaagcttgaccacctcgttttattcaaaaaaatatctaattattaatattttttattatgatattgttttgcatataatatactttaagtatgtctttaattttttttttaaaattttgcagtcgatcaaatttgataaaaaagtcaaacgaattataaa

SEQ ID NO: 199382 - DNA, 1071 bp, Zea Mays
gtggtccaaacaaccaaacagccgctatatagcggactaggggctcgttggagagaaaacttattacaaccgaccaacgcgctttgtaacgcctccgctgcaatcagcccccgcggcgagcttgccctgcccctgattgctagttctcgccgttacgtaaggcttcttggccttgcgtcctccgtctttcgttgctgatacatcgaggcatggcgatttatcggtccaacggtgacgccggctccgtcgctttcgtcgtggtatcttatctcgacctggtggccctgttcgcctgcttgcgctactacgagcagttggatcagcagcactcccaaaagcgcgcgagggtcaaggctggggtttggagcctcacgaccctccttactatcatgttcagttacaaggtggctgagattatgcccctgccagtcaaacttgttgtctggtcgatggcagccgctaccacctgtggcggcttctacgctttcttcgtccacagcgagaagcctgtcatgccagcggtggcgccacggcccgccgcggccaaggatgcagcctccaactaggttcgtttgccaccacaaggcgcatactgccggccttggttcggcaccgcgcgttagatcccatatgtaacgcgcggtagctttaagattattatgtccagcagcttattcatatattatacatatattcaaatttcactctgtgaatagtagtctaaaatacagtagtgttttgagtaaactatggataaactgctggacaaggtctaagataagtgctgcgtggtggcaacaaacgacacttagtcttgtttggtggcaatgatattggaggggctaaagttttttcgctcctaaacaagctcctaaacaagctcctaagaatcttacgtgttatgttgcattatggaatatctatgtatctgcaaactctctgtagtctgtatgtacctcggatgtgctctatgtggctttgtaattctgaacggaggaagtaataataagataaatggatggcgtaacaagataagttgctttgtgcaatttgtgtttccatactccggtg

SEQ ID NO: 199383 - DNA, 1858 bp, Zea Mays
gtggtccaaacaaccaaacagccgctatatagcggactaggggctcgttggagagaaaacttattacaaccgaccaacgcgctttgtaacgcctccgctgcaatcagcccccgcggcgagcttgccctgcccctgattgctagttctcgccgttacgtaaggcttcttggccttgcgtcctccgtctttcgttgctgatacatcgaggtattaaagaagctgcctggttccgggcagcagaggtcgccgccgcctgcagcaatggccgacttctcctggctcacggtgcttggcttcctattcctcaccttcaactcaggcatggcgatttatcggtccaacggtgacgccggctccgtcgctttcgtcgtggtatcttatctcgacctggtggccctgttcgcctgcttgcgctactacgagcagttggatcagcagcactcccaaaagcgcgcgagggtcaaggctggggtttggagcctcacgaccctccttactatcatgttcagttacaaggtggctgagattatgcccctgccagtcaaacttgttgtctggtcgatggcagccgctaccacctgtggcggcttctacgctttcttcgtccacagcgagaagcctgtcatgccagcggtggcgccacggcccgccgcggccaaggatgcagcctccaactaggttcgtttgccaccacaaggcgcatactgccggccttggttcggcaccgcgcgttagatcccagggccaactagcttgccggcgtggacagactggcagatctggagctcggcgcgaccagatccggtgctgctgtgcccgatggcagaggagatctctctggtttactctgctaagagtcaaagaggagctgatgacgacaactaagcttgggttaccgataattgagcctgttctctgcacgagaagaaatttccggcctcacctagtactaataagtatgctggatagtcccccagcacgggagttaattgtatcaagagaagtggagaccaagggcagagtagaactacagaggatatctttgtatatggaggctacatgtgaacaagaaaggagaggaggaagactgtatagatctgaagaacctaaggagaaacaatcagagtacttgctggaacacatatatcttccatgataaaagttagatttcttgtttggtgctcatgcatgggttccatatgttcttcccgtcttattagaacatatctattggactaccatgcataaaaagccgtcgtttcataaactattgggactatacggcaccaatgaagctattgatgctggccggcaagctgacagcgaggtgaaagcttttcaaaacgatattccgagtggaagagaaaagaaaataaaagaaatagcaggttattttagaaaaaaatagttggcccatatgtaacgcgcggtagctttaagattattatgtccagcagcttattcatatattatacatatattcaaatttcactctgtgaatagtagtctaaaatacagtagtgttttgagtaaactatggataaactgctggacaaggtctaagataagtgctgcgtggtggcaacaaacgacacttagtcttgtttggtggcaatgatattggaggggctaaagttttttcgctcctaaacaagctcctaaacaagctcctaagaatcttacgtgttatgttgcattatggaatatctatgtatctgcaaactctctgtagtctgtatgtacctcggatgtgctctatgtggctttgtaattctgaacggaggaagtaataataagataaatggatggcgtaacaagataagttgctttgtgcaatttgtgtttccatactccggtg

SEQ ID NO: 199384 - DNA, 1672 bp, Zea Mays
gtggtccaaacaaccaaacagccgctatatagcggactaggggctcgttggagagaaaacttattacaaccgaccaacgcgctttgtaacgcctccgctgcaatcagcccccgcggcgagcttgccctgcccctgattgctagttctcgccgttacgtaaggcttcttggccttgcgtcctccgtctttcgttgctgatacatcgaggcatggcgatttatcggtccaacggtgacgccggctccgtcgctttcgtcgtggtatcttatctcgacctggtggccctgttcgcctgcttgcgctactacgagcagttggatcagcagcactcccaaaagcgcgcgagggtcaaggctggggtttggagcctcacgaccctccttactatcatgttcagttacaaggtggctgagattatgcccctgccagtcaaacttgttgtctggtcgatggcagccgctaccacctgtggcggcttctacgctttcttcgtccacagcgagaagcctgtcatgccagcggtggcgccacggcccgccgcggccaaggatgcagcctccaactagcttgccggcgtggacagactggcagatctggagctcggcgcgaccagatccggtgctgctgtgcccgatggcagaggagatctctctggtttactctgctaagagtcaaagaggagctgatgacgacaactaagcttgggttaccgataattgagcctgttctctgcacgagaagaaatttccggcctcacctagtactaataagtatgctggatagtcccccagcacgggagttaattgtatcaagagaagtggagaccaagggcagagtagaactacagaggatatctttgtatatggaggctacatgtgaacaagaaaggagaggaggaagactgtatagatctgaagaacctaaggagaaacaatcagagtacttgctggaacacatatatcttccatgataaaagttagatttcttgtttggtgctcatgcatgggttccatatgttcttcccgtcttattagaacatatctattggactaccatgcataaaaagccgtcgtttcataaactattgggactatacggcaccaatgaagctattgatgctggccggcaagctgacagcgaggtgaaagcttttcaaaacgatattccgagtggaagagaaaagaaaataaaagaaatagcaggttattttagaaaaaaatagttggcccatatgtaacgcgcggtagctttaagattattatgtccagcagcttattcatatattatacatatattcaaatttcactctgtgaatagtagtctaaaatacagtagtgttttgagtaaactatggataaactgctggacaaggtctaagataagtgctgcgtggtggcaacaaacgacacttagtcttgtttggtggcaatgatattggaggggctaaagttttttcgctcctaaacaagctcctaaacaagctcctaagaatcttacgtgttatgttgcattatggaatatctatgtatctgcaaactctctgtagtctgtatgtacctcggatgtgctctatgtggctttgtaattctgaacggaggaagtaataataagataaatggatggcgtaacaagataagttgctttgtgcaatttgtgtttccatactccggtg

SEQ ID NO: 199385 - DNA, 1693 bp, Zea Mays
gtggtccaaacaaccaaacagccgctatatagcggactaggggctcgttggagagaaaacttattacaaccgaccaacgcgctttgtaacgcctccgctgcaatcagcccccgcggcgagcttgccctgcccctgattgctagttctcgccgttacgtaaggcttcttggccttgcgtcctccgtctttcgttgctgatacatcgaggcatggcgatttatcggtccaacggtgacgccggctccgtcgctttcgtcgtggtatcttatctcgacctggtggccctgttcgcctgcttgcgctactacgagcagttggatcagcagcactcccaaaagcgcgcgagggtcaaggctggggtttggagcctcacgaccctccttactatcatgttcagttacaaggtggctgagattatgcccctgccagtcaaacttgttgtctggtcgatggcagccgctaccacctgtggcggcttctacgctttcttcgtccacagcgagaagcctgtcatgccagcggtggcgccacggcccgccgcggccaaggatgcagcctccaactagctgtcgcctcggttgttttagcttgccggcgtggacagactggcagatctggagctcggcgcgaccagatccggtgctgctgtgcccgatggcagaggagatctctctggtttactctgctaagagtcaaagaggagctgatgacgacaactaagcttgggttaccgataattgagcctgttctctgcacgagaagaaatttccggcctcacctagtactaataagtatgctggatagtcccccagcacgggagttaattgtatcaagagaagtggagaccaagggcagagtagaactacagaggatatctttgtatatggaggctacatgtgaacaagaaaggagaggaggaagactgtatagatctgaagaacctaaggagaaacaatcagagtacttgctggaacacatatatcttccatgataaaagttagatttcttgtttggtgctcatgcatgggttccatatgttcttcccgtcttattagaacatatctattggactaccatgcataaaaagccgtcgtttcataaactattgggactatacggcaccaatgaagctattgatgctggccggcaagctgacagcgaggtgaaagcttttcaaaacgatattccgagtggaagagaaaagaaaataaaagaaatagcaggttattttagaaaaaaatagttggcccatatgtaacgcgcggtagctttaagattattatgtccagcagcttattcatatattatacatatattcaaatttcactctgtgaatagtagtctaaaatacagtagtgttttgagtaaactatggataaactgctggacaaggtctaagataagtgctgcgtggtggcaacaaacgacacttagtcttgtttggtggcaatgatattggaggggctaaagttttttcgctcctaaacaagctcctaaacaagctcctaagaatcttacgtgttatgttgcattatggaatatctatgtatctgcaaactctctgtagtctgtatgtacctcggatgtgctctatgtggctttgtaattctgaacggaggaagtaataataagataaatggatggcgtaacaagataagttgctttgtgcaatttgtgtttccatactccggtg

SEQ ID NO: 199386 - DNA, 1585 bp, Zea Mays
gctggccacaccggccacctgtatgttggcccgccgcgacccaaatctgtcatgtgccggcccgccgtgcccctctgttcgccgtcgaccggccggccactcgctatcactctacctcgctagaaagttccaaacgactacggcatcctctgactcccccgctctcggtccgcatttccattgtgctttctccgttgcatgcagcctcgcatctattctagcctccgccctcagctcaccaccacgacccgagggaaagggagaggggacgaatggcgagctctcagtgctgcgataacccgccagccctgaacccggcctgcgggaagggcaaggtcgtcgacagcttcggcgggctcaaggcctacgtcgccggccccgaggactccaaggccgccgtcgtcctcgttgccgacgtcttcggattcgaagcgccgattctgaggaacatagccgacaaagttgcttcgtcagggtactttgttgtggtaccagatttctttcatggggatccttatgtacctgagaatgctgagaagctcatacctgtgtggctgaagtcacatactccggaaaaagctctgtgctatagacccaaatgggtccgatccttccctggaccctgaccaagcgggagcacatgcacttggctgcccttttttttgttatatttcttctgagatcaaagttgggcatcttaatctgaaccatatgtgttgccataaaaaaactaaaaacaaataaaaacgcaaatgcttaatcttgtttgaactacatttaatccatctaggtgctaggaagtggcctagcgcctagcatcttttggacccttgattgtcacacgttgtttactttctttcgctgaacaaatttcatcaacagaaagaggtatttatttgctaggaaaaagggtttgaagaggcaaaaccagttatcgcggctctaaaggagaagggagtgtctgccgttggagctgcagggtattgctggggtgcaaaggtcgttgtggagttggcaaaagcaaatgagctcctccaggctgctgtactattttttttttccaatataacaccagaggtcaaatgctcaatctctatacttggagctgagatggatgtgaggtccccaccagagttagtcaagcaattcgagcaagccctttctgtgaactcaggggttggtcacttcgtcaaggtcttccctggcgtggcgcatgggtggagcctgagatggatgtgaggtccccaccagagttagtcaagcaattcgagcaagccctttctgtgaactcaggggttggtcacttcgtcaaggtcttccctggcgtggcgcatgggtggagcgtgagatacagcctcgatgatgcagctgccgtgaagagcgctgaggaagcctttgcggacatgctcgactggttcaacaagaacctaaaatgaactctgcagttgtcatcatgccttgtaataataactagtaacttgtgcgcgcctcgcgcgcgtagtaaacgttttgtaatataagtgataagaatacctatgtggcatgattacgatcattacttgctatattgaatccatttatatcc

SEQ ID NO: 199387 - DNA, 1829 bp, Zea Mays
cagaccaccctctcgtcgagtagtttcgctgcttctacgtcttggtatctagctccaagtcccaacgaagcgataacaagaaacaaccaaaatacgctgacgtagtcttacccatttgcgatggttcgttcagtccagtcttggtggcaagattgctgttggaaactaggaatcgcgccatttcctcctggttttccggtgttttgaatagggccttagcgcgatttctgcgtcatctgattagcatgcactagaattcgcgtctttgcttgaccgtttgtctgatctgttgttctaccaatttggatcacgagaatgaacaagacaagccgctttcttcgtgactccaatcgaccacagtggatgagtggaaagaggctgtggctgtgtgttcggtttctttgcgcggatctctatcaatgttagtggtaaaattcttcacatactctacgtagagagggacagagagaaaagggcgcaaagatgtcgacttcgttgcaaaggaatcaaaattattgatggtgcttcctaagcgagatgaggcggtgacaaagatgacggccggaaaggcaaataagctcacccgttgaatccctccacctttgatgatcatgccatgccatagtgtcctgtcctgatcacactgcctttttcatcatatagagtagaaacttagataagcttttgccctttgattctgaactgagagagtgtgcactgtgttgtgcctgtgcaaggcgtgtacttgtactgtaccaggggggagacggtagtgtagtactgtagtgggtgacgactgacgaccatgggtttcccaatgactaccgccattgttcctcccccgagatggctttatccccgattatctgaggtgtacgtcgagcatttaaaagggcattttccgcggtttgagaaacgaggagatctatctccttctcgcttcttattttttatttggtttgtgaaatagaatgatgtgtctatcaccaacacattcctcataatataataattagtatatacatgagaaataagttaattccaccaaaatttatagaacaaacttataatgcatcaatttataaagtataaggtgactcaataaaccaaacacatcgtaaagaggacggcgagtgctatcagtcatcagaaattcagaacctttgttctccctgcctcctcaaagcaagacatcggttcactgacagccaagacgcgcgagatatgacactaagaggcgatcccgagggaggcgaggcagtacgagctgggggaggcccggtactacatggtgctggcgtgggcggcggtgctgtggcagtgcttcttcctgggcgcggtgggcgtcatcttctgcgtgcacacgctgctggcgggcatcctcatcgccgtgttcatcccggtgacggaggtggcggccgtcatcttcctgcacgagaagttcagcagcgagaagggcgtggcgctggcgctctcgctctggggcctcgcgtcctactcctacggcgagtggagccaggccaaggccaagaaggagaagaagagcgaggaggacgacggcgaagtggcccaggcagtcccatgatccgtgccccacacacacaaacacaatggtctgccccgttgtactctctgtctgtgtgtatgtaaatgttgtgttgattgcggccgtgttggtcctgtgaatggcgtcctgagtcgtcggttgtcagtgatgtttgatttccagggattaatcttttgtctctttatttttattttatttaataatttacatattaaaataaaatagaatatatgaactaaatattagtctttagaaatcaaat

SEQ ID NO: 199388 - DNA, 1754 bp, Zea Mays
aaaatgtcattcaaggtttggactaagtctaactttttaaagttttactagatttatagaaaatactatcgacatttacatctccaaatagatttattatgagagtatattccataattcatctaatggtatttgctacaacttataaatattatttttgggggttatttggtgttttttgcccctgttgtataatgcaattgtgattatacccctacttttctaactgtgattttactctcgcgatcatgtttttgaagctttcgtttgcccctagtttgtactggcacttggtactgccgcattaaacgaaaaaattagaaatcgaaattagggccacacaaaaagaccaaagtaccttatatcctttgacccatgccttctctcctgtacccgttcacctagtattgatgcaaaatcctcaccctaacaagaagcggtgatgcgtcatgcgtagggatgcaagcaaaaaggttgacaccgcagaacaaggttggtttcaacgggaggtgttaccgaacgcgttagtggtgtgcgggacgaccaatatcgattgctgcgttggacggttcggtcgttatcgacttgaaccggtcggtaacggttgtctttagtgacgtcgagccttttgatttgtccatgcgcgtgccacgtcaggctgttccactcagcgcacgaaaaactagtggaggtaactccgaaggaatagcacatttcttgcagctgccacatttcacagaagcaactgtgaaaaagattgctcgcaagaaaatccgtgccttccaagaactttgtgacatgtctgtggagggtcgtgctgcattgctcacacaagttgctgggctttctgaagaacaagttcgggatgtggagcttgtactggagatgattccttgtattgaagtagacatcaaatgcgagactgaaggtgaagagggcattcaagagggtgatgtcgtgacaatgtatgcttgggtctcgctacgacggcgtaatggactgactgctgctcttccccattgtcccaacttcccattccacaaggaagaaaacttctggctgcttctagccgatgcggcatcaaatgatgtctggttgtcacagaaagtgagcttcatggatgaggccactgccataactgcggcatcaaaagctatacaagatacccaggaagcactaggtgcaagtgcaaaggaaataggaaatgcagttaaggaggcagttgacagggtgaagaagggcagtaggctggtaatgggcaagttccaagccccagcagagggtactcacaacctcacctccttttgtttatgcgacgcttggataggctgtgacatcaagaccagcttcaagctcaaggtcctaaagcgcagccgtgctggaacaagaggccatgtgcctgaagaagggtcagcagcagccgtagaagatggtattgaggacgaagaggaggaagatgaagaggagtatgatgactatgagagcgagtacagtgatgacgaggaggatgagaagaacaaggggaaagggcaggggaaggtcgtgaacggatcggcccatcaaggggctgaatctgatatagattcaggcagcgatgagtgattctacactgtattatgttgagaaaatcatagaacttaaccccatctattttttttaatttgaacatatccctattaagttgcatgcatcaatctaacccaaaagtttaatccgataagagttgtgcaattcacttatattatattccaaca

SEQ ID NO: 199389 - DNA, 2248 bp, Zea Mays
ctttcccattccccctcttgcgtgcaagcatcttctccggttctccccgctctcccatctttaaccgccccccctccctccctctccgtggtcttggaggagctcgctgttctacggctggctgcctgccgcggcgatccctgtctgttcgtttccgtcgcgcgggagccgcggttgcttttgcttgcttgcgttgccgcgagagaatcgtgagcagagagtgtgacctggccttattggcgtcttccgtgggcgggggcgggggcctgggccggggccgttgctggctgtttgttcgttgcccatcgatacactcctcccttgtctcccccgcatgcaatccgtgtgtgtgtgtgtgtgcgctctgcctctgctcgccggcgttggtttcgtgtgtcgcctgcctgtcgtcctcaccgcaacgctactcgttaccagctatcaactagcattgccttctccttccgctacaagaatctgacgagcccccctctccctcccgtcccggcgctgttcccagctcgctcctttcgagagtgtactgtttagtccgcgcgcattgctcggaccgagccaccgagttcttgccgcgcgccgcagcagtagagccattgccgcgttcgctcgcgccgcgcggttcatgcgccaggagtctgaggcggctacctagttaacggcgggggcatgcgtttcatcacaggcggcggcggcggcggagtaggaggaggagtaggaggaggcggaagctcggcggcgcggtcgtacgagcccatggccacggccgacaccacgagcctgcactactggctgcactggcgggtggggctctgtggcctgtgggtgctggcctgcatggccgtcgcgggctacctaatctggcgtcacgagggccccagcgccgaccggcgtcccggcggcgcgggcgcgggcctgtcgtccccgggcgctgcggctgacggcggcaaggagaggtgtcacggggtgctgtacgacgacgaggcgtggcggccgtgcctccgggacatccacccggcgtggctgctcgcctacaggctcatctccttcttcgtcctcctcagcctcctcgtcgtcattgtcatctccgatggcggcagcatcttctactactacactcagtggaccttcattctggtgacgatttacttcgggctcggcacggccctgtccatctacggctgcagcaggttcgccgaggagaacgtcgccgcggcggcggcggcggcggcggcagacatggaggacggcgcgggatacgtcgtcgcccgtggcctggggcctgctgctgctaagccggccttggatgaacgagacggtgccggagaggtcgctgggttctggggctacctgctccagatcatctaccaggcaaatgcaggcgcggtgatgctcacggactgcgtgttctggttcatcatcttcccgttcctcaccgagaaggactacagcctcaacttcctgttgatcgggatgcattcggtgaacgcagtcttcctgctgggcgaggccgccctgaatagcttgaggttcccgtggttccgggtcgcctacttcttcctctggaccgcgctctacgtcgtcttccagtggatcgtccacgcagctacgccgatgtggtggccttacccgttcctcgacctgacatcgaacctggcacctctgtggtacctcgcggtggcggcgctgcagctgccgtgctacgtggtgttctggctgctgatcaaggtgaagcaccacctgctggccaggtgcttcccggtctcgtacgtacgctagctaggggctagggcacaagcaggcaggcccgtcttctccgccgccaacggtgccctccccgatcaagcgaagaacagaggggagtggcgcgtggtggaagggaaggagatgcgtgcagtttttttacagggggtataaaaactataaaatagtttggtgtacattggaaggaagctaagcatggtggtagtctttatttgagaatttttttgtattttttttgccgtggtggagtggaagtgaacaggagagaggttcagggcagcagggaatggctgtgtatagctttgactgattggatgagattgaaatgaaatgaaatggagaagatactgttccttgacatcttatatttacccgtaccattccatccaaaatcaccgtgtgcgttaactttggctaagtgtctgtttggttgcctctacataggggtggtaatggatcgtgatctaaa

SEQ ID NO: 199390 - DNA, 4576 bp, Zea Mays
cgacgatcggcgtcggcagcggcgcgtccctgctgtccctcctgcatgcttgccacccagcttcgcctcgccacgcgtctcgtggaccattgcgcgcgtccctcgtgccacggcgcacccgcagccatgagtgccagcgctcccgtctcccgactcccgagcaaatcgctcggcgcctactactagcccgaaacctaggtggtgggaactcgggatacgaggtcctcttctccgccgcttgtcctcggcaagcacaaacgcggtaagccaccaaccgcctttcgatcgccgggctccatccctaagccatctcgccgcctcgtgagtcgtgagccgtgagccaaccgacctgccatcatcaattagtgacttcctgaacctgcttcgtgcgtcctaccactccaaagttccaacaatcaagagatttaaacaaagccttccataacttgttgccaataagtgcaggatttggaggccactgggctttggaaattcaaagtagactgcttggatcataacgagagagcacaaagggcctgggttttgtaaacagttggctttcactagagtcgatccattccatactgagcttttgcatatcatcaattcatcacacaatggatggtgtgcgatgcatggagtccccagctgctggtgatgccccgcatagttctttccgaacccttgggccaacactcctggtttcaatggggtatcttgacttcggaaaatggttggtggcagtggaagctgggtctcggtttggctatgatcttgtcctgctcgtgctgctttttaatctatcagctattctgtgtcagtacctctcgagctgtatcggcattgtcaccaaaaagaatcttgcggagatttgccaccaggagtatgatcagaaaatatgtgttgttcttggtcttcaagcaggactgtccttgctaacttctgaatttaccatgattgcaggcatcgtagttgggttcaaccttgtatttgaaagcaacaatcccatcacagtcgtatgttttacaagtgttgtagttaatctgctaccatatacactctcccttctggacaagaggaaggctggaatgtttaatgcctacgcatctggctttacactagtttgttttgtgcttggtttattagtgagccatcccaaaacccctgtcaataccaacgtaatgttccccaagttgagtggtgaaagtgcttactcactgatggtactacttggcacaaatataatagtacacaacttttatactcattcatcagttgttcaggttcagagaagatttcagggtcatacccttggtactctgtttcatgatcaccttttttctgtactatttgcattttctggtatctttcttgtgaattatattctgatgagttcagcagttgatgagtccaaaaacacaatggccattaacttccaagatgctagacagctaatgaatcaggttcatgtcattgttctcttcttatccgtcaagtcttttgtttaattggctatttgttctccgttcaccttcctattaatgtaaagagcagcattcgaattctcaaattataagacatgaccataggtttggtgttgtggcatgctactatacttgcatgtttggattttcaactttgtgaagttattgtattataagtacattacctattttttgggttgaccaaatggtgcacgagtttcaatattttactatggtcaaaaggacctaattggagtagcagagttttaggaaaaatatagttctagtatatttggggttcaagttatagatattagaaatcctatagtgtgtgtttgctttgtggaagtgcctcatgctagatcaggtcgtgtatcatgagtttattccatgaatttttgggtggaacaaacccattcttcatgtgtatacattagcttgtgagaattgagttggtgatgcatcaactcattctattctacagaccaaacaaaaagtgatcatgatggatcaccatattactcaaacccaatacacgttgttctaaacaagggctaaggttgggagaaatgatgtgttctagggaagccactggggacactctcttaggctcattccctgaatagggacataaagactgagttataagtaagctgctgggatgctctttttctcttcaactttcttgaaaacttagcctccgcatgaactggccagcgcatattcaataaaaatagtatccctttgagcttggagtgtgcattgaaggaggaagctccttcctgaatttcgtctggattcttgtattttgcaggtgttcacaagtcctgtggcgccaattgtattattagtggtccttctcttttcaggccacatcgtgtcaatgacatgtattattggtagtgatgtaatttcagaggatctcttcggcataaagctgcctctttttgtgcaccatctgttacctaaggtttttgccatgattactactatataccatgcgaaggttgtgggttttgaagggttatatcagttactcatggtctgcccaattatccaagctatgctccttccttcgtctgttatacctgttttccgcatttcctcgtcgagatcattgatgggaagataccggatatctcgatgtgttgaaatattgtgcttcctagcatttcttctaacactgtttacaaatatcatttttgtggcggaagttctttttggtgatagcacttggacaaatgacctgaaagggaacactgaaaaccctattctacttccatatatcgtcgtagtcctgatatcatgtggatctattggttttgcactgttccttgctgttactccactaaaatcagcatgtaatgaagctgagagagcgttgtctgtgcactcataacagagagaaacgttggatgccactcgtcacagcaaaaccgacttctctgagaatagggcacatgaagcatatgaagaacagaggtccttagccatccttgttccacaggattcactgaaaggtgatagaaataattttcgtagcatatccgtcatctcaaattagcttttgatcacaagggcagtttctgacgctactctacatgcaaatcatatgtctagtaatccagaagttcatccttagcattgactggacagagcctatgtcaactgaaggttgtgcccttaaaattgactggacagagagcctatgtcaactgaaaaaggttgtgcaaatagactcggatgcctgcacggacaacgctctgtttgtggagaagtctgaatatttcttttatcaatcactatttctcttccatttaaattcacaattaacaggatggttcttatcatgactgtacctctgtttgtgggagtggaagtgttggcttatctacctattactcaaagaaacaccactgtctcacctgacacctccggtgattgctgcaaacagaatgctttgttggttgttgaatgaagcaaattaatgtggacagtggtactgcaaatcaggtggttcctctataggatacaccatgtgtggagtctgcaacaaggttctagtctcaacttgcacatatggtggctcttgcgagttgtgacatgatcgtctgacatcaaagcgtgaaagacgttaataaatctgttcaggagaagcagtcatctagcgtggcaagcttggaattgacaatgagtgaggtggacactggtagatctagtagcagggtcaaaggatgatttcttttaccaagtatgcttgcattcgtgaggcaaatcaatgatacattatttagagcgtgattggttgcctgctcggcccagcctgagcgtatccagtcattcaggcccatggcggcatgctaaagaggtgcaataggctattgtttggttactttgtttcatctcatgatggcccattagagcttgcctttggttgcaaggctgtacagacacttgagcatggcaagcctcccaactagagaacagaagacaccagtcatgacaacgatgttctttctcctcactaagtatgcaccttttcctcttgttgcctgccgcagacccactagtagcacctgcagctgcctcctagctcttcggagcctccccaaacagccttgaaacatcatcaaccttcatggcatctgtttgtagtgagctctcagcaaagtaagatgtggtacccattgcaaacttgccagttgcaagaccattgccaaagatcacttccatctgcttgtaattttctatttggcatgtttaagtactcagcattcttagcccttcagggtgtgcctatattgcaagctcacaaatgttagtgtaaggctggaattaggttagtgggcacttaggaaaggttacaaaatcacagatacaattaacatacatcttgatatggccacctatagtgcacttcatctagactgatcatgtgtcattcatcatcatcatcacaaaggggctatttgtttcggtttttcgctagattttagccgtcatagtcgacttctagataccagacacagaaaaccgaacgcttcgcatctcagtgcgcttcaatgaaaatcatttttttttgtaaaaatcgc

SEQ ID NO: 199391 - DNA, 4468 bp, Zea Mays
cggcagcggcgcgtccctgctgtccctcctgcatgcttgccacccagcttcgcctcgccacgcgtctcgtggaccattgcgcgcgtccctcgtgccacggcgcacccgcagccatgagtgccagcgctcccgtctcccgactcccgagcaaatcgctcggcgcctactactagcccgaaacctaggtggtgggaactcgggatacgaggtcctcttctccgccgcttgtcctcggcaagcacaaacgcggtaagccaccaaccgcctttcgatcgccgggctccatccctaagccatctcgccgcctcgtgagtcgtgagccgtgagccaaccgacctgccatcatcaattagtgacttcctgaacctgcttcgtgcgtcctaccactccaaagttccaacaatcaagagatttaaacaaagccttccataacttgttgccaataaggatttggaggccactgggctttggaaattcaaagtagactgcttggatcataacgagagagcacaaagggcctgggttttgtaaacagttggctttcactagagtcgatccattccatactgagcttttgcatatcatcaattcatcacacaatggatggtgtgcgatgcatggagtccccagctgctgtggaagctgggtctcggtttggctatgatcttgtcctgctcgtgctgctttttaatctatcagctattctgtgtcagtacctctcgagctgtatcggcattgtcaccaaaaagaatcttgcggagatttgccaccaggagtatgatcagaaaatatgtgttgttcttggtcttcaagcaggactgtccttgctaacttctgaatttaccatgattgcaggcatcgtagttgggttcaaccttgtatttgaaagcaacaatcccatcacagtcgtatgttttacaagtgttgtagttaatctgctaccatatacactctcccttctggacaagaggaaggctggaatgtttaatgcctacgcatctggctttacactagtttgttttgtgcttggtttattagtgagccatcccaaaacccctgtcaataccaacgtaatgttccccaagttgagtggtgaaagtgcttactcactgatggtactacttggcacaaatataatagtacacaacttttatactcattcatcagttgttcaggttcagagaagatttcagggtcatacccttggtactctgtttcatgatcaccttttttctgtactatttgcattttctggtatctttcttgtgaattatattctgatgagttcagcagttgatgagtccaaaaacacaatggccattaacttccaagatgctagacagctaatgaatcaggttcatgtcattgttctcttcttatccgtcaagtcttttgtttaattggctatttgttctccgttcaccttcctattaatgtaaagagcagcattcgaattctcaaattataagacatgaccataggtttggtgttgtggcatgctactatacttgcatgtttggattttcaactttgtgaagttattgtattataagtacattacctattttttgggttgaccaaatggtgcacgagtttcaatattttactatggtcaaaaggacctaattggagtagcagagttttaggaaaaatatagttctagtatatttggggttcaagttatagatattagaaatcctatagtgtgtgtttgctttgtggaagtgcctcatgctagatcaggtcgtgtatcatgagtttattccatgaatttttgggtggaacaaacccattcttcatgtgtatacattagcttgtgagaattgagttggtgatgcatcaactcattctattctacagaccaaacaaaaagtgatcatgatggatcaccatattactcaaacccaatacacgttgttctaaacaagggctaaggttgggagaaatgatgtgttctagggaagccactggggacactctcttaggctcattccctgaatagggacataaagactgagttataagtaagctgctgggatgctctttttctcttcaactttcttgaaaacttagcctccgcatgaactggccagcgcatattcaataaaaatagtatccctttgagcttggagtgtgcattgaaggaggaagctccttcctgaatttcgtctggattcttgtattttgcaggtgttcacaagtcctgtggcgccaattgtattattagtggtccttctcttttcaggccacatcgtgtcaatgacatgtattattggtagtgatgtaatttcagaggatctcttcggcataaagctgcctctttttgtgcaccatctgttacctaaggtttttgccatgattactactatataccatgcgaaggttgtgggttttgaagggttatatcagttactcatggtctgcccaattatccaagctatgctccttccttcgtctgttatacctgttttccgcatttcctcgtcgagatcattgatgggaagataccggatatctcgatgtgttgaaatattgtgcttcctagcatttcttctaacactgtttacaaatatcatttttgtggcggaagttctttttggtgatagcacttggacaaatgacctgaaagggaacactgaaaaccctattctacttccatatatcgtcgtagtcctgatatcatgtggatctattggttttgcactgttccttgctgttactccactaaaatcagcatgtaatgaagctgagagagcgttgtctgtgcactcataacagagagaaacgttggatgccactcgtcacagcaaaaccgacttctctgagaatagggcacatgaagcatatgaagaacagaggtccttagccatccttgttccacaggattcactgaaaggtgatagaaataattttcgtagcatatccgtcatctcaaattagcttttgatcacaagggcagtttctgacgctactctacatgcaaatcatatgtctagtaatccagaagttcatccttagcattgactggacagagcctatgtcaactgaaggttgtgcccttaaaattgactggacagagagcctatgtcaactgaaaaaggttgtgcaaatagactcggatgcctgcacggacaacgctctgtttgtggagaagtctgaatatttcttttatcaatcactatttctcttccatttaaattcacaattaacaggatggttcttatcatgactgtacctctgtttgtgggagtggaagtgttggcttatctacctattactcaaagaaacaccactgtctcacctgacacctccggtgattgctgcaaacagaatgctttgttggttgttgaatgaagcaaattaatgtggacagtggtactgcaaatcaggtggttcctctataggatacaccatgtgtggagtctgcaacaaggttctagtctcaacttgcacatatggtggctcttgcgagttgtgacatgatcgtctgacatcaaagcgtgaaagacgttaataaatctgttcaggagaagcagtcatctagcgtggcaagcttggaattgacaatgagtgaggtggacactggtagatctagtagcagggtcaaaggatgatttcttttaccaagtatgcttgcattcgtgaggcaaatcaatgatacattatttagagcgtgattggttgcctgctcggcccagcctgagcgtatccagtcattcaggcccatggcggcatgctaaagaggtgcaataggctattgtttggttactttgtttcatctcatgatggcccattagagcttgcctttggttgcaaggctgtacagacacttgagcatggcaagcctcccaactagagaacagaagacaccagtcatgacaacgatgttctttctcctcactaagtatgcaccttttcctcttgttgcctgccgcagacccactagtagcacctgcagctgcctcctagctcttcggagcctccccaaacagccttgaaacatcatcaaccttcatggcatctgtttgtagtgagctctcagcaaagtaagatgtggtacccattgcaaacttgccagttgcaagaccattgccaaagatcacttccatctgcttgtaattttctatttggcatgtttaagtactcagcattcttagcccttcagggtgtgcctatattgcaagctcacaaatgttagtgtaaggctggaattaggttagtgggcacttaggaaaggttacaaaatcacagatacaattaacatacatcttgatatggccacctatagtgcacttcatctagactgatcatgtgtcattcatcatcatcatcacaaaggggctatttgtttcggtttttcgctagattttagccgtcatagtcgacttctagataccagacacagaaaaccgaacgcttcgcatctcagtgcgcttcaatgaaaatcatttttttttgtaaaaatcgc

SEQ ID NO: 199392 - DNA, 708 bp, Zea Mays
ttgtttcaccgtcaagcaccaatttttgggtaggtgaacgttcctaagaccaagaagacctactgcaagaacaaggagtgcaagaagcacactctccacaaggttactcagtacaagaagggtaaggatagcctgtctgcccagggaaagcgccgttatgaccgcaagcagtcaggatatggtggccagaccaagcctgtcttccacaagaaggccaagaccaccaagaaaatcgtattgaagctgcagtgccagagctgcaagcactactcacagcacgcaattaagaggtgcaagcattttgagattggtggagacaagaagggcaagggaacatctctcttctaagtttctcatcgcccatctcgatgttggatcgaacctgtgggtctactactgttctaaaaactcgtcaaatttcaatgttactagtagttctgaaagcaggtcatgctgtgtatcaaattccaatgcctgacatttgcgctgagtgtgggttgtcttttggctaaatgaagttttgcaccctgaatcttcattgaatgtgttgtgtgtttgtttgattttgttctgcgattgccttagtctaaagcttgatcacaccgaggatggtttatgtaatgtaactggctgaatggaatcccacagttcgctcactgaattgttggagatgatattgcatatgaaataaatccatcgattttgtaa

SEQ ID NO: 199393 - DNA, 1669 bp, Zea Mays
ctcttctttccctctgtataccgcgagcgcccgcagctagctgctagccgcgcgcccgccgctacctgcccgcctccagcgcgcccgccgcgcgtgccccgccgccacccctcgcggtgatctgtgtgggcgacgtccacagctacatcacgaagctggagagcctctggtccaacctctaggccgcactccccgccgacgccttggccaccgcgctggtcatcttcctcggcgactacaacgaccgcggcccgcacacccgcagggtcctcaacttcctcctcgcgctcccgacgcgctacccagcgcagcgccatgtcttcctctgcggcaaccacgacctcgccttcacggcgttcgttggggcgccgccgccgccgcccaacggctccccgttcttcggccacctgcgcagcgccatctctctttcctccctatctcgctgctccctcccctgccgccctgcttatttacgcccatttcttaagagaggatttgatggcctgtcagaataaaagagctcgaggaaattgcggcggccggaaatcctggtgatggtgccacacaaacacgagaatctgcttcgtcctcggcggaattgccgtcggggtcgggcgattcttcggaggacaagtgcctctgtttcgttgagctggctaggtccatggggattagtcaggacactcatgagtcgatggcaacagatgcagccaattacctttgccaccagcttcagcatcttcttgggcctatctcttctgcgacgagccaaagtggcccctgggaggagaggtcggtgatggttaggttgactcagaagctgcagaaatctaagagaaataagtggtggcggcagaggagaaggaagcatgttgcagagctttttcagaaggagcgtgcggattatgatagagttgaccaggaagctgatgaatggagggctaagcaaatagccaaggacattgcaaagcggagggtggaaagcatgcagcagattgctagaaagaaaacaaatgaggaaagaaagcgcctagaatctgagcaaagcgccgcctgcctgcaagaaaatttccggcgctctgtgcgagttctgcagttccggcgttgctcttctttcccgcgccacctgcctgcaagaaagcgccgggggcgtgccgtcttttccccctccacgcttcagcagcagcgcagtaaatttcgtcggcgtgttgggcagcagcagcagttggcagccaacgtcccgctcccccgcccgctattactttcccagctccgcgacaagctaggcgcgcgtcgtcgtggttgacttggatttggagaattatgagtgtttcatagatgttactctgacgagggataacaatattaccactagaaatatatactagtctgtcattgagaaggagagaaggggtgattatattggaaagactttataggagctgcaccatccgaaatgcgacgtctgccttcagtttgtaaggcttcctctgaaatctgaacgacctgcagactgacaaaactacatatgcgttaacttttctgtacttcgtcattgcaagaagctcattcttttcctttgtctgtttctgcagattccaacgaacaggagtggcctgatagagtacagatcccacccgttctagggccagaagtattgcccttcgca

SEQ ID NO: 199394 - DNA, 1085 bp, Zea Mays
ttgcaggggaagggtacgagcagcttcggcaagcgccggaacaagacgcacacgctctgcatccgctgcagccgccacagcttccacctccagaagagcacctgctcctcctgcgattacactgccgcccgcatccgcaagtaaggacaagcctccacatcgatagaagcaaatcaatccatttcgtttgacaagtagaagattatatatgttcaaccaaatggacataattagtgctgttttgcaaaagcattttggattttccagtctcaaagcattccaaaaggaagtcttggatgcttggtttggtcatgaggattgtgttctcctagcagccataggatcaggatcacatgaaaattattgaagacgacggtccaggtgcagccttctatgccagtgctaaggccatgactaatggaaatcacactttctatgtgagcaaactgatacagaggttggctagattaagtaaatatgatacaatgtatcacatgcacagggacctctcaagcaacaacctcaatggataaggcatattaaatacatcatgggagaaaatcttactgtcagggttcagaggatgttgtacggaatgaagttggttgatttgacgaagaagaaaacatttttagtcttgtggctgtgcgtctagctgttgatgcagctgatgagaagtcggctatagccgagagaattttagtcatcctgcagaaatatgtcttcccatatgacttatttcgttgttggatttatcatcaagtggagagtggcaatacttagtctggccactacttgtgcttgccaactttgcttagcaacttttaatgaagggctttgctggtgttgcgacaaagatacatgccaagagcagtatggttgcaggtgaagcagtgagtaacatctgcgttatagtggcattcaacgttcaaagcaagaaatgtatttggtttaattattgcaagcagtgatctgaaatatgtaaattatctttatatggtctttgcaagggaacacattttctggctctataccatcagtgattagccctgtacaaattttattgaaagaaaaactaaaggaat

SEQ ID NO: 199395 - DNA, 1035 bp, Zea Mays
aggggaagggtacgagcagcttcggcaagcgccggaacaagacgcacacgctctgcatccgctgcagccgccacagcttccacctccagaagagcacctgctcctcctgcgattacactgccgcccgcatccgcaagtaaggacaagcctccacatcgatagaagcaaatcaatccatttcgtttgacaagtctcaaagcattccaaaaggaagtcttggatgcttggtttggtcatgaggattgtgttctcctagcagccataggatcaggatcacatgaaaattattgaagacgacggtccaggtgcagccttctatgccagtgctaaggccatgactaatggaaatcacactttctatgtgagcaaactgatacagaggttggctagattaagtaaatatgatacaatgtatcacatgcacagggacctctcaagcaacaacctcaatggataaggcatattaaatagtaatgctccttccatttcataatgtcatcatgggagaaaatcttactgtcagggttcagaggatgttgtacggaatgaagttggttgatttgacgaagaagaaaacatttttagtcttgtggctgtgcgtctagctgttgatgcagctgatgagaagtcggctatagccgagagaattttagtcatcctgcagaaatatgtcttcccatatgacttatttcgttgttggatttatcatcaagtggagagtggcaatacttagtctggccactacttgtgcttgccaactttgcttagcaacttttaatgaagggctttgctggtgttgcgacaaagatacatgccaagagcagtatggttgcaggtgaagcagtgagtaacatctgcgttatagtggcattcaacgttcaaagcaagaaatgtatttggtttaattattgcaagcagtgatctgaaatatgtaaattatctttatatggtctttgcaagggaacacattttctggctctataccatcagtgattagccctgtacaaattttattgaaagaaaaactaaaggaat

SEQ ID NO: 199396 - DNA, 3287 bp, Zea Mays
tagttttctttcttgttggacattcgggcggccaaagcagcggcccccttatctccagggaccaggggaggtcgcacaccaacgcaccgtccttccctttcctcctcctcctccctctcctcggaaggtcaagtgacggtatttgtgaccatggcagggaccttactccagtcagttgccctgggaacaccatttgggggtcgcatgagaacccattgttggaggtcccatggcaccaggaggcctgcctctatgttggcagtgtcacttagccgccctgtcaagatgtcagcatttgtgggtctaagatcagtgcatagcttctcggtcacaccgacggtgtccaattccaggtcggcagttgcatcttacaggtcatcgcgacagacaagacgatctcgttttgtcactcaggcaatgtttgagaggttcacggagaaagctattaaggtcatcatgcttgcgcaagaggaagcaaggcgcctgggccacaactttgttggaactgagcagatcctcttgggtctgattggagagggcactggtattgcagctaaggtgctcaagtccatgggaataaatcttaaggatgcacgtgtggaggtggagaagattattggccgcggcaatggttttgttgctgttgaaataccattcacaccacgtgcgaaacgtgttttggagctctccttggaggaagctcgccaattaggtagtttgattatcaaggacataattatattggatctgagcacctgctccttggactgcttcgtgagggtgaaggtgtggcggctcgtgtgcttgagagtctcggagctgaccccagcaatatccgtacacaagttattcgaatgattggtgagaccacagaagctgttggtgctggagttggcggcggcagcagtggtaataagatgccaactcttgaggagtatggaactaatttaacaaaattagcagaggagggaaaattagatcctgttgttggaaggcagccacaaattgagcgtgtggtacaaattttaggcagacgaaccaagaacaatccctgcttgattggagagcctggtgttggaaaaactgcaattgctgaaggacttgctcagcgcatttctacaggcgatgtacctgaaacaatagaagggaaaaaggtcataacccttgacatgggacttcttgttgctggcacaaagtaccgtggagaattcgaagaaagattaaagaagctgatggaggaaataaagcaaagtgatgagataatactctttattgatgaagttcacactctgataggagcaggagcagcggaaggtgctatagatgctgctaatatcttgaagcctgcgttggccagaggtgaattacagtgcattggagccactacactagatgaatataggaagcacattgagaaagacccagcacttgaacggaggtttcaacctgtgaaagtgccagaaccaacagtagatgaaaccattgaaatcctcagaggactgagggaacgatatgagatccaccataaacttcgttacactgatgaagctctgattgcagctgcaaagctgtcatatcaatatatcagtgatcggtttctcccagataaggcaattgacttgattgatgaagcaggttcccgtgttaggctacagcatgcacaggtccccgaggaagcaagagagcttgacaaggagctcaaacaagtcacgaaacagaagaatgaagctgttcgaagccaggattttgagaaggctggggaattgagagaccgtgaaatggaattgaaggcccagataacagccctcattgacaagagcaaggaattgagcaaagcagaggaagagtctggagagacaggacctatggtcaatgaagaagatatccagcacatagtatcttcatggactggcatccctgtggagaaggtttccagcgatgaatctgataagcttcttaagatggaagagactttgcacaagcgtgtcattggccaagatgaggctgtggtagcaattagtcgctccatccgccgtgctcgtgtgggtctcaagaaccccaacaggccaattgcaagctttatttttgctggtcccaccggcgttgggaagtctgagcttgcaaaggctcttgcagcctattactttggctctgaggaggctatgatccggcttgatatgagtgaattcatggagagacacacggtatccaagctgattggttcacctccaggatatgtaggatacactgagggtggccagctgacagaggcagttcgacggcggccatacacagttgtgctctttgatgagattgagaaggcacaccctgatgtcttcaacatgatgcttcagattttggaagatgggagattgactgacagcaagggaaggacggtggacttcaagaacacactcctgatcatgacctcaaatgtagggagcagtgtcatcgagaagggtggaaggaagatcggatttgaccttgactctgatgagaaggacagtagctacagcaggatcaagagcctggtcatcgaggagatgaagcagtatttccgacctgagttcctcaaccgtctcgatgagatgatcgtgttcaggcagcttaccaagctcgaggtcaaggagatagcggacatcatgctccaggaggtctttgacaggctgaaggccaaggacatcaatcttcaagtgaccgagaagttcaaggagcgggtggtggacgaaggctacaaccctagctatggtgcacgcccgctgaggcgagccatcatgaggctgctggaggacagccttgctgagaagatgctcgcaggggaggtaaaggagggcgactctgccatagtagatgtggactcggaggggaaggttgttgtgctcaatggtcagggcggcataccggagctctcaactccggcgatcaccgtttagctcgtacataacaaatgacaaaattaatagcatagtttttgttcaaacacattatcatttatggttagaatatctgtgtatatgtagtggtatagtcaatggggaaatcgttcctgcctctaaattcctttttttcaagttaaggtgtttcttttgtcgcaagttaatctgcctggttattaagatattgtttacagagtgatgtgaaaagctcttgtctgtgttcaaggatacatatacagacgggtcaagtagcatgtaggcaatagttccaatataggcctcagcgttgtctttaaccgagcatccgaaaacacttgcacctaaataccgtcgcctgaaaatacaaaaaaa

SEQ ID NO: 199397 - DNA, 1888 bp, Zea Mays
gaatgcatgcatttttagttacgctgcaacattcacggtcttgaggtggcgatcaagtgcaagaacagcaaaggcgagtacgagagcaaggccatgggcaagcttgatggcttcggcgccttcagcatcccacttagcacggacctccacggcgctgactgcgttgcacagctccacagcgctgcggggaacccgtgccccggtcaagaaccttccagaattgtgccacaatcgtcaaagggcaacttcgtcgtggtccctggaaagacagactacccatcgaaggaatgtgcgtccgcaaccctgtgtgggtcgatcaagaagcacctactagaccatttccacaagaaacctgtgccaccaaagccaaagccagaacctaagccagagctggagccgaagccagaacctaagccagagccagagaaccacccacctacaccaacatacggatcctcaactccgatctaccatcctccatccaggcagttgtttgacaagaaacacatgtttgataacttccacaagcaccacgactaccatcacttctttgaccacttccacaagaaaccagttccaccaaagccaaaaccagaacctaagccagaaccaaaacccaagccccagccagagtaccactctccaactccaacatatgggtcgcccacaccgatctaccaccctccggctaggcatttgtttgataagaagcccttgctagatcacttccataaggaccatgactatcaccacttcttagaccacttccacaagaaacccgtgccacaaaagccaaagctagaacccaagccacagcctaagcccgagtaccaccctccgacacccacatatgtttctccaactcccatctatcacccgcccgctgagacagaaatgaagtatgacaagaagcactttgatcactttcacaaggatcatgactaccaccacttctttgaccacttccacaagaagcctgtgccacccaagccaaaaccggagccagagccaaagccaaagccacaacctaagccagagtacaagccccccatgcccacatacgggtctccaactcctatctaccatcctccagccaagaaagaagtggcatttgacaagaagcacttccttgatcacttccacaaagaccatgactaccaccacttctttgaccacttccacaagaagcctgtgccaccaaagcctaagccggagcccaagccagagcccaaaccacaacctgagcctgagtaccacccacctacaccgacctatggatcaccgactcccatctaccaccctccggccaagcattgatcgatggagttgaatggtggtcagtgatcgacgtcgctagctaagagttgcatgtgtggtctagctagcgtggtttgcagtcctgcttttttgtttctacagaataaattatagctttatttgggtatgtatacttatttgtgtatcggttagtatcatataaatgtatgatttgagtgtgcgttgtttttaatatgcatgttctatgatgtactttattccttttaaaatattattatttatatgtagaagttaaaaggtttacagtagtgtgatttgcttcttttccatgcccgaaggtctggatgtgtggacgatcaatgtgctgaagtgaatagtgtaatgtatgcccgtctcgatattagtcatatgaaaatattctggatacaaggttgtcctatatattgttttatctacgaagaaaaccatctctagggttagtttggaaattaaactcaaatttagtataacacgacctcattttttttattgtactactaattattagattatgatgaatgaaatgatgatcaactcattctataatctattccacaaaccaaataaaaaa

SEQ ID NO: 199398 - DNA, 1790 bp, Zea Mays
gtcattggccgaaccataataaaaattcgcacggtgcaggcgctagaaaccctaaacttcggcatcgaagatggcggcggcgtgcatgcgttgtcctaaagggagcaggacatccagatgatcctcgccaccgacgtgcacctcggtaccaagaattgggacttctagatggtagtagcccaaatctttcgagactaaccaaatgcttacctcaaatgtttattatatttgatatctagttctagatctgttcgtattgacctctttctggatcttgctatgtgcatgcatatattgtgatgcaatgtatagtcaactgagagaaatattggcgcgtagtatcagtcgaggaatattgaatcataggtatgtaactctagttgttaattttgccgttgacagcagcgtcgggtagtcttgaggatttgtctagcacaaagagttggaaggtttccggagtgagtgtgatacacatgtgtaccgtgtacgttctagctcagtagttgtgacatcacaaatggtattcgtctcaatgtaataccataaatatgcgttgtggaattggtttacactagaatttgtcaaaaataaaggataaatcaacttataccaagcatctaatgtttgtgttgatgtgtttgttcactggaatcagtgggaagaatggcccgtagctcagtgctaattctcattaattatgcttataatttcactttgtcacttgaccatggtgcactgcaaaataacaatagcacttttgtatatattattgttattatccttaaggtatctacattattaaccttggcaagacctgtgagaagcttcagttggcattgagaatccatagggcatcattgtgcagtctgctaggccctatgtccagagggctgtcctcaagtttgcgtagtacactggtgctcatgccattgccggcaggcacactcctggtacattcaccaaccagttgcaaacctccttcagcgagccacgccttcttatcctcactgatccaggactggtcaccagtccattaaaggcttgtttgatatcaagtatcatcaaaatccatatggactacggaggctgcgctcggaaacattttcaccactgtgttggtttcaattcatagtcgatcttttttcttctacaggacatagaggaagcaaaggagaaggaggaagaagaggctctggttgctccgggctatggcgcagttgcagaatatactgcccctagagctgacaactggggtgacgagtggggagctggtgagggtgaggccgtgaggctgcagctccacctgctggcgtcccggctgctggtgcagactgggttgctgctccagctcctcccgctgatgcgtgatgatgtgtgggatgcagctgcgcctcctccagcagcagcagccgcctagagatgggaacatgtcgctgcccttgtcacggcatctactctagatctcatctggatactctaatattcaccccaattcacatgtattgagatggattcaggtcacaatccatctcaacacatatagattagaataaataatagagtaagcaaacaagccctaaaccctaactgggagtgaagagtaagtgagcatgattgttggcttacactagtcttcaacagaacttgttagtagacactgctggagtatatttgaatttttagtgtggtagatgagtatcagttttgtgttattggctctgctttgcttagagagcgagtggatcgcgctccatttttgttatctcaaatggatagatctttgttttaac

SEQ ID NO: 199399 - DNA, 1198 bp, Zea Mays
aaatcaacctgggcatattcctctctctttcctcatcctcatccgagtggctctctccgtgtgctgtggcggcgcctggctctgctcggacggactccaccgaaggcgctcggctcccctcgggctccacctgcgacggccggccctctgcctgcaccgacggtgcccggccccctcggcatccaccagcggtgctcggctccaaggagcactgctgtgaggaaggccatccattttgtcaacctgtggacagctggaaggtctagtggaaacctggctatgaactccgtaccaaaacccgcccctgggtccgaaacatctgggagggaggattttgctgtgggggataaggatgctgtggtcattgttgatcatgggtcaagacgccaagaatccaatctcatgctaaatgactttgttgagatgttccgggcgaagactagctataggattgttgagcctgctcatatggagctagcggagcctactataaaggatgcttttggaaaatgtgtgcaacaaggagcatcccgagttattatcagtccatatttcctttcccctggacgacactggaagcaagacattcctgctttagcagcagtggcatcaaaggagcactcaaatataccctatattgtcactgcccctcttgggctgcatgagcttatggtggtatgtgcttgatatcatgaatgatcgcatcaagtactgcctgcgacatgttgcgggtgatgtcgatgagtgtacagtgtgtgccggaactggaaagtgccgcatgtactcctgatggagcatacctgggaattgtttctggagaatacgagatctgacgagtgtatatctaggtccgctgtgtaccgtgaaaccaaaagcttgtacagttcattctgaacagatcgtcagaattagacaagtgccaaattagttatgctgtgcatgcttgcgaacatcaataacgattcattagctaatcttgagtttatttacgtcacgaacaaactcagtcaagtgctctgatatttccattcacatgttatctatattcctgctaccttgtagttgaattagacttattgccttaacatggatcaaatgagaatataatgtacccttgtttgatttgccagttctttttgtcatatatctgttagggacttgttctcaaatgctatgaattaaaaacaagacaacacaa

SEQ ID NO: 199400 - DNA, 1576 bp, Zea Mays
aaagcctgcgaccgaggggtataacctcgccggagaggacggatcacaaccacaaactttttttttcgaaaacgcgcaggagagctgcgcccctttatatatttagaagataggaaaaaaggtctaaagtagaccaaacatcagcaggcctcctcacgggggccagaaaatagcatacaaaaaagaactcatcatgtgaaaggaacaaacaacacaccaccctagggagcagctgcagaagcaaccagagaacataggcccttcgccccagctgcctcccaacgacttctctcctcgtcagcccaagcaaggatataggtgaggcaaggagacaatccatcgaagtcacatttgttccgatgaatccaaatagtccaagcacccaggataataagggagttaaggccttttctggtgacacctgagaccacctctgaaacctcctcccaccaattcaagaaggaggtgaccgccgactggggggctagggagtgaagcccaaatttccggaaaagctggtaccaaaagactctcgagaaggagcaagccaccagaagatgatcaagagtttcttcagcttggtcacatagcagacatttctcatggtggtttaggcctttcttagctaatcgatctgctgtccagcatctattatgggcagcaagccaaatgaaaaaacgacactttggcggggcccaggttttccaaactcttgtgaagtgtccaaaggaaactgaacccatgaacagtccattataagcagattttgcagaatacattccatctggggcaatactgaaaatatgtcttcaactctaggctgcagctcaatggctgagagcatctcccacagctgaaggagctagcggagcctactataaaggatgcttttggaaaatgtgtgcaacaaggagcatcccgagttattatcagtccatatttcctttcccctggacgacactggaagcaagacattcctgctttagcagcagtggcatcaaaggagcactcaaatataccctatattgtcactgcccctcttgggctgcatgagcttatggtggatatcatgaatgatcgcatcaagtactgcctgcgacatgttgcgggtgatgtcgatgagtgtacagtgtgtgccggaactggaaagtgccgcatgtactcctgatggagcatacctgggaattgtttctggagaatacgagatctgacgagtgtatatctaggtccgctgtgtaccgtgaaaccaaaagcttgtacagttcattctgaacagatcgtcagaattagacaagtgccaaattagttatgctgtgcatgcttgcgaacatcaataacgattcattagctaatcttgagtttatttacgtcacgaacaaactcagtcaagtgctctgatatttccattcacatgttatctatattcctgctaccttgtagttgaattagacttattgccttaacatggatcaaatgagaatataatgtacccttgtttgatttgccagttctttttgtcatatatctgttagggacttgttctcaaatgctatgaattaaaaacaagacaacacaa

SEQ ID NO: 199401 - DNA, 2303 bp, Zea Mays
aacacacgcccctcggataccgccacgtcagcgatccgcgcctctcgatccgagcactcgcattggccgcgcgcgagacccactagccaacctccctgcgcctggtccagggcgcgccccgtgaaccgctcccctcttcccccaatggcgaggaaaacacccaccccgtataagatcactctgtatttcaaatcccctcgcatccaaacacttccgtggaaaaaaaacaattaataatttattactggcagaagggggaagaagagatggtggacgaggcatgggagcgggcggtggaggcggcgctgcacgccggcggcgaggggagctcgtcgccggcgcggagcctgacgcttgacggcgccgtcaagtgcacgcacgggcggctgccggcggcagagatactggagcggcaccagagcctggagcacctttcgatcgctggcgtcggggtcacgtcgctcgagggtttcccgcggctgcggaacctcacgcggctcaccctctccgacaaccgcatcgccggcggtctcgaccacctcgtcgccgctggcctgtcctcgctgcgggacctcgacctcagcaacaaccgcatccaggacgttgacgacctcgcgccactcgccgacctgcgcctcgtctcgctcgacctctacgagtgccccgttacccgtgtcaaggactacagatccagggtcttcgagatgatccggacgctcaaatacctggacaagatggatgccgacgagaacgagcgccccgagtccgatgacgacgatgacgacggcgagggcgatggcgagggcgatggcgacgatgatgacgaagatgaagaagacgaggaagaccctgggagcggcgaggtagcgaacggcggcgtcgcccatgcgcgcgcgggcgtgccctcgcacccggtggaggtgaatggggtgatcgatgtggacgaggaggagagcgacgctgacgaggtcatcccgaacggtggtgtcgagcacagccatggcgcaaacgggtttcgtgtcgcggctgctggcgaagcccgtggcgaggaggatgaggacgtggaggaagatgacgacgacgacgatgactttgaggaggaggatttgggggaggagattgatgaggatgttgatgacgaggatgctgttgtggaggtgcatgatgtaccaagtagtgacgaggaggaagatggcgtggaggaggatgaggaagaagaggatgaggacgaagatgatgaagaagaggaggaggttgaggatgaaggtgaagaggcggagccacagagcagtggtagggttgccatgatgacaggcgaggatgaaggagaagagatagatgggcatgaacatggagaaggggacgatgaggatgaaaatggtgagattggtgaagaggatgaggagggattggaggtggggaatgatgacgacgaagacgacgcagatgcggatgatgaggatgaagatactgaatatcttgtgcaaccaatcgctcagcctcaagccatggctattggaagtgaattagatggagttgaccctgatgatgctgacgaggacaaggaagaagtcgacaacgatgatgatggggccacagatcagccttcatcctcgcatggagccaagcggaagagagatgatgatgatctgtcaggcagtggtgatgacagtgaggatgacggtgttgaggacttgaggcccttcaagcacaagtgatggagcagccaatgtacatggatccctccctcccccttcttcagctagaagtaagcagcaagatcagcagcagcaggaggaggcagcaggaacagaaatatggatttggaattacgcgaagttacggcgcggttgttgctcccaccggaatccctgcctgcgcgagcgggacggaaataaatggcgtggacccggttcacggggcaatcgcgccgggcctccatgtgggcgtggttctccgcctgcgacctgcctatcctccagcagctgtgagcgtatggtccgagtctatgtcgacggtcgtatgaaatggtgacaactcgcgacggaagtattacggcggcggcaggcaccacagctcatcacgctatacccgtgatgggagcagaacaacgcggaatacgacgtgggcgaagaagggtcggtacggagcaactagcaagacgtgtaccgcccatgcctcattttcttttctcccttcacatctcgccttcgttaggccgcctgttgtggggaatgtaaataaatgtacgtattttgagaaaggttaaataaaatacttcaattacaagcgaagccttgtac

SEQ ID NO: 199402 - DNA, 324 bp, Zea Mays
tctccctccccccacgatctgctccccccatctcaacaatccccgccccatcgccgtgcgtctcggctgtcatcttccctaccggaagcagcgactagggtcaagatggtgtggtggctcacctaccagaagcggcacagctacgccaccaaatcgaaccagacccgcgtcgtcaagacacctggtgggaaacttgtgtaccagtacaccaagaagcgcgcgagcggaccgaagtgcccagtcaccgggaagaagatccaaggatggctatgatgcatgattatcatcccagttcataacacgaacaggtaaaatgcaccaagt

SEQ ID NO: 199403 - DNA, 96 bp, Zea Mays
accaaatcgaaccagacccgcgtcgtcaagacacctgtacaccaagaagcgcgcgagcggaccgaagtgcccagtcaccgggaagaagatccaagg

SEQ ID NO: 199404 - DNA, 2204 bp, Zea Mays
cgcatggagccgggatggacatactgcggtaggcgacttttgagaagtgttgacgaagccagcgttgatgaacttatcctgcgaaccgaggatggagaaatccaagatgcatcactagcacgggtcctgattgtattgcctacggattcaatgttaaaacagatgagtatcttccgatcacgacatgaacgacttcgagctagcttgccttagtttacaaacaaaagacagtcccgccaagcattgtcgaatcgaagccacgagcacaaaatatacacgcatcatctgatcatctccctcagaatcagagccgattcgtcagcacgaggttcatcagcggaaaaataatcatcatctccgcaattctgcttaaagtcgactgactgaagattgcagaggatgcgagtagagtagtgcaccatttttattttgtcatcttcagacttcagtaacataacagaagcgtcagaggactgaggtctgagcctctgaggagggggagggagagggacagagctacagaggatgctacgcctgcggttccggccagctcccctgtcactgaagctggccttcaccgtctccctcgccgtctccttctccgtctcctgctgcgcctcctcctcatactcgtcccgcacatcatccagatcgccgcaggccgtagccgcggacctcctctccgtgctcgccggccctcgcgccgcggcgcgggtaccggcggcggaggcctcgcggctccgcgcctgcctccggttcctcgccccggccaaccccacggcccaaaaggtctcgtcttggagccgcggaggcccccggaagttcctcctcgatggttgcgatgcgggggcggctgaggcggacgagatggtgatgtggccgccggccccggtcttggacctggcgcggctggccgttgactccggaggcgatcccggtgccatccaccgcgcgctcgacccaacaatgctgccggtgccagatgttgagggttcccagaagaataaatgccatctcacaagaacaccgtatgggaggcgctttgccaatgaggagatcaattcatattttgcattcttgttcgaattgattgtggcacgggcaccttcggttggattaaatgtatcactgaatcgctatgatttgttccatgggcatcttttccttgcatcggagacaggacggcttggaattctgaggagttgcgtgtcatttcattaagaggaagaaccgagtacagctagaggaaagtatcctcaaataccatacaacactctgaaaatagaataaagtaaaaaataacaacagaacaacccagatacaagactagcataggaatagatgtgtctttgatggatgtaatcctagcttgatcacagcccttatggtggctagggaagaggcggtcctctagtccatgactggagccaaggccctgtctttcctccaggtcgaagagttgctggcttaaaactcaaagaagtgggtaatgagccgaagtgtatggaaatactgatttttttactcatgatgtttctattttttatgtaggttccatgctaaagaatacccagcatttaacaaggaattgtttccttataatttgggatattgccaggcaggatctaatgtaccatatgatgattcgatgaatttgcgcaatgtactttggttagcacctttgccatcaaaggagacaaaagcttggttagcaccaggagtactagttgtcttggacgcacatcctgatggaattatctatcaagagatgatacgtgactatgttcagattgttagaacagtatacgaagatgatcttggggagaacacagttgatgtcaattatctgaatgtggcaaatgcagctcccgtagatagaatttacatttgttgaagtcatatgtaccgctatttgttttcccatggtgtgatttgatttgatttctgagaaccggacgtcaatgcatcatcctcatgtccaccaaagcaattgttcccgttcccatgaccgctgctgtgtatttcacatgtttatttgtttaattaaaaatgctcaacgaagcaacgatttgttgttaagttttacagtgtgctgttttgtacattccgtacacttttatctttgattgtgttgagtttgagtgtacaggtagattgctcacctcttctcaatgattagatttgtgaagtttaggcttcctaag

SEQ ID NO: 199405 - DNA, 2094 bp, Zea Mays
caaatgcaaaccctggccgtcgtcttcctcataccagccgtgagtccctcgctgcgcacgcggtgctagtacacatgtgcacgacgttcgtccccgtacgtgtggactatgtggaagcgcagctgcgactgttgcgctgacacactgcggaggaggagacgatcgtgatcggctatttcctcttcatcgacgcgtgcatataaccaaacctagctgcgcttcctccagatctcggcgctctggccccatggccaccctcgttactagctccagtctctccgctcaccgcccttgcgccctctagctccggatcgcccgcgcacacgaggccatggagcccgcagccgaggacgttgcagccgccgcgccggactcgtgggaatcggccgacatcgacgggcccataagccggcttatcctctccgcgcgccgcgtgtcctcctcgccggacctcgctgacaacccggacccgccccagccgccgcctgcgctgcagccgcagggcccgccttcggttccctcggctgcgcgcgaggatttgatggctcaggtcgatcagttcctacgagaggctctagagaagccgagggagaggctttctgtgctaagaatggagcaagaaattttgaagttcattggtgaccctaggtttacagaatattccagttaacctaccacaagaagaaaacatctctgtggcgaaagtagctattaagcagaggcctcaaaagaatctccatggcatgaacagctcaagtgctcactcctttagagacaatcaccagaaaagcgttgaagaaagaaaagaggaatacaacaaagcacgagcgcgtatatttaacaacggcgtcagtaatgctactgatgggagatcagctgaggaagtgacttcactcactactcttcacaggtccacttccttggagttgaactcaaacaatagaatgggccaaggggctgaaattactcttgagaggaccttgactaccacttcagctagcagcatgtcaaatagaagcaagagtgataaggagcctgcagtcaatagaaacagacagaacaatagggttgcaattttcagagaccgtgagtcagagcgcagggatcctgattatgacagaagctatgacaggtatatgcaaagatttgatcctggatttggatttagtggagggtcatacacaattcgacctctgtatgcccctgctgttaactacaacactgaattccctcagcttggttcagcacaccaatcacctgttgctgtcgaacagcaacctcgtccaatagctcagcacatgcctgtgacatggtctgcggctcaagcaaccaatgcaattggctatgggccagatggtgtcatggggccttacagccctggccatattcgtgcacctgtgagatcatctgttttcatgcatgcttcacagcaatatgccataccttcacgccctggagttccatttgtacatccacaggaatccatgggaccatttgcacaagttgagatgctgaaggagcacatcttgccctatttgaatgggctctgttgtcgaaggactgatgacgatgatgaaaaattgggattcgcagtgagtgggcgatcagggaggagagcaaagattggggtggtccagtatgtgaacaggcgacagggatgtggccccattgtgcataggatggttgccgggttgaactgaggaggcatgaagaggacgttgtttcttgctttgcctagtgcgggcccggcaccattgttgatcaggtttagaagcagaggcatctctgttgacacaattgatggtcaggtttacaagcagactcatctggtagtcagtgttgtgttgtaaattaatgagtgttattgaattaccgaacctatttcttgtaccatgcatgacaagcaacgacactagttatgatcatgacgaatcatgtaacagacctgtttactgcagtgcagtgtttaatgttagaccgggttatttgcttgtgtttggtagttgtttaaggtttcactcttctttttttattaaggtattgctggaaactaatacttcctctataccaaaagattagttgttatagctcttg

SEQ ID NO: 199406 - DNA, 2394 bp, Zea Mays
tggatagattattatagttatgaacgggatacccgtgaaaaactcggcccttccgatggccggactgcatcaacacaccggtccaacggacgaccacatgaattggaccaaagaaagaaaaaaaaaagtggccgaaaaggagaccccgtgccgtgcgtggacatggcgcctggcggaaacacatgagccgcatggcagtcagcgccccgacttttccgccttccttgcaccaccccgtcatatctcggcaacaatttctcggcgccaaccggccgatccatcctcgtcgtaagtctgcgctttcatcccttattgttccaggaacaaacaaaatctacaggtttccaagacaccaggacggagacatcgaggaggcggcggagacgccgccgcgtccttccgcttctgagccgtataacaacaaacccctcggccccgtcccctctgtccatcgatcaccttgaccacgtgcctgtgccgcaggccgcagccaggcatctccggcgaatctggtttgaggcgcggagagaggatatttgcatgcgggactgatcaatcaaagcaatggcagtagcgcccatggactgcggtgctggttcgattagtctaggccacaaggttttatgccgtttcggagtacccaacagcagtagattgcgatgggtgggatatgacaggaaacaaaggacagatcagttgattgctagagccgtatccgtggatcggacacaactagacttctcgaatccggactggaagacgcagtttcaagaggatttcgataagcgcttcagcttgccacacttgacagatgtaattgatgtggaaccgaggccaactactttttctctcaagagcagagcccctcttgagaacgcgaatggtaccatgcaaggatcatggaacggctatgtcaatgatgatgacagagcacttttgaaggttattaagtttgcctcaccaacttctgctggagctgactgcattgaccctgattgtagctgggttgaacaatgggtgcaccgtgctggtccacgcaaacaaatatattttgagcctcaatatgtgaaggctgggattgtgtcgtgtggtgggctctgcccaggtctcaatgatgtcattcggcagattgtgcttacacttgaaaaatatggggtgaaaaacattgttgggatacagcatggattccgtggattttttgaggatcacttatcagaagtgccactttctaggcatgtagtccaaaatatcaatcttgctggtggtagcttcttaggagtctctcgcggtggtgcaaacatttcagacattgttgacagtattcaggctaggaggcttgatatgctatttgtgcttggtggaaatggaacacatgctggagctaatgctatacatgatgaggccgcaagagaaaactgcaagtatcgattgtatgtgtccccaaaactattgacaatgacatattactgatggacaagacctttggatttgatactgcagtggaagctgcacaaagagctatcaactctgcatacattgaggcacattctgcatttcatggcattggactggtcaagctgatgggaagaagcagcggcttcatcacaatgcatgcctccctgtcaagtggccaagtagatatctgtctgatacctgaggtaccattcactgttgatggaccgaatggagttcttcgacatctcgaacacctgatagagaccaagggatttgctctggtttgcgttgctgaaggagcaggacaggaatactttcaaaagtcaaatgcaactgatgcatcagggaacatggttcttagtgacattggtgtgcaccttcagcagaagatcaagtcccattttaaggacataggagtccattctgatgtcaagtatattgatccaacatacatgctccgcgctgtgcgagccaatgcatccgatgccatcctgtgcaccgtgcttggtcagaatgctgttcatggtgcctttgcgggttttagcggcatcacaaccggggtgtgcaacacacacaatgtgtacttgccgataccggaagtgatcaaatccacgaggtttattgatccaaacagtcggatgtggcaccggtgcctgacctcaaccgggcaaccagacttccattgatcaattattaaggaagcttgtagtagcatccgagtgtaaaggaaggttgtgtatagtatagcgaaagggacctaattgctttgtcaggccttgtctagcagcatatggttctgcaaaacattgttttgcattgtagataggctaagtttgaaataagaggtgagataggcaggatagccttagtatggcaaaatgatcatcttgaaggattcatgagtgaatgatagctaataaaatatttacgcttgatcaa

SEQ ID NO: 199407 - DNA, 2209 bp, Zea Mays
tggatagattattatagttatgaacgggatacccgtgaaaaactcggcccttccgatggccggactgcatcaacacaccggtccaacggacgaccacatgaattggaccaaagaaagaaaaaaaaaagtggccgaaaaggagaccccgtgccgtgcgtggacatggcgcctggcggaaacacatgagccgcatggcagtcagcgccccgacttttccgccttccttgcaccaccccgtcatatctcggcaacaatttctcggcgccaaccggccgatccatcctcgtcgtaagtctgcgctttcatcccttattgttccaggaacaaacaaaatctacaggtttccaagacaccaggacggagacatcgaggaggcggcggagacgccgccgcgtccttccgcttctgagccgtataacaacaaacccctcggccccgtcccctctgtccatcgatcaccttgaccacgtgcctgtgccgcaggccgcagccaggcatctccggcgaatctggtttgaggcgcggagagaggatatttgcatgcgggactgatcaatcaaagcaatggcagtagcgcccatggactgcggtgctggttcgattagtctaggccacaaggttttatgccgtttcggagtacccaacagcagtagattgcgatgggtgggatatgacaggaaacaaaggacagatcagttgattgctagagccgtatccgtggatcggacacaactagacttctcgaatccggactggaagacgcagtttcaagaggatttcgataagcgcttcagcttgccacacttgacagatgtaattgatgtggaaccgaggccaactactttttctctcaagagcagagcccctcttgagaacgcgaatggtaccatgcaaggatcatggaacggctatgtcaatgatgatgacagagcacttttgaagattgtgcttacacttgaaaaatatggggtgaaaaacattgttgggatacagcatggattccgtggattttttgaggatcacttatcagaagtgccactttctaggcatgtagtccaaaatatcaatcttgctggtggtagcttcttaggagtctctcgcggtggtgcaaacatttcagacattgttgacagtattcaggctaggaggcttgatatgctatttgtgcttggtggaaatggaacacatgctggagctaatgctatacatgatgagtgccgcaagagaaaactgcaagtatcgattgtatgtgtccccaaaactattgacaatgacatattactgatggacaagacctttggatttgatactgcagtggaagctgcacaaagagctatcaactctgcatacattgaggcacattctgcatttcatggcattggactggtcaagctgatgggaagaagcagcggcttcatcacaatgcatgcctccctgtcaagtggccaagtagatatctgtctgatacctgaggtaccattcactgttgatggaccgaatggagttcttcgacatctcgaacacctgatagagaccaagggatttgctctggtttgcgttgctgaaggagcaggacaggaatactttcaaaagtcaaatgcaactgatgcatcagggaacatggttcttagtgacattggtgtgcaccttcagcagaagatcaagtcccattttaaggacataggagtccattctgatgtcaagtatattgatccaacatacatgctccgcgctgtgcgagccaatgcatccgatgccatcctgtgcaccgtgcttggtcagaatgctgttcatggtgcctttgcgggttttagcggcatcacaaccggggtgtgcaacacacacaatgtgtacttgccgataccggaagtgatcaaatccacgaggtttattgatccaaacagtcggatgtggcaccggtgcctgacctcaaccgggcaaccagacttccattgatcaattattaaggaagcttgtagtagcatccgagtgtaaaggaaggttgtgtatagtatagcgaaagggacctaattgctttgtcaggccttgtctagcagcatatggttctgcaaaacattgttttgcattgtagataggctaagtttgaaataagaggtgagataggcaggatagccttagtatggcaaaatgatcatcttgaaggattcatgagtgaatgatagctaataaaatatttacgcttgatcaa

SEQ ID NO: 199408 - DNA, 2689 bp, Zea Mays
gttccatatttttttaacttcctttgcagtattggacactgctgctggagtttggtgtgataccaaatcagtagttacaactccaaggacaggaagatatagtgcagatgcagcaggtggtgatgcttctgtagagctcacacggcggtgcaggcatgcagcagccgctgttggtgatttgatatttgtttatggaggtttaaggggaggtgtgctgctagatgacctcctagttgctgaagatcttgctgctgctgaaacaaccagtgcagctaatcatgcagcagcagcagctgcatccacaaatggacaaagagaacctggtagatatgcctacaacgatgaacaatcaggacaaactgttacagtttcaagtcctgatggagctgttgttcttgggactcctgttgctcctccggtcaatggggacatgtatactgatattagtcctgagaatgccattatccagggacagagaaaaatgagcaaaggtgttgattatttggttgaagcatcagctgcagaggctgaggcaatcagtgctactttagctgctgtaaaggctaggcaagttaatggtgagatggagcattcacctgatagggaacagtctccagatgctgcaccaagtaccaagcaaaattcaagcctcataaaaccagatgttgctcttgtcaacaattcaacagcacctcctggtgttcggttgcaccatagagcagttgtggtggctgcagaaactggaggtgccttaggtggcatggttaggcagttgtccattgatcagtttgagaatgaaggtagaagggtcatttatggaacccctgagaatgcaactgcggcaaggaaattattagatcgacaaatgtctattaatagtgtgcccaaaaaggtaattgcttctcttctgaaacctcgtggctggaagccccctgttcgaaggcagttctttcttgactgcaatgagattgcagatctatgtgatagtgctgaaagaatattttcaagtgaacctagtgtcttacagctgaaagctcccattaagatatttggtgatctgcatggtcaatttggtgacctcatgcgcttatttgatgaatatggcgctccttcaacagctggagacattgcttacattgattatcttttcttgggagattatgtcgatcgtggtcagcatagtctggagacaatcagtcttctccttgcactgaaggttgaatatcctcacaatgtacatttaattcgagggaatcatgaagcagcggatatcaatgctctttttgggttccgaatagagtgcatagagagaatgggtgagcgggatggaatctggacctggcaccgtgtgaacaggttatttaattggcttcctttggctgcactaatagaaaagaagataatttgtatgcatggtggtattggtcggtccatcaaccatatagagcaaattgaaaatcttcaaagaccaattaccatggaagcaggctcagttgttctgatggatcttctgtggtctgatccaactgagaatgatagcgtagagggactcaggccgaatgcacggggccctggtcttgttacctttgggcctgatagagttatggagttctgcaacaacaatgacctgcagttgattgtgcgagcacatgagtgtgtgatggatggctttgagcgattcgcccaaggtcacttgatcactcttttctcggcaacgaattactgtggaacggcaaacaacgcaggtgcaattttagttctcggaagggatctggtggttgttccgaaactcatccatcctttgccgcctgctatcacgtcacctgagacctctccggagcatcatattgaggacacatggatgcaggagttgaatgcaaacagaccaccaacaccaaccaggggccgccctcaagcccccaacaatgaccgaggctcccttgcctggatataacaggctggccatattattaaacaattgatttcttgtctcctatcattggcttgaggctaaaattatccatccattctggacacatggaagcactctgctgaaagcacacactggcccaaaacaatgtcgaaagaaaactgttcagggagcgagactaagcggtgctctgaaggcgaaggccagagaagagtcactgtcgacagcgctccccaaatcctttccacaaacaagtagaagagcagaaccaagtgttggtaaaccacaggatcttgcctgggatcgcgcctgtacatactcagacgccagcagatagaggaggggttgtgtatgtgttctttttgtcttagcgtcgaaagggatagcagcgtccattgtactaggtattcatttgctgtagattttgatttgttgcctcatgttgcaaagtatggagtgggaaagttggtttcctcgtgtgacggacggtggtctgtcaggtcttgtataatagcgttgtcggctgtttatgtttgcagcgcgtcagctgttacttagcacaccttacacctccctcatgttgtaattcccatcaccggtgctgatgaatgtgcacaatatattgttgtctgttgtccaaagttttgggtcctggacgggttaggtgatttgatttggtttattggagaagcaatacgttgtttgattttgagctgtatgctgtgcacctttgggatttattttattttgcaaatttgt

SEQ ID NO: 199409 - DNA, 3656 bp, Zea Mays
ccttgtgctcagctcgcgaaaccctaggggcagcaggaggcgaagcttgcagggcggcgatggacgtggactcccgcatggcgacagagtccgactccgactccgacgctcgcggcggcgggtcggggtccgggagcgagacccccacggcgtccgcgtccgcgtccgcgtccccgtccacgtccgcgcccgcgcccgggacgcccacggccgcggccgcgtccccggggctggtggcggggcccaggccggcgccggggtacacggtggtggacgccgcgatggacaagaaggaggacgggccgggatgccggtgcgggcacacgctaacggcagtgccggcagtcggggaggagggctcgccggggtacgtgggcccgcgcctgatactctttggtggtgccaccgcgctcgagggcaactctgccacgccgccctcgccggctgggagcgccgggatccgccttgctggtgccaccgcagatgtccattgttatgatgtgttatcaaataagtggaccaggcttactccacttggtgaacctccttcaccaagagctgcacatgtagccactgctgttggtaccatggtggtcattcagggtggaattggccctgccggcttatctgctgaggaccttcatgttctggatcttacacaacaacgaccgcgatggcatagagtggtggttcaaggtcctggtcctggtccacggtatggacatgtgatggccttggttgggcagcgattcttattgacaattggtggcaatgatggaaaacggcccctggcagatgtatgggcccttgatactgcggctaagccatatgaatggagaaaacttgagccggaaggtgaaggaccaccaccatgcatgtatgcaactgctagtgcccgttctgatggtctccttttgctttgtggtggaagggatgccaatagtgtgcccctatcgagtgcatatgggcttgctaagcatagagatggtcgctgggagtgggcaatggcccctggtgtgtctccatcacccagatatcaacatgcagctgtttttgtcaatgcacggcttcatgtctcaggaggggctcttgggggtggtcgcatggtagaagattcctcaagcgttgcagtattggacactgctgctggagtttggtgtgataccaaatcagtagttacaactccaaggacaggaagatatagtgcagatgcagcaggtggtgatgcttctgtagagctcacacggcggtgcaggcatgcagcagccgctgttggtgatttgatatttgtttatggaggtttaaggggaggtgtgctgctagatgacctcctagttgctgaagatcttgctgctgctgaaacaaccagtgcagctaatcatgcagcagcagcagctgcatccacaaatggacaaagagaacctggtagatatgcctacaacgatgaacaatcaggacaaactgttacagtttcaagtcctgatggagctgttgttcttgggactcctgttgctcctccggtcaatggggacatgtatactgatattagtcctgagaatgccattatccagggacagagaaaaatgagcaaaggtgttgattatttggttgaagcatcagctgcagaggctgaggcaatcagtgctactttagctgctgtaaaggctaggcaagttaatggtgagatggagcattcacctgatagggaacagtctccagatgctgcaccaagtaccaagcaaaattcaagcctcataaaaccagatgttgctcttgtcaacaattcaacagcacctcctggtgttcggttgcaccatagagcagttgtggtggctgcagaaactggaggtgccttaggtggcatggttaggcagttgtccattgatcagtttgagaatgaaggtagaagggtcatttatggaacccctgagaatgcaactgcggcaaggaaattattagatcgacaaatgtctattaatagtgtgcccaaaaagctgaaagctcccattaagatatttggtgatctgcatggtcaatttggtgacctcatgcgcttatttgatgaatatggcgctccttcaacagctggagacattgcttacattgattatcttttcttgggagattatgtcgatcgtggtcagcatagtctggagacaatcagtcttctccttgcactgaaggttgaatatcctcacaatgtacatttaattcgagggaatcatgaagcagcggatatcaatgctctttttgggttccgaatagagtgcatagagagaatgggtgagcgggatggaatctggacctggcaccgtgtgaacaggttatttaattggcttcctttggctgcactaatagaaaagaagataatttgtatgcatggtggtattggtcggtccatcaaccatatagagcaaattgaaaatcttcaaagaccaattaccatggaagcaggctcagttgttctgatggatcttctgtggtctgatccaactgagaatgatagcgtagagggactcaggccgaatgcacggggccctggtcttgttacctttgggcctgatagagttatggagttctgcaacaacaatgacctgcagttgattgtgcgagcacatgagtgtgtgatggatggctttgagcgattcgcccaaggtcacttgatcactcttttctcggcaacgaattactgtggaacggcaaacaacgcaggtgcaattttagttctcggaagggatctggtggttgttccgaaactcatccatcctttgccgcctgctatcacgtcacctgagacctctccggagcatcatattgaggacacatggatgcaggagttgaatgcaaacagaccaccaacaccaaccaggggccgccctcaagcccccaacaatgaccgaggctcccttgcctggatataacaggctggccatattattaaacaattgatttcttgtctcctatcattggcttgaggctaaaattatccatccattctggacacatggaagcactctgctgaaagcacacactggcccaaaacaatgtcgaaagaaaactgttcagggagcgagactaagcggtgctctgaaggcgaaggccagagaagagtcactgtcgacagcgctccccaaatcctttccacaaacaagtagaagagcagaaccaagtgttggtaaaccacaggatcttgcctgggatcgcgcctgtacatactcagacgccagcagatagaggaggggttgtgtatgtgttctttttgtcttagcgtcgaaagggatagcagcgtccattgtactaggtattcatttgctgtagattttgatttgttgcctcatgttgcaaagtatggagtgggaaagttggtttcctcgtgtgacggacggtggtctgtcaggtcttgtataatagcgttgtcggctgtttatgtttgcagcgcgtcagctgttacttagcacaccttacacctccctcatgttgtaattcccatcaccggtgctgatgaatgtgcacaatatattgttgtctgttgtccaaagttttgggtcctggacgggttaggtgatttgatttggtttattggagaagcaatacgttgtttgattttgagctgtatgctgtgcacctttgggatttattttattttgcaaatttgt

SEQ ID NO: 199410 - DNA, 4293 bp, Zea Mays
ataaaatacgacaaaatctaagggtgaaaacgcgagtgccaggccagcacacacaaaaaaaaaagatcttatgaaaattcttgacgctatagacaccacgagtccacgacacggcgccctttccctgtccgtcctccgtcgtctccgccggctcttcttcactcctcttttccgctggagtccccgatctcccccgcatttcccactcccacttctagcctcccccacgcccccatcctcagttcctcaccaccacttgccccgccaattcccaaatctcccaggggcttctccgcttaccacccccgcccgctcgcgatcccatcgcctcgacccgacccgagacttgctcgtcgcggagcgccaccaccacgcctcgccgccggcggcgagtggacaagcctagggcttatctacgggtgatggcggccgcgccggccgccgcaagctcgaccgtctcctagggcggcggttacccgaggctgagctcgtgcgcgcgcgtggggggatccttgtgctcagctcgcgaaaccctaggggcagcaggaggcgaagcttgcagggcggcgatggacgtggactcccgcatggcgacagagtccgactccgactccgacgctcgcggcggcgggtcggggtccgggagcgagacccccacggcgtccgcgtccgcgtccgcgtccccgtccacgtccgcgcccgcgcccgggacgcccacggccgcggccgcgtccccggggctggtggcggggcccaggccggcgccggggtacacggtggtggacgccgcgatggacaagaaggaggacgggccgggatgccggtgcgggcacacgctaacggcagtgccggcagtcggggaggagggctcgccggggtacgtgggcccgcgcctgatactctttggtggtgccaccgcgctcgagggcaactctgccacgccgccctcgccggctgggagcgccgggatccgccttgctggtgccaccgcagatgtccattgttatgatgtgttatcaaataagtggaccaggcttactccacttggtgaacctccttcaccaagagctgcacatgtagccactgctgttggtaccatggtggtcattcagggtggaattggccctgccggcttatctgctgaggaccttcatgttctggatcttacacaacaacgaccgcgatggcatagagtggtggttcaaggtcctggtcctggtccacggtatggacatgtgatggccttggttgggcagcgattcttattgacaattggtggcaatgatggaaaacggcccctggcagatgtatgggcccttgatactgcggctaagccatatgaatggagaaaacttgagccggaaggtgaaggaccaccaccatgcatgtatgcaactgctagtgcccgttctgatggtctccttttgctttgtggtggaagggatgccaatagtgtgcccctatcgagtgcatatgggcttgctaagcatagagatggtcgctgggagtgggcaatggcccctggtgtgtctccatcacccagatatcaacatgcagctgtttttgtcaatgcacggcttcatgtctcaggaggggctcttgggggtggtcgcatggtagaagattcctcaagcgttgcagtattggacactgctgctggagtttggtgtgataccaaatcagtagttacaactccaaggacaggaagatatagtgcagatgcagcaggtggtgatgcttctgtagagctcacacggcggtgcaggcatgcagcagccgctgttggtgatttgatatttgtttatggaggtttaaggggaggtgtgctgctagatgacctcctagttgctgaagatcttgctgctgctgaaacaaccagtgcagctaatcatgcagcagcagcagctgcatccacaaatggacaaagagaacctggtagatatgcctacaacgatgaacaatcaggacaaactgttacagtttcaagtcctgatggagctgttgttcttgggactcctgttgctcctccggtcaatggggacatgtatactgatattagtcctgagaatgccattatccagggacagagaaaaatgagcaaaggtgttgattatttggttgaagcatcagctgcagaggctgaggcaatcagtgctactttagctgctgtaaaggctaggcaagttaatggtgagatggagcattcacctgatagggaacagtctccagatgctgcaccaagtaccaagcaaaattcaagcctcataaaaccagatgttgctcttgtcaacaattcaacagcacctcctggtgttcggttgcaccatagagcagttgtggtggctgcagaaactggaggtgccttaggtggcatggttaggcagttgtccattgatcagtttgagaatgaaggtagaagggtcatttatggaacccctgagaatgcaactgcggcaaggaaattattagatcgacaaatgtctattaatagtgtgcccaaaaaggtaattgcttctcttctgaaacctcgtggctggaagccccctgttcgaaggcagttctttcttgactgcaatgagattgcagatctatgtgatagtgctgaaagaatattttcaagtgaacctagtgtcttacagctgaaagctcccattaagatatttggtgatctgcatggtcaatttggtgacctcatgcgcttatttgatgaatatggcgctccttcaacagctggagacattgcttacattgattatcttttcttgggagattatgtcgatcgtggtcagcatagtctggagacaatcagtcttctccttgcactgaaggttgaatatcctcacaatgtacatttaattcgagggaatcatgaagcagcggatatcaatgctctttttgggttccgaatagagtgcatagagagaatgggtgagcgggatggaatctggacctggcaccgtgtgaacaggttatttaattggcttcctttggctgcactaatagaaaagaagataatttgtatgcatggtggtattggtcggtccatcaaccatatagagcaaattgaaaatcttcaaagaccaattaccatggaagcaggctcagttgttctgatggatcttctgtggtctgatccaactgagaatgatagcgtagagggactcaggccgaatgcacggggccctggtcttgttacctttgggagttatggagttctgcaacaacaatgacctgcagttgattgtgcgagcacatgagtgtgtgatggatggctttgagcgattcgcccaaggtcacttgatcactcttttctcggcaacgaattactgtggaacggcaaacaacgcaggtgcaattttagttctcggaagggatctggtggttgttccgaaactcatccatcctttgccgcctgctatcacgtcacctgagacctctccggagcatcatattgaggacacatggatgcaggagttgaatgcaaacagaccaccaacaccaaccaggggccgccctcaagcccccaacaatgaccgaggctcccttgcctggatataacaggctggccatattattaaacaattgatttcttgtctcctatcattggcttgaggctaaaattatccatccattctggacacatggaagcactctgctgaaagcacacactggcccaaaacaatgtcgaaagaaaactgttcagggagcgagactaagcggtgctctgaaggcgaaggccagagaagagtcactgtcgacagcgctccccaaatcctttccacaaacaagtagaagagcagaaccaagtgttggtaaaccacaggatcttgcctgggatcgcgcctgtacatactcagacgccagcagatagaggaggggttgtgtatgtgttctttttgtcttagcgtcgaaagggatagcagcgtccattgtactaggtattcatttgctgtagattttgatttgttgcctcatgttgcaaagtatggagtgggaaagttggtttcctcgtgtgacggacggtggtctgtcaggtcttgtataatagcgttgtcggctgtttatgtttgcagcgcgtcagctgttacttagcacaccttacacctccctcatgttgtaattcccatcaccggtgctgatgaatgtgcacaatatattgttgtctgttgtccaaagttttgggtcctggacgggttaggtgatttgatttggtttattggagaagcaatacgttgtttgattttgagctgtatgctgtgcacctttgggatttattttattttgcaaatttgt

SEQ ID NO: 199411 - DNA, 2951 bp, Zea Mays
cccaccgccccattccatccatgacggtcgcccctaacccacggtgtcgactgctccaccgtaagcgcctgtttcaccgccaccgccgacttcggttggtcctcacccgcgcgtggatggcgcacgcgcctctctcctccaagtgcgccgtcgacaccaagctcccctgcctcaccgcgcgatctccagccccgccgcgctcgcaagtcttgagatcgagcagatccaccatcctgcgccctcgccccatcacgcactcaccttggccccgcatccctgcgccgccataccctcggcctcgccctcgcctcatcctcccctgcccccgcaccgcatccaacgcgtagatccagcgtcgtcgccgcgatacctgcccatgccaccgcgtgcgcaccccccgtgccgtcggcaaaccctagcgtgatccccaccctgcccccgtcctcctcacatcatcggctcccccgtcatccatatcccagtggacatctctggcgacgagaggatgacgtcgtccggggtggtggccgcccggacaacccgttgctcgccaggccgagtctcctgagacccttgagcttgctcagtgacggagggatgcttccatggaaggaattgaaatacagatcaagaaactctaggctctagcactactccagctcttctggcatctgaccggagaatttgttctcggatagcgctagctgagcaaggctggtgaggctggagacgtcaggttggctacagtgtcggggatgaacccactcagcgcgttactactcagatcaagctccactagctgggcgaggtcgccgatggaggatgggattggccccgtcaaccggttcccctgcaacgccaacttcgtgaggttcttcatgttcccaatccctgttgggatggtgccgttgaggaggttggattcgaggcccaacgtcgtgagcccgatgaggtcgtcgctggccggtggaatagacccggagatgctgttttcccctatgttcagtgcttgaatctccctcgggaggcgggcaatggagcctggcaactagccaccgagcttgttgttgtcaagggcgaggacctgcaggctgccgcagttggtaagatggtccaggaactcccagccttactcgtcgctcgccgtcagctggttgcccgacatgtacaacgactgtgggcagagcatgccgatgactcactgctcctttgtatccttatgctattgttttcatccgacaacatcaactgcaataaacataagatggagagatttctgcaccatggcaggtatccacagagtctcgaatctgaaatcgatcgtgttgtatatgttccacgatcccaacgacgtaaaatggttcaagcctattgagcggtggacaaaacatggtcgtcgtggccgcatcatggagaccgttggtactcatggtgccatgaaatgtttattcaacagcagcatgatactgtgtgcatgagcttgtacaaacacgtgtacctaaaatggccttaacaactctaccacgtataaggttgcctgacgtttcgctagatctgtaccagcaggctatccaaacgacgagaatgaaataaccttggagctagcgtggtgtgtagcctatctaaatatttttaggattagaaaattgttttgtattggtccatcttatacttttctttaacattacaccctcattcttcttggtcttagacgactcttttcagtatcaaatccaaattcatgtttaattgcgtgttgagataatgccaacttattccatgttggcatatgtactacccagtacccacaatcatcggagggtcttataagaaacattagggggtaactctacctacatctatcttatacttgaacatcacacccccattctccttggatcaaatttaaaccaacaacaaattcacttgtatgtggaggcatctattttactacttacaggtatgcatcttgactagctcgctgagggggatggcctggtggatctgttgttggtttgcttgtaggtgattagctagattgtgctgttttaagtcccgacaattcagtttctgtacatgctcgacctttgttgaatctacccttacaggtatcctcggcgtctggtggagctgcgccgcctccacgccactgtcaagcgcttcctcggcgtctgcttcggccactagctgccaatcccatacccgtccagatataagcaagctataatgtgcttttgaaatacaagcgaatattgctatagcatgctgcttgagcttagcattcctctttctttcttttgcagcataagaaacactcttacgaagctcttaccaaatctaacggttacaagattcagttcatacttgggttttgctcattgtattgtcttcaagcagggtatgaggaatagtatagatggaacaatttcttctctgttagtggcacattgtcaatggtgtgtctgacaacattctcaaccacatcatcctagagaacaatgagaacaagcctgtcacaaacagtcgtgacactcaggagatatgccttgaacaaggccttcatatcctcaagatattcgaggattatcatgtcagcaaaacatccatcctgaacgaccttgcctcagcaatgggaaacactccaaacccatacgagcaagccatgtccacttgtgtgaatgaccaagcgatgatgctatcgcatatggtgtggcatgagtctacaatttcactgtagttatgaaaactgatcagtcaatgatgatgaatcatacgaaccttttttacttcagcacgttctttaataggggacgaatttgcatgaggtgttatgaactgcaggtggaggtgagcagtgggagcgtttgcgtattaaagtgcattgcactacaatacttgtttgtggatgttgagtgtttactttagcttaatcaatcttatagttttttaat

SEQ ID NO: 199412 - DNA, 3062 bp, Zea Mays
cccaccgccccattccatccatgacggtcgcccctaacccacggtgtcgactgctccaccgtaagcgcctgtttcaccgccaccgccgacttcggttggtcctcacccgcgcgtggatggcgcacgcgcctctctcctccaagtgcgccgtcgacaccaagctcccctgcctcaccgcgcgatctccagccccgccgcgctcgcaagtcttgagatcgagcagatccaccatcctgcgccctcgccccatcacgcactcatcctcccctgcccccgcaccgcatccaacgcgtagatccagcgtcgtcgccgcgatacctgcccatgccaccgcgtgcgcaccccccgtgccgtcggcaaaccctagcgtgatccccaccctgcccccgtcctcctcacatcatcggctcccccgtcatccatatcccagtggacatctctggcgacgagaggatgacgtcgtccggggtggtggccgcccggacaacccgttgctcgccaggccgagtctcctgagacccttgagcttgctcagtgacggagggatgcttccatggaaggaattgaaatacagatcaagaaactctaggctctagcactactccagctcttctggcatctgaccggagaatttgttctcggatagcgctagctgagcaaggctggtgaggctggagacgtcaggttggctacagtgtcggggatgaacccactcagcgcgttactactcagatcaagctccactagctgggcgaggtcgccgatggaggatgggattggccccgtcaaccggttcccctgcaacgccaacttcgtgaggttcttcatgttcccaatccctgttgggatggtgccgttgaggaggttggattcgaggcccaacgtcgtgagcccgatgaggtcgtcgctggccggtggaatagacccggagatgctgttttcccctatgttcagtgcttgaatctccctcgggaggcgggcaatggagcctggcaactagccaccgagcttgttgttgtcaagggcgaggacctgcaggctgccgcagttggtaagatggtccaggaactcccagccttactcgtcgctcgccgtcagctggttgcccgacatgtacaacgactgtgggcagagcatgccgatgactcactgctcctttttttgaagaacagagatggcgagcaatctgccattgcagctgtaggttcgctaaaaagtatggatccaaatcggatcattctgaagaaaattgttctgaccatgtaagcttgggtgcatccatcttcacaaggcaattttacttacttagaatcctgcacccttttatgttccgtcggaggtgtttggttttctatctgtacacaatcactgtaatgttttgtggagttttacaggatatggcgacatgttggttcgcctctaagggctcccgtttagacctcagctaacatagtggctcatcgttcatgctatattatgtgcaggtatccacagagtctcgaatctgaaatcgatcgtgttgtatatgttccacgatcccaacgacgtaaaatggttcaagcctattgagcggtggacaaaacatggtcgtcgtggccgcatcatggagaccgttggtactcatggtgccatgaaatgtttattcaacagcagcatgatactgtgtgcatgagcttgtacaaacacgtgtacctaaaatggccttaacaactctaccacgtataaggttgcctgacgtttcgctagatctgtaccagcaggctatccaaacgacgagaatgaaataaccttggagctagcgtggtgtgtagcctatctaaatatttttaggattagaaaattgttttgtattggtccatcttatacttttctttaacattacaccctcattcttcttggtcttagacgactcttttcagtatcaaatccaaattcatgtttaattgcgtgttgagataatgccaacttattccatgttggcatatgtactacccagtacccacaatcatcggagggtcttataagaaacattagggggtaactctacctacatctatcttatacttgaacatcacacccccattctccttggatcaaatttaaaccaacaacaaattcacttgtatgtggaggcatctattttactacttacaggtatgcatcttgactagctcgctgagggggatggcctggtggatctgttgttggtttgcttgtaggtatcctcggcgtctggtggagctgcgccgcctccacgccactgtcaagcgcttcctcggcgtctgcttcggccactagctgccaatcccatacccgtccagatataagcaagctataatgtgcttttgaaatacaagcgaatattgctatagcatgctgcttgagcttagcattcctctttctttcttttgcagcataagaaacactcttacgaagctcttaccaaatctaacggttacaagattcagttcatacttgggttttgctcattgtattgtcttcaagcagggtatgaggaatagtatagatggaacaatttcttctctgttagtggcacattgtcaatggtgtgtctgacaacattctcaaccacatcatcctagagaacaatgagaacaagcctgtcacaaacagtcgtgacactcaggagatatgccttgaacaaggccttcatatcctcaagatattcgaggattatcatgtcagcaaaacatccatcctgaacgaccttgcctcagcaatgggaaacactccaaacccatacgagcaagccatgtccacttgtgtgaatgaccaagcgatgatgctatcgcatatggtgtggcatgagtctacaatttcactgtagttatgaaaactgatcagtcaatgatgatgaatcatacgaaccttttttacttcagcacgttctttaataggggacgaatttgcatgaggtgttatgaactgcaggtggaggtgagcagtgggagcgtttgcgtattaaagtgcattgcactacaatacttgtttgtggatgttgagtgtttactttagcttaatcaatcttatagttttttaat

SEQ ID NO: 199413 - DNA, 3299 bp, Zea Mays
cccaccgccccattccatccatgacggtcgcccctaacccacggtgtcgactgctccaccgtaagcgcctgtttcaccgccaccgccgacttcggttggtcctcacccgcgcgtggatggcgcacgcgcctctctcctccaagtgcgccgtcgacaccaagctcccctgcctcaccgcgcgatctccagccccgccgcgctcgcaagtcttgagatcgagcagatccaccatcctgcgccctcgccccatcacgcactcaccttggccccgcatccctgcgccgccataccctcggcctcgccctcgcctcatcctcccctgcccccgcaccgcatccaacgcgtagatccagcgtcgtcgccgcgatacctgcccatgccaccgcgtgcgcaccccccgtgccgtcggcaaaccctagcgtgatccccaccctgcccccgtcctcctcacatcatcggctcccccgtcatccatatcccagtggacatctctggcgacgagaggatgacgtcgtccggggtggtggccgcccggacaacccgttgctcgccaggccgagtctcctgagacccttgagcttgctcagtgacggagggatgcttccatggaaggaattgaaatacagatcaagaaactctaggctctagcactactccagctcttctggcatctgaccggagaatttgttctcggatagcgctagctgagcaaggctggtgaggctggagacgtcaggttggctacagtgtcggggatgaacccactcagcgcgttactactcagatcaagctccactagctgggcgaggtcgccgatggaggatgggattggccccgtcaaccggttcccctgcaacgccaacttcgtgaggttcttcatgttcccaatccctgttgggatggtgccgttgaggaggttggattcgaggcccaacgtcgtgagcccgatgaggtcgtcgctggccggtggaatagacccggagatgctgttttcccctatgttcagtgcttgaatctccctcgggaggcgggcaatggagcctggcaactagccaccgagcttgttgttgtcaagggcgaggacctgcaggctgccgcagttggtaagatggtccaggaactcccagccttactcgtcgctcgccgtcagctggttgcccgacatgtacaacgactgtgggcagagcatgccgatgactcactgctcctttgtatccttatgctattgttttcatccgacaacatcaactgcaataaacataagatggagagatttctgcaccatggcaggttttatgttgcctctgtatatgctccaatttccttcccttcacttcctctaatagttttgaagaacagagatggcgagcaatctgccattgcagctgtaggttcgctaaaaagtatggatccaaatcggatcattctgaagaaaattgttctgaccatgtaagcttgggtgcatccatcttcacaaggcaattttacttacttagaatcctgcacccttttatgttccgtcggaggtgtttggttttctatctgtacacaatcactgtaatgttttgtggagttttacaggatatggcgacatgttggttcgcctctaagggctcccgtttagacctcagctaacatagtggctcatcgttcatgctatattatgtgcaggtatccacagagtctcgaatctgaaatcgatcgtgttgtatatgttccacgatcccaacgacgtaaaatggttcaagcctattgagcggtggacaaaacatggtcgtcgtggccgcatcatggagaccgttggtactcatggtgccatgaaatgtttattcaacagcagcatgatactgtgtgcatgagcttgtacaaacacgtgtacctaaaatggccttaacaactctaccacgtataaggttgcctgacgtttcgctagatctgtaccagcaggctatccaaacgacgagaatgaaataaccttggagctagcgtggtgtgtagcctatctaaatatttttaggattagaaaattgttttgtattggtccatcttatacttttctttaacattacaccctcattcttcttggtcttagacgactcttttcagtatcaaatccaaattcatgtttaattgcgtgttgagataatgccaacttattccatgttggcatatgtactacccagtacccacaatcatcggagggtcttataagaaacattagggggtaactctacctacatctatcttatacttgaacatcacacccccattctccttggatcaaatttaaaccaacaacaaattcacttgtatgtggaggcatctattttactacttacaggtatgcatcttgactagctcgctgagggggatggcctggtggatctgttgttggtttgcttgtaggtgattagctagattgtgctgttttaagtcccgacaattcagtttctgtacatgctcgacctttgttgaatctacccttacaggtatcctcggcgtctggtggagctgcgccgcctccacgccactgtcaagcgcttcctcggcgtctgcttcggccactagctgccaatcccatacccgtccagatataagcaagctataatgtgcttttgaaatacaagcgaatattgctatagcatgctgcttgagcttagcattcctctttctttcttttgcagcataagaaacactcttacgaagctcttaccaaatctaacggttacaagattcagttcatacttgggttttgctcattgtattgtcttcaagcagggtatgaggaatagtatagatggaacaatttcttctctgttagtggcacattgtcaatggtgtgtctgacaacattctcaaccacatcatcctagagaacaatgagaacaagcctgtcacaaacagtcgtgacactcaggagatattcgaggattatcatgtcagcaaaacatccatcctgaacgaccttgcctcagcaatgggaaacactccaaacccatacgagcaagccatgtccacttgtgtgaatgaccaagcgatgatgctatcgcatatggtgtggcatgagtctacaatttcactgtagttatgaaaactgatcagtcaatgatgatgaatcatacgaaccttttttacttcagcacgttctttaataggggacgaatttgcatgaggtgttatgaactgcaggtggaggtgagcagtgggagcgtttgcgtattaaagtgcattgcactacaatacttgtttgtggatgttgagtgtttactttagcttaatcaatcttatagttttttaat

SEQ ID NO: 199414 - DNA, 2829 bp, Zea Mays
cacaatttacgcctcccccaccgccccattccatccatgacggtcgcccctaacccacggtgtcgactgctccaccgtaagcgcctgtttcaccgccaccgccgacttcggttggtcctcacccgcgcgtggatggcgcacgcgcctctctcctccaagtgcgccgtcgacaccaagctcccctgcctcaccgcgcgatctccagccccgccgcgctcgcaagtcttgagatcgagcagatccaccatcctgcgccctcgccccatcacgcactcaccttggccccgcatccctgcgccgccataccctcggcctcgccctcgcctcatcctcccctgcccccgcaccgcatccaacgcgtagatccagcgtcgtcgccgcgatacctgcccatgccaccgcgtgcgcaccccccgtgccgtcggcaaaccctagcgtgatccccaccctgcccccgtcctcctcacatcatcggctcccccgtcatccatatcccagtggacatctctggcgacgagaggatgacgtcgtccggggtggtggccgcccggacaacccgttgctcgccaggccgagtctcctgagacccttgagcttgctcagtgacggagggatgcttccatggaaggaattgaaatacagatcaagaaactctaggctctagcactactccagctcttctggcatctgaccggagaatttgttctcggatagcgctagctgagcaaggctggtgaggctggagacgtcaggttggctacagtgtcggggatgaacccactcagcgcgttactactcagatcaagctccactagctgggcgaggtcgccgatggaggatgggattggccccgtcaaccggttcccctgcaacgccaacttcgtgaggttcttcatgttcccaatccctgttgggatggtgccgttgaggaggttggattcgaggcccaacgtcgtgagcccgatgaggtcgtcgctggccggtggaatagacccggagatgctgttttcccctatgttcagtgcttgaatctccctcgggaggcgggcaatggagcctggcaactagccaccgagcttgttgttgtcaagggcgaggacctgcaggctgccgcagttggtaagatggtccaggaactcccagccttactcgtcgctcgccgtcagctggttgcccgacatgtacaacgactgtgggcagagcatgccgatgactcactgctcctttttttgaagaacagagatggcgagcaatctgccattgcagctgtaggttcgctaaaaagtatggatccaaatcggatcattctgaagaaaattgttctgaccatgtatccacagagtctcgaatctgaaatcgatcgtgttgtatatgttccacgatcccaacgacgtaaaatggttcaagcctattgagcggtggacaaaacatggtcgtcgtggccgcatcatggagaccgttggtactcatggtgccatgaaatgtttattcaacagcagcatgatactgtgtgcatgagcttgtacaaacacgtgtacctaaaatggccttaacaactctaccacgtataaggttgcctgacgtttcgctagatctgtaccagcaggctatccaaacgacgagaatgaaataaccttggagctagcgtggtgtgtagcctatctaaatatttttaggattagaaaattgttttgtattggtccatcttatacttttctttaacattacaccctcattcttcttggtcttagacgactcttttcagtatcaaatccaaattcatgtttaattgcgtgttgagataatgccaacttattccatgttggcatatgtactacccagtacccacaatcatcggagggtcttataagaaacattagggggtaactctacctacatctatcttatacttgaacatcacacccccattctccttggatcaaatttaaaccaacaacaaattcacttgtatgtggaggcatctattttactacttacaggtatgcatcttgactagctcgctgagggggatggcctggtggatctgttgttggtttgcttgtatcctcggcgtctggtggagctgcgccgcctccacgccactgtcaagcgcttcctcggcgtctgcttcggccactagctgccaatcccatacccgtccagatataagcaagctataatcataagaaacactcttacgaagctcttaccaaatctaacggttacaagattcagttcatacttgggttttgctcattgtattgtcttcaagcagggtatgaggaatagtatagatggaacaatttcttctctgttagtggcacattgtcaatggtgtgtctgacaacattctcaaccacatcatcctagagaacaatgagaacaagcctgtcacaaacagtcgtgacactcaggagatatgccttgaacaaggccttcatatcctcaagatattcgaggattatcatgtcagcaaaacatccatcctgaacgaccttgcctcagcaatgggaaacactccaaacccatacgagcaagccatgtccacttgtgtgaatgaccaagcgatgatgctatcgcatatggtgtggcatgagtctacaatttcactgtagttatgaaaactgatcagtcaatgatgatgaatcatacgaaccttttttacttcagcacgttctttaataggggacgaatttgcatgaggtgttatgaactgcaggtggaggtgagcagtgggagcgtttgcgtattaaagtgcattgcactacaatacttgtttgtggatgttgagtgtttactttagcttaatcaatcttatagttttttaat

SEQ ID NO: 199415 - DNA, 2905 bp, Zea Mays
cacaatttacgcctcccccaccgccccattccatccatgacggtcgcccctaacccacggtgtcgactgctccaccgtaagcgcctgtttcaccgccaccgccgacttcggttggtcctcacccgcgcgtggatggcgcacgcgcctctctcctccaagtgcgccgtcgacaccaagctcccctgcctcaccgcgcgatctccagccccgccgcgctcgcaagtcttgagatcgagcagatccaccatcctgcgccctcgccccatcacgcactcaccttggccccgcatccctgcgccgccataccctcggcctcgccctcgcctcatcctcccctgcccccgcaccgcatccaacgcgtagatccagcgtcgtcgccgcgatacctgcccatgccaccgcgtgcgcaccccccgtgccgtcggcaaaccctagcgtgatccccaccctgcccccgtcctcctcacatcatcggctcccccgtcatccatatcccagtggacatctctggcgacgagaggatgacgtcgtccggggtggtggccgcccggacaacccgttgctcgccaggccgagtctcctgagacccttgagcttgctcagtgacggagggatgcttccatggaaggaattgaaatacagatcaagaaactctaggctctagcactactccagctcttctggcatctgaccggagaatttgttctcggatagcgctagctgagcaaggctggtgaggctggagacgtcaggttggctacagtgtcggggatgaacccactcagcgcgttactactcagatcaagctccactagctgggcgaggtcgccgatggaggatgggattggccccgtcaaccggttcccctgcaacgccaacttcgtgaggttcttcatgttcccaatccctgttgggatggtgccgttgaggaggttggattcgaggcccaacgtcgtgagcccgatgaggtcgtcgctggccggtggaatagacccggagatgctgttttcccctatgttcagtgcttgaatctccctcgggaggcgggcaatggagcctggcaactagccaccgagcttgttgttgtcaagggcgaggacctgcaggctgccgcagttggtaagatggtccaggaactcccagccttactcgtcgctcgccgtcagctggttgcccgacatgtacaacgactgtgggcagagcatgccgatgactcactgctcctttgtatccttatgctattgttttcatccgacaacatcaactgcaataaacataagatggagagatttctgcaccatggcagagatggcgagcaatctgccattgcagctgtaggttcgctaaaaagtatggatccaaatcggatcattctgaagaaaattgttctgaccatgtaagcttgggtgcatccatcttcacaaggtatccacagagtctcgaatctgaaatcgatcgtgttgtatatgttccacgatcccaacgacgtaaaatggttcaagcctattgagcggtggacaaaacatggtcgtcgtggccgcatcatggagaccgttggtactcatggtgccatgaaatgtttattcaacagcagcatgatactgtgtgcatgagcttgtacaaacacgtgtacctaaaatggccttaacaactctaccacgtataaggttgcctgacgtttcgctagatctgtaccagcaggctatccaaacgacgagaatgaaataaccttggagctagcgtggtgtgtagcctatctaaatatttttaggattagaaaattgttttgtattggtccatcttatacttttctttaacattacaccctcattcttcttggtcttagacgactcttttcagtatcaaatccaaattcatgtttaattgcgtgttgagataatgccaacttattccatgttggcatatgtactacccagtacccacaatcatcggagggtcttataagaaacattagggggtaactctacctacatctatcttatacttgaacatcacacccccattctccttggatcaaatttaaaccaacaacaaattcacttgtatgtggaggcatctattttactacttacaggtatgcatcttgactagctcgctgagggggatggcctggtggatctgttgttggtttgcttgtatcctcggcgtctggtggagctgcgccgcctccacgccactgtcaagcgcttcctcggcgtctgcttcggccactagctgccaatcccatacccgtccagatataagcaagctataatgtgcttttgaaatacaagcgaatattgctatagcatgctgcttgagcttagcattcctctttctttcttttgcagcataagaaacactcttacgaagctcttaccaaatctaacggttacaagattcagttcatacttgggttttgctcattgtattgtcttcaagcaggagaacaatgagaacaagcctgtcacaaacagtcgtgacactcaggagatatgccttgaacaaggccttcatatcctcaagatattcgaggattatcatgtcagcaaaacatccatcctgaacgaccttgcctcagcaatgggaaacactccaaacccatacgagcaagccatgtccacttgtgtgaatgaccaagcgatgatgctatcgcatatggtgtggcatgagtctacaatttcactgtagttatgaaaactgatcagtcaatgatgatgaatcatacgaaccttttttacttcagcacgttctttaataggggacgaatttgcatgaggtgttatgaactgcaggtggaggtgagcagtgggagcgtttgcgtattaaagtgcattgcactacaatacttgtttgtggatgttgagtgtttactttagcttaatcaatcttatagttttttaat

SEQ ID NO: 199416 - DNA, 3298 bp, Zea Mays
aagaaaacttacaagggcgcggcaacagagcgagaggcgcgcgcgcagtcccctctacttcccgccgctggccgtttcccttccccccaatccaaaccctagagagagagagagagagtgtgtagtgtgtgtgtgtgagagagagggggattggaggcgaaggcagcgggctagcgctagcggaggaggagagatccgctgaggtggaacgcccgatcggcggagccccatccaccaccactccacaagatgcggggcgggacgctgcagatcaactggcacgaccagcagccggtgctcagcctcgacttccaccccgtctcccgccgcctcgccacagccggagcggaccacgacgtcaagatctgggaggtagcgtcggacggcaagctccccaccgccaccttcaagaccggcctggtccccaacaccaccgcccacagctccgcggtcaacgtcctccggttctccccttcaggggagtatctcgcctccggtgctgatggtggcggcatcaccctctggaaactgcatcccgctgacgacggcgaggcatggaaaattcacaagacgttactttccatcacaaggatgttcttgaccttcagtggtcgcatgacagcacatttcttgtttctgcatcagtcgacaacacttgcataatttgggaagctagtaaaggcacagtgcaacaaaagctagagggacatctgcattatgttcagggtgtggcatgggatcctttgggccagtatattgcttcactgagttctgacagaacctgtaaaatatatgcaaaaaagcctcagggcaaatccaagaacgcggagaggttgaactttgtttgccagcatacactagtgaaggtagaataccagaatcatgatgaatctaagccaccaaccaaatctcatttgtttcatgatgagacactaccatctttcttccgaaggttggcatggtcacctgatggatcttttctagtattgccagcaggcctttctaaacactcctccgaggtgattaatacagcttatgtaatgtccaggcgtgacctctcaaggccttcgatacaactccctggggcaagtaaagctatagtggcagtacgcttctgccctgtactattcaaaccacgtggttctaactcagatggtttcttcaagcttccttatagagttgtctttgctgtggctactttgaactctctgtatgtctatgatacagaaagtgttcctccaattctagtccatgctggtctacactatgctgccattaccgatattgcatggtcttctgatgctaagtacctggcagtgtcatcacgagatggctactgtactataatagagtttgagaatgaggaactgggacagcctcacatactccccggatcaaaggaagttgctaatgggaatctgacacctgagaccaagaagcctgtatgtgctgatagcatgaaggttgataatagtgccaacaagcttaagatggaagccagtcctgttgctgtaggagttagagcaccactgctgccaactgagaacatcaagagaacaggagagcttgccgaaggaaatgtaacctgtgaaaacaaggagccggtaacaatagacagtatggaagtagatgccgatgataccaaaggcaaggaggcaaccatacccgtggcagctgaagtgacaccgccaccagcggtaccggcagcgaagaacagcgcatctagtaagcctgctaagaggcgaattactcctatcgcaatcgactaggtagtagacgcagcagttagggttttgatgtgttatgtagtgatggcaagtactggatactatgtttaggctaccctgtaaagtcgtttgtgctgcggtgctcatcttctgctctagtcctcctgctcttgacacaattggggagaatgtgaacagaagggctgtgtgtatgtatgagcacactttgttatggcgcaacatgcaagccactaaccgacatcttaagaagtggagttcattactgaggagtgaggaagttgtttcacacgagctgctcatatacaaatgctggcatacaaattacacattgaaatcaatcagatggggacatgacgcccttatttcatttacatgaaagaacatagaatcttatcaaaataccgaaaacgaatgggagggtagtatgtatatgtgtgtgtgtatgggtatggtattggcctcaagttgaagggccttgggtgcagtaggcatcatcatgcatctcaggactttgttatgcgcgccttggatttgtcatactcttcctggctctcgccggcctcttcaaacctgatgtcctcatcctccgaaaggacctcaaccctttcgccatgtggcccaggcacgatcatctcgtcgacgtgcttgtgcttggtgacgttgatgacctccgtcttcctctcctctccgctctggtgtttcttgtgccaggtccaaggggcggtgctcgaggactcgccgatggcgtcctgcttcctgaccgcctcctggaacctgacgtcctcgtccaccgtcagcctgacggcgctcgcgcccccggccggcccgggcacggtctgcttgtggacgtggacgtggtcgctgaagttgagcacctcggccttggcctcctcctcctctgccttcctccccctcctcttcttcttcttgtgccagcagaggagcgcggcagccaggcatgccagcagcagcaggccgcccagggagacgaacaccacgatgatgacgatgtggtgcggggggctaggtggaggcggcacgggcgccggcggaggcggcatgggcaggtgaggcggtggtggcgcttgaggccgaggagttggtggtggtggtgggcggatgggtggtgacggtggtggtggaggagcgcggcgtggtggcggcggtggctgagtgggaggtggaggggcgcggcgtggtggcggcggtggctgagtgggaggtggaggagcgcggcgtggtggcggcggtggctgagtgggaggcgggggagcgcggcgcggtggcggtggcggcattgtgggtggtggcggtgccagagccggtggtgggggagcacggcgcggaggaggcggttgtggtagggtgggcggtggtggagcgcgtcgcggtggcgggaagggctgctgtggtggtcttggaaggtaagggttcggagggaggtaggggaagccaagtcctggaggggtagggttgaacgccatcgctgctgctggatgatctcggaggagagctgtgtggtgctgtagtgaggtgaggcgagtgagctg

SEQ ID NO: 199417 - DNA, 2789 bp, Zea Mays
gttggcccgtgcagtgcatgcctctcctcgctccctccgcctcgtctctctctgagtcccttcgtctctctgccagctgcttcaccttctgccgctttgatcgtccacttcacttcagcacagtcacgtcgtttattgtcgccttcatcgtctgctccagtgtttggtgatatccatcgctttcttcgtcagctccacttcctcgtcgagttgctgcttgtttcattggggtttctaagttcctcttgcttccttatatatttacacattttaatcttccctgcacttcaatgtgagatgtggaaaggcttgccacagctagatttgtgcatttttatctagtcagctttatttggaaaatacacgccaaaaatgaccactcttttttgggggtcaattcaacattccgcttccctcccactgtttctctctgctcttgaatctacgatgtgtagactttgttattttagtgttttgcaatttcattttcccttgaaaatatagggaacctcattgcattctttttggatcgatggattccgtggcccataaatccctgctcttcaatttacaccctccgtcttcatctgcaacctgcttcgtctaccgttgtttttgtcaggctatgaaaaagtgtcttcggcgtaaaaggtcaatcgccccgcctccagcaaaatgacttcatttttccccgacttttgttacggttagtgctctttgctgctgactcccttgtgtctgttatccaagctacgatttctcccccaaatttaaggtttagggtttatgttacaaaggaaaaaggaaggataccaatgaaaaaaaccctcactgttacttgttgttcgatttaatccctggttcttgtacttcaagccttgaatttgtttggtttctcccccaaatttgaagttcgggactaatgttatagcaaagggaaaaagtaaggaaagcaagacaaaaaatcctccctgttacttggggctagtttggaaactcaaatcccctccaatcccgaaggggattcgaggttcccaaagtagtgtttgatttaatccctggttcttgtagttcaaaccttgaatatgttcgtcttattttgtgtagtccttttccttttttggtccccggcacatgcttcacatgatctgttacaaatttgtggttggtcaatccgttgttccccacgtatattttttaaaacttctttaccttgaagagttcttttctgtcctattttgtttggttttacccacactggtttcggttccctgcttttcctctgttcctgttttcaatcccactcgattatgcccaacttagtttgaattcacagttattttcaatatggtaaggaaatgtttgctacttatatattagatcgcagccacattttcatccacatgctctcacttcgagattttgaccctttttccacgattttcaatacggtaaggaaatgtttgctacttattccctgttgtccattatccaaagtatggtttttaggccaaatttaaggattactgtttatattacagaaaaggacataggaaagaaacgagtaaaaaagaaggaaacaaattctttcagctacttgctgttcgatttacttccacatctaggattagttgttctttttttccacagcaccccccccggggcatgtctcactggaacttttacaaatttgggtttagggtacataaaagcacgtggagtgatacctctgcacctcagtggctttatcggcgaggcttggttgctgaggtaattagcattagttttgatctactttccttcgtgctggttgttcactaatagattaatgtttgatgtcctgttcggcctaggatacttaccagtgtgtctatgtgttccaccaatatactgcattatgcacgcttgctagtttaaagtgtgatttcgtgtacagaacacagtacagagcttcttatttaaaaatatttgtaactttaacaaatcaactcttagatatacaacctaatgaaatatattcaataggctcgatgtgttctagcatattccgatgtgccatgcagtgcagaggtaaattcagtgtacttacatgcttaacttctatatatactaatgaagatagatatctgtatactgttaatgtctctacaacaaatgataaaaacatgttttccaagttaaacacctacaaattcttcggcacaaaagtgctctcccactttggactaccatagtaagatagcaatgtttatcttatcgttcacaagtcatctacaaagacatggatcagctgaccaagctcgagctaccatcgcctccaaaaaaatgaagcatacccaacttaacaaagagctaccatattctatgggttcaaaaaatgaagacgactagcccaccacgaagcactcgaaggtattggttttttgcaagcattagaagagctccatcactttttaatataaaagccttttgtgtacatatgaaccaactgttggagcatttctaaaactgtattgacttatgcaacctctagaaacacactgttactgcatattggagtacactgcttaaatgctacttgatatatattgtaatttcatttgatattacaaatgcggttagcaaccaaattcagctataaatttcgtaagcatgtggcgccttatccgacaaaaaaacacaaaagagcaaagcaacaacttttgcttacgtcatagcatgtttccgtatgcttatttgcttcataacaactcttatacatgttcatgtacactttctttacattaaac

SEQ ID NO: 199418 - DNA, 2661 bp, Zea Mays
gttggcccgtgcagtgcatgcctctcctcgctccctccgcctcgtctctctctgagtcccttcgtctctctgccagctgcttcaccttctgccgctttgatcgtccacttcacttcagcacagtcacgtcgtttattgtcgccttcatcgtctgctccagtgtttggtgatatccatcgctttcttcgtcagctccacttcctcgtcgagttgctgcttgtttcattggggtttctaagttcctcttgcttccttatatatttacacattttaatcttccctgcacttcaatgtgagatgtggaaaggcttgccacagctagatttgtgcatttttatctagtcagctttatttggaaaatacacgccaaaaatgaccactcttttttgggggtcaattcaacattccgcttccctcccactgtttctctctgctcttgaatctacgatgtgtagactttgttattttagtgttttgcaatttcattttcccttgaaaatatagggaacctcattgcattctttttggatcgatggattccgtggcccataaatccctgctcttcaatttacaccctccgtcttcatctgcaacctgcttcgtctaccgttgtttttgtcaggctatgaaaaaggtttgttttctttgtccctgatgctttgtgcttctaccagatctagttccttcagctagatttgccagtcgcttagatttttggatttgttcatcgccttaaactacaaccgcttttcgtctccgtcttctagtgtcttcggcgtaaaaggtcaatcgccccgcctccagcaaaatgacttcatttttccccgacttttgttacggttagtgctctttgctgctgactcccttgtgtctgttatccaagctacgatttctcccccaaatttaaggtttagggtttatgttacaaaggaaaaaggaaggataccaatgaaaaaaaccctcactgttacttgttgttcgatttaatccctggttcttgtacttcaagccttgaatttgtttggtttctcccccaaatttgaagttcgggactaatgttatagcaaagggaaaaagtaaggaaagcaagacaaaaaatcctccctgttacttggggctagtttggaaactcaaatcccctccaatcccgaaggggattcgaggttcccaaagtagtgtttgatttaatccctggttcttgtagttcaaaccttgaatatgttcgtcttattttgtgtagtccttttccttttttggtccccggcacatgcttcacatgatctgttacaaatttgtggttggtcaatccgttgttccccacgtatattttttaaaacttctttaccttgaagagttcttttctgtcctattttgtttggttttacccacactggtttcggttccctgcttttcctctgttcctgttttcaatcccactcgattatgcccaacttagtttgaattcacagttattttcaatatggtaaggaaatgtttgctacttatatattagatcgcagccacattttcatccacatgctctcacttcgagattttgaccctttttccacgattttcaatacgcacgtggagtgatacctctgcacctcagtggctttatcggcgaggcttggttgctgaggtaattagcattagttttgatctactttccttcgtgctggttgttcactaatagattaatgtttgatgtcctgttcggcctaggatacttaccagtgtgtctatgtgttccaccaatatactgcattatgcacgcttgctagtttaaagtgtgatttcgtgtacagaacacagtacagagcttcttatttaaaaatatttgtaactttaacaaatcaactcttagatatacaacctaatgaaatatattcaataggctcgatgtgttctagcatattccgatgtgccatgcagtgcagaggtaaattcagtgtacttacatgcttaacttctatatatactaatgaagatagatatctgtatactgttaatgtctctacaacaaatgataaaaacatgttttccaagttaaacacctacaaattcttcggcacaaaagtgctctcccactttggactaccatagtaagatagcaatgtttatcttatcgttcacaagtcatctacaaagacatggatcagctgaccaagctcgagctaccatcgcctccaaaaaaatgaagcatacccaacttaacaaagagctaccatattctatgggttcaaaaaatgaagacgactagcccaccacgaagcactcgaaggtattggttttttgcaagcattagaagagctccatcactttttaatataaaagccttttgtgtacatatgaaccaactgttggagcatttctaaaactgtattgacttatgcaacctctagaaacacactgttactgcatattggagtacactgcttaaatgctacttgatatatattgtaatttcatttgatattacaaatgcggttagcaaccaaattcagctataaatttcgtaagcatgtggcgccttatccgacaaaaaaacacaaaagagcaaagcaacaacttttgcttacgtcatagcatgtttccgtatgcttatttgcttcataacaactcttatacatgttcatgtacactttctttacattaaac

SEQ ID NO: 199419 - DNA, 2031 bp, Zea Mays
gttggcccgtgcagtgcatgcctctcctcgctccctccgcctcgtctctctctgagtcccttcgtctctctgccagctgcttcaccttctgccgctttgatcgtccacttcacttcagcacagtcacgtcgtttattgtcgccttcatcgtctgctccagtgtttggtgatatccatcgctttcttcgtcagctccacttcctcgtcgagttgctgcttgtttcattggggtttctaagttcctcttgcttccttatatatttacacattttaatcttccctgcacttcaatgtgagatgtggaaaggcttgccacagctagatttgtgcatttttatctagtcagctttatttggaaaatacacgccaaaaatgaccactcttttttgggggtcaattcaacattccgcttccctcccactgtttctctctgctcttgaatctacgatgtgtagactttgttattttagtgttttgcaatttcattttcccttgaaaatatagggaacctcattgcattctttttggatcgatggattccgtggcccataaatccctgctcttcaatttacaccctccgtcttcatctgcaacctgcttcgtctaccgttgtttttgtcaggctatgaaaaagtgtcttcggcgtaaaaggtcaatcgccccgcctccagcaaaatgacttcatttttccccgacttttgttacggttagtgctctttgctgctgactcccttgtgtctgttatccaagctacgatttctcccccaaatttaaggtttagggtttatgttacaaaggaaaaaggaaggataccaatgaaaaaaaccctcactgttacttgttgttcgatttaatccctggttcttgtacttcaagccttgaatttgtttggtttctcccccaaatttgaagttcgggactaatgttatagcaaagggaaaaagtaaggaaagcaagacaaaaaatcctccctgttacttggggctagtttggaaactcaaatcccctccaatcccgaaggggattcgaggttcccaaagtagtgtttgatttaatccctggttcttgtagttcaaaccttgaatatgttcgtcttattttgtgtagtccttttccttttttggtccccggcacatgcttcacatgatctgttacaaatttgtggttggtcaatccgttgttccccacgtatattttttaaaacttctttaccttgaagagttcttttctgtcctattttgtttggttttacccacactggtttcggttccctgcttttcctctgttcctgttttcaatcccactcgattatgcccaacttagtttgaattcacagttattttcaatatggtaaggaaatgtttgctacttatatattagatcgcagccacattttcatccacatgctctcacttcgagattttgaccctttttccacgattttcaatacgcacgtggagtgatacctctgcacctcagtggctttatcggcgaggcttggttgctgagtcatctacaaagacatggatcagctgaccaagctcgagctaccatcgcctccaaaaaaatgaagcatacccaacttaacaaagagctaccatattctatgggttcaaaaaatgaagacgactagcccaccacgaagcactcgaaggtattggttttttgcaagcattagaagagctccatcactttttaatataaaagccttttgtgtacatatgaaccaactgttggagcatttctaaaactgtattgacttatgcaacctctagaaacacactgttactgcatattggagtacactgcttaaatgctacttgatatatattgtaatttcatttgatattacaaatgcggttagcaaccaaattcagctataaatttcgtaagcatgtggcgccttatccgacaaaaaaacacaaaagagcaaagcaacaacttttgcttacgtcatagcatgtttccgtatgcttatttgcttcataacaactcttatacatgttcatgtacactttctttacattaaac

SEQ ID NO: 199420 - DNA, 2292 bp, Zea Mays
gttggcccgtgcagtgcatgcctctcctcgctccctccgcctcgtctctctctgagtcccttcgtctctctgccagctgcttcaccttctgccgctttgatcgtccacttcacttcagcacagtcacgtcgtttattgtcgccttcatcgtctgctccagtgtttggtgatatccatcgctttcttcgtcagctccacttcctcgtcgagttgctgcttgtttcattggggtttctaagttcctcttgcttccttatatatttacacattttaatcttccctgcacttcaatgtgagatgtggaaaggcttgccacagctagatttgtgcatttttatctagtcagctttatttggaaaatacacgccaaaaatgaccactcttttttgggggtcaattcaacattccgcttccctcccactgtttctctctgctcttgaatctacgatgtgtagactttgttattttagtgttttgcaatttcattttcccttgaaaatatagggaacctcattgcattctttttggatcgatggattccgtggcccataaatccctgctcttcaatttacaccctccgtcttcatctgcaacctgcttcgtctaccgttgtttttgtcaggctatgaaaaagtgtcttcggcgtaaaaggtcaatcgccccgcctccagcaaaatgacttcatttttccccgacttttgttacggttagtgctctttgctgctgactcccttgtgtctgttatccaagctacgatttctcccccaaatttaaggtttagggtttatgttacaaaggaaaaaggaaggataccaatgaaaaaaaccctcactgttacttgttgttcgatttaatccctggttcttgtacttcaagccttgaatttgtttggtttctcccccaaatttgaagttcgggactaatgttatagcaaagggaaaaagtaaggaaagcaagacaaaaaatcctccctgttacttggggctagtttggaaactcaaatcccctccaatcccgaaggggattcgaggttcccaaagtagtgtttgatttaatccctggttcttgtagttcaaaccttgaatatgttcgtcttattttgtgtagtccttttccttttttggtccccggcacatgcttcacatgatctgttacaaatttgtggttggtcaatccgttgttccccacgtatattttttaaaacttctttaccttgaagagttcttttctgtcctattttgtttggttttacccacactggtttcggttccctgcttttcctctgttcctgttttcaatcccactcgattatgcccaacttagtttgaattcacagttattttcaatatggtaaggaaatgtttgctacttatatattagatcgcagccacattttcatccacatgctctcacttcgagattttgaccctttttccacgattttcaatacggtaaggaaatgtttgctacttattccctgttgtccattatccaaagtatggtttttaggccaaatttaaggattactgtttatattacagaaaaggacataggaaagaaacgagtaaaaaagaaggaaacaaattctttcagctacttgctgttcgatttacttccacatctaggattagttgttctttttttccacagcaccccccccggggcatgtctcactggaacttttacaaatttgggtttagggtacataaaagcacgtggagtgatacctctgcacctcagtggctttatcggcgaggcttggttgctgagtcatctacaaagacatggatcagctgaccaagctcgagctaccatcgcctccaaaaaaatgaagcatacccaacttaacaaagagctaccatattctatgggttcaaaaaatgaagacgactagcccaccacgaagcactcgaaggtattggttttttgcaagcattagaagagctccatcactttttaatataaaagccttttgtgtacatatgaaccaactgttggagcatttctaaaactgtattgacttatgcaacctctagaaacacactgttactgcatattggagtacactgcttaaatgctacttgatatatattgtaatttcatttgatattacaaatgcggttagcaaccaaattcagctataaatttcgtaagcatgtggcgccttatccgacaaaaaaacacaaaagagcaaagcaacaacttttgcttacgtcatagcatgtttccgtatgcttatttgcttcataacaactcttatacatgttcatgtacactttctttacattaaac

SEQ ID NO: 199421 - DNA, 2684 bp, Zea Mays
gttggcccgtgcagtgcatgcctctcctcgctccctccgcctcgtctctctctgagtcccttcgtctctctgccagctgcttcaccttctgccgctttgatcgtccacttcacttcagcacagtcacgtcgtttattgtcgccttcatcgtctgctccagtgtttggtgatatccatcgctttcttcgtcagctccacttcctcgtcgagttgctgcttgtttcattggggtttctaagttcctcttgcttccttatatatttacacattttaatcttccctgcacttcaatgtgagatgtggaaaggcttgccacagctagatttgtgcatttttatctagtcagctttatttggaaaatacacgccaaaaatgaccactcttttttgggggtcaattcaacattccgcttccctcccactgtttctctctgctcttgaatctacgatgtgtagactttgttattttagtgttttgcaatttcattttcccttgaaaatatagggaacctcattgcattctttttggatcgatggattccgtggcccataaatccctgctcttcaatttacaccctccgtcttcatctgcaacctgcttcgtctaccgttgtttttgtcaggctatgaaaaaggtttgttttctttgtccctgatgctttgtgcttctaccagatctagttccttcagctagatttgccagtcgcttagatttttggatttgttcatcgccttaaactacaaccgcttttcgtctccgtcttctagtgtcttcggcgtaaaaggtcaatcgccccgcctccagcaaaatgacttcatttttccccgacttttgttacggttagtgctctttgctgctgactcccttgtgtctgttatccaagctacgatttctcccccaaatttaaggtttagggtttatgttacaaaggaaaaaggaaggataccaatgaaaaaaaccctcactgttacttgttgttcgatttaatccctggttcttgtacttcaagccttgaatttgtttggtttctcccccaaatttgaagttcgggactaatgttatagcaaagggaaaaagtaaggaaagcaagacaaaaaatcctccctgttacttggggctagtttggaaactcaaatcccctccaatcccgaaggggattcgaggttcccaaagtagtgtttgatttaatccctggttcttgtagttcaaaccttgaatatgttcgtcttattttgtgtagtccttttccttttttggtccccggcacatgcttcacatgatctgttacaaatttgtggttggtcaatccgttgttccccacgtatattttttaaaacttctttaccttgaagagttcttttctgtcctattttgtttggttttacccacactggtttcggttccctgcttttcctctgttcctgttttcaatcccactcgattatgcccaacttagtttgaattcacagttattttcaatatggtaaggaaatgtttgctacttatatattagatcgcagccacattttcatccacatgctctcacttcgagattttgaccctttttccacgattttcaatacggtaaggaaatgtttgctacttattccctgttgtccattatccaaagtatggtttttaggccaaatttaaggattactgtttatattacagaaaaggacataggaaagaaacgagtaaaaaagaaggaaacaaattctttcagctacttgctgttcgatttacttccacatctaggattagttgttctttttttccacagcaccccccccggggcatgtctcactggaacttttacaaatttgggtttagggtacataaaaggtatgttttttacaccatcaagttgttgattctttatcactttaaattgctattgatgtgtaaaaagagttgattatgtgttccacataaattgctagaatcctttgtggctacaaaagaattgaatcaattgattatagttttaagctgcttccattcgcactggttgtctgctacatggcgcgtagtgattttacagttacttttcttgaactaagtttaaatgctccgcgtcttatatgtactgtttgtttctgctcttttatcgaagcacgtggagtgatacctctgcacctcagtggctttatcggcgaggcttggttgctgagacatggatcagctgaccaagctcgagctaccatcgcctccaaaaaaatgaagcatacccaacttaacaaagagctaccatattctatgggttcaaaaaatgaagacgactagcccaccacgaagcactcgaaggtattggttttttgcaagcattagaagagctccatcactttttaatataaaagccttttgtgtacatatgaaccaactgttggagcatttctaaaactgtattgacttatgcaacctctagaaacacactgttactgcatattggagtacactgcttaaatgctacttgatatatattgtaatttcatttgatattacaaatgcggttagcaaccaaattcagctataaatttcgtaagcatgtggcgccttatccgacaaaaaaacacaaaagagcaaagcaacaacttttgcttacgtcatagcatgtttccgtatgcttatttgcttcataacaactcttatacatgttcatgtacactttctttacattaaac

SEQ ID NO: 199422 - DNA, 2017 bp, Zea Mays
cccgtgcagtgcatgcctctcctcgctccctccgcctcgtctctctctgagtcccttcgtctctctgccagctgcttcaccttctgccgctttgatcgtccacttcacttcagcacagtcacgtcgtttattgtcgccttcatcgtctgctccagtgtttggtgatatccatcgctttcttcgtcagctccacttcctcgtcgagttgctgcttgtttcattggggtttctaagttcctcttgcttccttatatatttacacattttaatcttccctgcacttcaatgtgagatgtggaaaggcttgccacagctagatttgtgcatttttatctagtcagctttatttggaaaatacacgccaaaaatgaccactcttttttgggggtcaattcaacattccgcttccctcccactgtttctctctgctcttgaatctacgatgtgtagactttgttattttagtgttttgcaatttcattttcccttgaaaatatagggaacctcattgcattctttttggatcgatggattccgtggcccataaatccctgctcttcaatttacaccctccgtcttcatctgcaacctgcttcgtctaccgttgtttttgtcaggctatgaaaaaggtttgttttctttgtccctgatgctttgtgcttctaccagatctagttccttcagctagatttgccagtcgcttagatttttggatttgttcatcgccttaaactacaaccgcttttcgtctccgtcttctagtgtcttcggcgtaaaaggtcaatcgccccgcctccagcaaaatgacttcatttttccccgacttttgttacgatcgcagccacattttcatccacatgctctcacttcgagattttgaccctttttccacgattttcaatacggtaaggaaatgtttgctacttattccctgttgtccattatccaaagtatggtttttaggccaaatttaaggattactgtttatattacagaaaaggacataggaaagaaacgagtaaaaaagaaggaaacaaattctttcagctacttgctgttcgatttacttccacatctaggattagttgttctttttttccacagcaccccccccggggcatgtctcactggaacttttacaaatttgggtttagggtacataaaaggtatgttttttacaccatcaagttgttgattctttatcactttaaattgctattgatgtgtaaaaagagttgattatgtgttccacataaattgctagaatcctttgtggctacaaaagaattgaatcaattgattatagttttaagctgcttccattcgcactggttgtctgctacatggcgcgtagtgattttacagttacttttcttgaactaagtttaaatgctccgcgtcttatatgtactgtttgtttctgctcttttatcgaagcacgtggagtgatacctctgcacctcagtggctttatcggcgaggcttggttgctgagtcatctacaaagacatggatcagctgaccaagctcgagctaccatcgcctccaaaaaaatgaagcatacccaacttaacaaagagctaccatattctatgggttcaaaaaatgaagacgactagcccaccacgaagcactcgaaggtattggttttttgcaagcattagaagagctccatcactttttaatataaaagccttttgtgtacatatgaaccaactgttggagcatttctaaaactgtattgacttatgcaacctctagaaacacactgttactgcatattggagtacactgcttaaatgctacttgatatatattgtaatttcatttgatattacaaatgcggttagcaaccaaattcagctataaatttcgtaagcatgtggcgccttatccgacaaaaaaacacaaaagagcaaagcaacaacttttgcttacgtcatagcatgtttccgtatgcttatttgcttcataacaactcttatacatgttcatgtacactttctttacattaaac

SEQ ID NO: 199423 - DNA, 1778 bp, Zea Mays
cccgtgcagtgcatgcctctcctcgctccctccgcctcgtctctctctgagtcccttcgtctctctgccagctgcttcaccttctgccgctttgatcgtccacttcacttcagcacagtcacgtcgtttattgtcgccttcatcgtctgctccagtgtttggtgatatccatcgctttcttcgtcagctccacttcctcgtcgagttgctgcttgtttcattggggtttctaagttcctcttgcttccttatatatttacacattttaatcttccctgcacttcaatgtgagatgtggaaaggcttgccacagctagatttgtgcatttttatctagtcagctttatttggaaaatacacgccaaaaatgaccactcttttttgggggtcaattcaacattccgcttccctcccactgtttctctctgctcttgaatctacgatgtgtagactttgttattttagtgttttgcaatttcattttcccttgaaaatatagggaacctcattgcattctttttggatcgatggattccgtggcccataaatccctgctcttcaatttacaccctccgtcttcatctgcaacctgcttcgtctaccgttgtttttgtcaggctatgaaaaagtgtcttcggcgtaaaaggtcaatcgccccgcctccagcaaaatgacttcatttttccccgacttttgttacgcacgtggagtgatacctctgcacctcagtggctttatcggcgaggcttggttgctgaggtaattagcattagttttgatctactttccttcgtgctggttgttcactaatagattaatgtttgatgtcctgttcggcctaggatacttaccagtgtgtctatgtgttccaccaatatactgcattatgcacgcttgctagtttaaagtgtgatttcgtgtacagaacacagtacagagcttcttatttaaaaatatttgtaactttaacaaatcaactcttagatatacaacctaatgaaatatattcaataggctcgatgtgttctagcatattccgatgtgccatgcagtgcagaggtaaattcagtgtacttacatgcttaacttctatatatactaatgaagatagatatctgtatactgttaatgtctctacaacaaatgataaaaacatgttttccaagttaaacacctacaaattcttcggcacaaaagtgctctcccactttggactaccatagtaagatagcaatgtttatcttatcgttcacaagtcatctacaaagacatggatcagctgaccaagctcgagctaccatcgcctccaaaaaaatgaagcatacccaacttaacaaagagctaccatattctatgggttcaaaaaatgaagacgactagcccaccacgaagcactcgaaggtattggttttttgcaagcattagaagagctccatcactttttaatataaaagccttttgtgtacatatgaaccaactgttggagcatttctaaaactgtattgacttatgcaacctctagaaacacactgttactgcatattggagtacactgcttaaatgctacttgatatatattgtaatttcatttgatattacaaatgcggttagcaaccaaattcagctataaatttcgtaagcatgtggcgccttatccgacaaaaaaacacaaaagagcaaagcaacaacttttgcttacgtcatagcatgtttccgtatgcttatttgcttcataacaactcttatacatgttcatgtacactttctttacattaaac

SEQ ID NO: 199424 - DNA, 1551 bp, Zea Mays
acgttctcgtcgaactacacggctgaggcagtaggcagcaggcaggatacgcactaagcgacggccgccatgtacgcggcggctccgagcagcagcagggtggccgccgccgccgccgccttcttcatcgtcatctccctctcgccgcagctgctcgtccgccccttcggcgcatcgacgacggtccactgggcagcggcgcaggagctcggtaggcgtttccggcccccgtttacacgcgcgcgcgcaggggcagcgccgtgagtgaccgaccgatcgagtcggctttattatttgaatgcattgttaccggtaggaggtcgttgtgtcatgcatgcatgcgctcgttcgtccttgggacacgctccccgtgctgctgttgtctcgtctgtgcatggttttgctcgatgcgttgcgcgctggatggctggggtcggtggatgaagacgaggaggacttcagctaccggcggaacgccgggaacgggccggcgcggtggggcttgatccggagggagtgggcaacgtgcaacgtgggcctcctgcagtcgcccatcggcctctccgacaccttggcggggctagccgaccggtccggccgcctgggccgctcctaccgccccgccgccgcgtccctcgtcaaccgcggccacagcattatggtaaggttcaacagcaaccccggcggcgtggtgatcgacggcgtggcgtaccggctccggcagatgcactggcacgcgccgagcgagcacgccatcaacgggcgcaggtacgccctggagctgcagatggtgcaccagagcgacaccaacaggtacgccgtggtctcgcagctctacaggatctcgcggcggcgtcctgacaggaccattcacaggctggagcggtacatccggaggatcgcgaggaggaagaaccacgaggagctcatcgacgaggaggtggacccgcggcggccggtgagccggagcacggcctactacaagtacacgggctccttcacgacaccgccctgcacggagggcgtgacgtgggtagtggcgcaccagggcaccaggagcaacaggaggccactccaggaagccaacggcagggccatcaccttctactacacctcgccggcgcacggccgaggggcgaacggggactagcacgcattgcaaggagacggccggcggaatcttggcgtccccgtgctccttttctgtccaggcgacacaggccatggccaagcaaactcttgcatgtgatcgatgtccgacagtgttaggtcagagtgcagaccaattttttttttctctccagcgatcatcaattcgttgcggagtaatgctgtagtgcgattgcatatttgcattggcaagtgagtttgtgccaaaaaaaaggacatcaaattagtagaacgtttgcggtttacactccttgttccgtgactgagtgagcgaattgcaatctcgaaaatcatgtgattctaaggatagcacgtctgccacatgtaagggtgaaaacgatcggtaacggtcggaaaaaatctctcaccgtttttactcgt

SEQ ID NO: 199425 - DNA, 1242 bp, Zea Mays
cgaactacacggctgaggcagtaggcagcaggcaggatacgcactaagcgacggccgccatgtacgcggcggctccgagcagcagcagggtggccgccgccgccgccgccttcttcatcgtcatctccctctcgccgcagctgctcgtccgccccttcggcgcatcgacgacggtccactgggcagcggcgcaggagctcgacgaggaggacttcagctaccggcggaacgccgggaacgggccggcgcggtggggcttgatccggagggagtgggcaacgtgcaacgtgggcctcctgcagtcgcccatcggcctctccgacaccttggcggggctagccgaccggtccggccgcctgggccgctcctaccgccccgccgccgcgtccctcgtcaaccgcggccacagcattatggtaaggttcaacagcaaccccggcggcgtggtgatcgacggcgtggcgtaccggctccggcagatgcactggcacgcgccgagcgagcacgccatcaacgggcgcagctctacaggatctcgcggcggcgtcctgacaggaccattcacaggctggagcggtacatccggaggatcgcgaggaggaagaaccacgaggagctcatcgacgaggaggtggacccgcggcggccggtgagccggagcacggcctactacaagtacacgggctccttcacgacaccgccctgcacggagggcgtgacgtgggtagtggcgcaccagggcaccaggagcaacaggaggccactccaggaagccaacggcagggccatcaccttctactacacctcgccggcgcacggccgaggggcgaacggggactagcacgcattgcaaggagacggccggcggaatcttggcgtccccgtgctccttttctgtccaggcgacacaggccatggccaagcaaactcttgcatgtgatcgatgtccgacagtgttaggtcagagtgcagaccaattttttttttctctccagcgatcatcaattcgttgcggagtaatgctgtagtgcgattgcatatttgcattggcaagtgagtttgtgccaaaaaaaaggacatcaaattagtagaacgtttgcggtttacactccttgttccgtgactgagtgagcgaattgcaatctcgaaaatcatgtgattctaaggatagcacgtctgccacatgtaagggtgaaaacgatcggtaacggtcggaaaaaatctctcaccgtttttactcgt

SEQ ID NO: 199426 - DNA, 741 bp, Zea Mays
gcgggatggcagcgcggctgccgcacggggtggcgattggtggttgcagaaaaagaagcagaagctggtgggaagacgggtgacctagattcttatgagattgaaggcggtgagacaaaagcagagatattgcaaaacctagctgagttccagttttcttgtgtcatgtacaatggtgccctagagaatgcatgcagtgagcttggagcccgtatgtctgccatggacagctctagcagaaatgctggcgatatgcttgatcgtctcacgcttacttacaacaggacacgccaagcatccatcaccacagagcttactgagattatatctggtgcatcagcccttgaaggataggtgaagagactatgtggacttctccctttttccccatttgtgttcctctcacatgaaggcttcttttcttccggaggctcagtttcaacccttctcgtttcacttttccttgataaacgtattctcatgctttattgcaataattaggccaacgacagtgatgatgccgtgcgcctttgcatattgcaaaaatgatgttctacatctatggtgaatggctggttttcataaatggtgatgatcaatatatgtatcttgcacatgattagcaagttcacgtgtctgccaaattgagccatataacgatatagcattaatgacatctgttcaatctgaacttccaacatttatccagctgaagaatctattttgaattttgatgctata

SEQ ID NO: 199427 - DNA, 2131 bp, Zea Mays
gcatattatgcggatcctcttggagatgaagctaggcgggggcagttcaggtttcagtgcaagatccacaaatgatgaattggcattaattccattagaaccctcaacatcatcattttctattgctggagggcctacattttcaaatggtttttcatctgggattggttctagtttttcgcaagataatagctttagtcctttattaagggatggagaagatggttacaatagtctcagcaatggaactaaagatgacactcacggattgagtggattacataacttgggtaatacatgcttcatgaatagtgccatacaatccttggttcatacacctccattggtacagtactttttggaggactatacttgtgaaataaacaaggaaaatccactaggcctccagggggaacttgcaatagcatttggagagctacttagaaaactttggtcgtctggtcgaacttctattgctccacgggcatttaaatcgaaactttctcgatttgccccccagttcagtggatataatcagcatgattctcaggagctacttgcgtttctgttggatggtctgcatgaagatctgaaccgtgtaaaagagaaaccatatattgaggcaaaagatgcagatggccgcccagatgatgaatttgctgaagaatgctggaattaccataaagctcgaaatgactccataattgttgataagtttcaaggtcaatacaagtccacattggtgtgcccagtttgtaacaaaatctctgttacctttgatccatttatgtatttgtcgctaccattgccatcaacagtttactcggatgattactgtaactgtattcagtggtacgggagatgttcttccaatgccttacactgtgactgtacagaaaaatggaaactgccgtgatcttactaaagcccttgctgatgtctgctgcttaaaaaattctgagacattgttgcttgcagaggtatacgaacgtcggatctaccgctacctaacaaatccaattgagggacttcatatcataaaagatgaagatatacttgttgcatacaggctccctgttggtcatgaaaaacttttgaggttggagattctgcattcgagggcagacaggtactgtcctgggtgcaaggaacacaggcaagctagcaagaaactggacttgtggaggttgcctgagatattggtagttcatttgaaaaggttctcgtacagccggtatatgaagaataagcttgatacatttgtgaactttccgatccatgacctcaatatgagcaagtatgtgaagcctacatcaagaggtgaccagcaccccgtgtatgaactctatgcagtgataaatcattatggcggtctcggtggtggacactactctgcatatgcgaagttgaagaggacaattggtatcattttgatgacagtcatgtttcctctgttaatgaggatgagatcaggcgatctgcagcatatgttcttttctaccgacgagttggaggttcaagtacagcggcaaacggtggtccagttgacattgaaatggttgattcgctagagacatagttccccagatcaaagcctgagtataacatgtggatcgagatatggagatcagaagagttatggaatttgcatgtctgctccggaatggaatatttgtgtatgaagcctttgacattttgaggcatggcagacaactgaggtcgaaatagcgtggtagcttggatctgcacatctatatgattgagggcctggtgtttaggattataatctgcccagattatataacctatcttattttgaactaagtgttagttcaaaataagttagattatataatatggacaaattatattcccaatcaaacaggctatgattggacttactgatacccatttgagtagaactgatcttgacaggtatccgagaaaacgatgaccttaattgaaaattttgctgatacgctgatgcagcacttagggtctactattgttattggtgtagccaagggattgcaactgggaaaaatggtgtaaaaacgctgcatatttttttttgcctaagctacagctgtgctacagcaaattttgattacggttgtttttttaaaatgcc

SEQ ID NO: 199428 - DNA, 3421 bp, Zea Mays
aaataaattaccgtatttttttcgtctcatcccctctccatttctttcttggtttcctcctctatctctcgtctccctccgaccgaattaaaacgctcgacctgccaagccggactgaaccctaggccccgatccggcgtctcgccgtgctgcttggatttgatcgggcggggttggggtcgtatcggcggcgggatgaccatcccgagcgcggaggggttcctccaggcgtcgagctgcctcccgtgcacggcgacggaggagcgggaggtcgttgacgcgcttaccaaggaggccgagaagaatgtcaagcacggcgatctccgctatctcgtctcgcagagctggtggatggagtggcaaggatatgtgggtctagtcaattatggagaaagtggcaccgagcagtttcctcaggccacaaatagacctggagagattgataactcgaagcttgttttggcagaaaggatcaatggtagtgaggagccagagcttcaaaggaccttgagagaaggggagcactatactttggtgccgcaagaagtttggcaaaggctatatgaatggtataaaggtggaccagaaatccctagaaaagttatttttgacaatccaactgacaagacttacgtagtggatgtctaccctctctgtctaaaactaattgatgcaagggacgactctgagaaagtttttaggataagtagaaaggccaaagttcatgagctttactcaatggtttgctcgctcatgtcagtagagcagtctgagattgtcatctgggattattatcggaggacaaagggcaaggagttgactaatcaaaatgatacactagaagaagctcaacttagtatggaccaggagatcctcttggagatgaagctaggcgggggcagttcaggtttcagtgcaagatccacaaatgatgaattggcattaattccattagaaccctcaacatcatcattttctattgctggagggcctacattttcaaatggtttttcatctgggattggttctagtttttcgcaagataatagctttagtcctttattaagggatggagaagatggttacaatagtctcagcaatggaactaaagatgacactcacggattgagtggattacataacttgggtaatacatgcttcatgaatagtgccatacaatccttggttcatacacctccattggtacagtactttttggaggactatacttgtgaaataaacaaggaaaatccactaggcctccagggggaacttgcaatagcatttggagagctacttagaaaactttggtcgtctggtcgaacttctattgctccacgggcatttaaatcgaaactttctcgatttgccccccagttcagtggatataatcagcatgattctcaggagctacttgcgtttctgttggatggtctgcatgaagatctgaaccgtgtaaaagagaaaccatatattgaggcaaaagatgcagatggccgcccagatgatgaatttgctgaagaatgctggaattaccataaagctcgaaatgactccataattgttgataagtttcaaggtcaatacaagtccacattggtgtgcccagtttgtaacaaaatctctgttacctttgatccatttatgtatttgtcgctaccattgccatcaacagtttactcggatgattactgtaactgtattcagtggtacgggagatgttcttccaatgccttacactgtgactgtacagaaaaatggaaactgccgtgatcttactaaagcccttgctgatgtctgctgcttaaaaaattctgagacattgttgcttgcagaggtatacgaacgtcggatctaccgctacctaacaaatccaattgagggacttcatatcataaaagatgaagatatacttgttgcatacaggctccctgttggtcatgaaaaacttttgaggttggagattctgcattcgagggcagacagagcaaaagcacatagccctgatgtgtctgctgtcaagttaaatggcaatgggccaagtttggacggtattgtcctgaccgataatggcaccaccagtgaggagggtctctctacatcaagatcaagggaggacgataatgcagctgacaatgagcttttaccgtttcagctttcattgactgatgaaaaaggtagtacaagaaatgctatagacatggattctaatcgtgttctaggactagttattagggttttgatggattggggtgagaaagagcatgggatgtacaatattgatcacatggatgtacttcctgaagtcttcaagcctggttttatgtcaaagaagacccgtcaagaagcagtcaatttattttcatgcttggatgcttttctgaaggaggagcctctagggccagatgatatgtggtactgtcctgggtgcaaggaacacaggcaagctagcaagaaactggacttgtggaggttgcctgagatattggtagttcatttgaaaaggttctcgtacagccggtatatgaagaataagcttgatacatttgtgaactttccgatccatgacctcaatatgagcaagtatgtgaagcctacatcaagaggtgaccagcaccccgtgtatgaactctatgcagtgataaatcattatggcggtctcggtggtggacactactctgcatatgcgaagctagttgaagaggacaattggtatcattttgatgacagtcatgtttcctctgttaatgaggatgagatcaggcgatctgcagcatatgttcttttctaccgacgagttggaggttcaagtacagcggcaaacggtggtccagttgacattgaaatggttgattcgctagagacatagttccccagatcaaagcctgagtataacatgtggatcgagatatggagatcagaagagttatggaatttgcatgtctgctccggaatggaatatttgtgtatgaagcctttgacattttgaggcatggcagacaactgaggtcgaaatagcgtggtagcttggatctgcacatctatatgattgagggcctggtgtttaggattataatctgcccagattatataacctatcttattttgaactaagtgttagttcaaaataagttagattatataatatggacaaattatattcccaatcaaacaggctatgattggacttactgatacccatttgagtagaactgatcttgacaggtatccgagaaaacgatgaccttaattgaaaattttgctgatacgctgatgcagcacttagggtctactattgttattggtgtagccaagggattgcaactgggaaaaatggtgtaaaaacgctgcatatttttttttgcctaagctacagctgtgctacagcaaattttgattacggttgtttttttaaaatgcc

SEQ ID NO: 199429 - DNA, 2677 bp, Zea Mays
gcggtgcggcgttcgatttgttcagtccgccatgattaagcaaatcctcggccggcttcccaagaagccgaccaaggccggcgagaaggagctggccggcgcgggcccgtcgctgcccagcccgacgtccgacgcgagaaccaccaccgatctgaccgcgtctagcaggcttgtcagccccagcaactacgcctccgcggcaacaaatccaggccagagctacgcgcccagggccgccgggctcggcgccggcgccagcaacgggttcgcgggctcggcggccgggtacgaggcgctgccgagcttcagggacgtgccggcgtccgagaagccgggcctgctcctcgggaagctggccatgtgctgcgtggtgttcgacttcgcggacccgaccaaggacgtgcgggagaaggaggtcaagaggcagacgctgctcgagctggtggactacatcacctccgccaccagcaagttcccggagcccgtcgtgcaggaggtcgtcaggatggtgtctgtgaatctgttcagggtgcccacccctgccccgagagagaacaaggcgctcgagtcgttcgacatggaggaggaggagcccgtcatggaccccgcgtggtcgcacttgcagatcgtgtatgagctgttcttgaggtttattcagtctccggagacggacgcgaagctggccaagagatacattgaccacggcttcattatcaggcttctcgacctcttcgactcagaggatcctagggagagagagtacctgaagacgatccttcacaggatatacggcaagttcatggtgcatcgccccttcatcaggaaggcaatcaacaatatcttctaccggtttatattcgagacggagaagcataatggtatcgcagagctgttagagattctggggagtataattaatggctttgctttgccgctcaaggaagagcacaaattgtttctagtccgagcgctgattccactccacaaaccaaaatgtgttgccatgtaccatcagcaactgtcgtactgcgtcactcagtttgttgagaaagattgcaagcttgctgatactgtcataagggggttactcaagtattggcccatcacaaatagctcaaaggaggtgatgtttttgggtgagttagaggaggtgctggaagctacacagccagcagagtttcagaggtgtatggtgccacttttccgtcagattgcccgctgtttaagcagttctcactttcaggtggcagagagggctctctttctatggaacaacgaccatatcgagggtttgatcaaacagaacaacaaggttatactgcccataatcttcccagcgttagaacgaaacacgaaaggccactggaaccaggcggttcaaagcttgagtctaaatgtccggaaaatattcatggaccatgatcccgcgctgtttgaggagtgtcacaagaagtttgaggaagaggaagcccaagaagctggcgtaaggtcaagacgggaggctagatggaggcgcctagaagaaatcgcctcgtcaaagtctcctcagtgaagtagcgcgtcctcctgaggctgtagttcttcatcagtagagttcttctagctatcttgtcttggggacttgcatattagcagctcttttggacaggatcaagtaaatgctgatgatgtagttgctggatgtcttcttgccgcctgttacttgtgaccgaacgttctacaggccgacatgtaaatacgaggcacatgatgggctgtgaagcttcaacagagcctcggcgggttctctttgccgtgtgatccactgatgacagtgtcggtttcatcatcataggacaaaggaaaggaggtaaaatggtctttttccgggtcaatgtcttgatccaaggactgttaggagcacttgaaagacgaggaaggaggcaggtagcacttgctcttgctgatggtgattttgctgaaatgtaatactatgctttatgtatgatgcatggtaacttgaagccatgtctggtgataatatgtaatcctggtgtacatgtcttttccttcctttgatgtatacagaaatttggaatgaagccctgattgaaggctgttttctacaagtttgaccccactcatgtgggctgtctttttttaaaatcaggtgtttagggtcaccggagggaggggctcctgaataggtgcaagatcagggatgcgtacgccaagtttggtgtcatgaaccgaatgtaatgttgagcttgcatcatggtggggggtttcgtttgggataactgtaatgctgcctaaaaatacaaataagagtgatatatttgtaaactgcagtgttgcccaaaaacgcaaataaaaatgtgaatatatttgcaatgatacgtttcaattggtatatacgttttgttaccgtaatttttacccattattatgctcatctctttgaactacgcaaccactaccgtgtaccagctattttctgagcaagctgaagcattcgggggcactcaagcagagttagccggtgatcaggttcagcacaattctggatctgccaacggaaagagcctattatgcctccctaaactatatttgtagtctcattttccttaactctaaaaccagatatcttaccactcgatactcttgaaaccattcaaattatctctctggtttgggg

SEQ ID NO: 199430 - DNA, 3803 bp, Zea Mays
aaatatcagaacccaccaaaccgcccgctccgatcggcggacgcacacgcacccactgtggaagaaccgttgagctgagccgagcagggagaaggacgcgagagcagcatggagacggcggagaggggcatcaccgtgtgcgtgaccggcgcggggggctttgtggcatcgtggctcgtcaagctcctcctctccaccggccgctacaccgtccggggcaccgtgcgtcatctcggtgatggcaagaatgcccatcttaagacactggaagatgctgaggagaggttgcagttggtcaaggctgacatgctggactatggcagcgttgcgtccgcggtcgccggctgtcagggtgtcttccatgtcgcgagccctgtcccctccggcaaatcctccaaccctgaggaagatgtcatagctcctgctgtaactggcacactgaatgtgttgaaagcttgctatgaggccaaagcgaagagagttgttgtggtatcttcagtggcggctgtgttcaataatcctgactggcctaagggcgaggcctttactgaggatagctggtcagatggggaatattgcagaaaaaatgaggaatggtatttcctttctaaaacattggcagaacatgaggcttttgcttatgcagccaaaactgggctagacattgtaactatttgcccatcattggtaattggacctttgttgcaacctgcagtaaatacaagtgttaaagtcttcctcagttatatcaaaggagatcaggagatagttaaagatggacccaaaaatcttgtggatgttcgtgatgtcgctggtgcccttctgttggcttacgaaaatctgcaggcatcaggacgatacctctgcagttcaccagcaataagagtctctgatattgtaaacatactgaagaccgaatatccaacatacacttaccctcaaaaattcgttgaagcggaaggtagcaacacatacaacacggagaagcttcggaagctagggtggacctctaggcccatggaggacaccctccgagacagcatcgaatgctacagagctatgggcatcctgaactgagcttcccttcagctttgggctttggctgctgctgctgctactacttttcagtttctttcttcttcatttcatacgagggcctcaatcgtatattggattagacagaaaaggctaatcttactacattagtctgcaaattacaatcattttctactgctgccgtggcagcgtcgggagtcgaaactaccattaggaaaccctatgaggctatgacacctaattagcgacaattgtttcagcctgcaatcatctgcacaattaacataaccaaatcatatttgtttgtttagagaactaagttcagaacttcagatcaagatgtaattgctttgctgttatcgtctatttgctacattcaggcagactgctgctgctcctcttcggggggctctgccgcttgcccttgcggcgtctgccacatataagtcactgggtgaccctgctggccaccatacatcatacctgctccttgcacctgctgagctggcacatagtaatatggatgagaaccatgatcagctggagcccccatagcaggcggcaggccaactatgggattatgtccgagcccctcctctttcatttcatccctcgggattatgtccaccaggaagtcatatatatcagtcctggtgatggcagctgcaatgtcgttcttctgcaaggtccggcgcttgttctcctctgtgtgcatccatgacctcaatgtcagctctaatatgaatacctcgcatgccttcgcaaacacaacaggagcttctgcagagatcatccgcacatcctcatcagccttcattatcttctttatccttgcaagtggcaaggtgtggatcttgaagtcatttgcttgcttgatctcatccatctgggtagtccagaactccctgagctgttgttcctgctgttgctgaagttgttgatgaaattgctgagcctgctggtacaccatctggtgctgagcactgagttgagttggattggggaatgctgctgctggctgtgagccaggaggaacagcaagagatccaggtactggcacatagggagcagcagcaggataaggttgtgacccaacacccatcattggttgaggctgtgaggatggttccatgctagatctttgttcaaaatcaataagtgtcctgacccttggaaaacaattggaaatttgatcattttttccatccagataaacaagaaagactacaaaattacaggttataacacataaaaatgcaaaagatgtatttcaggttacaacactaaaaattctcagatctatgttgatggatgggattgggaatgccttttgtgtatgaaaaaaatcactggcctttatcttatttattcttgtagcttgaacgctactcttgagagcagcaaataatctaactgaagttacaaaagatgcttgcttgtaaaattccatcttaagcaaaaatccatcttaaagcaactgcagtggtgcaatagcgcattggtataacattttatcctggtggttgatttgggtatcacaaacacagaaacttccattaaacatggaacaaacatatggttacattgaacaagtgaaatcaaaagggagcgtatcctcaaagaataaacagcaactggtaaacagcaaggtagacaagatttacttttcttaaaaaaatcacaacatctattaacgttgtccctagttccctataatgcatgacaggaccgcaaaattacctttcatgctcccactttcaataatttaaaagtaggtatttgcacaaccagtcagtccctgccagtattggtcaaacaggttacggatattgcaaattgctttgatgatggaaaaaacaatttagtttgatggttgactttccattactctgttacagatagcaaaggcatatttaaagttttcataataatctcttttcaaaatcagataacggaaatgaggtttaaagttttcaaagtaatctcttttcaaaatcacttacaaaaaatgaggtttagtatgttctgcacataagcttaagctgggctacaactacctaaataaaacctcttaaataacatggtgatttggtggtttcctgggtagttggcttaagtggagtaaagctgacatgaacatcgcactgtgaataactcaacatcttccaaaaatcaatttcaatagacgcattggagcaaaatttcgcttgtaaattaagatttacgagatgaggggtccagaatcaaattaatcatcacatctaagatcattaaagggcaatcccgacccagtgttggaggctcccacatgagaggggtctgaaaaaaggataaaccaaagcaagccttctctcgcaaatgtgcaaatgtggagagactgattcgaacccgtgacctggtgactcaatgagacagctctcaccagtgcaccaaacgttgcagaaacgtaatccatctgcaatctggaactagcactcagaaaaagtacttaattcccatgtcacacttacagaaattacttgccaaacttaagataacatgcatgccattagttacaatattatgaaagatagcttaaagctcaaattctattaaggtgggtccttgctgagattggatgtgctagcgatttcatatgggacatatgacgatgtatagcaaggcattacccaggtctcctttccctacataggcacaaacatgattcgatggctgaaaggaatattctcgattcttgggagtacatg

SEQ ID NO: 199431 - DNA, 1222 bp, Zea Mays
gagcccaagccaactcacattgtcttttgtgctacacaggctaggatacttcagcagtcagcacctacatttcaagaaatgtacccacacgagcaaagttcaggcatggaaacatgggttccacaacaacaaccagcagtgctacaagggacagaagaggaaccaacatcttatgaatcagatgctactgctggtcaggagccagagaccctaactgctgctgactacctgcgtgaactggaccaactccgagaaaaatccagcgatgttgacaaaatgagctttcaggatgaacatgcatcctgtcttgccacgtgcagcacaggagacattgaagatgatccatacccagcctcctactctgacgatatggaaggcataggtgaagattctggtgccttcacttcttgtgttggcactaggtggttcagggctcctgagcttttatatgggtcaacaaactatgggctagagattgatctctggtcgcttggatgcattttggcagaactgatgaaattggaggctttgttcccagggatatctgatattgatcagattagtagaatcatcaatgtcctgggcgatataacagaagaaacctttccaggctgttcaaacttgccagattacaacaagatttcctttaacaaagttgagaaaccgacaggccttgaagcatgtctgcctaacagatctcctactgaggttagcatcataaagcagctaatttgctatgacacagcaaagaggaccagtgctgttgatctgctgaatgatcggtactttaccgaagagcccttgccggcacctatagaaggattacatgtcccggcatcaaaggacgaggatgatgacagctcaactgaagaatggggtaattacagggatggtgtctctcgggttgactttgatgagtttggtagtatggatgccaccaaaactgagaagggtttcagcatacagttttcgtgacgaagaaagacgtagacgtacggaccatgcgtgccatgtccaaactaagaccatatcatggtatttatctacatgggagttgaattgctgtcaacatagacgaacatcagtaagcgatcaaaggttgtgcaatgttgctttgggtttaacatttttttagtttctatggaactttgtgattctttgtacggcagaaccagttttttccctggcaagaataaaactgtgtgtggtagtctgaagttcc

SEQ ID NO: 199432 - DNA, 5282 bp, Zea Mays
cccgcccagcgccggggacagcgagaggcggacgaagccccgcgcggcgctccggtcgcctcaacatcttatccatccacccagctctcctccgacttcgccaagccccgcagccagataaaaagtacggcctcccctccggcgcgcgaacgcgacacggcgcagtgtctcctcgccctccggtggtcctcgtgcgcgcgcaccgacacgtcccggcgaaccgctccgttgtccgttccggtagtttcggtacgcgcgccgctcgccttggcgccatggcgtcggctgccgcttcggcggcggcggcgctggcgcggcacgtcctcctccccccgcgctaccacgcgtcgccgccctccgccgctcgccgggcccgcgccgcgcccgcgctcacctcggcgtcgccccgctgcgtcctccgtcgcgtgggtaggacgccccggtacgggacgaccgggaagaagaggactaggcgcttcggggctccgcgcgcggggatggacatggacctggccagcggcgccgtcgaggtgatcaacgacctgggcttcgacacgctcaccttcctcggcgtcacggtcctcgtcgtccccgccttccgcgtcgtcaaggccagcccaattctcggcttcttctgcgccggcgtcgtgctcaaccagttcggcctcatcaggaacctcaccgacgttaagctgctctccgagtggggaatccttttcctgctgtttgagatggggctggagctctccctctctcgcctcaaggctcttgcgaggtacgcctttgggatgggcttgcctcaggttcttttgtcaacccttgctttcacggcgttcgagcttcctcctaatgatgccataggaacaaagatattgcagtttctctttgattcaagacctgatcttgtgaacatcaggagtatcgatgaagcaatagtaattggagctgccctctcactatcttcatctgcttttgttctccagcttcttgccgagaaaggtgaacttccaacaagatttggttcagctacactgggaattcttctcctgcaggacattgcagttgtccccctgttggtcatactccctgtgctggagagtcagaatattatagagcaaagtgtgtggccaattttactagctgagagcttaaaggcactgggcgggcttggcttactttcccttggtgggaaatacttcataagacgtgtctttgagtttgttgcagagtcaaggagttcagaggcatttgttgcgctctgtcttcttacagtcgcagggacatcacttatcacccagaagctgggatttagtgatacattgggtgcatttctggctggagccattcttgcagaaacaaatttccggacacaaattgaagctgacataaggccattcaggggcttgttgcttgggctgttctttgtgactacagggacttccattgacatgcagcttctcatccgggagtggcctaatgttctgtcactgttggggggtcttattgtaatcaagacactgataatcaccgcaattgggcctagagtcgggttaactcttaaagaaagtgtaaggatagggctgctactttctcaaggaggcgagtttggatttgtggtgttttctttggcaaacaggctcggtgtcctaccacttgagttgaataaactgcttataattgttgttgtgctgtcgatggcattaactcccttactcaatgaagttggaagaagagtagcagggatgattgatgaaagatctgaagaaaaagaaaagcctgctgagatggtgaattatggtgccactgaacctgttgtaattcttggttttggagagatgggacaggtgcttgctaaatttttatctgcaccattgtcatttggaattgagaaagacacagaaggatggccatatgttgcattcgatctgaatcctgttgttgtaaagtcagctagaaaatcaggatttcctgtgctattcggagatggttcacgccctgcagttctgcaatctgctggcataacgtttccaaaagctatcatggttatgtatactggaaaggaaaaaacaattgagtctgtaagcagattgcgtcaagctttcactgcggttccgatatacgctagagctcaagacctctcacatttgttagatcttaagaaagcaggcgcaacagacgttgtcctggaaaatgccgagaccagcttgcagctaggttcaatacttttgaaaggactgggcgtcatgtctgatgatgtatccttcttgagtaagcttgtgagggactcaatggagctacaagctcaggaagcactgaaagacattggggaccaagaagttgatattatgaagcctcttcaggtaagagtgtcagatttagtggagagcaatggtaatagttcaagaatggtagccccagagcagtcgttaagtctaagtagccgcccagacataaaggcaataaaaccaccagtggcgaatgggatacctgatatgaaggtggaaaatgacaagacaggatacgattttgacagggtggattctgaaaatggtgtgacatactgtctattggaatctgatgaccaaagcgatgaagcctccagtacaagcaaggaaatgatcgatcagtctgctgatacaagggttaatgtcaatgataagaagatactctagctctacttgtaggatcaagttcattggtgattggctgatcgctgggctgatcagaactgccgcatttcttgcagctcctataggtttcttgaagcacttctaaagactgcaatactgcatttaagttcctggtacatggagtccatgtctcttggtgccaaccaagctggatgcagatcagtagtccatggagccgaaatccggctccggcggcctgggaagcatgatgaggctgtcggcccggacggatcgctggcgctgcacgccgcgcatggcgttcttggcgaagcgcgacacgaggagcgtggtcttgaacctgctcgtggaaaccccggacgagtcggcctccatctcctcctcccggcgccgctgctcggccgccttccgcttgaggtacctcctccatgcggcctgtatgaagcaggaggcccaggtgcgccactgctgcgagtagaagcggaaggtctgctgcagctgcttgctgtgcaggcgccggaactgccccgccacgaacttgagctcgtcagcgcgcagcgcgaacgcctccacctcggagatggccctaacggtgcgcgtggacagcgggaagttggcgccggcctttgggtcgagcgcccacgtgagtagctcctccccgcagaagtcgccctccttgagcagcccccggttgtagaaccccatccggccgccgtcggtggtggagctctcgaggcggccgcgaatgatgaagagcatctcgtcgacggggtccccctcgcgcacgatgtaggtggactcggtgcagaggctgggcttgaggcgctcgcagatagcgtcgaggaggcgctcgtccatgttggcgaagagcgggacgcggcggacgaggcggaggcagaggtgccgcttgacgtcgcggcgcaggtccttgggcaggctgcgcacgaggctgtcctcgtcgacgccgcgcgtctcgagccacttgtactggttgtgccgccacacccgctcccggagctcgtcggggaggacgcggtggtgcatccactgctccgagtccctgcgcttgaggcgcatctcctccaggcgcagcgtcatggactgcaggtacgtctgcatgttgccgatgaggagcgccatgaggatgaggcccagcagcgcgagcgtgatggagaagagctgctcccccttgtagtgggtcgtctccaggccctggccgatggtgctcaggttctgcaggccccaccagaggcagaagaggatcttggccgtcaggttctccgtggagtagacgcccgactggatggccgtggtgtagatgccgtaggggaaccccgtgccgctgccgtcgacgggggcgcactcctgcgccagcacctgccggatcatggtgcgccactcgaggaagcccgactggccctggctgccgccgccgcagtacatgtaggtgcggcactggtggaagttgaggttggtgcacttgtcccgccagcagtcgtccagccgctcgatggccagcaggtaccagaaggcccccaccatgtggctggccagcatgtagagcagcaggtagaaggcggcgccgccgaaggccgtctcggcgaacacccccgtggtgcgcttcagctccgaggtgatggggtagaagcgcaccaggcggggcacgtactgcgacagcaccgtgaagagcagcgcgttcttggtgggcagcaggtccgcgcccttgggccggttgaggaagttccagatggagacctgcggcagcggcagcacggacagcaggtcgacggcgaagaatcggcgcaggtagcggcgcgcgatggcggacgagtcgatgaccagctcgccgcgcccgaacacgcgcgacgacggcgcgatgtacgccgtccggaactgcagcgcgatccgcgccaggtagaaggcgtccacggcggtgcgcaccacggtggcgacggtggccaggttgcggtcgaagccgatgcaggtgttcttgtccgtgtacttgacggccaggaggtagaggaagagcgggtcgatggccacggacacgatgcacgcgaagacgaaggcgcggttcatgcgcgccaggaacgcgtcctgcgggtcgaacacctgctgcgacatcttccggaagtcctcctggaacacgaggccgatgctcctcagccgctccgaccggttcatcacgcccgccgccacccgaaccgaccgcgcacggaacttggcggcggccgccgccgggttgcccgagaagtagctgtccatgtggaacccgccgccgtgcccgtgcccgtgcccgtgctccatgctggcaccgccgccgctgccggaagtggggctggacgccgaatccgccggcgcgtctgcctcgacgagcctcacgaacttctccctgcgcccgttgatgaactgggtccggtagccgcacccgaacatctatcgccttcttgctcccggactacgggacatcatctatccaacaccactgatcgggacggcgccagtttacttggtcgatcgatgatgcagcaggcaacaattaagttgctcgatctcttctccgatcctcgtccctcgatcgatcttgcaggaaggagcgccgcgcgtgaaagaaggcgaggccgtgagcgcaag

SEQ ID NO: 199433 - DNA, 3802 bp, Zea Mays
cccgcccagcgccggggacagcgagaggcggacgaagccccgcgcggcgctccggtcgcctcaacatcttatccatccacccagctctcctccgacttcgccaagccccgcagccagataaaaagtacggcctcccctccggcgcgcgaacgcgacacggcgcagtgtctcctcgccctccggtggtcctcgtgcgcgcgcaccgacacgtcccggcgaaccgctccgttgtccgttccggtagtttcggtacgcgcgccgctcgccttggcgccatggcgtcggctgccgcttcggcggcggcggcgctggcgcggcacgtcctcctccccccgcgctaccacgcgtcgccgccctccgccgctcgccgggcccgcgccgcgcccgcgctcacctcggcgtcgccccgctgcgtcctccgtcgcgtgggtaggacgccccggtacgggacgaccgggaagaagaggactaggcgcttcggggctccgcgcgcggggatggacatggacctggccagcggcgccgtcgaggtgatcaacgacctgggcttcgacacgctcaccttcctcggcgtcacggtcctcgtcgtccccgccttccgcgtcgtcaaggccagcccaattctcggcttcttctgcgccggcgtcgtgctcaaccagttcggcctcatcaggaacctcaccgacgttaagctgctctccgagtggggaatccttttcctgctgtttgagatggggctggagctctccctctctcgcctcaaggctcttgcgaggtacgcctttgggatgggcttgcctcaggttcttttgtcaacccttgctttcacggcgttcgagcttcctcctaatgatgccataggaacaaagatattgcagtttctctttgattcaagacctgatcttgtgaacatcaggagtatcgatgaagcaatagtaattggagctgccctctcactatcttcatctgcttttgttctccaggtgtgcactctatttagtaattacatcagtaatcattctttgaagtattgagtttatccatagtttcacatttgtagcttgtctattttcggtgaatggcttgactcacgacatgcactctaacatctatgcatacagtggcattttagttacacaaatcattcacgcaacttgtcatgcttacaacagttacattttttaaaactttttgcacttggtgattgattatgaataccatctgcagcttcttgccgagaaaggtgaacttccaacaagatttggttcagctacactgggaattcttctcctgcaggacattgcagttgtccccctgttggtcatactccctgtgcatgtctcttggtgccaaccaagctggatgcagatcagtagtccatggagccgaaatccggctccggcggcctgggaagcatgatgaggctgtcggcccggacggatcgctggcgctgcacgccgcgcatggcgttcttggcgaagcgcgacacgaggagcgtggtcttgaacctgctcgtggaaaccccggacgagtcggcctccatctcctcctcccggcgccgctgctcggccgccttccgcttgaggtacctcctccatgcggcctgtatgaagcaggaggcccaggtgcgccactgctgcgagtagaagcggaaggtctgctgcagctgcttgctgtgcaggcgccggaactgccccgccacgaacttgagctcgtcagcgcgcagcgcgaacgcctccacctcggagatggccctaacggtgcgcgtggacagcgggaagttggcgccggcctttgggtcgagcgcccacgtgagtagctcctccccgcagaagtcgccctccttgagcagcccccggttgtagaaccccatccggccgccgtcggtggtggagctctcgaggcggccgcgaatgatgaagagcatctcgtcgacggggtccccctcgcgcacgatgtaggtggactcggtgcagaggctgggcttgaggcgctcgcagatagcgtcgaggaggcgctcgtccatgttggcgaagagcgggacgcggcggacgaggcggaggcagaggtgccgcttgacgtcgcggcgcaggtccttgggcaggctgcgcacgaggctgtcctcgtcgacgccgcgcgtctcgagccacttgtactggttgtgccgccacacccgctcccggagctcgtcggggaggacgcggtggtgcatccactgctccgagtccctgcgcttgaggcgcatctcctccaggcgcagcgtcatggactgcaggtacgtctgcatgttgccgatgaggagcgccatgaggatgaggcccagcagcgcgagcgtgatggagaagagctgctcccccttgtagtgggtcgtctccaggccctggccgatggtgctcaggttctgcaggccccaccagaggcagaagaggatcttggccgtcaggttctccgtggagtagacgcccgactggatggccgtggtgtagatgccgtaggggaaccccgtgccgctgccgtcgacgggggcgcactcctgcgccagcacctgccggatcatggtgcgccactcgaggaagcccgactggccctggctgccgccgccgcagtacatgtaggtgcggcactggtggaagttgaggttggtgcacttgtcccgccagcagtcgtccagccgctcgatggccagcaggtaccagaaggcccccaccatgtggctggccagcatgtagagcagcaggtagaaggcggcgccgccgaaggccgtctcggcgaacacccccgtggtgcgcttcagctccgaggtgatggggtagaagcgcaccaggcggggcacgtactgcgacagcaccgtgaagagcagcgcgttcttggtgggcagcaggtccgcgcccttgggccggttgaggaagttccagatggagacctgcggcagcggcagcacggacagcaggtcgacggcgaagaatcggcgcaggtagcggcgcgcgatggcggacgagtcgatgaccagctcgccgcgcccgaacacgcgcgacgacggcgcgatgtacgccgtccggaactgcagcgcgatccgcgccaggtagaaggcgtccacggcggtgcgcaccacggtggcgacggtggccaggttgcggtcgaagccgatgcaggtgttcttgtccgtgtacttgacggccaggaggtagaggaagagcgggtcgatggccacggacacgatgcacgcgaagacgaaggcgcggttcatgcgcgccaggaacgcgtcctgcgggtcgaacacctgctgcgacatcttccggaagtcctcctggaacacgaggccgatgctcctcagccgctccgaccggttcatcacgcccgccgccacccgaaccgaccgcgcacggaacttggcggcggccgccgccgggttgcccgagaagtagctgtccatgtggaacccgccgccgtgcccgtgcccgtgcccgtgctccatgctggcaccgccgccgctgccggaagtggggctggacgccgaatccgccggcgcgtctgcctcgacgagcctcacgaacttctccctgcgcccgttgatgaactgggtccggtagccgcacccgaacatctatcgccttcttgctcccggactacgggacatcatctatccaacaccactgatcgggacggcgccagtttacttggtcgatcgatgatgcagcaggcaacaattaagttgctcgatctcttctccgatcctcgtccctcgatcgatcttgcaggaaggagcgccgcgcgtgaaagaaggcgaggccgtgagcgcaag

SEQ ID NO: 199434 - DNA, 1882 bp, Zea Mays
caggcccacgcatcgaaccccgtgagtgttcgccgacgtggcccggcgtcagcgtcgcgtcgatctctctgccgaggacctcgctctccaccaagaggcggtcagcgctgcccgacggcaccgtcgcctctagggcatcgaacaccgtcgagtagtagcccatcgccgcggtcacccgctatggcaggtcatcggagcagtcgtcgctgccggtgctgttggcttccttctcaacgatggtcaccacggcggggttcatggatttaacccacttcaggaatgtaccttgacttcgtccgggagaagcagaaactggtctcgtgaatccttctaagctcctgaccagcattgacgaacagatagcggaaagccagggaggagccgtccaggagagaaatcatggagaagataaacaagtggctgctggcttgcgaggaagagaaatggctggatgagtacaatatggtaggtccaaaatgtgggtttggatacatcgaacactgatttcaaatgtggaagacagataaagaccaggcaaactatattgaatgggagaggataaagccaatcaacatatgagaggtcgccgtcgcaggctgcgcagcaggtgtcgccccagcagcaatataggcggtggtggctgtgcgggcccaggcactggcccaggtgacgcgggtacgaagcctcgagatggagttcagcttccttgtttttttcaatttttgttgcttgctcaaaagctcttctcatattttctcggttctctctatttttttgtattttgtacataacatttttatttcgtattaccttgttcaaattctgcaacttactccccccaaaaatgcaaaatttgttgttttgtcgattatacaggcaagccaaagaggtcgggctgcaggctgtagctgccgccgagctgctcctggcgcttctggttccagtcgccaactcatcagatgtactatatagatatagaccgtgaactttgtattgatgattttctttgtggtgatgattacaaaataaatatttctgaactaatgaagatcagttcaataacctgcatgggattagccaattggaacatcaaaagtctgatgccctcgccttgtaccgtcttgagtacaagtcctctagctccaaaagaagcgtcaggtcaaaactgtccagtagtccactgaatgaaatccagcagcaaatgggcaggctgactgcagacagtcctgtggagaacaaacggactgctaggagcaagccaaaggctaaccagaaggataccaatgcaaatattcatccccatgttaacgcccccaatcaagttaatgctccaaatgcttatcaagcaacaccgcaggtgaaccaaatgacacttatgaatgggaacgttgtttatggacctcatctcccacattctgaagacgtcatctatggacctcatcttccacatggatactcagctgaaggaagcagcttcttttggaacacaagtgactatcaatatacataaaagttgctaacaaaaactatcacatttttctcaaagatcagttcaaattaaagtgctcttattctgtgtttaagcgacttatttctgtatattgcggaatgtctgaagcttatgttcactgtttgatctgctgctgctgaataatgttgccagcctagggttcatgtcacttttcatctgcatttttactacaagcatcctagaaatgagatggagtggtgttggaattgatgacacatgtgtgcgatttgaaaaacacctgttttgtgttgtgcttccttgcattctctacaacaatgtaatagattactatgccttttctgtaatactttttatctgaatttttttataatatttatatcttacaacaaa

SEQ ID NO: 199435 - DNA, 1677 bp, Zea Mays
cccacgcatcgaaccccgtgagtgttcgccgacgtggcccggcgtcagcgtcgcgtcgatctctctgccgaggacctcgctctccaccaagaggcggtcagcgctgcccgacggcaccgtcgcctctagggcatcgaacaccgtcgagtagtagcccatcgccgcggtcacccgctatggcaggtcatcggagcagtcgtcgctgccggtgctgttggcttccttctcaacgatggtcaccacggcggggttcatggatttaacccacttcaggaatgtaccttgacttcgtccgggagaagcagaaactggtctcgtgaatccttctaagctcctgaccagcattgacgaacagatagcggaaagccagggaggagccgtccaggagagaaatcatggagaagataaacaagtggctgctggcttgcgaggaagagaaatggctggatgagtacaatatggtaggtccaaaatgtgggtttggatacatcgaacactgatttcaaatgtggaagacagataaagaccaggcaaactatattgaatgggagaggataaagccaatcaacatatgagaggtcgccgtcgcaggctgcgcagcaggtgtcgccccagcagcaatataggcggtggtggctgtgcgggcccaggcactggcccaggtgacgcgggcaagccaaagaggtcgggctgcaggctgtagctgccgccgagctgctcctggcgcttctggttccagtcgccaactcatcagatgtactatatagatatagaccgtgaactttgtattgatgattttctttgtggtgatgattacaaaataaatatttctgaactaatgaagatcagttcaataacctgcatgggattagccaattggaacatcaaaagtctgatgccctcgccttgtaccgtcttgagtacaagtcctctagctccaaaagaagcgtcaggtcaaaactgtccagtagtccactgaatgaaatccagcagcaaatgggcaggctgactgcagacagtcctgtggagaacaaacggactgctaggagcaagccaaaggctaaccagaaggataccaatgcaaatattcatccccatgttaacgcccccaatcaagttaatgctccaaatgcttatcaagcaacaccgcaggtgaaccaaatgacacttatgaatgggaacgttgtttatggacctcatctcccacattctgaagacgtcatctatggacctcatcttccacatggatactcagctgaaggaagcagcttcttttggaacacaagtgactatcaatatacataaaagttgctaacaaaaactatcacatttttctcaaagatcagttcaaattaaagtgctcttattctgtgtttaagcgacttatttctgtatattgcggaatgtctgaagcttatgttcactgtttgatctgctgctgctgaataatgttgccagcctagggttcatgtcacttttcatctgcatttttactacaagcatcctagaaatgagatggagtggtgttggaattgatgacacatgtgtgcgatttgaaaaacacctgttttgtgttgtgcttccttgcattctctacaacaatgtaatagattactatgccttttctgtaatactttttatctgaatttttttataatatttatatcttacaacaaa

SEQ ID NO: 199436 - DNA, 1021 bp, Zea Mays
ccgccatcaaaaccggcatgcagccattagaagagatgcttcctcttccccgagacctattcgacattaggtattcagttcggttcttgggagagccagtctgctgctgcttgcggtgactggcaccagcgcgcaaggcttcctagagaccatctacctgcgccgttccgatgggttgcttcgggtgcttcgcgccggaggcggacgaggaccttaggccctccaagcacgacgattcgtcaggggctgatgcgaggaggaaggtcgcgccggatgtggccagcggctacgcgcacagcttcaccttcaaggatctgcttgtggcaactggctacttcaacgaggccaatttcataggagaaggtggattcgggaaggtgtacaagggcaagatcaacggacagtgaagcagctcgctcgagacgctcgagacggagttcttggtcgaggtgctcatgctgacggtgctcaaccatcgcaaccttgtcagcttggtcgggttctacgcgtggacgagaggctgttgcctgctggtctatgagtacatgccgttcggaagcctggagagccatctgtttgacaatcctaaggtctaaggatacagccgggtggcgttatggattcacggccttatttctttctgtgagatctttagaattctttcagggaatggaatgcatatggagcttttcttccatgttaaatggcagtgactctgtcatatctttctaccatccactatttgtggacccatctatacactaaacacacttaaatgttttctagaccgcggagcacgcacaatttactagttaagatatagtttagtttcacaacaatggccgatatagcagaagccaagtgttatgatgatttgttttttcaattctatgttgtgttattggttcagcatgcacatatattgacatgatttatggcatggcatctgccatctttgttatatttatgacatcgttcttgattgatgtgtgcgacatgaatgatggatctttttaacatc

SEQ ID NO: 199437 - DNA, 1590 bp, Zea Mays
cacgaaaccaaacaaagaaaaacccgtgggccgtggtcactccgtccgcacggcgactggactatactgctaccatgaacctcgccgtcgcagccgcactgccgtccgtgacgccacgtaccggcgtcgtgctcccacggagcagtcgccgacactgcccccgcggggtcgtcccacgcgcggcctcgagctccgtttcctcctttacctccccctcagcagcggcggcgcccatctacacgcccacgccgcaggaccggtctctccggacgccgcatagcgggtaccactttgatggcacggctcgacctttctttgaaggatggtacttcaaggtgtcgattccagagtgcaggcagagtttctgctttatgtactctgttgagaaccctctcttccgtgatggtatgagtgatttggacaagttgttatatcgcccacgctttactggtgtgggagcacaaatccttggtgcggacgataagtacatatgccagttctctgagaaatcaaacaatttttggggaagatggatagaatgggatggagaacggtttgaatttgaaaatgctccatcttactcagaaaagaactggggcggaggttttccaagaaagtgatccagtgcaatgtcttcccaggagcttctggtgaagtttctttaactgctgctggtggattgaggaaaattggacttggtgatacctatgaaagtccttcactgactgaattggtgagggagacaggagacattgcacaagggagaagctgactagagcacatgcttcaggcgtgcatcggggtgtgaggggcaatggctagacggtggtaaagagatgagggagaaggtattggaatacattatgagggacagttttttgaatttgtaccttggactggaacagtaagctgggacattggactgtggggtctttggaaaatgtctggcgagaacaaaactcatctggtagaaatagaagcaaccactgcagaatcaggaactgctctgcgcgctcctactatcgaggctggactggtaccagcgtgcaaagacacctgctatggagatctaaggctacagttgtgggaaaagaaatacgatggtagcaagggagagatgatactcgacgccacaagcaacatggcagcactagaagttggcggaggcccctggttcaatgggtggaaagggacaactgttgtgaacgaggttgtaaataacattgtgggcacgccagtcgatgtagagagcctcctcccaatcccatttcttaagcccccaggcctataggatcaccaacgaatgtcacaatgaagaagtatcacggatatcaatgttgatcatacagtaaaactgtgcccagttcaataataattcatgatttttacttgttttttactacaatccacaaactatctgccgttgcatgtgcatcgacatcattgttagctcacagttttcccttctttttcgaaggcgggatgattttcacagaaccttctattgttggggtagactaactatttcaagactgatagaccgaactctgaatatatggcaaaatgggacatgaatctatagtagggtca

SEQ ID NO: 199438 - DNA, 583 bp, Zea Mays
ctgtgtgttcgagaaaaaattgaggatggatagaatgggatggagaacggtttgaatttgaaaatgctccatcttactcagaaaagaactggggcggaggttttccaagaaagtggtattggatccagtgcaatgtcttcccaggagcttctggtgaagtttctttaactgctgctggtggattgaggaaaattggacttggtgatacctatgaaagtccttcactggtagaaatagaagcaaccactgcagaatcaggaactgctctgcgcgctcctactatcgaggctggactggtaccagcgtgcaaagacacctgctatggagatctaaggctacagttgtgggaaaagaaatacgatggtagcaagggagagatgatactcgacgccacaagcaacatggcagcactagaagttggcggaggcccctggttcaatgggtggaaagggacaactgttgtgaacgaggcgggatgattttcacagaaccttctattgttggggtagactaactatttcaagactgatagaccgaactctgaatatatggcaaaatgggacatgaatctatagtagggtca

SEQ ID NO: 199439 - DNA, 3628 bp, Zea Mays
cgaaacgaaacccatctccgcaagggcagcaaccctaccgggaccggcagctcgctcgccttgcgccgcgcattcccaccacgcgtctccccaaattcgcggccgtctatatatataaagaccccgcccaccaccacttttgccatcgcaacccctcgtccttttttgcacagcggccatgcctcccctcacgagctccctcctctcccgctccaccaccggcggctcctccgcccgcggcgtggcggtggccgcagcgatctccaggcccgccgcggacgccgccccttcctcctcgtccccgcctgcccgtccgaccccgaggccgcgcccaagcccggcgtcgcccttcgcgtccggcctcgcgggccgcctcttcggcggccaccgcgccgccacccgctccgcgtcgtctgcggccgccgtcttcgagcgccggtttgcctcagccgcgaccaggaactcgtacgatgaaatactgacgggcctcgggaggccaggaggcggagaggagtttggcaagtactacagcctgcctgctctctccgatccgcggattgatcggctcccatattctatcaggattcttctcgagtcggcgatcaggaactgcgatgatttccaggtcaccgggaaggatgttgagaagatcttggactgggagagaagtgcaccgaagcaagttgaaatcccgttcaagcccgcccgtgtcctcctccaggattttactggtgtcccggctgttgtcgaccttgcgtgcatgagggatgctatgagcaaactcggcagcgacccgaacaaaattaatcctctggtacctgtagaccttgttattgaccattcagtacaagtcgacgtggcaagatcagcaaatgctgctcaggcaaatatggagcttgagttctatcgtaacaaggaacggtttgggttcttgaaatgggggtcctctgcattccgcaacatgcttgttgttccacctggatctggcattgttcaccagcgtcgtaggcactgactcccacacaactatgatagatggtcttggagttgctgggtggggagttggtggtatagaggcggaagctgcaatgcttggccagccaatgagcatggtcttgccaggggttgttggcttcaagttatcaggcaagctgaggaatggagttacagccactgacttggttctaacagtaacccaaatgcttcggaaacatggtgttgtcgggaaatttgttgagttctatgggcaaggcatgagtgaattgtcacttgctgatcgggcgaccatcgcaaatatgtctcccgaatatggcgcaactatgggtttcttcccagttgatggaaagacgctggactatttgaagcttactggccgaagtgatgatacagtggccatggttgagtcctacctgcgtgcgaataagatgttcgttgatcacagccaggctgaagctgaaagagtatattcttcttatctagaactgaacctggaagaggtagaaccatgtctatcgggaccaaaacggcctcacgatcgagtgacattgaagaatatgaagtctgactggctttcttgcttggatagcgatgtaggattcaagggttttgctgtccccaaagagtcacaaggcaaagttgcagaatttttgttccacgggactcctgcaaagataaagcatggtgatgttgtaattgcagcaataaccagttgcacaaacacatcaaatcctaatgtaatgctgggagctgctttggttgccaagaaggcttgtgagttaggcctggaggtaaagccatggattaagacgagccttgcacctggttctggtgttgtgaagcagtacttggataagagcgggttgcagaaatatcttgaccagcttggcttcaatattgttggctatggttgcacaacctgcattggaaattccggggagcttgatgaatccgtatctgctgcaattactgagaatgatattgtttctgctgctgtattgtccggaaacaggaattttgaaggacgtgtgcatcccttaactagagcaaattaccttgcttcccctccattagttgttgcttatgccttggctggcacggttaatattgattttgagaaagaacctattggaatctcgaaagatgggaaagaggtttacttccgggatgtttggccatcaacagaagagatagccgaggttgtcaagtcaagtgtgcttcctgacatgttcaagagcacatatgagtccatcacccaaggaaatcctatgtggaatgagctgccagtctcaacaagcactctctatccctgggatccatcatctacatacatccatgagcctccttacttcaaggatatgacaatgactcctcctggcccgcgaccagtgaaggatgcatattgccttctgaactttggtgacagtatcacaactgaccacatctcgcctgccggaaacattcacccagacagcgcagctgcaacatatctgaaggagcgtggtgttgaaaggaaggacttcaactcatatggtagccgaagaggaaatgatgagatcatggctaggggaacctttgccaacattcgtctcgtgaataagttcttgaagggtgaggttggacccaagacaatccatgttccatctggggataagctttcagtttttgatgctgctatgaaatacaagaatgaagggcatgatactattatcctggctggtgccgagtacgggagtggtagctctcgggattgggctgcaaagggcccaatgcttcagggagtgaaggctgtgatagcaaagagctttgagaggattcaccgcagcaatcttgctggcatgggaatcatccctctatgcttcaaagcaggggaggatgcagacaccctgggcctaaccggccatgagcgctacacggtccaccttccaaccaatgtgagtgagataaagcctggccaagatgttaccgtgacaactgataatgggaagtcgttcacttgcacactcagattcgacactgaggtggagcttgcttactacgaccatggtggcattctaccatatgtcatcagaaagattgcggaacagtagattgagatgattgcgatgcggtgaatcgtaattggtgtaaacgacccatttttgagtacttataataacctctgagtttctcagagtgagctgtctgaacttttagtaaccttttgctttctttaagacactgttaataatatgttaactcctgcaatatctgaatatacatttggcagatgattccctatgttgtaaatgacactagttcataacactgacgcagttcaaagcggttcttgttatctggtggtactcaaattagtactgcaaacaatcgattagctgattttattttgagttttgtattacgaacctttttgactggtgaaacggttattccatttgcttcaagcgatttggaaatgattgttacagaaagctgtttgttacagtgagtgtattttgcctcttaccagctaacgtttcactttcacgagcgactggcaatgaccctgaagcaatgacaggatacataagcagcttcagcaggccaaggcaactgatgcgaggtcggtacgtgattttgggagtggctccat

SEQ ID NO: 199440 - DNA, 3417 bp, Zea Mays
aagcttcagctcggctgtccaccgcggcggcggcggggaacggcgtgagcgcaggacgaaacgaaacgaaacccatctccgcaagggcagcaaccctaccgggaccggcagctcgctcgccttgcgccgcgcattcccaccacgcgtctccccaaattcgcggccgtctatatatataaagaccccgcccaccaccacttttgccatcgcaacccctcgtccttttttgcacagcggccatgcctcccctcacgagctccctcctctcccgctccaccaccggcggctcctccgcccgcggcgtggcggtggccgcagcgatctccaggcccgccgcggacgccgccccttcctcctcgtccccgcctgcccgtccgaccccgaggccgcgcccaagcccggcgtcgcccttcgcgtccggcctcgcgggccgcctcttcggcggccaccgcgccgccacccgctccgcgtcgtctgcggccgccgtcttcgagcgccggtttgcctcagccgcgaccaggaactcgtacgatgaaatactgacgggcctcgggaggccaggaggcggagaggagtttggcaagtactacagcctgcctgctctctccgatccgcggattgatcggctcccatattctatcaggattcttctcgagtcggcgatcaggaactgcgatgatttccaggtcaccgggaaggatgttgagaagatcttggactgggagagaagtgcaccgaagcaagttgaaatcccgttcaagcccgcccgtgtcctcctccaggattttactggtgtcccggctgttgtcgaccttgcgtgcatgagggatgctatgagcaaactcggcagcgacccgaacaaaattaatcctctggtacctgtagaccttgttattgaccattcagtacaagtcgacgtggcaagatcagcaaatgctgctcaggcaaatatggagcttgagttctatcgtaacaaggaacggtttgggttcttgaaatgggggtcctctgcattccgcaacatgcttgttgttccacctggatctggcattgttcaccaggtgaatcttgaatatctggcaagggttgtgtttaataatggtgggatcctttaccctgacagcgtcgtaggcactgactcccacacaactatgatagatggtcttggagttgctgggtggggagttggtggtatagaggcggaagctgcaatgcttggccagccaatgagcatggtcttgccaggggttgttggcttcaagttatcaggcaagctgaggaatggagttacagccactgacttggttctaacagtaacccaaatgcttcggaaacatggtgttgtcgggaaatttgttgagttctatgggcaaggcatgagtgaattgtcacttgctgatcgggcgaccatcgcaaatatgtctcccgaatatggcgcaactatgggtttcttcccagttgatggaaagacgctggactatttgaagcttactggccgaagtgatgatacagtggccatggttgagtcctacctgcgtgcgaataagatgttcgttgatcacagccaggctgaagctgaaagagtatattcttcttatctagaactgaacctggaagaggtagaaccatgtctatcgggaccaaaacggcctcacgatcgagtgacattgaagaatatgaagtctgactggctttcttgcttggatagcgatgtaggattcaagggttttgctgtccccaaagagtcacaaggcaaagttgcagaatttttgttccacgggactcctgcaaagataaagcatggtgatgttgtaattgcagcaataaccagttgcacaaacacatcaaatcctaatgtaatgctgggagctgctttggttgccaagaaggcttgtgagttaggcctggaggtaaagccatggattaagacgagccttgcacctggttctggtgttgtgaagcagtacttggataagagcgggttgcagaaatatcttgaccagcttggcttcaatattgttggctatggttgcacaacctgcattggaaattccggggagcttgatgaatccgtatctgctgcaattactgagaatgatattgtttctgctgctgtattgtccggaaacaggaattttgaaggacgtgtgcatcccttaactagagcaaattaccttgcttcccctccattagttgttgcttatgccttggctggcacggttaatattgattttgagaaagaacctattggaatctcgaaagatgggaaagaggtttacttccgggatgtttggccatcaacagaagagatagccgaggttgtcaagtcaagtgtgcttcctgacatgttcaagagcacatatgagtccatcacccaaggaaatcctatgtggaatgagctgccagtctcaacaagcactctctatccctgggatccatcatctacatacatccatgagcctccttacttcaaggatatgacaatgactcctcctggcccgcgaccagtgaaggatgcatattgccttctgaactttggtgacagtatcacaactgaccacatctcgcctgccggaaacattcacccagacagcgcagctgcaacatatctgaaggagcgtggtgttgaaaggaaggacttcaactcatatggtagccgaagaggaaatgatgagatcatggctaggggaacctttgccaacattcgtctcgtgaataagttcttgaagggtgaggttggacccaagacaatccatgttccatctggggataagctttcagtttttgatgctgctatgaaatacaagaatgaagggcatgatactattatcctggctggtgccgagtacgggagtggtagctctcgggattgggctgcaaagggcccaatgcttcagggagtgaaggctgtgatagcaaagagctttgagaggattcaccgcagcaatcttgctggcatgggaatcatccctctatgcttcaaagcaggggaggatgcagacaccctgggcctaaccggccatgagcgctacacggtccaccttccaaccaatgtgagtgagataaagcctggccaagatgttaccgtgacaactgataatgggaagtcgttcacttgcacactcagattcgacactgaggtggagcttgcttactacgaccatggtggcattctaccatatgtcatcagaaagattgcggaacagtagattgagatgattgcgatgcggtgaatcgtaattggtgtaaacgacccatttttgagtacttataataacctctgagtttctcagactaacgtttcactttcacgagcgactggcaatgaccctgaagcaatgacaggatacataagcagcttcagcaggccaaggcaactgatgcgaggtcggtacgtgattttgggagtggctccat

SEQ ID NO: 199441 - DNA, 3754 bp, Zea Mays
gcgaagcttcagctcggctgtccaccgcggcggcggcggggaacggcgtgagcgcaggacgaaacgaaacgaaacccatctccgcaagggcagcaaccctaccgggaccggcagctcgctcgccttgcgccgcgcattcccaccacgcgtctccccaaattcgcggccgtctatatatataaagaccccgcccaccaccacttttgccatcgcaacccctcgtccttttttgcacagcggccatgcctcccctcacgagctccctcctctcccgctccaccaccggcggctcctccgcccgcggcgtggcggtggccgcagcgatctccaggcccgccgcggacgccgccccttcctcctcgtccccgcctgcccgtccgaccccgaggccgcgcccaagcccggcgtcgcccttcgcgtccggcctcgcgggccgcctcttcggcggccaccgcgccgccacccgctccgcgtcgtctgcggccgccgtcttcgagcgccggtttgcctcagccgcgaccaggaactcgtacgatgaaatactgacgggcctcgggaggccaggaggcggagaggagtttggcaagtactacagcctgcctgctctctccgatccgcggattgatcggctcccatattctatcaggattcttctcgagtcggcgatcaggaactgcgatgatttccaggtcaccgggaaggatgttgagaagatcttggactgggagagaagtgcaccgaagcaagttgaaatcccgttcaagcccgcccgtgtcctcctccaggattttactggtgtcccggctgttgtcgaccttgcgtgcatgagggatgctatgagcaaactcggcagcgacccgaacaaaattaatcctctggtacctgtagaccttgttattgaccattcagtacaagtcgacgtggcaagatcagcaaatgctgctcaggcaaatatggagcttgagttctatcgtaacaaggaacggtttgggttcttgaaatgggggtcctctgcattccgcaacatgcttgttgttccacctggatctggcattgttcaccaggtgaatcttgaatatctggcaagggttgtgtttaataatggtgggatcctttaccctgacagcgtcgtaggcactgactcccacacaactatgatagatggtcttggagttgctgggtggggagttggtggtatagaggcggaagctgcaatgcttggccagccaatgagcatggtcttgccaggggttgttggcttcaagttatcaggcaagctgaggaatggagttacagccactgacttggttctaacagtaacccaaatgcttcggaaacatggtgttgtcgggaaatttgttgagttctatgggcaaggcatgagtgaattgtcacttgctgatcgggcgaccatcgcaaatatgtctcccgaatatggcgcaactatgggtttcttcccagttgatggaaagacgctggactatttgaagcttactggccgaagtgatgatacagtggccatggttgagtcctacctgcgtgcgaataagatgttcgttgatcacagccaggctgaagctgaaagagtatattcttcttatctagaactgaacctggaagaggtagaaccatgtctatcgggaccaaaacggcctcacgatcgagtgacattgaagaatatgaagtctgactggctttcttgcttggatagcgatgtaggattcaagggttttgctgtccccaaagagtcacaaggcaaagttgcagaatttttgttccacgggactcctgcaaagataaagcatggtgatgttgtaattgcagcaataaccagttgcacaaacacatcaaatcctaatgtaatgctgggagctgctttggttgccaagaaggcttgtgagttaggcctggaggtaaagccatggattaagacgagccttgcacctggttctggtgttgtgaagcagtacttggataagagcgggttgcagaaatatcttgaccagcttggcttcaatattgttggctatggttgcacaacctgcattggaaattccggggagcttgatgaatccgtatctgctgcaattactgagaatgatattgtttctgctgctgtattgtccggaaacaggaattttgaaggacgtgtgcatcccttaactagagcaaattaccttgcttcccctccattagttgttgcttatgccttggctggcacggttaatattgattttgagaaagaacctattggaatctcgaaagatgggaaagaggtttacttccgggatgtttggccatcaacagaagagatagccgaggttgtcaagtcaagtgtgcttcctgacatgttcaagagcacatatgagtccatcacccaaggaaatcctatgtggaatgagctgccagtctcaacaagcactctctatccctgggatccatcatctacatacatccatgagcctccttacttcaaggatatgacaatgactcctcctggcccgcgaccagtgaaggatgcatattgccttctgaactttggtgacagtatcacaactgaccacatctcgcctgccggaaacattcacccagacagcgcagctgcaacatatctgaaggagcgtggtgttgaaaggaaggacttcaactcatatggtagccgaagaggaaatgatgagatcatggctaggggaacctttgccaacattcgtctcgtgaataagttcttgaagggtgaggttggacccaagacaatccatgttccatctggggataagctttcagtttttgatgctgctatgaaatacaagaatgaagggcatgatactattatcctggctggtgccgagtacgggagtggtagctctcgggattgggctgcaaagggcccaatgcttcagggagtgaaggctgtgatagcaaagagctttgagaggattcaccgcagcaatcttgctggcatgggaatcatccctctatgcttcaaagcaggggaggatgcagacaccctgggcctaaccggccatgagcgctacacggtccaccttccaaccaatgtgagtgagataaagcctggccaagatgttaccgtgacaactgataatgggaagtcgttcacttgcacactcagattcgacactgaggtggagcttgcttactacgaccatggtggcattctaccatatgtcatcagaaagattgcggaacagtagattgagatgattgcgatgcggtgaatcgtaattggtgtaaacgacccatttttgagtacttataataacctctgagtttctcagagtgagctgtctgaacttttagtaaccttttgctttctttaagacactgttaataatatgttaactcctgcaatatctgaatatacatttggcagatgattccctatgttgtaaatgacactagttcataacactgacgcagttcaaagcggttcttgttatctggtggtactcaaattagtactgcaaacaatcgattagctgattttattttgagttttgtattacgaacctttttgactggtgaaacggttattccatttgcttcaagcgatttggaaatgattgttacagaaagctgtttgttacagtgagtgtattttgcctcttaccagctaacgtttcactttcacgagcgactggcaatgaccctgaagcaatgacaggatacataagcagcttcagcaggccaaggcaactgatgcgaggtcggtacgtgattttgggagtggctccat

SEQ ID NO: 199442 - DNA, 1003 bp, Zea Mays
gtatatgccatttgggttttgtagttgattggcctcagcattttgttggggatcaactgctgatcactctacgaattagtccttggactatgcaaaattttctacatcaaggtttcttcatttcagtagtatttctgcatgttccaagatcaccttgcgctgatgatggaactgctaggaatgatgcctcgaaagatcgcgttgggtggtcggtactcacgtgatttcttcaatcggtacggggatttgaggcacatccgacggttgcggttctggcctctcaacaaggtgctgatggagaagtatgagttcactgaaataaatgctcatgggatggcggattttcttgttccaatacttgattttgttcctgagaagcgccctacagctgctcagttgcttcagcatccatggcttgatgttggtcccctccgacagcaacctaaaacactgcctgactcagcacagaattcagatgacggtgtttcagagaagcagaagaaagagagtgaagaaagagaggcaatggctctagagttggggaacattgccatagatggtgctggtggcaaatgaccctcaagcaaaaaagcgcaactaaaacaactgctacctcttctaagtgaggtgcatttggtttcacgagttaagctgtaaaagttgttttcagtcgagaattgtcgcacgagtgggtaacagatgtttttttaggtttaaaatatgttaggatagctgccgagggaaaagtagagtaggccaattatttgctttatggggttggatggacaagactagattcgtttgggttgcagtaaccctagttttttttcctttgagaacatattcttttgtacaattagaatctggaaaaaaattaaggttagcagtgaacaactgggaacccgaaatgtgttgcgttaaggcctgcctaaaattttctgctggaatcatctggaaacatgatgtgccaccttttatcactgtaaagtttttactgtacatt

SEQ ID NO: 199443 - DNA, 2553 bp, Zea Mays
ccatctccgactccctcttacccttcccgttccccaattcgaaatcgagtcgggtactcgggtcggtcttgccgtgcgtgcgtggctgcgcgaaccagcccacgctcccactccccgcccgccaccgccgggtccctctagggttttgccgcgatgtcgctccggccgagcgagcgggagcagatgcggaagggcaactacaagcagacggtggacgccgaggagagccgccgccgccgcgagggccagatggtcgacatccgcaaggccaagcgagaggaaagcctccagaagaagcgccgcgatgggttccccgccgccggcgccgtgccgccgatgggccactccaccgcactccagcagaagctcgatggcttgccggcgatggtacaggccgttcactccaacgaccccactgtgcagcttgaggccaccacgcagttcaggaagctgctctccatagagcgtagtcccccaattgaagaggtgatcagcacaggagtcgtgccccgattcattgagttccttacacgtgaggaccatccacaactccagtttgaggctgcatgggcgctcaccaacattgcatcaggcacatcagagaacactaaggtggtggttgagagtggtgctgtgcccatctttgttaagctcctcaactccaatagcgaggatgctgtatgggctttaggtaatgttgctggtgactccccaaagtgccgtgatctggtgctaggccatggtgggctattccccttgctgcaacagcttaatgagcatgctaagctctcgatgctgaggaatgccacatggacactatcaaacttctgccgtgggaagccacaaccgaactttgatcaggtcaaaccagcattgccagcacttcagcaacttatccactctcaggatgaggaggtcctaactgatgcctgttgggctctatcatacctatctgatgggactaatgacaaaatccaagctgttattgaatctggcgtgttccctcgccttgtggaacttctgatgcatccttcagcctctgtactgattccagctctgcgcacggtgggtaacatcgtaactggggacgacatgcagactcagtgtgtcattgacaatcaagcacttccatgccttttgaacctactgaccaccaaccacaagaaaagcatcaagaaagaagcatgctggacaatctcaaacatcacagctggtaacagggaacagattcaggccgtgattaatgcaaacataattgcacctctggtgcaacttctgcaaactgctgaatttgacatcaagaaagaagcagcctgggcaatttcaaatgccacttctggtggcacacatgatcagatcaagtaccttgttgcccagggttgcattaagccactctgtgatctgcttgtttgcccggatcccagaattgtaacagtttgcttggagggtcttgagaacatcctgaaagttggcgaggcagagaaaaatcttggtgcaggcgatgtcaatgtttacgcacagatgattgatgatgctgagggcctggacaagattgagaacctacagagccatgacaacactgagatatatgagaaggctgtcaagatgctcgaatcttactggctagaggaggaagatgatgccatgccctctggcgacaatccccagaatggcttcaactttgggaaccagccctctgttccatcaggtggattcaacttcggctgaagatgcccatttggaatggcggctgtgccattgtgccttggcctagtggttggggctagtcagagttggggtagtggcgtcgtcctccaaaaccttggttcggtcccattggtctggtctcaggtgtttgtcatgtcagtcccagtcagcagggtcagtccttgtgctgcatcaccagtggtgctgcatggaagtggtcagtcttcaaggtcagccggttggatcatttgggctcttgctcccaccgcctctggtggtaggcatgaagtcgcaggtgttgtcgggagttgggttttgcctccaatatagcatgaatgaattatattgttttacctatttgatgaggtagaagaaaagaaccttggaagatagggaatgtgttggtttttgtcaaagcggttcctgtcctgtatgacatgttgcatgagtattgacacaaattataagacataatggcaaataggtttttgggagtctcttgagtctcgagtcttaactcattggctcattgtaggtttgtggttcgttatgtcatcttctctgttgtagtcacttgtgcttcctcaaacgtggttttggcaccattgtctcaaagtcgttccaagcttatctagagcagtagaagacgagggttgtttgcggcatttgaggttatggttcctagtttttttttgtggaacctgatttatcgttgtatgatcatgacaaacaattggtagtaaggaaatcaaaaaggggaaatccgtacatgtttgctctgtttcatctgtatcttgcatgttaaatatttaaatataaaaagcattgagtctatctcctgtgtca

SEQ ID NO: 199444 - DNA, 834 bp, Zea Mays
ggctaagacaaaaaatacccctcaacaccatggtgccaaaggagcaagccgcagcttgagtgcctgggacagtcgtacgtgaccgctcatgctggcgggaaagccaatggcatcaggtggtgtcacagaccaggtaacgtcaccaggtggtaacactgtgcacacattgaagggaaaatctggtgacaaatttgagtttaaagctccgaagggtggcatgtacaagttctgcttccataacccatatggagcacctgaaactgtttctttctacattcatgttgggcacatacccaatgagcacaatctggcgaaagatgagcacttggaccctatcaacgttaaaatcgcggagctgaaggaagtattagaatccgtcaccgccgagcagaagtacctaaaagcacgcgaagctcgtcatagacacactaatgagagcaccagaaagcgtgtcatgttctacacaatggcggagtacatagctttcgtggctgctagcacgttgcaagtcctctacatccgccgcatgttcagtaagaatgtgggatacaacagagtgtaggatacagctctacttcaaaggcgacagtggaagaagcaccacatggtcggaacgggaaacattctctgccaatttgacaaattgtagctctgcaccctctttctttttgttagtttacaagaaacacttttacatttatcatgtacttttagcaacacttgcgatatgttacgtgcatttgatgctgaacatagttccagaattaattttcagagaatttgtagtattgttctgcttccgatttttttgattgttaatcatgtggtgtcttt

SEQ ID NO: 199445 - DNA, 676 bp, Zea Mays
gtttcgactgattggtccttacatgcttgaacatggtgcctgtaccattcatcatcctctacctgaagaaactcgcaacgtttctgtctcagaacagcgcgtccgcgactcgaattatggacctcctctttgagcgggcacggcgcaaggctgctcctgttgaggaattccagtggctcggcttgatgctgttcgttgccgttccattcccaggcacgggagcgtggacaggggccttcattgcatctgtactaggcatgccgttctggtcaggttttacagcaaatttcgtgggagtcgtccttgcagggctgctggtgaacttgctcatgaatcttggcctgaaatacgcgatcgtcactggagtagttttgttctttgtctcaaccgtcatgtggagtgttcttcgttcccttaagaagtccgttaatgtcaagtgatctagtagtctttatcaaactgttcctaatcccttcagagttcagccttgcgtaggaagcttagttgtgtaattttaagtggaactttcagcttccaagtggatttacaagagagagtaacactccatatctccagcgagctgagaattggccatgcttatttaagtcgcaagtaaaaatgtctttctcatccaataattgaatatgcgatattttagctattaggctatgccaat

SEQ ID NO: 199446 - DNA, 2173 bp, Zea Mays
ctgaggcactcgtctccctcctcgcttgcgctctgtttcggtgtttcctgtttcggtgtttcctgtctctggtggcgacgactgggcggccgacgctgccaccgccctacgccagtggcggaaatttgatgagttagagcttattactggtctgatactcctatacgatgtcactgaaacttccaattccgcaagggctttccttcttaagaagtgttggatggtttgaggaccggaaggttgattcagcagccaaacagcagttatccccaacgttgaaactccagacagataaggagacgtacagacctggtgattcagtcactgtgactatcgaaatctgtagcccagctagtttgaaggatgatgttgggcaggcagtgtcaggcgaggatgccccctcgctgttgttagatgtgctatcatttgaacttaaagggattgagaagctggatactcaatggttctctgttcctaagcccttaccagggtctaaacaaaggcgaggtgaacatatgtttctggattgttcggcaccatcactggtctctaaagtaataattggtgcagggcgaacaaaaacgtacattgcacgtgtggagctcccaaagactttgccgccatcttataggggcatcagtatccgctatttttattatgttaggaccacattatttggaaggccagttatgttgggtaatggagaccaatataaaggtcttgtgaataatgcaattcatctggaagctagagtcccattgcagatacgtgtttcccagaaaagcagcagcctactaaatgaagaagatgttttagggaatctgcctttttcggtggatcaaccgagcatattttggaagggaaaagatgaagattcagaatggagcaaagcaaatgataatgttgatctagaagaaggatatgatagttctaaagatgaagtttcatctgtttcctcatacaatccttcaaaagcacatcctgaattctccctaaggagctcgttgtcaatgcattctctgtcatcacggctctccacgagtgagctattttacaatcaagtggaacgacctaatttcccatcatacaatccaattcctcgattgtcagtgtcagagatttcagatgatcatgacggaggtttagtggcatctcaaaggaaactaaacattttgctaccagaccatacatcgaatgggcaaagggtttctccagattctgatcactcaaaagatgatgctggactcccccttacgccaaaaaatgttgatccagctggatctgaaggctttacgacaggaagatcttataatataagaattgatgaccaagttttgcttcggttttcaccaaagaattctgactcaacctattactttggtgatatgattggtggagcacttaccttctttcacggaactggaaaacggaggtgcctcgaggtatctatagccctggaaacatctgaaacaattaatcctcgcgcattacatccttcaagaaggggctcaccaacaataaccaagctacacagtgaacatcatgaggttgttgcggatcttcaccagacaagctttctgttttccattcccattgatggccctatgtctttttgtacctcaaaggtcactgtacagtggtctcttcgatttgagttcttcacaactccggaaggaacagacccagctaggtacgagcacccactccttgttgataaaagagagaagggtgaatgggtgctcccggtaactgtttacacacctccattgcgcagacgagctactcatgagaggaatggtagatctgtctcacctggaaatatcttcaactcttgaagtgcactgttgccgaagtatagttactttcagctggaaaggatttacagactattctgactggtacaattgcatcaaaaggattttctcgctgtaaattgttataggatttgcaatgcgatgtctatttttttaatagagaacaaatggagtgaaatacttgacttgcaccaaatggatttattggaccatttgtttcatcgatttgtatcccatgagagatgcatcctggccaaaatttggtgttcagtgcattcattatttagcttatagttgaccttgaccaaagtatgagagcttaccacgacgcaaccatttggttctctcgaatagtacac

SEQ ID NO: 199447 - DNA, 2393 bp, Zea Mays
catcgcccatcgccgcccacacctcttctgcagttctacttcacgtcttgaccacgtccgcctcggcccctggtctcctactctcctccccactcctccctcggcctggagtccagtcctcgactccgcctgccgcctgctgcctgacaagccacgcgctgcggcagccgtacgggcactagggttttcttccacttcgaccgcgggctcgggatctcgcgccgcaccgcaatgcagcacacgtgccgctgatcccgtggccgcctccttcctttcctcctcctgcggtcctgcgccgcctctgctgcagcgggcagccgccatggcgcggcgccacgggtggcagctccccgcccacaccctgcagatgtactgcgattgatcctgctgactctggcatcctgatttccatggatgacatactaatttataaatcagaagcacatgtagacactcaagatgaagctggtaagccaggattgaggaacgatgaggatatccgaaagcataaatcatgctttggaagggtttgtttttgttgcgctatttttacaactggggactgtcgcggaggggatgaagctaaccatcaagaagattatggtgaagaggcactcttttgcaccctttgcaacgcagaggtgcgcaaacatagcaagcactgtcgaagttgcgacaagtgtgttgatgggtttgatcatcactgccggtggctgaacaattgtgttggaagaaaaaattatatcacatttttatgccttatggctgtgagtctggcttggcttgctgctgagtgtggagttggtattgctgtttttgttcgttgcttcactgacaagacagtcatagaagatcagattggggaaaagctgggttacggtctttcacgtgcaccctttgcaaccattgtagccctggctacagctctttcaatgcttgcttcagtaccactaggagaactatttttcttccatatgatattaatccggaagggcataacaacttatgaatatgttgtggccatgagggctcagagtgaacctcctggaccttctgtcaatgatgaccaacaaagcttggcatcttctccaatgagttctgcaccaacagcttttagtgggagctcgtttgcacggcactacaaaggcgcatggtgcactcccccacgtatcttcattgaccaggacgaaatcatcccacacctggagcctggccgagttccttcaactgttgatcctgataccacagacccaatggaaagaaccaaaacccatcctaaacggccagtccgcatcagtgcgtggaagcttgcgaagctcgattcaaatgaggccatgaaagcagcagcgaaagccagagcctcttcgtccgtgctgaaaccgatcaatactcgcaaccagtatgaggcagacagtgatagcctcagtagcagaaacagtgtcataagtgctgataccggacaccataggtaccctcggtcttgcgggaattcgcagtacaagccctcttatccaccaagcagagcaagtgcagatgacatcgagttgtacccccagacaccgagcagcttccagagcaactcacggacttcaactcccatagccgagcaccatccatccaagcatttcaacccaatctaccagacatcagcaaacaggtctccattctcagcaaaagcaagtgtcagtgaagctcctgtctctgaaatcaccaatgcagggaggtcctaccccccaccacaagcggacagatcctcccggtcatctgtttactgggatcaggaagctggcaggttcgtgtctgctcaggcaaaccagggatctagctctcgccctgcctatcctgatcttctatacaccgggcagaatatattctttggtggacctctgattgcagatcccgcagcaagaagcttcagagatcctggtggctcgagccaaaggtctgccgggcctcggtcgcaccagctcccggtgttcgttcccagtgacccccagaaagatcagctgtccaggttaccgtgaaatgctatatcttttttttttggggggggggggggggtagtagtcttccgaaacacatgttgccctgccgggttattaatgtatagttattagctcttagacctgacagaatagttcatgactttgtatcgggttcatggaaattaagacctatttaggcactatcaaccataagcactgaagttatggaagtgctgcggagtagtagtgaagtgaaactgacaaggatgttctgtcaccaaacctaattagcttcacctcgccatatactcaaaacaaggcgataactaccaacgtgctccttattaaaaaaaactacaaatgtgttaaatctattcgctaatctggatccattttccctatctgttc

SEQ ID NO: 199448 - DNA, 2476 bp, Zea Mays
ggcccctggtctcctactctcctccccactcctccctcggcctggagtccagtcctcgactccgcctgccgcctgctgcctgacaagccacgcgctgcggcagccgtacgggcactagggttttcttccacttcgaccgcgggctcgggatctcgcgccgcaccgcaatgcagcacacgtgccgctgatcccgtggccgcctccttcctttcctcctcctgcggtcctgcgccgcctctgctgcagcgggcagccgccatggcgcggcgccacgggtggcagctccccgcccacaccctgcaggtggtggctataacagtgtactctgtgctttgtatagcattctatgctttcttctctccatttcttgggaaggacttgtatcaatatatcgctgtcggtatttatagttttttgccaggctttatctgtgctgattctatatgtcagatgtactgcgattgatcctgctgactctggcatcctgatttccatggatgacatactaatttataaatcagaagcacatgtagacactcaagatgaagctggtaagccaggattgaggaacgatgaggatatccgaaagcataaatcatgctttggaagggtttgtttttgttgcgctatttttacaactggggactgtcgcggaggggatgaagctaaccatcaagaagattatggtgaagaggcactcttttgcaccctttgcaacgcagaggtgcgcaaacatagcaagcactgtcgaagttgcgacaagtgtgttgatgggtttgatcatcactgccggtggctgaacaattgtgttggaagaaaaaattatatcacatttttatgccttatggctgtgagtctggcttggcttgctgctgagtgtggagttggtattgctgtttttgttcgttgcttcactgacaagacagtcatagaagatcagattggggaaaagctgggttacggtctttcacgtgcaccctttgcaaccattgtagccctggctacagctctttcaatgcttgcttcagtaccactaggagaactatttttcttccatatgatattaatccggaagggcataacaacttatgaatatgttgtggccatgagggctcagagtgaacctcctggaccttctgtcaatgatgaccaacaaagcttggcatcttctccaatgagttctgcaccaacagcttttagtgggagctcgtttgcacggcactacaaaggcgcatggtgcactcccccacgtatcttcattgaccaggacgaaatcatcccacacctggagcctggccgagttccttcaactgttgatcctgataccacagacccaatggaaagaaccaaaacccatcctaaacggccagtccgcatcagtgcgtggaagcttgcgaagctcgattcaaatgaggccatgaaagcagcagcgaaagccagagcctcttcgtccgtgctgaaaccgatcaatactcgcaaccagtatgaggcagacagtgatagcctcagtagcagaaacagtgtcataagtgctgataccggacaccataggtaccctcggtcttgcgggaattcgcagtacaagccctcttatccaccaagcagagcaagtgcagatgacatcgagttgtacccccagacaccgagcagcttccagagcaactcacggacttcaactcccatagccgagcaccatccatccaagcatttcaacccaatctaccagacatcagcaaacaggtctccattctcagcaaaagcaagtgtcagtgaagctcctgtctctgaaatcaccaatgcagggaggtcctaccccccaccacaagcggacagatcctcccggtcatctgtttactgggatcaggaagctggcaggttcgtgtctgctcaggcaaaccagggatctagctctcgccctgcctatcctgatcttctatacaccgggcagaatatattctttggtggacctctgattgcagatcccgcagcaagaagcttcagagatcctggtggctcgagccaaaggtctgccgggcctcggtcgcaccagctcccggtgttcgttcccagtgacccccagaaagatcagctgtccaggttaccgtgaaatgctatatcttttttttttggggggggggggggggtagtagtcttccgaaacacatgttgccctgccgggttattaatgtatagttattagctcttagacctgacagaatagttcatgactttgtatcgggttcatggaaattaagacctatttaggcactatcaaccataagcactgaagttatggaagtgctgcggagtagtagtgaagtgaaactgacaaggatgttctgtcaccaaacctaattagcttcacctcgccatatactcaaaacaaggcgataactaccaacgtgctccttattaaaaaaaactacaaatgtgttaaatctattcgctaatctggatccattttccctatctgttc

SEQ ID NO: 199449 - DNA, 2056 bp, Zea Mays
acacaccaccaccacccacacaaattagaggattggtgccttgctccctcccccttcttgtcgttgctccaccctctcttcttttattattgggttctttttttctctctctccccttggatttgcgcttgtgctcgtctggccgcatactagtatccgcaccagagaggagacacctccgactccgacctgctcttgcatatagattgggcagagagtgagagagcgcgcgcgcgctcaaggggtgccaaaaggagattttttttttaatccagcttcttagcctcactgtctttgatcccggagagcagccgccagcccaactaatccttgctgctggcgcgccggggctccgattgcgctccagatctgaggcacctgctcggtggattccaggaatccgagcaccaactcgacaggggagttctcagggtaaagaggctgagagcgcgttggagatttggactataagagcgagcgagcgagctgggtgccttgctgccttgaggacgccgtcaagaaaccgcgtggaggggagggcgatgagatgagggatgctggccgcggtgatggactacttcagcacctgctggggcccgcggtctcgtgcggggcaccggggcaagggctccgacgccgccggccggcaggacggcctcctctggtacaaggacgccgggcagctcgtcaccggggggttctccatggccgtggtgcaggccaaccagctgcttgaggaccagagccaggtggagtccggatcgctctccctggctgactacggcccgcagggcaccttcgtcggcgtctatgatggccatggcggcccggagacgtcccggttcatcaatgaccacctcttcaaccatctcaggagatttgcaactgagcacaagtccatgtcagcagacgtgatccggaaagctttccaagaaactgaggagggctttctttctctagtcatcaaggaatggtctttcaagcctcagattgcatcagttggctcctgttgccttgttggtgtaatctgtgctgggactctctatgttgcaaacctgggcgactcgcgtgcagttcttggaaggcttgtgaaagcaactggagaggttctggccactcagttgtcagcggagcacaatgcatgctatgaagaagttagacaagagctgcagtcatcacatcctgatgatccacgtattgtggttctcaaacataacgtttggcgagtgaagggtctcatccagatctcaagatctatcggagatgtatatctaaagaaaccggagtataacagagaacctcttcacagcaagtttcggcttcgagaaaccttccagaagccgattcttagttctgaacctcaaattactgaacaccgaatacagccaaacgatcagtttgttatatttgcttccgatggtctatgggagcacctcagcaatcaggaagctgttgaccttgtccaaagtagtccccgtaatggaatcgctcggagactagtgaaagccgcgatgcaagaagctgccaagaagagggagatgagatactcagacctcaagaagatcgaccgtggcgtgaggaggcatttccacgacgatataaccgtcgtcgtggtgttcctcgactcggatgccatgagcaaagctagctggagcaagagcccctcggtttctctccgagggggcggcgtcacccttcccgccaagtccctcgcacccttctcggctccggcacagttgaacggcacccactgaagctgctactgctcttgaaaagaagggcacagtgcagatctgctagagatgatgagagaagcagcaatcaagtgtagctgttgctcgtacacctgctgtgctgttgctgtttgcaaagctgccgtcttgactccgcctggtggctgtaaatttgtccagaacatgttttccctaatagcccatcatatcccgctctttttcttgttgatatgaccaaggctggcagcatcgctgctcaagataatgtttggggcgcatgatttgaccagtccgaatcattacttttgatgatgtgttgtagc

SEQ ID NO: 199450 - DNA, 1848 bp, Zea Mays
caagactctgtccgtccgccgctggactggagtagtcgtgctcgtgctcgcgctcgcgcctgcgcctgtcttaagctccgattgctaatcttcggatgtttgcctctcgaggctgagagcgcgttggagatttggactataagagcgagcgagcgagctgggtgccttgctgccttgaggacgccgtcaagaaaccgcgtggaggggagggcgatgagatgagggatgctggccgcggtgatggactacttcagcacctgctggggcccgcggtctcgtgcggggcaccggggcaagggctccgacgccgccggccggcaggacggcctcctctggtacaaggacgccgggcagctcgtcaccggggggttctccatggccgtggtgcaggccaaccagctgcttgaggaccagagccaggtggagtccggatcgctctccctggctgactacggcccgcagggcaccttcgtcggcgtctatgatggccatggcggcccggagacgtcccggttcatcaatgaccacctcttcaaccatctcaggagatttgcaactgagcacaagtccatgtcagcagacgtgatccggaaagctttccaagaaactgaggagggctttctttctctagtcatcaaggaatggtctttcaagcctcagattgcatcagttggctcctgttgccttgttggtgtaatctgtgctgggactctctatgttgcaaacctgggcgactcgcgtgcagttcttggaaggcttgtgaaagcaactggagaggttctggccactcagttgtcagcggagcacaatgcatgctatgaagaagttagacaagagctgcagtcatcacatcctgatgatccacgtattgtggttctcaaacataacgtttggcgagtgaagggtctcatccagatctcaagatctatcggagatgtatatctaaagaaaccggagtataacagagaacctcttcacagcaagtttcggcttcgagaaaccttccagaagccgattcttagttctgaacctcaaattactgaacaccgaatacagccaaacgatcagtttgttatatttgcttccgatggtctatgggagcacctcagcaatcaggaagctgttgaccttgtccaaagtagtccccgtaatggaatcgctcggagactagtgaaagccgcgatgcaagaagctgccaagaagagggagatgagatactcagacctcaagaagatcgaccgtggcgtgaggaggcatttccacgacgatataaccgtcgtcgtggtgttcctcgactcggatgccatgagcaaagctagctggagcaagagcccctcggtttctctccgagggggcggcgtcacccttcccgccaagtccctcgcacccttctcggctccggcacagttgaacggcacccactgaagctgctactgctcttgaaaagaagggcacagtgcagatctgctagagatgatgagagaagcagcaatcaagtgtagctgttgctcgtacacctgctgtgctgttgctgtttgcaaagctgccgtcttgactccgcctggtaattagtgtactgatagcgaggtatagaaattaggttatttgttagcgacgcaaatcctttctttttttttcttctccctctgttcttatctcttttctcttcatcatggaggaaacaggtggctgtaaatttgtccagaacatgttttccctaatagcccatcatatcccgctctttttcttgttgatatgaccaaggctggcagcatcgctgctcaagataatgtttggggcgcatgatttgaccagtccgaatcattacttttgatgatgtgttgtagc

SEQ ID NO: 199451 - DNA, 1289 bp, Zea Mays
cactgccgtcccactcccaccttcttggagacaccgccaggcgccatcttccggccgctgcccgcctgccccctcccccccccccccccccgggaggtcgaactgccttctagagccctctcctgttttcaggcgaatgtgcaggtagcttgacgtctgatgaacgctcagccatgctgctgatgctacacgaaactcttcctttcgtgaggccgacgagttcttgccgggacccaaaactctccgagaagagtgcctctgctttccacggtaaattgggatgcagtgcggtctgcagttcagcggaaggctatcgtgtacagaagccgcacattgttcacagctacaaagttagcttcactaggaccagccatcatctgtgtaaaagcttaaacgagagaactacaagcatcggttccatgttaatgcttcgcccgatgacgacgacttccgctcatcgcgtaacatagcgatcagtttgttcaagcggtacaagaatgtcattgaccgaggaggtggagaaaacctaaatgagtttgtcagtgctggagtgaccgcttacgcactagggtgtacagatgaggggcttagaaaggaacttatggatattgaagattctggtctggagattgaaggcttagggtccttggggggcaccagcctcaagttcaaagtccactcctttgagatccgtgagtgcatcctgtggctcagtatagtgttcgtcacaatactgtgcacaccacaactaacagttatcaggtggtctccgaacccaccggtgtcagccgacgtcttgcatcagtggaaaggattctgtgctctaatcgcgaacgcttactatgtcaaaggaatggcatggttgccagtgaaaaccttgcagctggaacagatggctgtcacaggaagttcagagaaaccatcagtagttgctagtcgcatgcagttagttttcagcacattagaggtagtcagcccacagtggccaagagtgtgattagatgaaagcaataccatcaaacaaaggtctgcagttttattctgaccaaaagatatgcatgtccaagttggcaagttcaaacctctgtcatggcgcaaacagatgatactatgtccatttgaactcaaatgtcaaataaaaatgctaatgtacttgttgtgaattatttgatttgatgtacatatactgcttctatcttgcatcaggagttctggcaagtgaacaagtatcccctactgctccaatagagataaagtggaaattgtgggtcactaattcgcaccaaatt

SEQ ID NO: 199452 - DNA, 990 bp, Zea Mays
ttgggtcgcggttcctgaatccgcaatccagtggtcgccccgcgcgcagcacaccacccaaaagggaagtcaagtcaaccaaaggccgcacggggtacagccctacccctcccgtcacaaatcccagcggcgccaagcccaagtcagcgcgcgcggcgatggagcggcgggggcaacagcctggcgacgcgcagcagccaggcaaggacggcgccggcgactcccctcctccaccgccaccgttcctggaggtgagctgcaggagctccggcaaggttcggcggttcgcggcggggacgacggcccgctacgcgctgcacgccatcaaccgcaagctcggccccggggccccgccggcgctgcacgtcgaggccgtcagggacggcgaggagcccgtcagcttcggccccagcgcggccctcgccgactacggccgcggctggaggctgcagaccgtcaccgcgcacgacgcgcccgggatccatcacgcgccgcacgcggacacggcgggcgacaggcagccgtccaaagaagatgccgatggtacggagacagtcaggggcacttgcatctacgtcgccaagatcgtgctcgcgtttgcgtttctcttcctgctaggtggatcgctcacgtacctgctggaggtgatccctgacatgctgcagactgcatcggcgcttgagttaactgattttttctacgacccgctgactgaaaatgtatgacgcatgtatcatttcattagcattaattatatggcattgtgtggggctttgtaacttggtcaattttaattcgtgtcgctgcagctcatgataattcatcgtctttgttattaggtctactttctaggcattgtgcaaggtttgcttgagtgcttggtaggacttttttttttttgacgtagacaaacgcacactcacctatataaacatacacatcacacatatgctgatatgcacacattacctctgtaagcacatctgaaag

SEQ ID NO: 199453 - DNA, 1889 bp, Zea Mays
ggagttctaccaccatcaccgcctcgtgtgcagcgtgctcgcccacctcctctgtcgacactcagggtactgacgcaccaccccgaagccctcccgccgcgctcgcagggtgttcgacccttcgcccgcgcgccctcacgacatggcctcctccgtctccgccgccgccaaggccgccgcggcgttcgcgcacaaggtgaagagcgcgatgacgatgacggagaagatactggcgcgggcgtcggagcgcgcggcgctggagcccggggagaacgtgtgggtcgacgtcgacgtgctcatgacgcacgacgtctgcgggcccggcgccttcgacatcttcaagaaggagttcggggaggacgccagggtctgggaccgcgagaagctcgtcgtcatcccggaccactacatcttcaccagcgacggccgtgccaaacgcaacgtcgacatcctcagggacttctgtgcggagcagaacatcaagtacttctatgacatcaaggacctcagcgatttcagggctaatccggactacaaaggcgtctgccacatcgcacttgctcaggaaggccactgccgaccaggcgaggttctcttgggcactgattctcatacatgcaatgctggagcttttggtcagtttgcaactggaatcggaaacactgatgcaggttttgtgttgggcactggaaaggctcttctcaaggtgccacctactatcaggtttatattagatggagagatgccgccttatttacttgcgaaggatctgattttgcaaattattggagagatttcagtatctggtgcgacctacaaatcaatggagtttgttggatcaactgtagaaagtctaaccatggaagagcgtatgacactatgcaacatggttattgaagctggtggaaagaacggtgttgtgcctgctgatgaaactacatttaaataccttgagggtaagacatcagtcgattatgaacctgtctacagtgatgctcaagccagattttttagcgactaccggtttgatgtatcaaaactggagccagtagttgccaagccacattcgcctgacaaccgtgctccagcaagagaatgcaaagatgtgaagatcgaccgagtctatattggttcttgcactggtggtaagaccgaggatttccttgctgctgcaaaggtgttcttagcctcgggaaagaaggttaaagttcccacatttcttgtccctgccacacaaaaggtgtggttggacatatatagcctccctgtaccaggatctggtggcaaaacttgctcccagatatttgaggaggctggttgtgacacaccagcaagtcctaattgtggtgcttgtttgggtggccctcgtgatacatatgcacggatgaatgaacctactgtctgcgtgtccaccacgaacaggaactttccgggcaggatgggccacaaggaagggcaaatctacctggcgtctccctacactgcggctgcctcagccctgacggggtatgttacggaccccagggacttcctcatgtaaccgtcttgaaacaacaacagatttcatgatgtaacagagtggttgtactgctgtttttcgtgctgaacttttgtctaggcatgtccttcgttgagaaataaactgcactagaataagcagcgacttctcgggagccatagcagatgtgacctcatatttatttgtgcaactttttttgtttttggctctgaagtcatgcaaggaaaccacataaaagagtgatttatgtatgtgtcagaatcaaacaataatttgatgtcaaaagctcaagatagacatagttctgtaataagaacacactacatgcagttggatgtagttggatgctcctcagggatataagtttaac

SEQ ID NO: 199454 - DNA, 985 bp, Zea Mays
ctggaggtggaactgaacctgattctcttgctgttacttttgaagacgacaaatatgtagttagttcgtcaaagtctcctcccttgctactggattctatacagtctgatcctgtgctcaagaattcttcagaccccgctctatctcgtgacagaaagataatatcaagtggacgaaaggcctttacaggatctatcattgagcacgacgacaatgtttccaccattgaaccttctgtggctagttcgttggcaaaacctggtacttgtgcttcttcaaggcccgtgtcaaggttcaagatgcagaaaggagggcggtgagtctggacactcgggtggacctttggtgtctgatagattgcatcttgaacacgttcaaattgtctgtgctgtctgaactcctggacgctagacatgttgtggatcctggacgctagacatgttgtggatcctggacgctagacatgttctggagtgattgtcttctgccgactgtagagtgaaaccgggacgtccaagcgaagaagggaattaaaaacgaggttttttttggtcggttaattattagtatcacaggacgtccaagcatcgcattagttagccactgcacacagagcctgtcggccaataaggtcagttaattacagatttagtggtgctagcttgctgttcctacttgtgctgtagcagagtgtcatgacatggtcagtagcagccgatgagcgccgcgaagtcagcagggcggctgctggtggtgtctcttctcgttccctgggcggcgccgtggagcaccagattgtctctctcacgtatttcagcggcagcaagggacgaagaacctgccctctgcatgtcagctccacctgccattatatgtgtatattatttcattcattaattcagtgggtaatcgtcacaaacagctatataagatccagtaaaatgttgaataatctgatacacacgcacacacacgagtataaaac

SEQ ID NO: 199455 - DNA, 2008 bp, Zea Mays
gtgtggaccttccagcggcaaatatagacaggactcctgcactgcaccatgcgtccagccatcgacacattattgggccgcagaatttcgttttattgggctgggccgctggtgcataccttaccggggttgtctggtgtcggacaggggttcccttcgtccagacggagctcccagtccgcaaccgccgcctcccgtttattctctctcaagcttctctccccgctaccgctccgagtcccaagtcccacccggccagcctccatcgctagtaccactcctagtcccaagtcccagccttccatcgacggcgagggagggagaggcgacctccatccgggctggttccctttggtggcgccgcctttttcccagggcgtttaatacacacaaatgaactcttggtgcttctgggtgaggggtactatgcagagaggtcggctaagcagacgactaatatattgcacaggagggggcaggaattggaagctcaagtcgaagcaatgaaggcaactatcgctgaccttgaagctgaggccaaattctttgaattcacggccaccgaggcttcagagggtcttgttgaaatcagggaagagtatgatgaggacttagagacgaattcatcaagatcagaggcttcagttgctactgtggttatgtccgataaagacagggaacatgctcgaatcatggcaaggttagatgaacttgaaagggaagaaaaggatgctggaagtgcctgtgaagatgataatgatggcgacgatgatgatggagatgctggaacaagtgatgatggcgaggaaaataaggaatctggaaatgctttaagtgatgtcaatgaagactacagttctggttttggcgcttcattttctggaagtggcggcaatgataggagtcatgggaatattaagagtgcactgaagaagcctggaggagatgaaatgctgataggcatttctcataagccatcatcccatacatctcatctagcatttcctggccaaacctctgcaacaaattctgatgtccgagttcacactaaagctgttacttttgaagacgacaaatatgtagttagttcgtcaaagtctcctcccttgctactggattctatacagtctgatcctgtgctcaagaattcttcagaccccgctctatctcgtgacagaaagataatatcaagtggacgaaaggcctttacaggatctatcattgagcacgacgacaatgtttccaccattgaaccttctgtggctagttcgttggcaaaacctggtacttgtgcttcttcaaggcccgtgtcaaggttcaagatgcagaaaggagggcggtgagtctggacactcgggtggacctttggtgtctgatagattgcatcttgaacacgttcaaattgtctgtgctgtctgaactcctggacgctagacatgttgtggatcctggacgctagacatgttgtggatcctggacgctagacatgttctggagtgattgtcttctgccgactgtagagtgaaaccgggacgtccaagcgaagaagggaattaaaaacgaggttttttttggtcggttaattattagtatcacaggacgtccaagcatcgcattagttagccactgcacacagagcctgtcggccaataaggtcagttaattacagatttagtggtgctagcttgctgttcctacttgtgctgtagcagagtgtcatgacatggtcagtagcagccgatgagcgccgcgaagtcagcagggcggctgctggtggtgtctcttctcgttccctgggcggcgccgtggagcaccagattgtctctctcacgtatttcagcggcagcaagggacgaagaacctgccctctgcatgtcagctccacctgccattatatgtgtatattatttcattcattaattcagtgggtaatcgtcacaaacagctatataagatccagtaaaatgttgaataatctgatacacacgcacacacacgagtataaaac

SEQ ID NO: 199456 - DNA, 1996 bp, Zea Mays
gtgtggaccttccagcggcaaatatagacaggactcctgcactgcaccatgcgtccagccatcgacacattattgggccgcagaatttcgttttattgggctgggccgctggtgcataccttaccggggttgtctggtgtcggacaggggttcccttcgtccagacggagctcccagtccgcaaccgccgcctcccgtttattctctctcaagcttctctccccgctaccgctccgagtcccaagtcccacccggccagcctccatcgctagtaccactcctagtcccaagtcccagccttccatcgacggcgagggagggagaggcgacctccatccgggctggttccctttggtggcgccgcctttttcccagggcgtttaatacacacaaatgaactcttggtgcttctgggtgaggggtactatgcagagaggtcggctaagcagacgactaatatattgcacaggagggggcaggaattggaagctcaagtcgaagcaatgaaggcaactatcgctgaccttgaagctgaggccaaattctttgaattcacggccaccgaggcttcagagggtcttgttgaaatcagggaagagtatgatgaggacttagagacgaattcatcaagatcagaggcttcagttgctactgtggttatgtccgataaagacagggaacatgctcgaatcatggcaaggttagatgaacttgaaagggaagaaaaggatgctggaagtgcctgtgaagatgataatgatggcgacgatgatgatggagatgctggaacaagtgatgatggcgaggaaaataaggaatctggaaatgctttaagtgatgtcaatgaagactacagttctggttttggcgcttcattttctggaagtggcggcaatgataggagtcatgggaatattaagaagcctggaggagatgaaatgctgataggcatttctcataagccatcatcccatacatctcatctagcatttcctggccaaacctctgcaacaaattctgatgtccgagttcacactaaagctgttacttttgaagacgacaaatatgtagttagttcgtcaaagtctcctcccttgctactggattctatacagtctgatcctgtgctcaagaattcttcagaccccgctctatctcgtgacagaaagataatatcaagtggacgaaaggcctttacaggatctatcattgagcacgacgacaatgtttccaccattgaaccttctgtggctagttcgttggcaaaacctggtacttgtgcttcttcaaggcccgtgtcaaggttcaagatgcagaaaggagggcggtgagtctggacactcgggtggacctttggtgtctgatagattgcatcttgaacacgttcaaattgtctgtgctgtctgaactcctggacgctagacatgttgtggatcctggacgctagacatgttgtggatcctggacgctagacatgttctggagtgattgtcttctgccgactgtagagtgaaaccgggacgtccaagcgaagaagggaattaaaaacgaggttttttttggtcggttaattattagtatcacaggacgtccaagcatcgcattagttagccactgcacacagagcctgtcggccaataaggtcagttaattacagatttagtggtgctagcttgctgttcctacttgtgctgtagcagagtgtcatgacatggtcagtagcagccgatgagcgccgcgaagtcagcagggcggctgctggtggtgtctcttctcgttccctgggcggcgccgtggagcaccagattgtctctctcacgtatttcagcggcagcaagggacgaagaacctgccctctgcatgtcagctccacctgccattatatgtgtatattatttcattcattaattcagtgggtaatcgtcacaaacagctatataagatccagtaaaatgttgaataatctgatacacacgcacacacacgagtataaaac

SEQ ID NO: 199457 - DNA, 1943 bp, Zea Mays
gtgtggaccttccagcggcaaatatagacaggactcctgcactgcaccatgcgtccagccatcgacacattattgggccgcagaatttcgttttattgggctgggccgctggtgcataccttaccggggttgtctggtgtcggacaggggttcccttcgtccagacggagctcccagtccgcaaccgccgcctcccgtttattctctctcaagcttctctccccgctaccgctccgagtcccaagtcccacccggccagcctccatcgctagtaccactcctagtcccaagtcccagccttccatcgacggcgagggagggagaggcgacctccatccgggctggttccctttggtggcgccgcctttttcccagggcgtttaatacacacaaatgaactcttggagggggcaggaattggaagctcaagtcgaagcaatgaaggcaactatcgctgaccttgaagctgaggccaaattctttgaattcacggccaccgaggcttcagagggtcttgttgaaatcagggaagagtatgatgaggacttagagacgaattcatcaagatcagaggcttcagttgctactgtggttatgtccgataaagacagggaacatgctcgaatcatggcaaggttagatgaacttgaaagggaagaaaaggatgctggaagtgcctgtgaagatgataatgatggcgacgatgatgatggagatgctggaacaagtgatgatggcgaggaaaataaggaatctggaaatgctttaagtgatgtcaatgaagactacagttctggttttggcgcttcattttctggaagtggcggcaatgataggagtcatgggaatattaagagtgcactgaagaagcctggaggagatgaaatgctgataggcatttctcataagccatcatcccatacatctcatctagcatttcctggccaaacctctgcaacaaattctgatgtccgagttcacactaaagctgttacttttgaagacgacaaatatgtagttagttcgtcaaagtctcctcccttgctactggattctatacagtctgatcctgtgctcaagaattcttcagaccccgctctatctcgtgacagaaagataatatcaagtggacgaaaggcctttacaggatctatcattgagcacgacgacaatgtttccaccattgaaccttctgtggctagttcgttggcaaaacctggtacttgtgcttcttcaaggcccgtgtcaaggttcaagatgcagaaaggagggcggtgagtctggacactcgggtggacctttggtgtctgatagattgcatcttgaacacgttcaaattgtctgtgctgtctgaactcctggacgctagacatgttgtggatcctggacgctagacatgttgtggatcctggacgctagacatgttctggagtgattgtcttctgccgactgtagagtgaaaccgggacgtccaagcgaagaagggaattaaaaacgaggttttttttggtcggttaattattagtatcacaggacgtccaagcatcgcattagttagccactgcacacagagcctgtcggccaataaggtcagttaattacagatttagtggtgctagcttgctgttcctacttgtgctgtagcagagtgtcatgacatggtcagtagcagccgatgagcgccgcgaagtcagcagggcggctgctggtggtgtctcttctcgttccctgggcggcgccgtggagcaccagattgtctctctcacgtatttcagcggcagcaagggacgaagaacctgccctctgcatgtcagctccacctgccattatatgtgtatattatttcattcattaattcagtgggtaatcgtcacaaacagctatataagatccagtaaaatgttgaataatctgatacacacgcacacacacgagtataaaac

SEQ ID NO: 199458 - DNA, 2302 bp, Zea Mays
cagagacgcgtccgacctccgacgctgccaccaacctcttcccccagccacgctccaccgcgccatagccgcaggaaaatatcaaatcggagccgcgatgcaccacagaaaaaaattccctagggtttccaagcaaaagccctcctgaattctccaattccgcgccttcccccgcttcgtgggcctcggatttagggtttatgcatggcttccgaccctcccggcgacggcgccggcggggaagagccgacgccgggccctgcccccgccgtggaggtgcttgctgctcccgccgttccgctcaggccgcgctgggccacggagatcaaggtctacacccgtaagcacccccgcaaaacccctaaacctcctccagaaccagctcccgcccccgcctccgtccctgcccctgcccttgctcctgccccggccccgaatcccctttccgaaaccttatcctcgattcgtcgctccatccgccgcgcggacacggttggcgctgcggcgcggcccgatccggcagcgccggcctcggttcccgcccgggggccacctggggaacgcggtgccgcctcgggggacccctcatctgaggtgaaccgtgtcggcggcggtatttctaacggccacggcgacgaccgggcggcggccgcggctgagaagtctgagaaagcacggaaacgcagggtgaggagtgagttgcggcgccgactggcgggggagctcgaccaggtccgcgtgctctccaagcggctgaaggaggctgccgaggccctggcgcagcaggaggcttctgagcctgcgcctttgcccatggtggtgctgccaacacagcagcaggtggtggatgctgggtatgtgcaactgcagttctcagctggtgatatggcggtgcccatgtctgctcagattgcagctgctgttactcctgcccgttccatgctgcagcgcagaccactaaccgtgtcggttgttcataatgaagcctttgagaaggtgaagcggacgccaaaggccaatcaattgtaccaaaattcggagttcttgcttgccaaggataggatccctccctcagattcacatgtgcgcaagaaatctaagcaccacaagaagaagcataggtccctagaatctcgtggcgcagactttgatgctgagcggcggctgtactctcatgcgttcaagaagtcctcgtcacttctaagccgtttaatgaagcacaagtttgggtgggtgtttaataagcctgttgatccagttgcacttggtttgcatgattattttactattatcaagcacccaatggatcttggcacgataaggggacggcttagccgcggacagtacaggaacccgaaggagtttgctgaggatgtccggctcactttccataatgcgatgacatataatcccaagggtcaggatgtgcattttatggcagagcagttgtcaggaatcttcgaggcacagtggcctgagattgaggctgaggttaactaccttgcatcgtgtcctccattgccgaagaagtttccacctccaccaattgacctgcacttcctagagaggtcagattcgatgagacaccacatggcattggacaccaattcaagaccgatcagtcatactcccacttacacccggactccatcaatgaagaaaccaagggcaaaggatccaaataagagggacatgacaatagacgagaagcgtaagcttagtgagaacctgcagaatttgccacctgagaagcttgatgctgttgtgcaagtcattaagaacaagaacctatcagttatgcagcatgatgatgagattgaggttgaaattgatagtatggatgctgagacactttgggagcttgaccggtttgtggccaactacaagaagaacctgagtaagcaaaagaggaaggccgagcgagcgatgcttgccagacaagatgcagagttgcgtgcgcagcgccttatacaacaaccgcaaccaaccccagtcccccaagaacctgttggtgaaaaatctctaaagcaagttgcaaaaggtgagcaactaccaacatctgcatcagagaaaaacgacgagaatagacagaacgtgagtggttcaagcaattcaagcagctccagcagtgactcaggatcatcgtctagtgactcagacagtgatagctcctcttcagatggatctgatgctgccaattcatcttgagatataggggttgagctgtttgttcgctggcgtcttccaaattccaatgttggagcgacggatatgcgtaatggctgggttgcgaaggcctcca

SEQ ID NO: 199459 - DNA, 2353 bp, Zea Mays
gccagcacccgtctttgcgacgtcggctcagctgcagtcctccccagaaaagcagagacgcgtccgacctccgacgctgccaccaacctcttcccccagccacgctccaccgcgccatagccgcaggaaaatatcaaatcggagccgcgatgcaccacagaaaaaaattccctagggtttccaagcaaaagccctcctgaattctccaattccgcgccttcccccgcttcgtgggcctcggatttagggtttatgcatggcttccgaccctcccggcgacggcgccggcggggaagagccgacgccgggccctgcccccgccgtggaggtgcttgctgctcccgccgttccgctcaggccgcgctgggccacggagatcaaggtctacacccgtaagcacccccgcaaaacccctaaacctcctccagaaccagctcccgcccccgcctccgtccctgcccctgcccttgctcctgccccggccccgaatcccctttccgaaaccttatcctcgattcgtcgctccatccgccgcgcggacacggttggcgctgcggcgcggcccgatccggcagcgccggcctcggttcccgcccgggggccacctggggaacgcggtgccgcctcgggggacccctcatctgaggtgaaccgtgtcggcggcggtatttctaacggccacggcgacgaccgggcggcggccgcggctgagaagtctgagaaagcacggaaacgcagggtgaggagtgagttgcggcgccgactggcgggggagctcgaccaggtccgcgtgctctccaagcggctgaaggaggctgccgaggccctggcgcagcaggaggcttctgagcctgcgcctttgcccatggtggtgctgccaacacagcagcaggtggtggatgctgggtatgtgcaactgcagttctcagctggtgatatggcggtgcccatgtctgctcagattgcagctgctgttactcctgcccgttccatgctgcagcgcagaccactaaccgtgtcggttgttcataatgaagcctttgagaaggtgaagcggacgccaaaggccaatcaattgtaccaaaattcggagttcttgcttgccaaggataggatccctccctcagattcacatgtgcgcaagaaatctaagcaccacaagaagaagcataggtccctagaatctcgtggcgcagactttgatgctgagcggcggctgtactctcatgcgttcaagaagtcctcgtcacttctaagccgtttaatgaagcacaagtttgggtgggtgtttaataagcctgttgatccagttgcacttggtttgcatgattattttactattatcaagcacccaatggatcttggcacgataaggggacggcttagccgcggacagtacaggaacccgaaggagtttgctgaggatgtccggctcactttccataatgcgatgacatataatcccaagggtcaggatgtgcattttatggcagagcagttgtcaggaatcttcgaggcacagtggcctgagattgaggctgaggttaactaccttgcatcgtgtcctccattgccgaagaagtttccacctccaccaattgacctgcacttcctagagaggtcagattcgatgagacaccacatggcattggacaccaattcaagaccgatcagtcatactcccacttacacccggactccatcaatgaagaaaccaagggcaaaggatccaaataagagggacatgacaatagacgagaagcgtaagcttagtgagaacctgcagaatttgccacctgagaagcttgatgctgttgtgcaagtcattaagaacaagaacctatcagttatgcagcatgatgatgagattgaggttgaaattgatagtatggatgctgagacactttgggagcttgaccggtttgtggccaactacaagaagaacctgagtaagcaaaagaggaaggccgagcgagcgatgcttgccagacaagatgcagagttgcgtgcgcagcgccttatacaacaaccgcaaccaaccccagtcccccaagaacctgttggtgaaaaatctctaaagcaagttgcaaaagattcactggcaggtgagcaactaccaacatctgcatcagagaaaaacgacgagaatagacagaacgtgagtggttcaagcaattcaagcagctccagcagtgactcaggatcatcgtctagtgactcagacagtgatagctcctcttcagatggatctgatgctgccaattcatcttgagatatagattaacttggagctggctgcctggctgattccttctaaggccaaataagatatttgtagaccttccagtgatgt

SEQ ID NO: 199460 - DNA, 3122 bp, Zea Mays
gtcaaagtcgtctcttctctcagatctcgtgctgtccctagcattttccctagtttaactagggacttcgcatccattgtgtctgatttcttctattcagagtgaattgcagaagtagactggtttcttcttcatccagtaagctcagtctgtaccctgcactgcaacaatggtgctaggcctccgaaccaagacaaggaaggattctgccttccatgtggatttcaatattctcatccaagaaatcagcccatggcccccttctgaatcgttgaagtctttgcgctccgtagtactcttctgggaaaatggcgagcgcaattcaggaaagacgagcactgttgcgccttcaattgggtcaggttccacagcagggaagattgaatttaatgagttcataaacttacaggctattttccagaaggaggggtcatccaagagtggaaagtggcagaagaacctgcttgaattgaacttgtatgagccgaggagggagaagctgaagggccagcatttggggtctgcaacactagaccttgcagagcatgcaatgtttcatgaggacaccagtgttcctgtgcctctcagttccaagagaagtttcaaaaacaatgcccaacccatggtttacctccgaatccagcctttggatggcgataactcaagcgtttcttcaagagatgcattatcacaagaggcatcagttgataaagattcaaaggaatttgtctcagcaacggtgagtgaggagtatactgaagatacagagtttgcttcctttactgatgaagaagaagcaactccatacctgtaccgctcgggtgtaactgctctcacaggtagcaatagatctcatgaatccctcaagggcaaggatatcaggttaactaataatgaaggtaccagctcatcgttggattctcaacatgaagcaacagtatcctgtatgaaagtgaggaatgaagaagttgaaaagtttccaattcaagtgcaaaagcaaaatggccatccagaaaatctgtctctctcatcagatttgcccagagaacaaagtccgtctcttccaccacacaatgcattcagaagtggtcgtaaaatgtcatttgcatatggtatgactgaatctaaccaaagacagtttggggagagaacttatagcactttaactactgatagagcaaggaatgcgaggttcagtatgagagttccagatgttaatggaagtatcataaataagaaagttgattcccaggatattgcaattactcatgagaataaggccagtgttgatgatggattgcaagtccaggaaccaatacgcatttcaaataatcgaaatgacaacaaagttcgagaactagaacttaaaattgagttgcttgaagcagagctaagggaagctgccgctgctgagataggcctttattcaataattgcagaacatggtagttcagtaaacaaggttcatacaccggcacggaggctctccaggcattttgtgcatgcactaaaaaactgttcaagagacaagatgggaagtgcagcaaggaacacaacctctgggctggttttggttgcaaaagcttgtggatatgacattgcaaggttgagtttctggttgtcaaactgtgttgtactgcgagcaattgttactgaaacttctaggcaatcgggcactgtaaatagcagcaattatggtgattataattccaaaacaacatacaggaaaaactctgcatcaatgtgggagtcacttaataggaagaaaggaaaattactttcccctgagtttgataactgggaagatgttgacacatttatagctgcactaaagaagatcgaatcatggatattttctcgaattgttgaaaccctttggtggcagacattcacaccacatatgcaatctgctgatataactggtggtttgagaagtactccaaatccaaaaaaaggctatggaaagattcctgttgtgggcaaccagcaacaagcaaccatatcaatggacatatggaagaaagcctttaaggaagcgtcagaacggctttgcccagtaagggcagctggtcatgagtgtggatgtctgcctatgttaaccaagttggtgatggagcagtgcatagctaggttggatgtagcaatgttcaatgctattttgcgtgaatcagatgatgaaattccaacagacccgctgtctgatcccataactgatcctaaagttcttccaatcccatctgggaaattcagcttcggtgctggggtccaactgaaaaatgctattggcagctggtctagatgtcttactgacttgtttggcatggatatggacgactatcaagaacttgacaatgaaggtggtgaaaatggctttggtgaatctgtaaagccattctatcacctgaatgcactgagtgatctcctaatgcttcccaaggatgtgctcatggataccagtagcaggaaagagctttgccctacctttagctcatcaatcatcaagaacatcctggatgtctttttaccagatgaattttgtccagatcccattcaaggttctttacttcaagcactagagttggaggaccacctggaggttaacaagggcatacggtcgatcccgtgcagcgcatcgccaattttgtacaatgcccctgtatctggggcaatactaagcgtcatcggtgatcctaggaagagcgggtccgccatccttcacaagtccaacacgagcgatgacgagcttgatgagctgagctccccacttaccttcatctccaacacctcatcagacccgcttgcgaagctgaagcggatcagcaactcgaccacagcgaggtataggcttctccatgaggtgtggaagctggatgaccagtaggacttgatcctatcaccaccatggttctcccctctgtatatagatgtaggcaattcaagtggcccaacgtgcaggcccatttcttctactccccacccgcagtgcagcggtgctgacgcagtgaaaatttattgtagtcccatactgctggccggtgatctgatagacaagtgtaacggtcagaggggttctatgtaacacctgcacccatgtgctattctatccctaaaccttacttggc

SEQ ID NO: 199461 - DNA, 2586 bp, Zea Mays
gtccctagcattttccctagtttaactagggacttcgcatccattgtgtctgatttcttctattcagagtgaattgcagaagtagactggtttcttcttcatccagtaagctcagtctgtaccctgcactgcaacaatggtgctaggcctccgaaccaagacaaggaaggattctgccttccatgtggatttcaatattctcatccaagaaatcagcccatggcccccttctgaatcgttgaagtctttgcgctccgtagtactcttctgggaaaatggcgagcgcaattcaggaaagacgagcactgttgcgccttcaattgggtcaggttccacagcagggaagattgaatttaatgagttcataaacttacaggctattttccagaaggaggggtcatccaagagtggaaagtggcagaagaacctgcttgaattgaacttgtatgagccgaggagggagaagctgaagggccagcatttggggtctgcaacactagaccttgcagagcatgcaatgtttcatgaggacaccagtgttcctgtgcctctcagttccaagagaagtttcaaaaacaatgcccaacccatggtttacctccgaatccagcctttggatggcgataactcaagcgtttcttcaagagatgcattatcacaagaggcatcagttgataaagattcaaaggaatttgtctcagcaacggtgagtgaggagtatactgaagatacagagtttgcttcctttactgatgaagaagaagcaactccatacctgtaccgctcgggtgtaactgctctcacaggtagcaatagatctcatgaatccctcaagggcaaggatatcaggttaactaataatgaaggtaccagctcatcgttggattctcaacatgaagcaacagtatcctgtatgaaagtgaggaatgaagaagttgaaaagtttccaattcaagtgcaaaagcaaaatggccatccagaaaatctgtctctctcatcagatttgcccagagaacaaagtccgtctcttccaccacacaatgcattcagaagtggtcgtaaaatgtcatttgcatatggtatgactgaatctaaccaaagacagtttggggagagaacttatagcactttaactactgatagagcaaggaatgcgaggttcagtatgagagttccagatgttaatggaagtatcataaataagaaagttgattcccaggatattgcaattactcatgagaataaggccagtgttgatgatggattgcaagtccaggaaccaatacgcatttcaaataatcgaaatgacaacaaagttcgagaactagaacttaaaattgagttgcttgaagcagagctaagggaagctgccgctgctgagataggcctttattcaataattgcagaacatggtagttcagtaaacaaggttcatacaccggcacggaggctctccaggcattttgtgcatgcactaaaaaactgttcaagagacaagatgggaagtgcagcaaggaacacaacctctgggctggttttggttgcaaaagcttgtggatatgacattgcaaggttgagtttctggttgtcaaactgtgttgtactgcgagcaattgttactgaaacttctaggcaatcgggcactgtaaatagcagcaattatggtgattataattccaaaacaacatacaggaaaaactctgcatcaatgtgggagtcacttaataggaagaaaggaaaattactttcccctgagtttgataactgggaagatgttgacacatttatagctgcactaaagaagatcgaatcatggatattttctcgaattgttgaaaccctttggtggcagacattcacaccacatatgcaatctgctgatataactggtggtttgagaagtactccaaatccaaaaaaaggctatggaaagattcctgttgtgggcaaccagcaacaagcaaccatatcaatggacatatggaagaaagcctttaaggaagcgtcagaacggctttgcccagtaagggcagctggtcatgagtgtggatgtctgcctatgttaaccaagttggtgatggagcagtgcatagctaggttggatgtagcaatgttcaatgctattttgcgtgaatcagatgatgaaattccaacagacccgctgtctgatcccataactgatcctaaagttcttccaatcccatctgggaaattcagcttcggtgctggggtccaactgaaaaatgctattggcagctggtctagatgtcttactgacttgtttggcatggatatggacgactatcaagaacttgacaatgaaggtggtgaaaatggctttggtgaatctgtaaagccattctatcacctgaatgcactgagtgatctcctaatgcttcccaaggatgtgctcatggataccagtagcaggaaagagctttgccctacctttagctcatcaatcatcaagaacatcctggatgtctttttaccagatgaattttgtccagatcccattcaagggggtatatcttcgcattaggctgctagtttcacaggaagggaactacagtaaaagaagcacgt

SEQ ID NO: 199462 - DNA, 2886 bp, Zea Mays
gactcgagctccctagatttcgattagaaaactcgatcagattcttttctttcctctcctccggaatagtttattccgctttgctttgggtccacgatctcttcttcgtctcctcctcgaggcagaggaagacgtccggcttcttgtatccgccttgttagccccacacaccgacaacctggactgcgcgtccacgaactcactcgccgaacagacatcattccccttaccccgacgtttgaaatcctctccagccgatgcatcctccccatcaatcttctccggttcgttgcattgcgtctggattggcctgcccctgctagattcagggacttcgcatccattgtgtctgatttcttctattcagagtgaattgcagaagtagactggtttcttcttcatccagtaagctcagtctgtaccctgcactgcaacaatggtgctaggcctccgaaccaagacaaggaaggattctgccttccatgtggatttcaatattctcatccaagaaatcagcccatggcccccttctgaatcgttgaagtctttgcgctccgtagtactcttctgggaaaatggcgagcgcaattcaggaaagacgagcactgttgcgccttcaattgggtcaggttccacagcagggaagattgaatttaatgagttcataaacttacaggctattttccagaaggaggggtcatccaagagtggaaagtggcagaagaacctgcttgaattgaacttgtatgagccgaggagggagaagctgaagggccagcatttggggtctgcaacactagaccttgcagagcatgcaatgtttcatgaggacaccagtgttcctgtgcctctcagttccaagagaagtttcaaaaacaatgcccaacccatggtttacctccgaatccagcctttggatggcgataactcaagcgtttcttcaagagatgcattatcacaagaggcatcagttgataaagattcaaaggaatttgtctcagcaacggtgagtgaggagtatactgaagatacagagtttgcttcctttactgatgaagaagaagcaactccatacctgtaccgctcgggtgtaactgctctcacaggtagcaatagatctcatgaatccctcaagggcaaggatatcaggttaactaataatgaaggtaccagctcatcgttggattctcaacatgaagcaacagtatcctgtatgaaagtgaggaatgaagaagttgaaaagtttccaattcaagtgcaaaagcaaaatggccatccagaaaatctgtctctctcatcagatttgcccagagaacaaagtccgtctcttccaccacacaatgcattcagaagtggtcgtaaaatgtcatttgcatatggtatgactgaatctaaccaaagacagtttggggagagaacttatagcactttaactactgatagagcaaggaatgcgaggttcagtatgagagttccagatgttaatggaagtatcataaataagaaagttgattcccaggatattgcaattactcatgagaataaggccagtgttgatgatggattgcaagtccaggaaccaatacgcatttcaaataatcgaaatgacaacaaagttcgagaactagaacttaaaattgagttgcttgaagcagagctaagggaagctgccgctgctgagataggcctttattcaataattgcagaacatggtagttcagtaaacaaggttcatacaccggcacggaggctctccaggcattttgtgcatgcactaaaaaactgttcaagagacaagatgggaagtgcagcaaggaacacaacctctgggctggttttggttgcaaaagcttgtggatatgacattgcaaggttgagtttctggttgtcaaactgtgttgtactgcgagcaattgttactgaaacttctaggcaatcgggcactgtaaatagcagcaattatggtgattataattccaaaacaacatacaggaaaaactctgcatcaatgtgggagtcacttaataggaagaaaggaaaattactttcccctgagtttgataactgggaagatgttgacacatttatagctgcactaaagaagatcgaatcatggatattttctcgaattgttgaaaccctttggtggcagacattcacaccacatatgcaatctgctgatataactggtggtttgagaagtactccaaatccaaaaaaaggctatggaaagattcctgttgtgggcaaccagcaacaagcaaccatatcaatggacatatggaagaaagcctttaaggaagcgtcagaacggctttgcccagtaagggcagctggtcatgagtgtggatgtctgcctatgttaaccaagttggtgatggagcagtgcatagctaggttggatgtagcaatgttcaatgctattttgcgtgaatcagatgatgaaattccaacagacccgctgtctgatcccataactgatcctaaagttcttccaatcccatctgggaaattcagcttcggtgctggggtccaactgaaaaatgctattggcagctggtctagatgtcttactgacttgtttggcatggatatggacgactatcaagaacttgacaatgaaggtggtgaaaatggctttggtgaatctgtaaagccattctatcacctgaatgcactgagtgatctcctaatgcttcccaaggatgtgctcatggataccagtagcaggaaagagctttgccctacctttagctcatcaatcatcaagaacatcctggatgtctttttaccagatgaattttgtccagatcccattcaagggggtatatcttcgcattaggctgctagtttcacaggaagggaactacagtaaaagaagcacgt

SEQ ID NO: 199463 - DNA, 4538 bp, Zea Mays
ctctagtcttctccagttcccaccccgcgccccaaatccagatccactgcccaccacccgcctattagtctccaacgcggacgcccccgcccccggctgcactcgtcgcgccatcctctggtgcctggtctccgggattctgcaggttcagttgagtagaccagtgtttgagcaagggttgaacataggaatgcgctgtttgttcctagagtagcagttcaaaatccaaacccgcccgcgatgaaaagcggcgtcatggttctcggtgtcggcagccctgaagaggcccctgaccgcaacgatgcggagccacggcgcgatatgggccaatcgcagatgcaggtcggtggccccgttgttctcaaccgatcagctgagctcgggtcaggtgattttatggctatcgatgacgctccagttcaagcaccatcgggccagccggcggcggcaaaacatcagtctcctgctgctctgacggacaccatcatggaggtgcagaagcaactgaagcgaaagagggcttctaataacccagtgattgctgccgcggacaaggacgctctcgctgccgggtgccggcaagagcttgagggtctcttccagttttacaaggaggtttctgaccgtaaggtgcagcttgacggtggtaacctgtccgtcaacggaatggttggctgcttgcttgaggagagcagccttgggctgaccaagttggtggacgggatatatgaaaagttgaagggattggatggtgtgtctgtggcttcagtccgtggctctgtgctgctcgttgggcagaggatgatgtacgggaaatcatccttggacgctgatgtgttggaagatgatacagagtcggctctttggtgctgggagacaagagatctgaaattgatgcctgtgaaagcacgcagtgttcttagtacacggaggtctgtcagaaagaaaatccatgagagaatcactgccatctattgtaagcaactctatcggttcttgaaaacccaggagtttacgtccaagtaaatgatctaaaaaaggcatcattaagattaaacaaatcgctgaacctggaagggatcagatcaatggtggaaagagtggcacaaaagaacctagaacggggtgtgaaagttgctggatcagcaattaaggaattgaagcaagagacagaaaaaaatgaccaaaatcttagaagacttgaggatactagcgtctctgagctgcagaatggaaattcgcctgataatgaaaaagaggttcaaaaggcacaaaaacaggtggagaaggaaataaagcgccaggagaaagaagaagctcggatgaaaaaactgcaaaagaaacagcaagaagatgtcctaagagaacagaagagacgtgaaaaggaggaagctgaagctaagaaacaacaaaagaagcaggaggaggaagcactgaaagaacagaagcgtcgtgaaaaggaagaagctgaaatgaagaaacaacataaaaaacagcaagaggaagctgagaaagaacagaagcgccttgagaaggaagctgcacaactcaagaagcaactagccgtgcaaaagcaagcttctatgatgcaaagatttttcaaaagtaagaaagacaatggaaaacttcaaaaatctggagagaacaactcagctgatggtccgtgcaatgacaacaaagagaccgtaccatcaaccacatcaaaaattgattattcattgtctcaacaagagagctgggttttggaggatctttggaggttgcagatcactggttggaagaagctatctagccacaataggtcctccagatggggtgtaagatgcaaacccaagacgaaagcatttaatgaactgaagcttcagaaatcctcagatgatatggttgatgaaatactttctactccaaataaagatggctgccacacttcaagtcaggaaaatgaacatgctacgcttgaaagtgacattgacatgctacaagctattgaggtgcaatgtcatgacaccaataaccctaaacctctgcaaactagattaattagaaggaaacttctgcaatttgacaaaagtaacaggccagcgtattatggatcctggaggaagaaaagtgttgttattggtccaaggtgtccacttaagatggatcctaatcttgactatgaggttgatagtgatgatgaatgggaagaggaggatcctggtgagagtctttctgactgtgagaaggataatgatgaatttatggaagaagattccaaaattacagatgaagaagatgaagatagctttgttgtgcctgatggctatctatcggacaatgagggaatacaaattgaaagcctattggatgataaagatgaggaagccagtagctcaccaactggtcagtgtgcagaagttgaagagttcaggtctctactgcgccaacaaagagtcctgaacattttaaccgagcaagctctccggaagagccaacctcttattatatccaacctaaatcatgaaaaagctgaattactgactgccgaagacctcaaggggacagcaaagatcgaacagctatgtttgcaagttctttcaatgcacatctgtccaggaggcgcagttgttgatgtgcctctaactgacagctcatctgcaactgttgaagaaattaaccagcccaatccgaaggatggttctcctggggctgcatctgctataccagaaacagatctgccagaaattgtccaggtgataagatcatgtcgagatggtatccataaggtggtggaattactgcagcacaagtttccaaatgtttcaaagactcagctgaatcgcaaagtgagagagatatctgactttgttgacaatcattggaaggtaaagaaagaggtgcttgacaagctgggattggattcgtcaccagtgaaatccaagaagaataaaagcatagccatgtacttctcgaagagatgtttacctcctgaagaggctgtcaatgctctgtctgcttctcctgagttgcggttgaaatctagaaccattcaaaatggcaatggtggcaccgaagctcctcagatcaatctgttcccttcaaagcagtagagtttgtaacaggacaccctgaaagtcggatcaggtataaatgaggctatgcacccaggtgagcacaaagctcagaggtccatgtccctcccatggctatggaagtgcgtgcaacttggttttgcatatggatgatctggatcgattatgtttccagtgacatgttgtaattttagccagaaagtaggtttgttcatgaaggacattcagttcaaatgtttgacctattgttaaggcaaggcattgttctctgcaacatgtggtgttatgaacattatgtgcactcgtgattctgccaaataagtaatgtgtcctgtgactggtcaattgaagcgcatctcttgagagaagtggagaaatttgctatttgtcactctcggttttggtttccatctcgtgtctagtgcaaccatctgtgataatggcaatggtaaaattgccaatggctcggtgcgactggggcgagcaaatatatttttcacttgtggcttatcaaatgacagattttctcagaaatttgtttttacaacctgtttgcatcaaatctgatgaatgtgcatgcaagtagtagcaaaggcaacaaaaagcaatgtatatttgctttggcatttaacaattttggttgaacaggcacagtagtaccaaaaaaaagcaatagtacatactaacagacggcaaagaatcaacgaatcttgttcatatatcattctgaaggagctaacaccagcggacgatcagacatggtacggctgccggttcttggcctggaggtcgtcgtcgtcgtcgtcatcgaggcggagggagaaggcgagcgcgagcgcggcccactcgaggacgaagatggcggtgccgaggcccccgaccatcttgaggatgacggcgccgtcctcgtcgcggacgtaggactgaagctcggccaggaagtcggaggtgcgggtgaacgcgagcagcgcgacggccccctggaagatggcggtgagcgcggcccccgcggtgtgcgcgttgtgccactgcgcgggcgtggcgggcgccgtgaaggagcccgagcagccggccgcggagaagacggcggtgagggcgtggaggaagagcaggaggaggccgcacggggacggcagcaggcgcagcgacagcgtgaggaagatgcagctggaagcggcgcccatgaggacgtagttgcacaggaggaacgccttgcgcgtgtgcgacttgcccgccattcgactcgacgccgccggactccgcttggaagcttaccgagggagcgggatggcttgcggtcgaaggggcgaggtcgagatcgagagagggaggtttggagtggagtgggagcggtggagtggtgggaactttatacctgcgcgggcgggcggggtggcgctggcgcggaggatttggccgttggaggcgtgtcggcggcggcggcggcgatgatgaggagtgagg

SEQ ID NO: 199464 - DNA, 4671 bp, Zea Mays
cgaaaagttctcgaagccgccggccgcgggaaacattttgcgcgccgcgctcccttctccttccgcatgcgcgcgcgcccgccccaccgcccgttacaaatactccattcccggttcggcgcttcctctcttccaaatctctagtcttctccagttcccaccccgcgccccaaatccagatccactgcccaccacccgcctattagtctccaacgcggacgcccccgcccccggctgcactcgtcgcgccatcctctggtgcctggtctccgggattctgcaggttcagttgagtagaccagtgtttgagcaagggttgaacataggaatgcgctgtttgttcctagagtagcagttcaaaatccaaacccgcccgcgatgaaaagcggcgtcatggttctcggtgtcggcagccctgaagaggcccctgaccgcaacgatgcggagccacggcgcgatatgggccaatcgcagatgcaggtcggtggccccgttgttctcaaccgatcagctgagctcgggtcaggtgattttatggctatcgatgacgctccagttcaagcaccatcgggccagccggcggcggcaaaacatcagtctcctgctgctctgacggacaccatcatggaggtgcagaagcaactgaagcgaaagagggcttctaataacccagtgattgctgccgcggacaaggacgctctcgctgccgggtgccggcaagagcttgagggtctcttccagttttacaaggaggtttctgaccgtaaggtgcagcttgacggtggtaacctgtccgtcaacggaatggttggctgcttgcttgaggagagcagccttgggctgaccaagttggtggacgggatatatgaaaagttgaagggattggatggtgtgtctgtggcttcagtccgtggctctgtgctgctcgttgggcagaggatgatgtacgggaaatcatccttggacgctgatgtgttggaagatgatacagagtcggctctttggtgctgggagacaagagatctgaaattgatgcctgtgaaagcacgcagtgttcttagtacacggaggtctgtcagaaagaaaatccatgagagaatcactgccatctattcaactctatcggttcttgaaaacccaggagtttacgtccaagtaaatgatctaaaaaaggcatcattaagattaaacaaatcgctgaacctggaagggatcagatcaatggtggaaagagtggcacaaaagaacctagaacggggtgtgaaagttgctggatcagcaattaaggaattgaagcaagagacagaaaaaaatgaccaaaatcttagaagacttgaggatactagcgtctctgagctgcagaatggaaattcgcctgataatgaaaaagaggttcaaaaggcacaaaaacaggtggagaaggaaataaagcgccaggagaaagaagaagctcggatgaaaaaactgcaaaagaaacagcaagaagatgtcctaagagaacagaagagacgtgaaaaggaggaagctgaagctaagaaacaacaaaagaagcaggaggaggaagcactgaaagaacagaagcgtcgtgaaaaggaagaagctgaaatgaagaaacaacataaaaaacagcaagaggaagctgagaaagaacagaagcgccttgagaaggaagctgcacaactcaagaagcaactagccgtgcaaaagcaagcttctatgatgcaaagatttttcaaaagtaagaaagacaatggaaaacttcaaaaatctggagagaacaactcagctgatggtccgtgcaatgacaacaaagagaccgtaccatcaaccacatcaaaaattgattattcattgtctcaacaagagagctgggttttggaggatctttggaggttgcagatcactggttggaagaagctatctagccacaataggtcctccagatggggtgtaagatgcaaacccaagacgaaagcatttaatgaactgaagcttcagaaatcctcagatgatatggttgatgaaatactttctactccaaataaagatggctgccacacttcaagtcaggaaaatgaacatgctacgcttgaaagtgacattgacatgctacaagctattgaggtgcaatgtcatgacaccaataaccctaaacctctgcaaactagattaattagaaggaaacttctgcaatttgacaaaagtaacaggccagcgtattatggatcctggaggaagaaaagtgttgttattggtccaaggtgtccacttaagatggatcctaatcttgactatgaggttgatagtgatgatgaatgggaagaggaggatcctggtgagagtctttctgactgtgagaaggataatgatgaatttatggaagaagattccaaaattacagatgaagaagatgaagatagctttgttgtgcctgatggctatctatcggacaatgagggaatacaaattgaaagcctattggatgataaagatgaggaagccagtagctcaccaactggtcagtgtgcagaagttgaagagttcaggtctctactgcgccaacaaagagtcctgaacattttaaccgagcaagctctccggaagagccaacctcttattatatccaacctaaatcatgaaaaagctgaattactgactgccgaagacctcaaggggacagcaaagatcgaacagctatgtttgcaagttctttcaatgcacatctgtccaggaggcgcagttgttgatgtgcctctaactgacagctcatctgcaactgttgaagaaattaaccagcccaatccgaaggatggttctcctggggctgcatctgctataccagaaacagatctgccagaaattgtccaggtgataagatcatgtcgagatggtatccataaggtggtggaattactgcagcacaagtttccaaatgtttcaaagactcagctgaatcgcaaagtgagagagatatctgactttgttgacaatcattggaaggtaaagaaagaggtgcttgacaagctgggattggattcgtcaccagtgaaatccaagaagaataaaagcatagccatgtacttctcgaagagatgtttacctcctgaagaggctgtcaatgctctgtctgcttctcctgagttgcggttgaaatctagaaccattcaaaatggcaatggtggcaccgaagctcctcagatcaatctgttcccttcaaagcagtagagtttgtaacaggacaccctgaaagtcggatcaggtataaatgaggctatgcacccaggtgagcacaaagctcagaggtccatgtccctcccatggctatggaagtgcgtgcaacttggttttgcatatggatgatctggatcgattatgtttccagtgacatgttgtaattttagccagaaagtaggtttgttcatgaaggacattcagttcaaatgtttgacctattgttaaggcaaggcattgttctctgcaacatgtggtgttatgaacattatgtgcactcgtgattctgccaaataagtaatgtgtcctgtgactggtcaattgaagcgcatctcttgagagaagtggagaaatttgctatttgtcactctcggttttggtttccatctcgtgtctagtgcaaccatctgtgataatggcaatggtaaaattgccaatggctcggtgcgactggggcgagcaaatatatttttcacttgtggcttatcaaatgacagattttctcagaaatttgtttttacaacctgtttgcatcaaatctgatgaatgtgcatgcaagtagtagcaaaggcaacaaaaagcaatgtatatttgctttggcatttaacaattttggttgaacaggcacagtagtaccaaaaaaaagcaatagtacatactaacagacggcaaagaatcaacgaatcttgttcatatatcattctgaaggagctaacaccagcggacgatcagacatggtacggctgccggttcttggcctggaggtcgtcgtcgtcgtcgtcatcgaggcggagggagaaggcgagcgcgagcgcggcccactcgaggacgaagatggcggtgccgaggcccccgaccatcttgaggatgacggcgccgtcctcgtcgcggacgtaggactgaagctcggccaggaagtcggaggtgcgggtgaacgcgagcagcgcgacggccccctggaagatggcggtgagcgcggcccccgcggtgtgcgcgttgtgccactgcgcgggcgtggcgggcgccgtgaaggagcccgagcagccggccgcggagaagacggcggtgagggcgtggaggaagagcaggaggaggccgcacggggacggcagcaggcgcagcgacagcgtgaggaagatgcagctggaagcggcgcccatgaggacgtagttgcacaggaggaacgccttgcgcgtgtgcgacttgcccgccattcgactcgacgccgccggactccgcttggaagcttaccgagggagcgggatggcttgcggtcgaaggggcgaggtcgagatcgagagagggaggtttggagtggagtgggagcggtggagtggtgggaactttatacctgcgcgggcgggcggggtggcgctggcgcggaggatttggccgttggaggcgtgtcggcggcggcggcggcgatgatgaggagtgagg

SEQ ID NO: 199465 - DNA, 1618 bp, Zea Mays
atcacaggttcaacaatattcaacattaaatggcaatatcatgccttcaaatcacacaaaacatagcattgattctacccgtgccctaatagagtttttacccatcgggagcaaattcattttatatgagacataaatctggacccacatgtcatatattagcgggttccctatcgggtagcgggtatggggcaacagagaacatacccacgcccaccatacccgatgggcataacaaatgacccaataaaatacccatgggtatcaaaatccgacatacccgtgccctaatagggtttttacctatcgggtttcgggtacccattgccatccctaatctcagcccgcccgcccgccccactctggagataaggctctccgcctccgcctcgcagcctcccttctatcctctccggcacgagccgtccagttcagttcacctcggtccgggaccgcgactacaccgacggcggcgcgtccgagcccagccgacgccgagccaatggtgactccagcgacattctccctccgccccagcgcgccccccgcgccgcctcgtgccgggctgccccgcgctcgggcctgtttcgcgcccgccatccgcacctccccttccgtcgccttttcctaccagcctcggcgcttcagtggcatccgccgcgccgtggccgtcgactccgagcagggctcccccgagtctccagagcaggagaagaagcccaagacgtactacttcctggtggcaaacgccaagttcatgctggacgaggaggagcatttccaggagcaactcgccgagaagctgcgcaactacgccgagcgcgacaaggagcaggacttctggctcgtcgtggagcccaagttcctcgacaggttccccaacatcaccaagcgcctcaagcgccccgccgtcgcgcttgtctccaccgacggcaactggatcacattcatgaagttaaggctagacagggtcttacaagaccagttcgacgcagaatcagttgaagaggcattggcttctaaccctgttgagttgaaatttgagaagcctgagaaatggacagctccgtaccctaaatatgggtttggatggtgggaacccttcttgcctccaaagttcagcaatggtacggcatagagataagcagcaatccctatgaggcatgttataacacgaggcactactacttgctcagtctaccagaccagaataaagacctctgtgccacgaagcacgaacaaatggacaatgccaatcacaatagtaaggacggactaacctgaacggttattatgggtccgtttggtttctttagtctcgagactaaagtttagttaggagactaaagtttagtccctattctgtttggttctaggactaaaagtattcaaaacacattaaataaatcataagaagactaaaatatcctttagcattctcctgtcattagtgcaactgaaataaaggaagaataaaaagtgtaatttatatggtttagtctcttttagtcacccttgaaggattagagacaaacaatttagtccatgttttagtcccaccgattgacaatttagggactgaaattgagagactaatctttagtccctcaaaccaaat

SEQ ID NO: 199466 - DNA, 1634 bp, Zea Mays
atcacaggttcaacaatattcaacattaaatggcaatatcatgccttcaaatcacacaaaacatagcattgattctacccgtgccctaatagagtttttacccatcgggagcaaattcattttatatgagacataaatctggacccacatgtcatatattagcgggttccctatcgggtagcgggtatggggcaacagagaacatacccacgcccaccatacccgatgggcataacaaatgacccaataaaatacccatgggtatcaaaatccgacatacccgtgccctaatagggtttttacctatcgggtttcgggtacccattgccatccctaatctcagcccgcccgcccgccccactctggagataaggctctccgcctccgcctcgcagcctcccttctatcctctccggcacgagccgtccagttcagttcacctcggtccgggaccgcgactacaccgacggcggcgcgtccgagcccagccgacgccgagccaatggtgactccagcgacattctccctccgccccagcgcgccccccgcgccgcctcgtgccgggctgccccgcgctcgggcctgtttcgcgcccgccatccgcacctccccttccgtcgccttttcctaccagcctcggcgcttcagtggcatccgccgcgccgtggccgtcgactccgagcagggctcccccgagtctccagagcaggagaagaagcccaagacgtactacttcctggtggcaaacgccaagttcatgctggacgaggaggagcatttccaggagcaactcgccgagaagctgcgcaactacgccgagcgcgacaaggagcaggacttctggctcgtcgtggagcccaagttcctcgacaggttccccaacatcaccaagcgcctcaagcgccccgccgtcgcgcttgtctccaccgacggcaactggatcacattcatgaagttaaggctagacagggtcttacaagaccagttcgacgcagaatcagttgaagaggcattggcttctaaccctgttgagttgaaatttgagaagcctgagaaatggacagctccgtaccctaaatatgggtttggatggtgggaacccttcttgcctccaaagttcagcaatggtacggcatagagataagcagcaatccctatgaggcatgtaagattactcccctgttataacacgaggcactactacttgctcagtctaccagaccagaataaagacctctgtgccacgaagcacgaacaaatggacaatgccaatcacaatagtaaggacggactaacctgaacggttattatgggtccgtttggtttctttagtctcgagactaaagtttagttaggagactaaagtttagtccctattctgtttggttctaggactaaaagtattcaaaacacattaaataaatcataagaagactaaaatatcctttagcattctcctgtcattagtgcaactgaaataaaggaagaataaaaagtgtaatttatatggtttagtctcttttagtcacccttgaaggattagagacaaacaatttagtccatgttttagtcccaccgattgacaatttagggactgaaattgagagactaatctttagtccctcaaaccaaat

SEQ ID NO: 199467 - DNA, 2570 bp, Zea Mays
atctccataagatttggctggttttttacgttggtttgccggacctaacacaaccctcctcctttaccgggcctgggaccggctatgttgaaacgactcaaggaagtcttccaatcaacataggcggagttttagctagtttatcaaaaatcatcatgtatataatactacagtatttaaaaatgctgcagtatttttctaaacttgtgaaaaaacttcactactaaacaactcctaaggagtaactgaatgccgatgccgtgctccgccggtgaggtcaccgcggcggcactggcacgggatccatcttcctccctcgtcgtccacgttcaaacccctgccccgattccaattccatcaattccatcgaggtggcagattcgaattgattaatccgttaacaagaaaatatactagtcaccacccctctctcctctttcgtcgccatcaacgaccgcttccactccgcctgccgctcccttcctcggcagcagcccgcccgccaccgcgtgaattcgcgggggctacaaatcccgccccgcccggccctgccaccgcggcatctcacctccatccaccaccgtcgtcggccaaggaaaaggaaaaggaaaagaaaggagcggggaagcggggcactggagcagtgaccatggtgaggctcccgtacgtgaccgcgctcaccacgctcttcagctacggcctcctcttcgccttcggccagctccgcgacttcttccgcaggatcctcgacgcccgcaagcccagcaacctcaagggctacgcgccgatctgcttgggactcgaggatttctacacgcgacgcctctacctccgcatccaggactgctttggccggccgattgctagtgcaccagatgcttggttcgatgtggttgagcgctactcaaatgactgcaacaagacactccatcgtaccacagcaacaaccaaatgccttaacttgggttcctataactaccttggttttgctgcggctgatgagtactgcacccctcgtgttattgagtcactgaagaaatattcggctagcacgtgcagtgttcgagttgatggaggcaatactaagttgcacacagagctcgaagagcttgttgcaagatttgttggtaagcctgcagctattctttttggcatgggctatgtgacaaactctgctatcattccagcgctggttgggaagggaagcctgattattagtgattcactgaaccataattctatagtcaacggagctaggggttcaggggccactgttcgggtttttcaacataacaatcctgctcacttggaagaggtattgagagagcagattgcaggaggccagcctcgcacacacaggccatggaagaagatcattgtaattgtcgagggaatttatagcatggagggggagctatgcaaactccctgaggttatttctgtctgcaagaaatacaagggcctaatatacctcacatatgaacaggcctacacatatctagacgaagcacacagtattggagctgttgggaaaacagggagaggtgtttgtgagctgctcggagtggatccagctgatgttgacattatgatgggtacattcacaaaatcatttggatcatgtggaggttacattgcagcatcaaatgagattattcaccatctaaagcatacatgcccagcccatatttatgcaacatccatgtcacctccagcagtccagcaggtcatttcagctataaaggtcatccttggggaagatggaactaacagaggggccaagaagctcgctcaaattcgagagaacagcaatttcttccgctcggagcttcagaaaatgggttttgaggttcttggagataatgattcacctgtcatgcctatcatgctttacaatcctgctaaaattcctgcattctcaagggagtgcctgaggcaagctgttgctgttgttactgttgcatttcctgccacgccacttctacttgcgagagctaggatatgtatctcagcttcccactccagggaagatctcataaaaggattggaggttatcagcaaagttggtgaccttgtgggtatcaaatacttcccggttgagcaagaaaagaccacggctgttgaaaatctgaagaaaattcaatgaacaatggcaagaactctgaagctgttgtagggtcatcttagtgtgcatcgcatgcctcagtttggcccttctgtgcacctctgggcccttttttgtccttctgtttgtggagaaatttagactttgtacagtatgtatcatccaccatagttgaaaatataacgggcagatagacattgtcatcgaattcggagaagtaatttttccggtcaccactttaaaccatttagactatgtgactgaaaccatgtagatattattatcgatcattctggttgttttgaattggacgtagataggtccatctttgtgaccgagtaataaatctggagtacagaaatggaaaaggcagcagagctgaatccgaatattttggtgagcagtgcttagtgttgatttatttgactgagtgatcttaccagtc

SEQ ID NO: 199468 - DNA, 1032 bp, Zea Mays
gttcattcttcctttgctgtctcatttcagtgatgccagcttgctgaggttccttgttgacatgaggggagctgacgctgatgatcgccagcttcgagatgatcttatgacaatgcttattgctggacatgaaacaactgctgctgttctgacatggtctgtttttttgctagcccagagccctaccaggatgagaaaagcccaggcagaggttgattctgttctcagcaatggggcaattactgtcgaatctcttaagaaactggagtacataaaactgattattcttgaagctcttcgcttgtatcctcagccaccattgttaatcaggcgttctctccggccagacaagttgccaggcgggtgcaatggagcaaaagagggatatgaaataccagctgggaccgatatatttgtttcggtatacaacctccacagatccccgtatttctgggaccggccaaatgagtttgaacccgagaggttttccgtcccgaagaaggacgagagcatagaaggctggtctggttttgaccctgaccggagtcctggcgcaatgtaccccaacgagatcatagcggacttcgctttcctccccttcggcggagggcctcgcaagtgcgtgggggaccagttcgcgctcctggagtcgacggtggctctggccctgctgctgcggaagttcgacgtggagctgagagggtcgcccgacgaagtggagatggtgacaggcgccacgatccacacgaagaacgggctgtggtgcaggctgaggagaaggacttgacgggccaacattagctttgcagtttgcactgagtgagaagtagctctcgtgcttgactcctgtgatgtgctttaggcgagctaaactgcatcgcagacagaccagtggatgggaaccgtgtacactgaaaacatatcttgtaggcttgtagcgtaacaggtgcaaccacaacaatatattatttatctatctatctaattgagcttgacattccggtgcatgcacgcacacgcgcctgagaacac

SEQ ID NO: 199469 - DNA, 1710 bp, Zea Mays
ctttctgaaccctgcaacactgacatgttatcatagcatggctctgtctacaagcttgcttttggacccaaatcgttcgttgttgtctctgaccctatcgttgctagacacatcctccgggagaacgctttctattatgataagggagttctcgctgaaattttaaaacccataatggggaagggtcttatacccgctgaccttgatacctggaagcaaaggagaaaaggttagaaagttataacacctgggttccatgccttattcatagaagctatggtgaggacatttacgagatgttcagagagaacaatatcaaagcttgaggagcttactgaaagtgaaggccgtgaacaaaattcgactattgtggaccttgaagctgagttctccaatttggcacttgatatcattggattgggtgtgttcaattttgattttgactcggttactaaggaatctcctgtaataaaggcagtgtatggaacacttttcgaagctgagcaccgttccaccttctacatcccctattggaatcttcctttgacaaaatggatagttccaaggcagcgcaagttccatagtgacctcaaagtgatcaacaattgccttgataaccttataaaaaatgcaaaggagacgagacagactttttatataggaagctgatgtggaaaagctccagcaaagggactactcttctctgaaggatgccagcttgctgaggttccttgttgacatgaggggagctgacgctgatgatcgccagcttcgagatgatcttatgacaatgcttattgctggacatgaaacaactgctgctgttctgacatggtctgtttttttgctagcccagagccctaccaggatgagaaaagcccaggcagaggttgattctgttctcagcaatggggcaattactgtcgaatctcttaagaaactggagtacataaaactgattattcttgaagctcttcgcttgtatcctcagccaccattgttaatcaggcgttctctccggccagacaagttgccaggcgggtgcaatggagcaaaagagggatatgaaataccagctgggaccgatatatttgtttcggtatacaacctccacagatccccgtatttctgggaccggccaaatgagtttgaacccgagaggttttccgtcccgaagaaggacgagagcatagaaggctggtctggttttgaccctgaccggagtcctggcgcaatgtaccccaacgagatcatagcggacttcgctttcctccccttcggcggagggcctcgcaagtgcgtgggggaccagttcgcgctcctggagtcgacggtggctctggccctgctgctgcggaagttcgacgtggagctgagagggtcgcccgacgaagtggagatggtgacaggcgccacgatccacacgaagaacgggctgtggtgcaggctgaggagaaggacttgacgggccaacattagctttgcagtttgcactgagtgagaagtagctctcgtgcttgactcctgtgatgtgctttaggcgagctaaactgcatcgcagacagaccagtggatgggaaccgtgtacactgaaaacatatcttgtaggcttgtagcgtaacaggtgcaaccacaacaatatattatttatctatctatctaattgagcttgacattccggtgcatgcacgcacacgcgcctgagaacac

SEQ ID NO: 199470 - DNA, 2096 bp, Zea Mays
caggtccagtggccagtgaccacgctccaccccattgctctggctctgtgctgtgcagctgtgctgccgggctcctgcgccatggccgcggccacgctgctccagggcccagccgccgcctcgccgcgtctcggcgccgcggcttcagcgccgtccgcgtcccacgggaggcgtcgcctcaccttcagcttcaggtgccagtcgaccagcgtcgacaagcagcaggagcggccgcccaagccgaagcagcggaacctgctcgacaacgccagcaacctgctgaccaacttcctcagcggtggcaacctcggggccatgcccgtcgctgagggcgcggtcaccgacctcttcggcaagcccctcttcttctcgctttacgactggttcctcgaggtgaatgcgcgtcccctttctgaaccctgcaacactgacatgttatcatagcatggctctgtctacaagcttgcttttggacccaaatcgttcgttgttgtctctgaccctatcgttgctagacacatcctccgggagaacgctttctattatgataagggagttctcgctgaaattttaaaacccataatggggaagggtcttatacccgctgaccttgatacctggaagcaaaggagaaaagttataacacctgggttccatgccttattcatagaagctatggtgaggacatttacgagatgttcagagagaacaatatcaaagcttgaggagcttactgaaagtgaaggccgtgaacaaaattcgactattgtggaccttgaagctgagttctccaatttggcacttgatatcattggattgggtgtgttcaattttgattttgactcggttactaaggaatctcctgtaataaaggcagtgtatggaacacttttcgaagctgagcaccgttccaccttctacatcccctattggaatcttcctttgacaaaatggatagttccaaggcagcgcaagttccatagtgacctcaaagtgatcaacaattgccttgataaccttataaaaaatgcaaaggagacgagacaggaagctgatgtggaaaagctccagcaaagggactactcttctctgaaggatgccagcttgctgaggttccttgttgacatgaggggagctgacgctgatgatcgccagcttcgagatgatcttatgacaatgcttattgctggacatgaaacaactgctgctgttctgacatggtctgtttttttgctagcccagagccctaccaggatgagaaaagcccaggcagaggttgattctgttctcagcaatggggcaattactgtcgaatctcttaagaaactggagtacataaaactgattattcttgaagctcttcgcttgtatcctcagccaccattgttaatcaggcgttctctccggccagacaagttgccaggcgggtgcaatggagcaaaagagggatatgaaataccagctgggaccgatatatttgtttcggtatacaacctccacagatccccgtatttctgggaccggccaaatgagtttgaacccgagaggttttccgtcccgaagaaggacgagagcatagaaggctggtctggttttgaccctgaccggagtcctggcgcaatgtaccccaacgagatcatagcggacttcgctttcctccccttcggcggagggcctcgcaagtgcgtgggggaccagttcgcgctcctggagtcgacggtggctctggccctgctgctgcggaagttcgacgtggagctgagagggtcgcccgacgaagtggagatggtgacaggcgccacgatccacacgaagaacgggctgtggtgcaggctgaggagaaggacttgacgggccaacattagctttgcagtttgcactgagtgagaagtagctctcgtgcttgactcctgtgatgtgctttaggcgagctaaactgcatcgcagacagaccagtggatgggaaccgtgtacactgaaaacatatcttgtaggcttgtagcgtaacaggtgcaaccacaacaatatattatttatctatctatctaattgagcttgacattccggtgcatgcacgcacacgcgcctgagaacac

SEQ ID NO: 199471 - DNA, 2117 bp, Zea Mays
cggccaccttatcatctctgtccgttcaggtccagtggccagtgaccacgctccaccccattgctctggctctgtgctgtgcagctgtgctgccgggctcctgcgccatggccgcggccacgctgctccagggcccagccgccgcctcgccgcgtctcggcgccgcggcttcagcgccgtccgcgtcccacgggaggcgtcgcctcaccttcagcttcaggtgccagtcgaccagcgtcgacaagcagcaggagcggccgcccaagccgaagcagcggaacctgctcgacaacgccagcaacctgctgaccaacttcctcagcggtggcaacctcggggccatgcccgtcgctgagggcgcggtcaccgacctcttcggcaagcccctcttcttctcgctttacgactggttcctcgagcatggctctgtctacaagcttgcttttggacccaaatcgttcgttgttgtctctgaccctatcgttgctagacacatcctccgggagaacgctttctattatgataagggagttctcgctgaaattttaaaacccataatggggaagggtcttatacccgctgaccttgatacctggaagcaaaggagaaaagttataacacctgggttccatgccttattcatagaagctatggtgaggacatttacgagatgttcagagagaacaatatcaaagcttgaggagcttactgaaagtgaaggccgtgaacaaaattcgactattgtggaccttgaagctgagttctccaatttggcacttgatatcattggattgggtgtgttcaattttgattttgactcggttactaaggaatctcctgtaataaaggcagtgtatggaacacttttcgaagctgagcaccgttccaccttctacatcccctattggaatcttcctttgacaaaatggatagttccaaggcagcgcaagttccatagtgacctcaaagtgatcaacaattgccttgataaccttataaaaaatgcaaaggagacgagacaggaagctgatgtggaaaagctccagcaaagggactactcttctctgaagggattttggtgaatagtatctcatatctgtgccatcatgcttttaggatgccagcttgctgaggttccttgttgacatgaggggagctgacgctgatgatcgccagcttcgagatgatcttatgacaatgcttattgctggacatgaaacaactgctgctgttctgacatggtctgtttttttgctagcccagagccctaccaggatgagaaaagcccaggcagaggttgattctgttctcagcaatggggcaattactgtcgaatctcttaagaaactggagtacataaaactgattattcttgaagctcttcgcttgtatcctcagccaccattgttaatcaggcgttctctccggccagacaagttgccaggcgggtgcaatggagcaaaagagggatatgaaataccagctgggaccgatatatttgtttcggtatacaacctccacagatccccgtatttctgggaccggccaaatgagtttgaacccgagaggttttccgtcccgaagaaggacgagagcatagaaggctggtctggttttgaccctgaccggagtcctggcgcaatgtaccccaacgagatcatagcggacttcgctttcctccccttcggcggagggcctcgcaagtgcgtgggggaccagttcgcgctcctggagtcgacggtggctctggccctgctgctgcggaagttcgacgtggagctgagagggtcgcccgacgaagtggagatggtgacaggcgccacgatccacacgaagaacgggctgtggtgcaggctgaggagaaggacttgacgggccaacattagctttgcagtttgcactgagtgagaagtagctctcgtgcttgactcctgtgatgtgctttaggcgagctaaactgcatcgcagacagaccagtggatgggaaccgtgtacactgaaaacatatcttgtaggcttgtagcgtaacaggtgcaaccacaacaatatattatttatctatctatctaattgagcttgacattccggtgcatgcacgcacacgcgcctgagaacac

SEQ ID NO: 199472 - DNA, 2256 bp, Zea Mays
caatcaatttcagcgcggccaccttatcatctctgtccgttcaggtccagtggccagtgaccacgctccaccccattgctctggctctgtgctgtgcagctgtgctgccgggctcctgcgccatggccgcggccacgctgctccagggcccagccgccgcctcgccgcgtctcggcgccgcggcttcagcgccgtccgcgtcccacgggaggcgtcgcctcaccttcagcttcaggtgccagtcgaccagcgtcgacaagcagcaggagcggccgcccaagccgaagcagcggaacctgctcgacaacgccagcaacctgctgaccaacttcctcagcggtggcaacctcggggccatgcccgtcgctgagggcgcggtcaccgacctcttcggcaagcccctcttcttctcgctttacgactggttcctcgagcatggctctgtctacaagcttgcttttggacccaaatcgttcgttgttgtctctgaccctatcgttgctagacacatcctccgggagaacgctttctattatgataagggagttctcgctgaaattttaaaacccataatggggaagggtcttatacccgctgaccttgatacctggaagcaaaggagaaaaggttagaaagttataacacctgggttccatgccttattcatagaagctatggtgaggacatttacgagatgttcagagagaacaatatcaaagcttgaggagcttactgaaagtgaaggccgtgaacaaaattcgactattgtggaccttgaagctgagttctccaatttggcacttgatatcattggattgggtgtgttcaattttgattttgactcggttactaaggaatctcctgtaataaaggttggtatatctgtagttctatcttatgtttatttgtgcataggatgtataatgtgtgctcgtatagagaaagtgactgaaagtagagaagaatattcataatttatgactatcttggacagtattggattgctgctactttcctcttctctgcttttaggagcttctgtttccattgtgcaggcagtgtatggaacacttttcgaagctgagcaccgttccaccttctacatcccctattggaatcttcctttgacaaaatggatagttccaaggcagcgcaagttccatagtgacctcaaagtgatcaacaattgccttgataaccttataaaaaatgcaaaggagacgagacaggaagctgatgtggaaaagctccagcaaagggactactcttctctgaaggatgccagcttgctgaggttccttgttgacatgaggggagctgacgctgatgatcgccagcttcgagatgatcttatgacaatgcttattgctggacatgaaacaactgctgctgttctgacatgagccctaccaggatgagaaaagcccaggcagaggttgattctgttctcagcaatggggcaattactgtcgaatctcttaagaaactggagtacataaaactgattattcttgaagctcttcgcttgtatcctcagccaccattgttaatcaggcgttctctccggccagacaagttgccaggcgggtgcaatggagcaaaagagggatatgaaataccagctgggaccgatatatttgtttcggtatacaacctccacagatccccgtatttctgggaccggccaaatgagtttgaacccgagaggttttccgtcccgaagaaggacgagagcatagaaggctggtctggttttgaccctgaccggagtcctggcgcaatgtaccccaacgagatcatagcggacttcgctttcctccccttcggcggagggcctcgcaagtgcgtgggggaccagttcgcgctcctggagtcgacggtggctctggccctgctgctgcggaagttcgacgtggagctgagagggtcgcccgacgaagtggagatggtgacaggcgccacgatccacacgaagaacgggctgtggtgcaggctgaggagaaggacttgacgggccaacattagctttgcagtttgcactgagtgagaagtagctctcgtgcttgactcctgtgatgtgctttaggcgagctaaactgcatcgcagacagaccagtggatgggaaccgtgtacactgaaaacatatcttgtaggcttgtagcgtaacaggtgcaaccacaacaatatattatttatctatctatctaattgagcttgacattccggtgcatgcacgcacacgcgcctgagaacac

SEQ ID NO: 199473 - DNA, 1547 bp, Zea Mays
ctctctccatcctcccgcctcacagggagttctcgctgaaattttaaaacccataatggggaagggtcttatacccgctgaccttgatacctggaagcaaaggagaaaagttataacacctgggttccatgccttattcatagaagctatggtgaggacatttacgagatgttcagagagaacaatatcaaagcttgaggagcttactgaaagtgaaggccgtgaacaaaattcgactattgtggaccttgaagctgagttctccaatttggcacttgatatcattggattgggtgtgttcaattttgattttgactcggttactaaggaatctcctgtaataaaggcagtgtatggaacacttttcgaagctgagcaccgttccaccttctacatcccctattggaatcttcctttgacaaaatggatagttccaaggcagcgcaagttccatagtgacctcaaagtgatcaacaattgccttgataaccttataaaaaatgcaaaggagacgagacaggaagctgatgtggaaaagctccagcaaagggactactcttctctgaaggatgccagcttgctgaggttccttgttgacatgaggggagctgacgctgatgatcgccagcttcgagatgatcttatgacaatgcttattgctggacatgaaacaactgctgctgttctgacatgagccctaccaggatgagaaaagcccaggcagaggttgattctgttctcagcaatggggcaattactgtcgaatctcttaagaaactggagtacataaaactgattattcttgaagctcttcgcttgtatcctcagccaccattgttaatcaggcgttctctccggccagacaagttgccaggcgggtgcaatggagcaaaagagggatatgaaataccagctgggaccgatatatttgtttcggtatacaacctccacagatccccgtatttctgggaccggccaaatgagtttgaacccgagaggttttccgtcccgaagaaggacgagagcatagaaggctggtctggttttgaccctgaccggagtcctggcgcaatgtaccccaacgagatcatagcggacttcgctttcctccccttcggcggagggcctcgcaagtgcgtgggggaccagttcgcgctcctggagtcgacggtggctctggccctgctgctgcggaagttcgacgtggagctgagagggtcgcccgacgaagtggagatggtgacaggcgccacgatccacacgaagaacgggctgtggtgcaggctgaggagaaggacttgacgggccaacattagctttgcagtttgcactgagtgagaagtagctctcgtgcttgactcctgtgatgtgctttaggcgagctaaactgcatcgcagacagaccagtggatgggaaccgtgtacactgaaaacatatcttgtaggcttgtagcgtaacaggtgcaaccacaacaatatattatttatctatctatctaattgagcttgacattccggtgcatgcacgcacacgcgcctgagaacac

SEQ ID NO: 199474 - DNA, 1631 bp, Zea Mays
gtcgccaatatgctcccaattcgctgccacatgtttgtcctgttctcagatcagatcgtgagcgctcttgttcccatctcggcgtcgtagaaggccctcggctctctccatcctcccgcctcacagttataacacctgggttccatgccttattcatagaagctatggtgaggacatttacgagatgttcagagagaacaatatcaaagcttgaggagcttactgaaagtgaaggccgtgaacaaaattcgactattgtggaccttgaagctgagttctccaatttggcacttgatatcattggattgggtgtgttcaattttgattttgactcggttactaaggaatctcctgtaataaaggcagtgtatggaacacttttcgaagctgagcaccgttccaccttctacatcccctattggaatcttcctttgacaaaatggatagttccaaggcagcgcaagttccatagtgacctcaaagtgatcaacaattgccttgataaccttataaaaaatgcaaaggagacgagacaggaagctgatgtggaaaagctccagcaaagggactactcttctctgaagggattttggtgaatagtatctcatatctgtgccatcatgcttttaggatgccagcttgctgaggttccttgttgacatgaggggagctgacgctgatgatcgccagcttcgagatgatcttatgacaatgcttattgctggacatgaaacaactgctgctgttctgacatggtctgtttttttgctagcccagagccctaccaggatgagaaaagcccaggcagaggttgattctgttctcagcaatggggcaattactgtcgaatctcttaagaaactggagtacataaaactgattattcttgaagctcttcgcttgtatcctcagccaccattgttaatcaggcgttctctccggccagacaagttgccaggcgggtgcaatggagcaaaagagggatatgaaataccagctgggaccgatatatttgtttcggtatacaacctccacagatccccgtatttctgggaccggccaaatgagtttgaacccgagaggttttccgtcccgaagaaggacgagagcatagaaggctggtctggttttgaccctgaccggagtcctggcgcaatgtaccccaacgagatcatagcggacttcgctttcctccccttcggcggagggcctcgcaagtgcgtgggggaccagttcgcgctcctggagtcgacggtggctctggccctgctgctgcggaagttcgacgtggagctgagagggtcgcccgacgaagtggagatggtgacaggcgccacgatccacacgaagaacgggctgtggtgcaggctgaggagaaggacttgacgggccaacattagctttgcagtttgcactgagtgagaagtagctctcgtgcttgactcctgtgatgtgctttaggcgagctaaactgcatcgcagacagaccagtggatgggaaccgtgtacactgaaaacatatcttgtaggcttgtagcgtaacaggtgcaaccacaacaatatattatttatctatctatctaattgagcttgacattccggtgcatgcacgcacacgcgcctgagaacac

SEQ ID NO: 199475 - DNA, 2214 bp, Zea Mays
gacgaggatctcttggagagagcctaagagcaactctaataggaacactaaacataaacaaattcaaatatagggtcataatcttattttagtgaaatttatctaaactttttgaggtccaacttgaaggatagcatctttgcgactcagagagcgacggccctatacgattcgcgttgttccaacctccacagacatttcatatgtatcttcgtcgccaccatctcccatccagttgtcgccaatatgctcccaattcgctgccacatgtttgtcctgttctcagatcagatcgtgagcgctcttgttcccatctcggcgtcgtagaaggccctcggctctctccatcctcccgcctcacaggtgccagtcgaccagcgtcgacaagcagcaggagcggccgcccaagccgaagcagcggaacctgctcgacaacgccagcaacctgctgaccaacttcctcagcggtggcaacctcggggccatgcccgtcgctgagggcgcggtcaccgacctcttcggcaagcccctcttcttctcgctttacgactggttcctcgagcatggctctgtctacaagcttgcttttggacccaaatcgttcgttgttgtctctgaccctatcgttgctagacacatcctccgggagaacgctttctattatgataagggagttctcgctgaaattttaaaacccataatggggaagggtcttatacccgctgaccttgatacctggaagcaaaggagaaaagttataacacctgggttccatgccttattcatagaagctatggtgaggacatttacgagatgttcagagagaacaatatcaaagcttgaggagcttactgaaagtgaaggccgtgaacaaaattcgactattgtggaccttgaagctgagttctccaatttggcacttgatatcattggattgggtgtgttcaattttgattttgactcggttactaaggaatctcctgtaataaaggcagtgtatggaacacttttcgaagctgagcaccgttccaccttctacatcccctattggaatcttcctttgacaaaatggatagttccaaggcagcgcaagttccatagtgacctcaaagtgatcaacaattgccttgataaccttataaaaaatgcaaaggagacgagacaggaagctgatgtggaaaagctccagcaaagggactactcttctctgaaggatgccagcttgctgaggttccttgttgacatgaggggagctgacgctgatgatcgccagcttcgagatgatcttatgacaatgcttattgctggacatgaaacaactgctgctgttctgacatggtctgtttttttgctagcccagagccctaccaggatgagaaaagcccaggcagaggttgattctgttctcagcaatggggcaattactgtcgaatctcttaagaaactggagtacataaaactgattattcttgaagctcttcgcttgtatcctcagccaccattgttaatcaggcgttctctccggccagacaagttgccaggcgggtgcaatggagcaaaagagggatatgaaataccagctgggaccgatatatttgtttcggtatacaacctccacagatccccgtatttctgggaccggccaaatgagtttgaacccgagaggttttccgtcccgaagaaggacgagagcatagaaggctggtctggttttgaccctgaccggagtcctggcgcaatgtaccccaacgagatcatagcggacttcgctttcctccccttcggcggagggcctcgcaagtgcgtgggggaccagttcgcgctcctggagtcgacggtggctctggccctgctgctgcggaagttcgacgtggagctgagagggtcgcccgacgaagtggagatggtgacaggcgccacgatccacacgaagaacgggctgtggtgcaggctgaggagaaggacttgacgggccaacattagctttgcagtttgcactgagtgagaagtagctctcgtgcttgactcctgtgatgtgctttaggcgagctaaactgcatcgcagacagaccagtggatgggaaccgtgtacactgaaaacatatcttgtaggcttgtagcgtaacaggtgcaaccacaacaatatattatttatctatctatctaattgagcttgacattccggtgcatgcacgcacacgcgcctgagaacac

SEQ ID NO: 199476 - DNA, 1920 bp, Zea Mays
attatgggcttttgacgaggatctcttggagagagcctaagagcaactctaataggaacactaaacataaacaaattcaaatatagggtcataatcttattttagtgaaatttatctaaactttttgaggtccaacttgaaggatagcatctttgcgactcagagagcgacggccctatacgattcgcgttgttccaacctccacagacatttcatatgtatcttcgtcgccaccatctcccatccagttgtcgccaatatgctcccaattcgctgccacatgtttgtcctgttctcagatcagatcgtgagcgctcttgttcccatctcggcgtcgtagaaggccctcggctctctccatcctcccgcctcacagggagttctcgctgaaattttaaaacccataatggggaagggtcttatacccgctgaccttgatacctggaagcaaaggagaaaagttataacacctgggttccatgccttattcatagaagctatggtgaggacatttacgagatgttcagagagaacaatatcaaagcttgaggagcttactgaaagtgaaggccgtgaacaaaattcgactattgtggaccttgaagctgagttctccaatttggcacttgatatcattggattgggtgtgttcaattttgattttgactcggttactaaggaatctcctgtaataaaggcagtgtatggaacacttttcgaagctgagcaccgttccaccttctacatcccctattggaatcttcctttgacaaaatggatagttccaaggcagcgcaagttccatagtgacctcaaagtgatcaacaattgccttgataaccttataaaaaatgcaaaggagacgagacaggaagctgatgtggaaaagctccagcaaagggactactcttctctgaaggatgccagcttgctgaggttccttgttgacatgaggggagctgacgctgatgatcgccagcttcgagatgatcttatgacaatgcttattgctggacatgaaacaactgctgctgttctgacatggtctgtttttttgctagcccagagccctaccaggatgagaaaagcccaggcagaggttgattctgttctcagcaatggggcaattactgtcgaatctcttaagaaactggagtacataaaactgattattcttgaagctcttcgcttgtatcctcagccaccattgttaatcaggcgttctctccggccagacaagttgccaggcgggtgcaatggagcaaaagagggatatgaaataccagctgggaccgatatatttgtttcggtatacaacctccacagatccccgtatttctgggaccggccaaatgagtttgaacccgagaggttttccgtcccgaagaaggacgagagcatagaaggctggtctggttttgaccctgaccggagtcctggcgcaatgtaccccaacgagatcatagcggacttcgctttcctccccttcggcggagggcctcgcaagtgcgtgggggaccagttcgcgctcctggagtcgacggtggctctggccctgctgctgcggaagttcgacgtggagctgagagggtcgcccgacgaagtggagatggtgacaggcgccacgatccacacgaagaacgggctgtggtgcaggctgaggagaaggacttgacgggccaacattagctttgcagtttgcactgagtgagaagtagctctcgtgcttgactcctgtgatgtgctttaggcgagctaaactgcatcgcagacagaccagtggatgggaaccgtgtacactgaaaacatatcttgtaggcttgtagcgtaacaggtgcaaccacaacaatatattatttatctatctatctaattgagcttgacattccggtgcatgcacgcacacgcgcctgagaacac

SEQ ID NO: 199477 - DNA, 1949 bp, Zea Mays
cttaaaataattaatttcacaaaaaatgatataattaacatatatagagagtatagtgctcctcctatatatacaggagatttgttctccactattctccttctataggtacaaattatgggcttttgacgaggatctcttggagagagcctaagagcaactctaataggaacactaaacataaacaaattcaaatatagggtcataatcttattttagtgaaatttatctaaactttttgaggtccaacttgaaggatagcatctttgcgactcagagagcgacggccctatacgattcgcgttgttccaacctccacagacatttcatatgtatcttcgtcgccaccatctcccatccagttgtcgccaatatgctcccaattcgctgccacatgtttgtcctgttctcagatcagatcgtgagcgctcttgttcccatctcggcgtcgtagaaggccctcggctctctccatcctcccgcctcacagttataacacctgggttccatgccttattcatagaagctatggtgaggacatttacgagatgttcagagagaacaatatcaaagcttgaggagcttactgaaagtgaaggccgtgaacaaaattcgactattgtggaccttgaagctgagttctccaatttggcacttgatatcattggattgggtgtgttcaattttgattttgactcggttactaaggaatctcctgtaataaaggcagtgtatggaacacttttcgaagctgagcaccgttccaccttctacatcccctattggaatcttcctttgacaaaatggatagttccaaggcagcgcaagttccatagtgacctcaaagtgatcaacaattgccttgataaccttataaaaaatgcaaaggagacgagacaggaagctgatgtggaaaagctccagcaaagggactactcttctctgaaggatgccagcttgctgaggttccttgttgacatgaggggagctgacgctgatgatcgccagcttcgagatgatcttatgacaatgcttattgctggacatgaaacaactgctgctgttctgacatggtctgtttttttgctagcccagagccctaccaggatgagaaaagcccaggcagaggttgattctgttctcagcaatggggcaattactgtcgaatctcttaagaaactggagtacataaaactgattattcttgaagctcttcgcttgtatcctcagccaccattgttaatcaggcgttctctccggccagacaagttgccaggcgggtgcaatggagcaaaagagggatatgaaataccagctgggaccgatatatttgtttcggtatacaacctccacagatccccgtatttctgggaccggccaaatgagtttgaacccgagaggttttccgtcccgaagaaggacgagagcatagaaggctggtctggttttgaccctgaccggagtcctggcgcaatgtaccccaacgagatcatagcggacttcgctttcctccccttcggcggagggcctcgcaagtgcgtgggggaccagttcgcgctcctggagtcgacggtggctctggccctgctgctgcggaagttcgacgtggagctgagagggtcgcccgacgaagtggagatggtgacaggcgccacgatccacacgaagaacgggctgtggtgcaggctgaggagaaggacttgacgggccaacattagctttgcagtttgcactgagtgagaagtagctctcgtgcttgactcctgtgatgtgctttaggcgagctaaactgcatcgcagacagaccagtggatgggaaccgtgtacactgaaaacatatcttgtaggcttgtagcgtaacaggtgcaaccacaacaatatattatttatctatctatctaattgagcttgacattccggtgcatgcacgcacacgcgcctgagaacac

SEQ ID NO: 199478 - DNA, 365 bp, Zea Mays
ttcaagttgaacgggttgccggcctaccgctgacagacgattcaaccgtccgccaaatccaaacgcaccgatccattccagaccatggcgacgaccaaggaccccgcgaccaccggcggcgagcccgccatcggcattccctaccacccggcggcggaggcccaggggcactattactacgcgccgccgccgaacccctacgcggcggggatgccgccgcccaacgcgatctacgccggcgcgcccaagggggtgccgctccagcagaccatgttccgcgacacgcccgcgcccttccactgccaggcctgcggtgaagccgccgtctcctccgtccgggcctggatccgctgaccacggcgggg

SEQ ID NO: 199479 - DNA, 1176 bp, Zea Mays
gcggcgttaaaaatccggaatcgtgcagacgggcaccgcttatcctccgcgcaggcaagagcagccagccgcttcgggatcgggacgcggagaggggaaaggcgagtcgtcgactcgtcgtccgggcagcttccctccctctcctctccgcccccgcttacctaggccggccccgcctacgcccccctcccgccgccgcacgatgagcacttctcccgccgccgccgacgtttcgcctttgccgcctactgctgccgccgacgaggccgcgcgggcgacagagacggtggtggtcgatgagagggtcgcctcacacgtggacccgttcctcgtcgaggcgctcgacaaccctcgccaccgtctcatggttctacggatggaactggatatacaaaactttatgcagaaccctcagctgcaggagtttgaattccagaactttccgacttcttacctccgctgtgctgctcatcgtgttgcacaacattatggcttagagactatagtagcagatagtttagtagaaggctcagttagcaggattgttgcaagaaaaacagcagaaagcaggtatcctgcaatttttttatcagaagttcctagcaatcaagcaagaaatgatcatgaaacagctgagaagcttaagtttgtcatttatcaaaggcccaaagcattccaaaatggaagcgctgattctagaaacaagagtggtgtaccaaaaactgttgatgagagaatagaggaatataataaagcacgagcacgcatcttcaatggttccatttctgcagattctgatgctgcaagtattatgggaactctttctactggcaaagatgaaccagtaaatgttgacccttctgttgatgaaaccaaagtcagcacaatgaacagtcgttccagagttgctgtttttaaggatactgaaaaggatcgtagtgacccagactacgatcgaaactacaaaagtttatgcagtatgacattggttatgtgcaatctcctggcatgtccacaaaccagcatactatgtactttggccagcctgatctaacaatagggtcttctggagctgctgtttatcgacattggccaaccccaacaatgatgtatccccattgctatgataatgttagtccaatgatgtctcagacgaaatgagtgggatagtttgtt

SEQ ID NO: 199480 - DNA, 1120 bp, Zea Mays
ttgaggcatagggcatggtggctaccaaggtccattatcatcttcatttgatggacgtccacaagcttagcaccactgacatgatctgtcaagtctgaggctaggtaggacgtattgcctccattggtggtattgctacgatgagagctacacctccaacacgaagactgcagctgtggccacctaccaggctatggtatcgatatcaactagtacatctacatgacgtcaacagatcatattacaagtaatctggacaagctagcagttcagaacaaggggacaaattggacctcacagccagcagggcagttctacggatggaactggatatacaaaactttatgcagaaccctcagctgcaggagtttgaattccagaactttccgacttcttacctccgctgtgctgctcatcgtgttgcacaacattatggcttagagactatagtagcagatagtttagtagaaggctcagttagcaggattgttgcaagaaaaacagcagaaagcaggtatcctgcaatttttttatcagaagttcctagcaatcaagcaagaaatgatcatgaaacagctgagaagcttaagtttgtcatttatcaaaggcccaaagcattccaaaatggaagcgctgattctagaaacaagagtggtgtaccaaaaactgttgatgagagaatagaggaatataataaagcacgagcacgcatcttcaatggttccatttctgcagattctgatgctgcaagtattatgggaactctttctactggcaaagatgaaccagtaaatgttgacccttctgttgatgaaaccaaagtcagcacaatgaacagtcgttccagagttgctgtttttaaggatactgaaaaggatcgtagtgacccagactacgatcgaaactacaaaagtttatgcagtatgacattggttatgtgcaatctcctggcatgtccacaaaccagcatactatgtactttggccagcctgatctaacaatagggtcttctggagctgctgtttatcgacattggccaaccccaacaatgatgtatccccattgctatgataatgttagtccaatgatgtctcagacgaaatgagtgggatagtttgtt

SEQ ID NO: 199481 - DNA, 1607 bp, Zea Mays
gaggcatagggcatggtggctaccaaggtccattatcatcttcatttgatggacgtccacaagcttagcaccactgacatgatctgtcaagtctgaggctaggtaggacgtattgcctccattggtggtattgctacgatgagagctacacctccaacacgaagactgcagctgtggccacctaccaggctatggtatcgatatcaactagtacatctacatgacgtcaacagatcatattacaagtaatctggacaagctagcagttcagaacaaggggacaaattggacctcacagccagcagggcaggttttgggtgtgctggctggcctaacttgcgtctttagaacacttgcaagctgtcatttagttctacggatggaactggatatacaaaactttatgcagaaccctcagctgcaggagtttgaattccagaactttccgacttcttacctccgctgtgctgctcatcgtgttgcacaacattatggcttagagactatagtagcagatagtttagtagaaggctcagttagcaggattgttgcaagaaaaacagcagaaagcaggtatcctgcaatttttttatcagaagttcctagcaatcaagcaagaaatgatcatgaaacagctgagaagcttaagtttgtcatttatcaaaggcccaaagcattccaaaatggaagcgctgattctagaaacaagagtggtgtaccaaaaactgttgatgagagaatagaggaatataataaagcacgagcacgcatcttcaatggttccatttctgcagattctgatgctgcaagtattatgggaactctttctactggcaaagatgaaccagtaaatgttgacccttctgttgatgaaaccaaagtcagcacaatgaacagtcgttccagagttgctgtttttaaggatactgaaaaggatcgtagtgacccagactacgatcgaaactacaaaagtttatgcagtatgacattggttatgtgcaatctcctggcatgtccacaaaccagcatactatgtactttggccagcctgatctaacaatagggtcttctggagctgctgtttatcgacattggccaaccccaacaatgatgtatccccattgctatgataatgttagtccaatgatgtctcaggttcctctgtaccagtctttcaaccatgattaggagattctgcttgctggaaagttgggaacaattctctgttgaacttgctatgttgtgttgtcctatgttaagtggagttcctttagattcgagccgtttttattacaaaaaattgtataaggagtcctaattcgttgaaactatttcgtgaactagtctggaactgtgatgcttgtctaatgtctagttctcgtttgcaatttgctcccggtttatagttagtagtgtgctgcgactggtcttgaaccgtgtcgcgtggtcgtactggtagaaccaggttgctacttgccagcagtcattgctttgattccgattttttatttaacttctttttaatcaagtatttcaaataatctaccctagaagttacttttacatctagttgtgccagaccacaaggacgacaaaataagattgtt

SEQ ID NO: 199482 - DNA, 1225 bp, Zea Mays
tcagaacaaggggacaaattggacctcacagccagcagggcagttctacggatggaactggatatacaaaactttatgcagaaccctcagctgcaggagtttgaattccagaactttccgacttcttacctccgctgtgctgctcatcgtgttgcacaacattatggcttagagactatagtagcagatagtttagtagaaggctcagttagcaggattgttgcaagaaaaacagcagaaagcaggtatcctgcaatttttttatcagaagttcctagcaatcaagcaagaaatgatcatgaaacagctgagaagcttaagtttgtcatttatcaaaggcccaaagcattccaaaatggaagcgctgattctagaaacaagagtggtgtaccaaaaactgttgatgagagaatagaggaatataataaagcacgagcacgcatcttcaatggttccatttctgcagattctgatgctgcaagtattatgggaactctttctactggcaaagatgaaccagtaaatgttgacccttctgttgatgaaaccaaagtcagcacaatgaacagtcgttccagagttgctgtttttaaggatactgaaaaggatcgtagtgacccagactacgatcgaaactacaaaagcatactatgtactttggccagcctgatctaacaatagggtcttctggagctgctgtttatcgacattggccaaccccaacaatgatgtatccccattgctatgataatgttagtccaatgatgtctcaggttcctctgtaccagtctttcaaccatgattaggagattctgcttgctggaaagttgggaacaattctctgttgaacttgctatgttgtgttgtcctatgttaagtggagttcctttagattcgagccgtttttattacaaaaaattgtataaggagtcctaattcgttgaaactatttcgtgaactagtctggaactgtgatgcttgtctaatgtctagttctcgtttgcaatttgctcccggtttatagttagtagtgtgctgcgactggtcttgaaccgtgtcgcgtggtcgtactggtagaaccaggttgctacttgccagcagtcattgctttgattccgattttttatttaacttctttttaatcaagtatttcaaataatctaccctagaagttacttttacatctagttgtgccagaccacaaggacgacaaaataagattgtt

SEQ ID NO: 199483 - DNA, 1267 bp, Zea Mays
gtgaactactagagttagaggatgcaacgagttctacggatggaactggatatacaaaactttatgcagaaccctcagctgcaggagtttgaattccagaactttccgacttcttacctccgctgtgctgctcatcgtgttgcacaacattatggcttagagactatagtagcagatagtttagtagaaggctcagttagcaggattgttgcaagaaaaacagcagaaagcaggtatcctgcaatttttttatcagaagttcctagcaatcaagcaagaaatgatcatgaaacagctgagaagcttaagtttgtcatttatcaaaggcccaaagcattccaaaatggaagcgctgattctagaaacaagagtggtgtaccaaaaactgttgatgagagaatagaggaatataataaagcacgagcacgcatcttcaatggttccatttctgcagattctgatgctgcaagtattatgggaactctttctactggcaaagatgaaccagtaaatgttgacccttctgttgatgaaaccaaagtcagcacaatgaacagtcgttccagagttgctgtttttaaggatactgaaaaggatcgtagtgacccagactacgatcgaaactacaaaagtttatgcagtatgacattggttatgtgcaatctcctggcatgtccacaaaccagcatactatgtactttggccagcctgatctaacaatagggtcttctggagctgctgtttatcgacattggccaaccccaacaatgatgtatccccattgctatgataatgttagtccaatgatgtctcaggttcctctgtaccagtctttcaaccatgattaggagattctgcttgctggaaagttgggaacaattctctgttgaacttgctatgttgtgttgtcctatgttaagtggagttcctttagattcgagccgtttttattacaaaaaattgtataaggagtcctaattcgttgaaactatttcgtgaactagtctggaactgtgatgcttgtctaatgtctagttctcgtttgcaatttgctcccggtttatagttagtagtgtgctgcgactggtcttgaaccgtgtcgcgtggtcgtactggtagaaccaggttgctacttgccagcagtcattgctttgattccgattttttatttaacttctttttaatcaagtatttcaaataatctaccctagaagttacttttacatctagttgtgccagaccacaaggacgacaaaataagattgtt

SEQ ID NO: 199484 - DNA, 1106 bp, Zea Mays
gactaaagcgaagatgattcttagttctacggatggaactggatatacaaaactttatgcagaaccctcagctgcaggagtttgaattccagaactttccgacttcttacctccgctgtgctgctcatcgtgttgcacaacattatggcttagagactatagtagcagatagtttagtagaaggctcagttagcaggattgttgcaagaaaaacagcagaaagcagattctgatgctgcaagtattatgggaactctttctactggcaaagatgaaccagtaaatgttgacccttctgttgatgaaaccaaagtcagcacaatgaacagtcgttccagagttgctgtttttaaggatactgaaaaggatcgtagtgacccagactacgatcgaaactacaaaaggtatgttaggagctcagtgcctggcttcaacttgagcccaggtgtttttaactttgttgtgcctcagtttatgcagtatgacattggttatgtgcaatctcctggcatgtccacaaaccagcatactatgtactttggccagcctgatctaacaatagggtcttctggagctgctgtttatcgacattggccaaccccaacaatgatgtatccccattgctatgataatgttagtccaatgatgtctcaggttcctctgtaccagtctttcaaccatgattaggagattctgcttgctggaaagttgggaacaattctctgttgaacttgctatgttgtgttgtcctatgttaagtggagttcctttagattcgagccgtttttattacaaaaaattgtataaggagtcctaattcgttgaaactatttcgtgaactagtctggaactgtgatgcttgtctaatgtctagttctcgtttgcaatttgctcccggtttatagttagtagtgtgctgcgactggtcttgaaccgtgtcgcgtggtcgtactggtagaaccaggttgctacttgccagcagtcattgctttgattccgattttttatttaacttctttttaatcaagtatttcaaataatctaccctagaagttacttttacatctagttgtgccagaccacaaggacgacaaaataagattgtt

SEQ ID NO: 199485 - DNA, 2491 bp, Zea Mays
atgtcatcggtgacccgccctcagcgggaggccgactttgcacgcttcccgtcgtccacccccatcgtcatcgacaacggcgcttctaccttccgcatcgggtgggcgggcgaggcggagccgcgcctttcgttccgcaatgtcgtgcagaggccgcgccaccgcagcactggtgaaactgtctcaattgttggggacactgacccatctctaatgaaattctttgactgcacaagatcggcagttcgctctccatttgacgatgatgttgtctatcagttcgagtacatggaatatattcttgactatggctttgatcgattaggtgtcgattcagaggtgggccatccaattcttatgacagaatgtgaatgtaatccgtccttttctcgagcccgaatgtcagaactacttttcgagacatatggtgtaccatccatagcatttggcattgacaacgcgtttagttataagtacaatcagaaacttggaaactgtaacgaagacgggctggctatttcatgtgaacatggaacttgtcatgttgttccaggcaagtatttcatgggaaaaggctgaagagctgaagaaggaacattgttatatagctcctgattatatggcagagttgcagatatttaaaaacaataaggaagaagctgatgagaaaatgaggtattggcagctaccatgggtccccccaccaaaggaagaaccaccatctgaggaagaacttgcaaggaaagcagctttgaaggaaaaggctggtcagcgtttgcgagacatggctgctgcaaagagatctcagaagatagtggaactagaaaaacaactttcctatctggaggaactaatggaacaacttgatgaagctgaggaagaagaagcaacagctattctaggtagctctggatatctttcccagcaggaaatcagatctgccattttaaaagcatcacaatctttaaggaaagcaaaaggggagtccaatggcaatgatgagaaaacagatgcctcagcagttgataagtatccacttgtatctgttcctgatgagacactgacgccagaacagttaaaggaaaagaagaaacagatattacttaaaaccacaacagagggcaaattgcgcgcaaagcagaaacgtgctgaagaggaggctttgcgggagaaacaagaagaaaagaggcgtgcggagaacccagagttataccttgaagagcttcgggcccgatattcagaactttctgataaatttgagcagaggaagcgacagaaagttaatggtagtcagacaaatgggaaccatagttcatctgcaggtgtaggccgtggagaaagactaaatgcagctcagaaagaaaggatgcggctgcttgcctcagctgcttttgatcggggcaaaggtgaggacacttttggaatgagagacgaggattggttagtgtacaacaagatgagcaaagacaatgatgatgacagcaatgatgatgatgaatcggaacttgttcgaatttcatcgaagctccaggagattgatcctacatttgtgtccaaatccgaagctgttcaactgactccggagccacccaaagtccggccactaaccgctgaggattacagaattgccattgggatcgagcggttccgttgccctgaagtcctcttccagccaggcatgattggaatcgaccaggccggcatcgatgagatggtcagcatctcactcaggagattaatggaggacgagtctgtgaaggagcgcctctgccagtcgatccttgtcactggcgggagctccctgttccctggcatgatccctcggctggagtctgggatacggcaatatcggccctaccttgctcccctgaagcttgtcggagcagctgaccccattttagacgcgtggaggggtgctgccgcctttgcggcatcaagcaagttcggcaaacaaacgttcagcctagctgattacggagagcatggagagaacctgtttcatcggtacaacattgtttactcactataaccggaaaatgacatagtgatcgaaccatctcagtcaggctatttatttaacagctgatacaaattgatgtagcaacaaagtttttcaaaactgcaattgatatttttatgtgattggaattggagggttcaaatggtgaaggaatttcataaacctataatatgtgtgcctttttttagtcttcccagggcacaacttgtttaagaacaggtgagctgaatcctctataaagctaaggtcactatcgactatatggatggataaaaagaacaaagttgtccatggttacttgcataggggcatttctttttcattttcttttttagtctctattttgttatatctaccattaattaaaaaaaggaacacagtcttatatagggggtatgcctttttattttatttttaaatcttctgtttcttcagggttcctaaatctattttttgttttctttaacacac

SEQ ID NO: 199486 - DNA, 2763 bp, Zea Mays
gcaaggcaagcgaggcgaggcgccgaggccaggtgaagcatccgaacggtcccgaagaaagacgactcagcagtcagcacaaggacaaggttaccaaacgctccaagtccaaacccctctcctcccccgcgtcccgcgagctccgtcaccgccgccgctggcgagatgtcatcggtgacccgccctcagcgggaggccgactttgcacgcttcccgtcgtccacccccatcgtcatcgacaacggcgcttctaccttccgcatcgggtgggcgggcgaggcggagccgcgcctttcgttccgcaatgtcgtgcagaggccgcgccaccgcagcactggtgaaactgtctcaattgttggggacactgacccatctctaatgaaattctttgactgcacaagatcggcagttcgctctccatttgacgatgatgttgtctatcagttcgagtacatggaatatattcttgactatggctttgatcgattaggtgtcgattcagaggtgggccatccaattcttatgacagaatgtgaatgtaatccgtccttttctcgagcccgaatgtcagaactacttttcgagacatatggtgtaccatccatagcatttggcattgacaacgcgtttagttataagtacaatcagaaacttggaaactgtaacgaagacgggctggctatttcatgtgaacatggaacttgtcatgttgttccatttttgaaaggacagcctgtgttggggggcttgctgcagaaccaatatcggtggatttcacattactgattttctgaggcagcttctctgtctaaaatatccctatcacacggcaagtatttcatgggaaaaggctgaagagctgaagaaggaacattgttatatagctcctgattatatggcagagttgcagatatttaaaaacaataaggaagaagctgatgagaaaatgaggtattggcagctaccatgggtccccccaccaaaggaagaaccaccatctgaggaagaacttgcaaggaaagcagctttgaaggaaaaggctggtcagcgtttgcgagacatggctgctgcaaagagatctcagaagatagtggaactagaaaaacaactttcctatctggaggaactaatggaacaacttgatgaagctgaggaagaagaagcaacagctattctaggtagctctggatatctttcccagcaggaaatcagatctgccattttaaaagcatcacaatctttaaggaaagcaaaaggggagtccaatggcaatgatgagaaaacagatgcctcagcagttgataagtatccacttgtatctgttcctgatgagacactgacgccagaacagttaaaggaaaagaagaaacagatattacttaaaaccacaacagagggcaaattgcgcgcaaagcagaaacgtgctgaagaggaggctttgcgggagaaacaagaagaaaagaggcggagaacccagagttataccttgaagagcttcgggcccgatattcagaactttctgataaatttgagcagaggaagcgacagaaagttaatggtagtcagacaaatgggaaccatagttcatctgcaggtgtaggccgtggagaaagactaaatgcagctcagaaagaaaggatgcggctgcttgcctcagctgcttttgatcggggcaaaggtgaggacacttttggaatgagagacgaggattggttagtgtacaacaagatgagcaaagacaatgatgatgacagcaatgatgatgatgaatcggaacttgttcgaatttcatcgaagctccaggagattgatcctacatttgtgtccaaatccgaagctgttcaactgactccggagccacccaaagtccggccactaaccgctgaggattacagaattgccattgggatcgagcggttccgttgccctgaagtcctcttccagccaggcatgattggaatcgaccaggccggcatcgatgagatggtcagcatctcactcaggagattaatggaggacgagtctgtgaaggagcgcctctgccagtcgatccttgtcactggcgggagctccctgttccctggcatgatccctcggctggagtctgggatacggcaatatcggccctaccttgctcccctgaagcttgtcggagcagctgaccccattttagacgcgtggaggggtgctgccgcctttgcggcatcaagcaagttcggcaaacaaacgttcagcctagctgattacggagagcatggagagaacctgtttcatcggtacaacattgtttactcactataaccggaaaatgacatagtgatcgaaccatctcagtcaggctatttatttaacagctgatacaaattgatgtagcaacaaagtttttcaaaactgcaattgatatttttatgtgattggaattggagggttcaaatggtgaaggaatttcataaacctataatatgtgtgcctttttttagtcttcccagggcacaacttgtttaagaacaggtgagctgaatcctctataaagctaaggtcactatcgactatatggatggataaaaagaacaaagttgtccatggttacttgcataggggcatttctttttcattttcttttttagtctctattttgttatatctaccattaattaaaaaaaggaacacagtcttatatagggggtatgcctttttattttatttttaaatcttctgtttcttcagggttcctaaatctattttttgttttctttaacacac

SEQ ID NO: 199487 - DNA, 2528 bp, Zea Mays
gaaccgattctcgcttaaacggacctcccaaactaccattcccagttcccacggcacgatggcctccgccgaaatccccaactccagccccgacgccaccaaccccgcccccgccgccgccgccgccaccggccccgacctctcctcttcgccgccgccgctcccgccgcgcaagcgccgcctttcgccttccccaccaccaacgcggtccgcgtcacgctctcggtccccccgctcccgctccccgcacggccgacgctcgcgcagccggagccgcagcccgcagcagtacccgaccgatggcaagcggcaacggcacaatggccttaccgtggatgcgtgccgcgatttcctgcgcgacaggtgcacccgctccgacctcgagtgcagatacgcgcaccctcacaactccgtttccatcgacctggacaataaggtgactgcgtgtgcggattctctgaggaacaattgcttccgggggatgacatgccgttactaccatccgcctccacatatccaggagcaattactgagatcagttggcgtggaagacccaaaggtgaagacgatctgcagagattttacacgtgggaagtgttcaagatcagcaaatgagtgccgattcttgcaccattcatctgttgaagatgttgcaattgtttgccaagacttcttgcgtggacagtgcaatcgcatagcatgtaggtactctcatgtagtagcacatccgatgccaccaatgaaccatgttcccatgccataccctgagatgctttacatgccaccaccaccaccaccaccccttggagtaccaatgatggggcctctgccttcacctcctataccatttgctgataatacgaacagagttgaagtttgtagggacttcttgaagaacatgtgcaatagagaatcctgccggtttgtgcaccctgagacacatacaacggcggtgaacgccaatgttgaagtatgccgtgattttaaacgaggagaatgcaatcgatctgcctgtcgctttttccatccacatacaagctgaagttttctgttgcctaaagtaaagtaaattatactttgtttccccccttttaatacaaatgactgccaaatacatatagatgaaagaatactcccttaggaacacctatttacagagttaactttgacttcaattccttgtggatcttgtgtctattcaaaccagctagagcaatatagagtttaagattggcaatttgtcatttgagtgaatcaacatattttttccaatgaaatgcaacttttatccgttccaaacaggcatgccaatgagcgtgttgattctctaagattttgaattggctaagattacatgcactgttcaagcgatctactgtttgttcagcttcattgccttctatttcacgtcaattctgttccttctggagagctctcctgccaagtttgatattaagatgtatgaatcacaacaatggaagatggcctcttgtatgagtccttcgtttcagaatttattacttgtttatgttgttgggctgttgataaaattatatggtctgatcttttcctgcatatctctctcccatggtcccaccaactaatttcctgagttcagttaataaactaatgagttattaaatgtggagagtatctttcaagtagcactactatttattttgctaaccggatcatctaacatgtctcatgcctaatgctgggccttataaggcctaagaataaaaatagctgttgctatatgattttctattgagaaatcaccagtgccaaaatctagattctgtttttcattttccccctttactgaagcagaaactgcagcttgagtgccctgcgccgctgctgctgctgctgccgccgccgccgcagccaccaattctgcttctgccaccaaagagctgctgcgctggctgttgtgttgctaaggtgccatagagcatggaagccgtagaaggtgctacgtaggcatggaataaaagatactatcgtcctgttatattcagatggttgcttgaacttgcttgactcaatgcttgagtggtacctcttcactatggggtctctctctccccctgtgtgtggttatgtatttgttgtcataaagatgattttgactccagctaatctggtgtctgcgctattggcttccctttagcgccacacgtttgttgtatggatacttttttttgagccaatgtttcgccacgctttgccgctgtttcaaacaggcaccacctgaagacattctgatgtgcttgtgatgcttaactaggaatacagtgccaggtaccaagctgattgaaacggcaaggtatctgaaaggttgggtgatgatgaggccttatgccaagcgtgccattctgttgctgctcgaatgcgtgcggtctacaggtaagcgattttaagggcatgtacaacggccatgtacaattggttttctatgtacaagagacatttaagaaactgtatcatacagtggagagttcttaaaatcagtcatatcagac

SEQ ID NO: 199488 - DNA, 1715 bp, Zea Mays
aaaaactcacatcgttccctacaccctactccctccgtcagccagcgaagttccttcagtcactcaacaccttacgtccctagccatcctccgccgcctccgtctctgcttccctagagccgtcgcgatggcagcagcccctgccgggcatcgatgaccagccagcgccgacccgcggggagagtctccatcgtcatccgctgcgtcagtagcccgccggccgtcgacacatctttcaagactaatgtcccgcgcaatgctaatatggccaaactccaagcaggatatttgtttcctgagattgccaggagaagagccgctcatttgctgaagtttccagatgccaaaattataagccttggaataggcgacactaccgagcccattccaaatgtcataacaaatgccatggcagagagagcacatgccttgtcaacaattgatggctacagcggttatggagctgagcaaggtgaaaagaaactcagagcagcaattgctgcaacctactatgcggaccttggtattgaagattcagacatatttgtctctgatggtgccaaatgtgacatatctcgcttgcaggtcctttttggatctaatgtgacaattgcggtccaagatccatcataccctgcatatgttgattcaagtgttatcatggggcaaactgatttatatcagcaagacgttcagaagtatggaaacattgagtacatgagatgcggtccagaaaatggattttttcctgatctgtcaactgtccctaggacagatattattttcttttgttcacccaacaatcctactggtgctgctgcatctcgggaccaactaaccaaattagtaaaatttgcaaaggacaacgggtccatcatagtctatgattctgcttatgcaatgtacatatcagatgacagcccaaagtctatctttgaaattcctggagcaaaggaggttgctattgagacagcctcattctcgaaatacgctgggttcacaggtgtccgtctaggttggactgttgtccccaaggagctccttttctcggatggacatccagttgctaaagatttcaatcgcatagtttgcacttgcttcaatggtgcatcaaacattgcgcaagctggtggtttagcctgcctctctccagacggtctaaaggctatgcaagatgttgttggcttctacaaggagaacactgaaataatcgttgagacatttacatcactcggattcaacgtgtatggcgccaagaacgctccatacgtatgggtgcacttccctggccgcaattcgtgggatgtgttcgctgagatcctggagaaggccaatgtggtcactactcctggcactggatttggaccgggtggcgaaggctttgtgagggtcagcgcgttcgggcacagagagaacatcattgaagccgcaaggaggttaaagcagctgtataagtgagcaccgatgcagcttctgtgccctcctagacagatgtatcaataagaacacatcagggcaccaaaaatcgcttggtgaagctgccagaagatgttagattttgaacttttttttttaattctcgtgcggtgtctacattcaaaccatttcgaactctagacaatgcttgttgtaatcctgagacccttcattcactggtgaagttgtgattgtcttgtctgtgttcatttttgtgtcctgctgttgctgtttcggaa

SEQ ID NO: 199489 - DNA, 1722 bp, Zea Mays
aaaaactcacatcgttccctacaccctactccctccgtcagccagcgaagttccttcagtcactcaacaccttacgtccctagccatcctccgccgcctccgtctctgcttccctagagccgtcgcgatggcagcagcccctgccggtgcccctgcaatcaccgcatcctcctcctttgtttcttcgtctccgttctgtctcaaggcatcgatgaccagccagcgccgacccgcggggagagtctccatcgtcatccgctgcgtcagtagcccgccggccgtcgacacatctttcaagactaatgtcccgcgcaatgctaatatggccaaactccaagcaggatatttgtttcctgagattgccaggagaagagccgctcatttgctgaagtttccagatgccaaaattataagccttggaataggcgacactaccgagcccattccaaatgtcataacaaatgccatggcagagagagcacatgccttgtcaacaattgatggctacagcggttatggagctgagcaaggtgaaaagaaactcagagcagcaattgctgcaacctactatgcggaccttggtattgaagattcagacatatttgtctctgatggtgccaaatgtgacatatctcgcttgcaggcatatgttgattcaagtgttatcatggggcaaactgatttatatcagcaagacgttcagaagtatggaaacattgagtacatgagatgcggtccagaaaatggattttttcctgatctgtcaactgtccctaggacagatattattttcttttgttcacccaacaatcctactggtgctgctgcatctcgggaccaactaaccaaattagtaaaatttgcaaaggacaacgggtccatcatagtctatgattctgcttatgcaatgtacatatcagatgacagcccaaagtctatctttgaaattcctggagcaaaggaggttgctattgagacagcctcattctcgaaatacgctgggttcacaggtgtccgtctaggttggactgttgtccccaaggagctccttttctcggatggacatccagttgctaaagatttcaatcgcatagtttgcacttgcttcaatggtgcatcaaacattgcgcaagctggtggtttagcctgcctctctccagacggtctaaaggctatgcaagatgttgttggcttctacaaggagaacactgaaataatcgttgagacatttacatcactcggattcaacgtgtatggcgccaagaacgctccatacgtatgggtgcacttccctggccgcaattcgtgggatgtgttcgctgagatcctggagaaggccaatgtggtcactactcctggcactggatttggaccgggtggcgaaggctttgtgagggtcagcgcgttcgggcacagagagaacatcattgaagccgcaaggaggttaaagcagctgtataagtgagcaccgatgcagcttctgtgccctcctagacagatgtatcaataagaacacatcagggcaccaaaaatcgcttggtgaagctgccagaagatgttagattttgaacttttttttttaattctcgtgcggtgtctacattcaaaccatttcgaactctagacaatgcttgttgtaatcctgagacccttcattcactggtgaagttgtgattgtcttgtctgtgttcatttttgtgtcctgctgttgctgtttcggaa

SEQ ID NO: 199490 - DNA, 3433 bp, Zea Mays
ctacgggagactaaccatcgtgtgcttatattctcacagatggttaagatgttggacatccttgcagaatatctctcccttcggggatttcagtttcagaggcttgatggtagtacaagagcagatcttcgtcatcaagccatggaacattttaatgctcctggaagtgatgacttctgttttcttttatccacacgtgccggaggacttggtattaatcttgcaactgcagatacagtgataatttttgattcagattggaatccacaaaatgatctgcaggttcttcctctcattctcttcctcctgcaagttcttgatcacttggttattcagaagctaaatgctgagggcaggcttgagaagaaagaatccaaaaagggtggctccatatttgacaagaatgaactttcggctatcttgaggtttggagcagaggaattgttcaaagaagacaagactgatgaagaggccaagagaaaccttgaaagtttggacattgatgaaattcttgagagagcagagaaagtcgagacaaagggtggtgaaggggaggaaggaaatgagcttcttagtgctttcaaggtcgcaaacttttccagtggcgaggatgatgcaacattctggagtaggctaatacagccagatcctgcagatattattcaggaaactttggcgcctcgtgctgcacgtaataaaaagagttatgttgaagatccccagtttgacaaaaataataacaggaaaagacgtgcagttgaagcacaagaaaagccaaggaggcgttctggcagaacagtggaaacagttaattcagtaccattggttgatggagcagtagctcaagtacgagagtggtcttttggtaatattccaaagaaggatgcttctcgttttgtacgagcggttaaaaaatttgggaatgcaacccagattgacttaattgtggatgatgttggtggtgtactagagaaggcaccacatgaagcacaaatagagctatttgatttgttgattgatggttgtcagaaaagctgttaaagagaatacagatatcaagggcacagttttggattttttcggtgtagctgtgaaggcctatgaattgctagctcgtgttgaagagcttcagttgttgtcaaagcgcattgcacgatacaaagatccaatcaagcaataccgcatccaactaccttataaaaagcctcagtggtcagcaagctgtggatggactgaaactgatgatgctagattgatggttggaattcattggtatggctacgggaattgggagaaaatacgtttggatccaaagcttggcctgacaacaaaaattgcaccagcaacacttggtgagagagagacatttttaccacgtgctccaaacttggataaccgtgctagcgctctcctgcaaaaggaatatgctaagtttagcggtaatagctcaaaagtcaaaggaaatgcccgccagacagtcaataacgacagtaatagtggagctcgatcaatgagaggccgacaaaaggatgcaccagataaagaggataataagccgaacaaagatgacattcagaagcgcaaggtaatgatggaagctgaagcaagagaagaaggtgaaatttctgaatcagaggcagagacaaagtatcgtctggacaaagaggagaagtggctcgaatggtgctctgaagttttaaatgaggaacaggaaactttgaagcgcctggacaggctgcagaatacaagtgtaaacctcccaaaggaaaaggttctttcaagaatccgcaagtatctcctgataattggggacaaaattggtgaagttgtccggcaacacagtgaatcttataggcaatcccgtaagtgtagccgcacctcccgcatgaccatgaggttatggaattatgttgccaccttttcaaacatgtctggggagcaattgcatgatctctatttgaaacttagtcaagaccaactggaaggtggagttggcccatctcatggtgccaatttcacatccattccttccagcaagggaggtaactcaaatcaacttcatcctacaagaaaccataggccaaccaggtctctccagtacaattctgagtctttgcacaataatgagagctctggaagttctgaagcctggaagcgtcgacggagagcagaccctgataatcagtttgacacccagcctttgtatcaacctccaattatgacaaatggaaataggttgcaggaatctagtagttctgcaggaattcttggttggggtccagttgaaatgagacggtatggtaatgaaaggccaaagcgtggtgttcatcctagtcattttcctactgggcatggacctttgttgtagctgaaggaattagatgactcgaacaaccttgtccactttggcataactgttcccagtgaatttcagcttccatatagttacaaatggtggaactctgtcggaattgaaattcttttttccataacaagaaggaataaaaagcaagacctgacctggagcgcagtttgaatactgtccctcaaaggtaatgccaggactccagaggcgacgcagggatttgttaacagctacactgaatatccttctgacaacatcacagtaaaacgaatacatggtggcttgtcaactgccaagaggattaatcgaggaaattttgtcgattcagttttgtgatccaatagaaaagttgggggtcattaggaaaaagttcatctcaacaatgatctatagttcactctatacatgtattatgttttacattgcaatataatgaaatatggttcagttattcccactcagtgtgttttgtgcccttctgtattgatgtaatagatcaaagaaatgcatgttctcgttttttttttttttttttagaaaaccgcaggagaactgcgcatcttatatattagagaggaaaaaagacattacaaaagaggagaagttgcagagcaactctcccacctaataaagaagttgcagctgggggggcatagtatgtgttagtttcaatttctctaaatagaggaaatatatattttgttcacgcgatggaatcggtagatacttgaattgattccatagtatttttttcctgaggtgatgtgagaatgaggtgtgtggttatatgtatttcaaataattgtttgacaacacggtgttatgatttacattttgacatgtcatgatctgtattctgtggtgcaggttagctaggtgatcaaagccattctacaagtcatttcgcaaaagcaaacaatttaggagttgcatgaggcctactttaccctggatgcctcacttttgttatttagatgcagtgaggatgtttctagctctgtgctccctccctcataaatatgacattgcgaaactttgatcatccgtctcattcaaaaaattcttgag

SEQ ID NO: 199491 - DNA, 6646 bp, Zea Mays
atctgcccttcctaatcgcccttacccccttgtgttagataaccacccctctcccttgcgcgccgccgccgccgccgccgcgcctccccgccgggagcccgtctccggcgatcgccgccgtctagcccccctcctgtccccgccttcgatccgaatcctagacgaaaaatcgtggaaaataccgcaaaaaatcgcggaaattcgcccggttctgtttgaataaatcgcacgggcgttgcgccccgcccctctcgctcccctcccgccgccagccccgcggccgccggcgacggcgatcgcgcagacaaataggcgcccgcgtcgagccagaaaaacccgcctcgtgccggtccgagcattcgtctctgtcgtggggactgagcacccgttgcctgtccccgcccgcctgcccgccgcctcctgctcctctcgtcggccgcggcacaaggagtgatactgagcctgtgagaggtattccatataatgccataatctgggatggcattcttcagcaactccgggagcaaggctgattcaggagggtacaacctgaatgaaaaggccgaagatgagggcatctacgagtcagttcaggatgggaatgttgacctgagttctaggcagtggaacttaaatgagaaagcagatgatgcttaccattgtgaagcagagcaatatgaggcgggccagtcaggtttgtactcttctgagaaggcatcagggcagcatatccagaaaggaggcagatcttctggtggtccatggggcacaaattttctgaaggattccaggtccaaacagatggccgaggatgttccatcgaatagtggtagaggaatgaatgctgctagcttgcatgatggcttggatgatagtggagaggatgatgagctgaacagggcaaatggtgaggtgcctgctgaggaaatgctctccgatgactattatgagcaggacggagaggagcagattgaatcgttgcatcgtggcgggacgaagcaatcaagctgttccacttctgaagacgaccccgctgatgtggattttgagccagacagcgaaacggacaaagctactgataaggataagtttatggatagtgagaattctgatggcgacgatgatgatggccttgaactctcagatgatgatgatgactttgttgagaaccggaggcaacctaaacgacttaagattgtagcaactaaaacttccaagggaaggaagttgcccatgccagctcaacgaaaacgaggggtgtctcacagcgatgaagaatattcttcaggaaaagattcagatcttcccagtgatgctgatttcaaacacagatcgaaaagacctgacaggttgcatcagaaatctgtgggccgcagtgatgttgccccaatcaattctcataatgagcttcgaacttctggaaggaggacagtgaaaaagatctcatatgttgaaagcgaagaaagtgatgatagcgaggagaagtcaactaaacaacaaaagctcatgaaggaggagctggaagaggaagacggagaaacaattgaaaaagttctttggcatcaacccaagggtgtagctgaagaagcaataaagaatcaccaatcagctcaacctactgttgtcagcctaacatcggactttgatcaacagtgggatgaattagagttctatataaaatggaaaggccagtcttacctgcattgtcaatggaagacattatcagagcttcaaagtgttagtggattcaagaaggtaataaattacacgaaaagagttgctgaggaacagaggtacaagagggcactatcacgtgaagaggttgaggtgcatgatgtgggcaaggagatggagctggatcttattaaacaatatagtcaggttgaacggatatttgctgatagggtcagcaaagctgatggagatgatctggttcctgaatatttagtcaaatggcaaggacttccttatgcagaatctacctgggaaaaagatacagatatcgattttgctcaagatgcaattgatgaatataaggctcgtgaagctgccacatctatacttgggaaaacagtagatttccaacgaaagaaaagcaaagctagtttgaggaggcttgatgatcagccagaatggctaaaagctggtaagcttcgtgattatcagctggaaggactaaactttctcgtgaatgggtggagaaatgatactaatgttatacttgctgatgaaatgggtctggggaaaactatccaatctgtttccatgcttggcttccttcataatgctcaagaaatcaatggtccatttcttgtagttgtgccactgtcaacattgtcgaactgggcaaaagaatttcggaagtggctgcccaacatgaatgttgtcatttatgttggcaaccgtgccagcagagagatgtgccagaagcatgagtttttttcagacaagaagggtgggcgtcatgtaaaattccatacgttgataactacatatgaggtgattctcaaggacaaagcggttctttccaagatcaaatggaactatcttatggttgatgaagcccaccggttgaaaaattgtgaagcatcactatatactacccttttggaattcagcactaagaataagctgcttatcactggaacacctttgcagaacagtgtggaagagctttgggcattacttcatttccttgatccagttaaattcaacagcaaggatagttttgttgaaagatacaaaaatttgagttccttcaatgaaaccgagcttgcgaatctgcataaggaattgaggcctcatattctaaggcgggttataaaagatgtcgagaagtctttacctcctaaaattgaacggattctacgtgtcgagatgtcaccccttcagaaacaatactacaagtggattttagagcggaatttccagaatctaaataaaggagtccgtgggaatcaggtatcacttttgaacattgttgttgaattgaagaaatgctgcaaccatccatttttgtttgaaagtgccgatcacggttatggtggagatagcattggcgatcggaataaagttgaacggattgttatgagtagtggtaaacttgtcttgttggacaaactattggtgagactacgggagactaaccatcgtgtgcttatattctcacagatggttaagatgttggacatccttgcagaatatctctcccttcggggatttcagtttcagaggcttgatggtagtacaagagcagatcttcgtcatcaagccatggaacattttaatgctcctggaagtgatgacttctgttttcttttatccacacgtgccggaggacttggtattaatcttgcaactgcagatacagtgataatttttgattcagattggaatccacaaaatgatctgcaggccatgagtagggcacataggattggccaacaggaaactgttaatatctaccgcttcgtcacatgcaaaagtgttgaagaggatattttggaacgcgcaaagaaaaagatggttcttgatcacttggttattcagaagctaaatgctgagggcaggcttgagaagaaagaatccaaaaagggtggctccatatttgacaagaatgaactttcggctatcttgaggtttggagcagaggaattgttcaaagaagacaagactgatgaagaggccaagagaaaccttgaaagtttggacattgatgaaattcttgagagagcagagaaagtcgagacaaagggtggtgaaggggaggaaggaaatgagcttcttagtgctttcaaggtcgcaaacttttccagtggcgaggatgatgcaacattctggagtaggctaatacagccagatcctgcagatattattcaggaaactttggcgcctcgtgctgcacgtaataaaaagagttatgttgaagatccccagtttgacaaaaataataacaggaaaagacgtgcagttgaagcacaagaaaagccaaggaggcgttctggcagaacagtggaaacagttaattcagtaccattggttgatggagcagtagctcaagtacgagagtggtcttttggtaatattccaaagaaggatgcttctcgttttgtacgagcggttaaaaaatttgggaatgcaacccagattgacttaattgtggatgatgttggtggtgtactagagaaggcaccacatgaagcacaaatagagctatttgatttgttgattgatggttgtcagaaaagctgttaaagagaatacagatatcaagggcacagttttggattttttcggtgtagctgtgaaggcctatgaattgctagctcgtgttgaagagcttcagttgttgtcaaagcgcattgcacgatacaaagatccaatcaagcaataccgcatccaactaccttataaaaagcctcagtggtcagcaagctgtggatggactgaaactgatgatgctagattgatggttggaattcattggtatggctacgggaattgggagaaaatacgtttggatccaaagcttggcctgacaacaaaaattgcaccagcaacacttggtgagagagagacatttttaccacgtgctccaaacttggataaccgtgctagcgctctcctgcaaaaggaatatgctaagtttagcggtaatagctcaaaagtcaaaggaaatgcccgccagacagtcaataacgacagtaatagtggagctcgatcaatgagaggccgacaaaaggatgcaccagataaagaggataataagccgaacaaagatgacattcagaagcgcaaggtaatgatggaagctgaagcaagagaagaaggtgaaatttctgaatcagaggcagagacaaagtatcgtctggacaaagaggagaagtggctcgaatggtgctctgaagttttaaatgaggaacaggaaactttgaagcgcctggacaggctgcagaatacaagtgtaaacctcccaaaggaaaaggttctttcaagaatccgcaagtatctcctgataattggggacaaaattggtgaagttgtccggcaacacagtgaatcttataggcaatcccgtaagtgtagccgcacctcccgcatgaccatgaggttatggaattatgttgccaccttttcaaacatgtctggggagcaattgcatgatctctatttgaaacttagtcaagaccaactggaaggtggagttggcccatctcatggtgccaatttcacatccattccttccagcaagggaggtaactcaaatcaacttcatcctacaagaaaccataggccaaccaggtctctccagtacaattctgagtctttgcacaataatgagagctctggaagttctgaagcctggaagcgtcgacggagagcagaccctgataatcagtttgacacccagcctttgtatcaacctccaattatgacaaatggaaataggttgcaggaatctagtagttctgcaggaattcttggttggggtccagttgaaatgagacggtatggtaatgaaaggccaaagcgtggtgttcatcctagtcattttcctactgggcatggacctttgttgtagctgaaggaattagatgactcgaacaaccttgtccactttggcataactgttcccagtgaatttcagcttccatatagttacaaatggtggaactctgtcggaattgaaattcttttttccataacaagaaggaataaaaagcaagacctgacctggagcgcagtttgaatactgtccctcaaaggtaatgccaggactccagaggcgacgcagggatttgttaacagctacactgaatatccttctgacaacatcacagtaaaacgaatacatggtggcttgtcaactgccaagaggattaatcgaggaaattttgtcgattcagttttgtgatccaatagaaaagttgggggtcattaggaaaaagttcatctcaacaatgatctatagttcactctatacatgtattatgttttacattgcaatataatgaaatatggttcagttattcccactcagtgtgttttgtgcccttctgtattgatgtaatagatcaaagaaatgcatgttctcgttttttttttttttttttagaaaaccgcaggagaactgcgcatcttatatattagagaggaaaaaagacattacaaaagaggagaagttgcagagcaactctcccacctaataaagaagttgcagctgggggggcatagtatgtgttagtttcaatttctctaaatagaggaaatatatattttgttcacgcgatggaatcggtagatacttgaattgattccatagtatttttttcctgaggtgatgtgagaatgaggtgtgtggttatatgtatttcaaataattgtttgacaacacggtgttatgatttacattttgacatgtcatgatctgtattctgtggtgcaggttagctaggtgatcaaagccattctacaagtcatttcgcaaaagcaaacaatttaggagttgcatgaggcctactttaccctggatgcctcacttttgttatttagatgcagtgaggatgtttctagctctgtgctccctccctcataaatatgacattgcgaaactttgatcatccgtctcattcaaaaaattcttgag

SEQ ID NO: 199492 - DNA, 5957 bp, Zea Mays
atctgcccttcctaatcgcccttacccccttgtgttagataaccacccctctcccttgcgcgccgccgccgccgccgccgcgcctccccgccgggagcccgtctccggcgatcgccgccgtctagcccccctcctgtccccgccttcgatccgaatcctagacgaaaaatcgtggaaaataccgcaaaaaatcgcggaaattcgcccggttctgtttgaataaatcgcacgggcgttgcgccccgcccctctcgctcccctcccgccgccagccccgcggccgccggcgacggcgatcgcgcagacaaataggcgcccgcgtcgagccagaaaaacccgcctcgtgccggtccgagcattcgtctctgtcgtggggactgagcacccgttgcctgtccccgcccgcctgcccgccgcctcctgctcctctcgtcggccgcggcacaaggagtgatactgagcctgtgagaggtattccatataatgccataatctgggatggcattcttcagcaactccgggagcaaggctgattcaggagggtacaacctgaatgaaaaggccgaagatgagggcatctacgagtcagttcaggatgggaatgttgacctgagttctaggcagtggaacttaaatgagaaagcagatgatgcttaccattgtgaagcagagcaatatgaggcgggccagtcaggtttgtactcttctgagaaggcatcagggcagcatatccagaaaggaggcagatcttctggtggtccatggggcacaaattttctgaaggattccaggtccaaacagatggccgaggatgttccatcgaatagtggtagaggaatgaatgctgctagcttgcatgatggcttggatgatagtggagaggatgatgagctgaacagggcaaatggtgaggtgcctgctgaggaaatgctctccgatgactattatgagcaggacggagaggagcagattgaatcgttgcatcgtggcgggacgaagcaatcaagctgttccacttctgaagacgaccccgctgatgtggattttgagccagacagcgaaacggacaaagctactgataaggataagtttatggatagtgagaattctgatggcgacgatgatgatggccttgaactctcagatgatgatgatgactttgttgagaaccggaggcaacctaaacgacttaagattgtagcaactaaaacttccaagggaaggaagttgcccatgccagctcaacgaaaacgaggggtgtctcacagcgatgaagaatattcttcaggaaaagattcagatcttcccagtgatgctgatttcaaacacagatcgaaaagacctgacaggttgcatcagaaatctgtgggccgcagtgatgttgccccaatcaattctcataatgagcttcgaacttctggaaggaggacagtgaaaaagatctcatatgttgaaagcgaagaaagtgatgatagcgaggagaagtcaactaaacaacaaaaggaggagctggaagaggaagacggagaaacaattgaaaaagttctttggcatcaacccaagggtgtagctgaagaagcaataaagaatcaccaatcagctcaacctactgttgtcagcctaacatcggactttgatcaacagtgggatgaattagagttctatataaaatggaaaggccagtcttacctgcattgtcaatggaagacattatcagagcttcaaagtgttagtggattcaagaaggtaataaattacacgaaaagagttgctgaggaacagaggtacaagagggcactatcacgtgaagaggttgaggtgcatgatgtgggcaaggagatggagctggatcttattaaacaatatagtcaggttgaacggatatttgctgatagggtcagcaaagctgatggagatgatctggttcctgaatatttagtcaaatggcaaggacttccttatgcagaatctacctgggaaaaagatacagatatcgattttgctcaagatgcaattgatgaatataaggctcgtgaagctgccacatctatacttgggaaaacagtagatttccaacgaaagaaaagcaaagctagtttgaggaggcttgatgatcagccagaatggctaaaagctggtaagcttcgtgattatcagctggaaggactaaactttctcgtgaatgggtggagaaatgatactaatgttatacttgctgatgaaatgggtctggggaaaactatccaatctgtttccatgcttggcttccttcataatgctcaagaaatcaatggtccatttcttgtagttgtgccactgtcaacattgtcgaactgggcaaaagaatttcggaagtggctgcccaacatgaatgttgtcatttatgttggcaaccgtgccagcagagagatgtgccagaagcatgagtttttttcagacaagaagggtgggcgtcatgtaaaattccatacgttgataactacatatgaggtgattctcaaggacaaagcggttctttccaagatcaaatggaactatcttatggttgatgaagcccaccggttgaaaaattgtgaagcatcactatatactacccttttggaattcagcactaagaataagctgcttatcactggaacacctttgcagaacagtgtggaagagctttgggcattacttcatttccttgatccagttaaattcaacagcaaggatagttttgttgaaagatacaaaaatttgagttccttcaatgaaaccgagcttgcgaatctgcataaggaattgaggcctcatattctaaggcgggttataaaagatgtcgagaagtctttacctcctaaaattgaacggattctacgtgtcgagatgtcaccccttcagaaacaatactacaagtggattttagagcggaatttccagaatctaaataaaggagtccgtgggaatcaggtatcacttttgaacattgttgttgaattgaagaaatgctgcaaccatccatttttgtttgaaagtgccgatcacggttatggtggagatagcattggcgatcggaataaagttgaacggattgttatgagtagtggtaaacttgtcttgttggacaaactattggtgagactacgggagactaaccatcgtgtgcttatattctcacagatggttaagatgttggacatccttgcagaatatctctcccttcggggatttcagtttcagaggcttgatggtagtacaagagcagatcttcgtcatcaagccatggaacattttaatgctcctggaagtgatgacttctgttttcttttatccacacgtgccggaggacttggtattaatcttgcaactgcagatacagtgataatttttgattcagattggaatccacaaaatgatctgcaggccatgagtagggcacataggattggccaacaggaaactgttaatatctaccgcttcgtcacatgcaaaagtgttgaagaggatattttggaacgcgcaaagaaaaagatggttcttgatcacttggttattcagaagctaaatgctgagggcaggcttgagaagaaagaatccaaaaagggtggctccatatttgacaagaatgaactttcggctatcttgaggtttggagcagaggaattgttcaaagaagacaagactgatgaagaggccaagagaaaccttgaaagtttggacattgatgaaattcttgagagagcagagaaagtcgagacaaagggtggtgaaggggaggaaggaaatgagcttcttagtgctttcaaggtcgcaaacttttccagtggcgaggatgatgcaacattctggagtaggctaatacagccagatcctgcagatattattcaggaaactttggcgcctcgtgctgcacgtaataaaaagagttatgttgaagatccccagtttgacaaaaataataacaggaaaagacgtgcagttgaagcacaagaaaagccaaggaggcgttctggcagaacagtggaaacagttaattcagtaccattggttgatggagcagtagctcaagtacgagagtggtcttttggtaatattccaaagaaggatgcttctcgttttgtacgagcggttaaaaaatttgggaatgcaacccagattgacttaattgtggatgatgttggtggtgtactagagaaggcaccacatgaagcacaaatagagctatttgatttgttgattgatggttgtcagaaaagctgttaaagagaatacagatatcaagggcacagttttggattttttcggtgtagctgtgaaggcctatgaattgctagctcgtgttgaagagcttcagttgttgtcaaagcgcattgcacgatacaaagatccaatcaagcaataccgcatccaactaccttataaaaagcctcagtggtcagcaagctgtggatggactgaaactgatgatgctagattgatggttggaattcattggtatggctacgggaattgggagaaaatacgtttggatccaaagcttggcctgacaacaaaaattgcaccagcaacacttggtgagagagagacatttttaccacgtgctccaaacttggataaccgtgctagcgctctcctgcaaaaggaatatgctaagtttagcggtaatagctcaaaagtcaaaggaaatgcccgccagacagtcaataacgacagtaatagtggagctcgatcaatgagaggccgacaaaaggatgcaccagataaagaggataataagccgaacaaagatgacattcagaagcgcaaggtaatgatggaagctgaagcaagagaagaaggtgaaatttctgaatcagaggcagagacaaagtatcgtctggacaaagaggagaagtggctcgaatggtgctctgaagttttaaatgaggaacaggaaactttgaagcgcctggacaggctgcagaatacaagtgtaaacctcccaaaggaaaaggttctttcaagaatccgcaagtatctcctgataattggggacaaaattggtgaagttgtccggcaacacagtgaatcttataggcaatcccgtaagtgtagccgcacctcccgcatgaccatgaggttatggaattatgttgccaccttttcaaacatgtctggggagcaattgcatgatctctatttgaaacttagtcaagaccaactggaaggtggagttggcccatctcatggtgccaatttcacatccattccttccagcaagggaggtaactcaaatcaacttcatcctacaagaaaccataggccaaccaggtctctccagtacaattctgagtctttgcacaataatgagagctctggaagttctgaagcctggaagcgtcgacggagagcagaccctgataatcagtttgacacccagcctttgtatcaacctccaattatgacaaatggaaataggttgcaggaatctagtagttctgcaggaattcttggttggggtccagttgaaatgagacggtatggtaatgaaaggccaaagcgtggtgttcatcctagtcattttcctactgggcatggacctttgttgtagctgaaggaattagatgactcgaacaaccttgtccactttggcataactgttcccagtgaatttcagcttccatatagttacaaatggtggaactctgtcggaattgaaattcttttttccataacaagaaggaataaaaagcaagacctgacctggagcgcagtttgaatactgtccctcaaaggttagctaggtgatcaaagccattctacaagtcatttcgcaaaagcaaacaatttaggagttgcatgaggcctactttaccctggatgcctcacttttgttatttagatgcagtgaggatgtttctagctctgtgctccctccctcataaatatgacattgcgaaactttgatcatccgtctcattcaaaaaattcttgag

SEQ ID NO: 199493 - DNA, 6014 bp, Zea Mays
atctgcccttcctaatcgcccttacccccttgtgttagataaccacccctctcccttgcgcgccgccgccgccgccgccgcgcctccccgccgggagcccgtctccggcgatcgccgccgtctagcccccctcctgtccccgccttcgatccgaatcctagacgaaaaatcgtggaaaataccgcaaaaaatcgcggaaattcgcccggttctgtttgaataaatcgcacgggcgttgcgccccgcccctctcgctcccctcccgccgccagccccgcggccgccggcgacggcgatcgcgcagacaaataggcgcccgcgtcgagccagaaaaacccgcctcgtgccggtccgagcattcgtctctgtcgtggggactgagcacccgttgcctgtccccgcccgcctgcccgccgcctcctgctcctctcgtcggccgcggcacaaggagtgatactgagcctgtgagaggtattccatataatgccataatctgggatggcattcttcagcaactccgggagcaaggctgattcaggagggtacaacctgaatgaaaaggccgaagatgagggcatctacgagtcagttcaggatgggaatgttgacctgagttctaggcagtggaacttaaatgagaaagcagatgatgcttaccattgtgaagcagagcaatatgaggcgggccagtcaggtttgtactcttctgagaaggcatcagggcagcatatccagaaaggaggcagatcttctggtggtccatggggcacaaattttctgaaggattccaggtccaaacagatggccgaggatgttccatcgaatagtggtagaggaatgaatgctgctagcttgcatgatggcttggatgatagtggagaggatgatgagctgaacagggcaaatggtgaggtgcctgctgaggaaatgctctccgatgactattatgagcaggacggagaggagcagattgaatcgttgcatcgtggcgggacgaagcaatcaagctgttccacttctggtggggcagcaaaatctggctcacgacaaatgaaggcgtcaaagtacaatgcttatgacgacgatgatgacgatgactataatgatgagaatgacgatgacaatgacgctgatgaagacgaccccgctgatgtggattttgagccagacagcgaaacggacaaagctactgataaggataagtttatggatagtgagaattctgatggcgacgatgatgatggccttgaactctcagatgatgatgatgactttgttgagaaccggaggcaacctaaacgacttaagattgtagcaactaaaacttccaagggaaggaagttgcccatgccagctcaacgaaaacgaggggtgtctcacagcgatgaagaatattcttcaggaaaagattcagatcttcccagtgatgctgatttcaaacacagatcgaaaagacctgacaggttgcatcagaaatctgtgggccgcagtgatgttgccccaatcaattctcataatgagcttcgaacttctggaaggaggacagtgaaaaagatctcatatgttgaaagcgaagaaagtgatgatagcgaggagaagtcaactaaacaacaaaagctcatgaaggaggagctggaagaggaagacggagaaacaattgaaaaagttctttggcatcaacccaagggtgtagctgaagaagcaataaagaatcaccaatcagctcaacctactgttgtcagcctaacatcggactttgatcaacagtgggatgaattagagttctatataaaatggaaaggccagtcttacctgcattgtcaatggaagacattatcagagcttcaaagtgttagtggattcaagaaggtaataaattacacgaaaagagttgctgaggaacagaggtacaagagggcactatcacgtgaagaggttgaggtgcatgatgtgggcaaggagatggagctggatcttattaaacaatatagtcaggttgaacggatatttgctgatagggtcagcaaagctgatggagatgatctggttcctgaatatttagtcaaatggcaaggacttccttatgcagaatctacctgggaaaaagatacagatatcgattttgctcaagatgcaattgatgaatataaggctcgtgaagctgccacatctatacttgggaaaacagtagatttccaacgaaagaaaagcaaagctagtttgaggaggcttgatgatcagccagaatggctaaaagctggtaagcttcgtgattatcagctggaaggactaaactttctcgtgaatgggtggagaaatgatactaatgttatacttgctgatgaaatgggtctggggaaaactatccaatctgtttccatgcttggcttccttcataatgctcaagaaatcaatggtccatttcttgtagttgtgccactgtcaacattgtcgaactgggcaaaagaatttcggaagtggctgcccaacatgaatgttgtcatttatgttggcaaccgtgccagcagagagatgtgccagaagcatgagtttttttcagacaagaagggtgggcgtcatgtaaaattccatacgttgataactacatatgaggtgattctcaaggacaaagcggttctttccaagatcaaatggaactatcttatggttgatgaagcccaccggttgaaaaattgtgaagcatcactatatactacccttttggaattcagcactaagaataagctgcttatcactggaacacctttgcagaacagtgtggaagagctttgggcattacttcatttccttgatccagttaaattcaacagcaaggatagttttgttgaaagatacaaaaatttgagttccttcaatgaaaccgagcttgcgaatctgcataaggaattgaggcctcatattctaaggcgggttataaaagatgtcgagaagtctttacctcctaaaattgaacggattctacgtgtcgagatgtcaccccttcagaaacaatactacaagtggattttagagcggaatttccagaatctaaataaaggagtccgtgggaatcaggtatcacttttgaacattgttgttgaattgaagaaatgctgcaaccatccatttttgtttgaaagtgccgatcacggttatggtggagatagcattggcgatcggaataaagttgaacggattgttatgagtagtggtaaacttgtcttgttggacaaactattgatggttaagatgttggacatccttgcagaatatctctcccttcggggatttcagtttcagaggcttgatggtagtacaagagcagatcttcgtcatcaagccatggaacattttaatgctcctggaagtgatgacttctgttttcttttatccacacgtgccggaggacttggtattaatcttgcaactgcagatacagtgataatttttgattcagattggaatccacaaaatgatctgcaggccatgagtagggcacataggattggccaacaggaaactgttaatatctaccgcttcgtcacatgcaaaagtgttgaagaggatattttggaacgcgcaaagaaaaagatggttcttgatcacttggttattcagaagctaaatgctgagggcaggcttgagaagaaagaatccaaaaagggtggctccatatttgacaagaatgaactttcggctatcttgaggtttggagcagaggaattgttcaaagaagacaagactgatgaagaggccaagagaaaccttgaaagtttggacattgatgaaattcttgagagagcagagaaagtcgagacaaagggtggtgaaggggaggaaggaaatgagcttcttagtgctttcaaggtcgcaaacttttccagtggcgaggatgatgcaacattctggagtaggctaatacagccagatcctgcagatattattcaggaaactttggcgcctcgtgctgcacgtaataaaaagagttatgttgaagatccccagtttgacaaaaataataacaggaaaagacgtgcagttgaagcacaagaaaagccaaggaggcgttctggcagaacagtggaaacagttaattcagtaccattggttgatggagcagtagctcaagtacgagagtggtcttttggtaatattccaaagaaggatgcttctcgttttgtacgagcggttaaaaaatttgggaatgcaacccagattgacttaattgtggatgatgttggtggtgtactagagaaggcaccacatgaagcacaaatagagctatttgatttgttgattgatggttgtcagaaaagctgttaaagagaatacagatatcaagggcacagttttggattttttcggtgtagctgtgaaggcctatgaattgctagctcgtgttgaagagcttcagttgttgtcaaagcgcattgcacgatacaaagatccaatcaagcaataccgcatccaactaccttataaaaagcctcagtggtcagcaagctgtggatggactgaaactgatgatgctagattgatggttggaattcattggtatggctacgggaattgggagaaaatacgtttggatccaaagcttggcctgacaacaaaaattgcaccagcaacacttggtgagagagagacatttttaccacgtgctccaaacttggataaccgtgctagcgctctcctgcaaaaggaatatgctaagtttagcggtaatagctcaaaagtcaaaggaaatgcccgccagacagtcaataacgacagtaatagtggagctcgatcaatgagaggccgacaaaaggatgcaccagataaagaggataataagccgaacaaagatgacattcagaagcgcaaggtaatgatggaagctgaagcaagagaagaaggtgaaatttctgaatcagaggcagagacaaagtatcgtctggacaaagaggagaagtggctcgaatggtgctctgaagttttaaatgaggaacaggaaactttgaagcgcctggacaggctgcagaatacaagtgtaaacctcccaaaggaaaaggttctttcaagaatccgcaagtatctcctgataattggggacaaaattggtgaagttgtccggcaacacagtgaatcttataggcaatcccgcatgaccatgaggttatggaattatgttgccaccttttcaaacatgtctggggagcaattgcatgatctctatttgaaacttagtcaagaccaactggaaggtggagttggcccatctcatggtgccaatttcacatccattccttccagcaagggaggtaactcaaatcaacttcatcctacaagaaaccataggccaaccaggtctctccagtacaattctgagtctttgcacaataatgagagctctggaagttctgaagcctggaagcgtcgacggagagcagaccctgataatcagtttgacacccagcctttgtatcaacctccaattatgacaaatggaaataggttgcaggaatctagtagttctgcaggaattcttggttggggtccagttgaaatgagacggtatggtaatgaaaggccaaagcgtggtgttcatcctagtcattttcctactgggcatggacctttgttgtagctgaaggaattagatgactcgaacaaccttgtccactttggcataactgttcccagtgaatttcagcttccatatagttacaaatggtggaactctgtcggaattgaaattcttttttccataacaagaaggaataaaaagcaagacctgacctggagcgcagtttgaatactgtccctcaaaggttagctaggtgatcaaagccattctacaagtcatttcgcaaaagcaaacaatttaggagttgcatgaggcctactttaccctggatgcctcacttttgttatttagatgcagtgaggatgtttctagctctgtgctccctccctcataaatatgacattgcgaaactttgatcatccgtctcattcaaaaaattcttgag

SEQ ID NO: 199494 - DNA, 6739 bp, Zea Mays
atctgcccttcctaatcgcccttacccccttgtgttagataaccacccctctcccttgcgcgccgccgccgccgccgccgcgcctccccgccgggagcccgtctccggcgatcgccgccgtctagcccccctcctgtccccgccttcgatccgaatcctagacgaaaaatcgtggaaaataccgcaaaaaatcgcggaaattcgcccggttctgtttgaataaatcgcacgggcgttgcgccccgcccctctcgctcccctcccgccgccagccccgcggccgccggcgacggcgatcgcgcagacaaataggcgcccgcgtcgagccagaaaaacccgcctcgtgccggtccgagcattcgtctctgtcgtggggactgagcacccgttgcctgtccccgcccgcctgcccgccgcctcctgctcctctcgtcggccgcggcacaaggagtgatactgagcctgtgagaggtattccatataatgccataatctgggatggcattcttcagcaactccgggagcaaggctgattcaggagggtacaacctgaatgaaaaggccgaagatgagggcatctacgagtcagttcaggatgggaatgttgacctgagttctaggcagtggaacttaaatgagaaagcagatgatgcttaccattgtgaagcagagcaatatgaggcgggccagtcaggtttgtactcttctgagaaggcatcagggcagcatatccagaaaggaggcagatcttctggtggtccatggggcacaaattttctgaaggattccaggtccaaacagatggccgaggatgttccatcgaatagtggtagaggaatgaatgctgctagcttgcatgatggcttggatgatagtggagaggatgatgagctgaacagggcaaatggtgaggtgcctgctgaggaaatgctctccgatgactattatgagcaggacggagaggagcagattgaatcgttgcatcgtggcgggacgaagcaatcaagctgttccacttctggtggggcagcaaaatctggctcacgacaaatgaaggcgtcaaagtacaatgcttatgacgacgatgatgacgatgactataatgatgagaatgacgatgacaatgacgctgatgaagacgaccccgctgatgtggattttgagccagacagcgaaacggacaaagctactgataaggataagtttatggatagtgagaattctgatggcgacgatgatgatggccttgaactctcagatgatgatgatgactttgttgagaaccggaggcaacctaaacgacttaagattgtagcaactaaaacttccaagggaaggaagttgcccatgccagctcaacgaaaacgaggggtgtctcacagcgatgaagaatattcttcaggaaaagattcagatcttcccagtgatgctgatttcaaacacagatcgaaaagacctgacaggttgcatcagaaatctgtgggccgcagtgatgttgccccaatcaattctcataatgagcttcgaacttctggaaggaggacagtgaaaaagatctcatatgttgaaagcgaagaaagtgatgatagcgaggagaagtcaactaaacaacaaaagctcatgaaggaggagctggaagaggaagacggagaaacaattgaaaaagttctttggcatcaacccaagggtgtagctgaagaagcaataaagaatcaccaatcagctcaacctactgttgtcagcctaacatcggactttgatcaacagtgggatgaattagagttctatataaaatggaaaggccagtcttacctgcattgtcaatggaagacattatcagagcttcaaagtgttagtggattcaagaaggtaataaattacacgaaaagagttgctgaggaacagaggtacaagagggcactatcacgtgaagaggttgaggtgcatgatgtgggcaaggagatggagctggatcttattaaacaatatagtcaggttgaacggatatttgctgatagggtcagcaaagctgatggagatgatctggttcctgaatatttagtcaaatggcaaggacttccttatgcagaatctacctgggaaaaagatacagatatcgattttgctcaagatgcaattgatgaatataaggctcgtgaagctgccacatctatacttgggaaaacagtagatttccaacgaaagaaaagcaaagctagtttgaggaggcttgatgatcagccagaatggctaaaagctggtaagcttcgtgattatcagctggaaggactaaactttctcgtgaatgggtggagaaatgatactaatgttatacttgctgatgaaatgggtctggggaaaactatccaatctgtttccatgcttggcttccttcataatgctcaagaaatcaatggtccatttcttgtagttgtgccactgtcaacattgtcgaactgggcaaaagaatttcggaagtggctgcccaacatgaatgttgtcatttatgttggcaaccgtgccagcagagagatgtgccagaagcatgagtttttttcagacaagaagggtgggcgtcatgtaaaattccatacgttgataactacatatgaggtgattctcaaggacaaagcggttctttccaagatcaaatggaactatcttatggttgatgaagcccaccggttgaaaaattgtgaagcatcactatatactacccttttggaattcagcactaagaataagctgcttatcactggaacacctttgcagaacagtgtggaagagctttgggcattacttcatttccttgatccagttaaattcaacagcaaggatagttttgttgaaagatacaaaaatttgagttccttcaatgaaaccgagcttgcgaatctgcataaggaattgaggcctcatattctaaggcgggttataaaagatgtcgagaagtctttacctcctaaaattgaacggattctacgtgtcgagatgtcaccccttcagaaacaatactacaagtggattttagagcggaatttccagaatctaaataaaggagtccgtgggaatcaggtatcacttttgaacattgttgttgaattgaagaaatgctgcaaccatccatttttgtttgaaagtgccgatcacggttatggtggagatagcattggcgatcggaataaagttgaacggattgttatgagtagtggtaaacttgtcttgttggacaaactattggtgagactacgggagactaaccatcgtgtgcttatattctcacagatggttaagatgttggacatccttgcagaatatctctcccttcggggatttcagtttcagaggcttgatggtagtacaagagcagatcttcgtcatcaagccatggaacattttaatgctcctggaagtgatgacttctgttttcttttatccacacgtgccggaggacttggtattaatcttgcaactgcagatacagtgataatttttgattcagattggaatccacaaaatgatctgcaggccatgagtagggcacataggattggccaacaggaaactgttaatatctaccgcttcgtcacatgcaaaagtgttgaagaggatattttggaacgcgcaaagaaaaagatggttcttgatcacttggttattcagaagctaaatgctgagggcaggcttgagaagaaagaatccaaaaagggtggctccatatttgacaagaatgaactttcggctatcttgaggtttggagcagaggaattgttcaaagaagacaagactgatgaagaggccaagagaaaccttgaaagtttggacattgatgaaattcttgagagagcagagaaagtcgagacaaagggtggtgaaggggaggaaggaaatgagcttcttagtgctttcaaggtcgcaaacttttccagtggcgaggatgatgcaacattctggagtaggctaatacagccagatcctgcagatattattcaggaaactttggcgcctcgtgctgcacgtaataaaaagagttatgttgaagatccccagtttgacaaaaataataacaggaaaagacgtgcagttgaagcacaagaaaagccaaggaggcgttctggcagaacagtggaaacagttaattcagtaccattggttgatggagcagtagctcaagtacgagagtggtcttttggtaatattccaaagaaggatgcttctcgttttgtacgagcggttaaaaaatttgggaatgcaacccagattgacttaattgtggatgatgttggtggtgtactagagaaggcaccacatgaagcacaaatagagctatttgatttgttgattgatggttgtcagaaaagctgttaaagagaatacagatatcaagggcacagttttggattttttcggtgtagctgtgaaggcctatgaattgctagctcgtgttgaagagcttcagttgttgtcaaagcgcattgcacgatacaaagatccaatcaagcaataccgcatccaactaccttataaaaagcctcagtggtcagcaagctgtggatggactgaaactgatgatgctagattgatggttggaattcattggtatggctacgggaattgggagaaaatacgtttggatccaaagcttggcctgacaacaaaaattgcaccagcaacacttggtgagagagagacatttttaccacgtgctccaaacttggataaccgtgctagcgctctcctgcaaaaggaatatgctaagtttagcggtaatagctcaaaagtcaaaggaaatgcccgccagacagtcaataacgacagtaatagtggagctcgatcaatgagaggccgacaaaaggatgcaccagataaagaggataataagccgaacaaagatgacattcagaagcgcaaggtaatgatggaagctgaagcaagagaagaaggtgaaatttctgaatcagaggcagagacaaagtatcgtctggacaaagaggagaagtggctcgaatggtgctctgaagttttaaatgaggaacaggaaactttgaagcgcctggacaggctgcagaatacaagtgtaaacctcccaaaggaaaaggttctttcaagaatccgcaagtatctcctgataattggggacaaaattggtgaagttgtccggcaacacagtgaatcttataggcaatcccgcatgaccatgaggttatggaattatgttgccaccttttcaaacatgtctggggagcaattgcatgatctctatttgaaacttagtcaagaccaactggaaggtggagttggcccatctcatggtgccaatttcacatccattccttccagcaagggaggtaactcaaatcaacttcatcctacaagaaaccataggccaaccaggtctctccagtacaattctgagtctttgcacaataatgagagctctggaagttctgaagcctggaagcgtcgacggagagcagaccctgataatcagtttgacacccagcctttgtatcaacctccaattatgacaaatggaaataggttgcaggaatctagtagttctgcaggaattcttggttggggtccagttgaaatgagacggtatggtaatgaaaggccaaagcgtggtgttcatcctagtcattttcctactgggcatggacctttgttgtagctgaaggaattagatgactcgaacaaccttgtccactttggcataactgttcccagtgaatttcagcttccatatagttacaaatggtggaactctgtcggaattgaaattcttttttccataacaagaaggaataaaaagcaagacctgacctggagcgcagtttgaatactgtccctcaaaggtaatgccaggactccagaggcgacgcagggatttgttaacagctacactgaatatccttctgacaacatcacagtaaaacgaatacatggtggcttgtcaactgccaagaggattaatcgaggaaattttgtcgattcagttttgtgatccaatagaaaagttgggggtcattaggaaaaagttcatctcaacaatgatctatagttcactctatacatgtattatgttttacattgcaatataatgaaatatggttcagttattcccactcagtgtgttttgtgcccttctgtattgatgtaatagatcaaagaaatgcatgttctcgttttttttttttttttttagaaaaccgcaggagaactgcgcatcttatatattagagaggaaaaaagacattacaaaagaggagaagttgcagagcaactctcccacctaataaagaagttgcagctgggggggcatagtatgtgttagtttcaatttctctaaatagaggaaatatatattttgttcacgcgatggaatcggtagatacttgaattgattccatagtatttttttcctgaggtgatgtgagaatgaggtgtgtggttatatgtatttcaaataattgtttgacaacacggtgttatgatttacattttgacatgtcatgatctgtattctgtggtgcaggttagctaggtgatcaaagccattctacaagtcatttcgcaaaagcaaacaatttaggagttgcatgaggcctactttaccctggatgcctcacttttgttatttagatgcagtgaggatgtttctagctctgtgctccctccctcataaatatgacattgcgaaactttgatcatccgtctcattcaaaaaattcttgag

SEQ ID NO: 199495 - DNA, 6050 bp, Zea Mays
atctgcccttcctaatcgcccttacccccttgtgttagataaccacccctctcccttgcgcgccgccgccgccgccgccgcgcctccccgccgggagcccgtctccggcgatcgccgccgtctagcccccctcctgtccccgccttcgatccgaatcctagacgaaaaatcgtggaaaataccgcaaaaaatcgcggaaattcgcccggttctgtttgaataaatcgcacgggcgttgcgccccgcccctctcgctcccctcccgccgccagccccgcggccgccggcgacggcgatcgcgcagacaaataggcgcccgcgtcgagccagaaaaacccgcctcgtgccggtccgagcattcgtctctgtcgtggggactgagcacccgttgcctgtccccgcccgcctgcccgccgcctcctgctcctctcgtcggccgcggcacaaggagtgatactgagcctgtgagaggtattccatataatgccataatctgggatggcattcttcagcaactccgggagcaaggctgattcaggagggtacaacctgaatgaaaaggccgaagatgagggcatctacgagtcagttcaggatgggaatgttgacctgagttctaggcagtggaacttaaatgagaaagcagatgatgcttaccattgtgaagcagagcaatatgaggcgggccagtcaggtttgtactcttctgagaaggcatcagggcagcatatccagaaaggaggcagatcttctggtggtccatggggcacaaattttctgaaggattccaggtccaaacagatggccgaggatgttccatcgaatagtggtagaggaatgaatgctgctagcttgcatgatggcttggatgatagtggagaggatgatgagctgaacagggcaaatggtgaggtgcctgctgaggaaatgctctccgatgactattatgagcaggacggagaggagcagattgaatcgttgcatcgtggcgggacgaagcaatcaagctgttccacttctggtggggcagcaaaatctggctcacgacaaatgaaggcgtcaaagtacaatgcttatgacgacgatgatgacgatgactataatgatgagaatgacgatgacaatgacgctgatgaagacgaccccgctgatgtggattttgagccagacagcgaaacggacaaagctactgataaggataagtttatggatagtgagaattctgatggcgacgatgatgatggccttgaactctcagatgatgatgatgactttgttgagaaccggaggcaacctaaacgacttaagattgtagcaactaaaacttccaagggaaggaagttgcccatgccagctcaacgaaaacgaggggtgtctcacagcgatgaagaatattcttcaggaaaagattcagatcttcccagtgatgctgatttcaaacacagatcgaaaagacctgacaggttgcatcagaaatctgtgggccgcagtgatgttgccccaatcaattctcataatgagcttcgaacttctggaaggaggacagtgaaaaagatctcatatgttgaaagcgaagaaagtgatgatagcgaggagaagtcaactaaacaacaaaaggaggagctggaagaggaagacggagaaacaattgaaaaagttctttggcatcaacccaagggtgtagctgaagaagcaataaagaatcaccaatcagctcaacctactgttgtcagcctaacatcggactttgatcaacagtgggatgaattagagttctatataaaatggaaaggccagtcttacctgcattgtcaatggaagacattatcagagcttcaaagtgttagtggattcaagaaggtaataaattacacgaaaagagttgctgaggaacagaggtacaagagggcactatcacgtgaagaggttgaggtgcatgatgtgggcaaggagatggagctggatcttattaaacaatatagtcaggttgaacggatatttgctgatagggtcagcaaagctgatggagatgatctggttcctgaatatttagtcaaatggcaaggacttccttatgcagaatctacctgggaaaaagatacagatatcgattttgctcaagatgcaattgatgaatataaggctcgtgaagctgccacatctatacttgggaaaacagtagatttccaacgaaagaaaagcaaagctagtttgaggaggcttgatgatcagccagaatggctaaaagctggtaagcttcgtgattatcagctggaaggactaaactttctcgtgaatgggtggagaaatgatactaatgttatacttgctgatgaaatgggtctggggaaaactatccaatctgtttccatgcttggcttccttcataatgctcaagaaatcaatggtccatttcttgtagttgtgccactgtcaacattgtcgaactgggcaaaagaatttcggaagtggctgcccaacatgaatgttgtcatttatgttggcaaccgtgccagcagagagatgtgccagaagcatgagtttttttcagacaagaagggtgggcgtcatgtaaaattccatacgttgataactacatatgaggtgattctcaaggacaaagcggttctttccaagatcaaatggaactatcttatggttgatgaagcccaccggttgaaaaattgtgaagcatcactatatactacccttttggaattcagcactaagaataagctgcttatcactggaacacctttgcagaacagtgtggaagagctttgggcattacttcatttccttgatccagttaaattcaacagcaaggatagttttgttgaaagatacaaaaatttgagttccttcaatgaaaccgagcttgcgaatctgcataaggaattgaggcctcatattctaaggcgggttataaaagatgtcgagaagtctttacctcctaaaattgaacggattctacgtgtcgagatgtcaccccttcagaaacaatactacaagtggattttagagcggaatttccagaatctaaataaaggagtccgtgggaatcaggtatcacttttgaacattgttgttgaattgaagaaatgctgcaaccatccatttttgtttgaaagtgccgatcacggttatggtggagatagcattggcgatcggaataaagttgaacggattgttatgagtagtggtaaacttgtcttgttggacaaactattggtgagactacgggagactaaccatcgtgtgcttatattctcacagatggttaagatgttggacatccttgcagaatatctctcccttcggggatttcagtttcagaggcttgatggtagtacaagagcagatcttcgtcatcaagccatggaacattttaatgctcctggaagtgatgacttctgttttcttttatccacacgtgccggaggacttggtattaatcttgcaactgcagatacagtgataatttttgattcagattggaatccacaaaatgatctgcaggccatgagtagggcacataggattggccaacaggaaactgttaatatctaccgcttcgtcacatgcaaaagtgttgaagaggatattttggaacgcgcaaagaaaaagatggttcttgatcacttggttattcagaagctaaatgctgagggcaggcttgagaagaaagaatccaaaaagggtggctccatatttgacaagaatgaactttcggctatcttgaggtttggagcagaggaattgttcaaagaagacaagactgatgaagaggccaagagaaaccttgaaagtttggacattgatgaaattcttgagagagcagagaaagtcgagacaaagggtggtgaaggggaggaaggaaatgagcttcttagtgctttcaaggtcgcaaacttttccagtggcgaggatgatgcaacattctggagtaggctaatacagccagatcctgcagatattattcaggaaactttggcgcctcgtgctgcacgtaataaaaagagttatgttgaagatccccagtttgacaaaaataataacaggaaaagacgtgcagttgaagcacaagaaaagccaaggaggcgttctggcagaacagtggaaacagttaattcagtaccattggttgatggagcagtagctcaagtacgagagtggtcttttggtaatattccaaagaaggatgcttctcgttttgtacgagcggttaaaaaatttgggaatgcaacccagattgacttaattgtggatgatgttggtggtgtactagagaaggcaccacatgaagcacaaatagagctatttgatttgttgattgatggttgtcagaaaagctgttaaagagaatacagatatcaagggcacagttttggattttttcggtgtagctgtgaaggcctatgaattgctagctcgtgttgaagagcttcagttgttgtcaaagcgcattgcacgatacaaagatccaatcaagcaataccgcatccaactaccttataaaaagcctcagtggtcagcaagctgtggatggactgaaactgatgatgctagattgatggttggaattcattggtatggctacgggaattgggagaaaatacgtttggatccaaagcttggcctgacaacaaaaattgcaccagcaacacttggtgagagagagacatttttaccacgtgctccaaacttggataaccgtgctagcgctctcctgcaaaaggaatatgctaagtttagcggtaatagctcaaaagtcaaaggaaatgcccgccagacagtcaataacgacagtaatagtggagctcgatcaatgagaggccgacaaaaggatgcaccagataaagaggataataagccgaacaaagatgacattcagaagcgcaaggtaatgatggaagctgaagcaagagaagaaggtgaaatttctgaatcagaggcagagacaaagtatcgtctggacaaagaggagaagtggctcgaatggtgctctgaagttttaaatgaggaacaggaaactttgaagcgcctggacaggctgcagaatacaagtgtaaacctcccaaaggaaaaggttctttcaagaatccgcaagtatctcctgataattggggacaaaattggtgaagttgtccggcaacacagtgaatcttataggcaatcccgcatgaccatgaggttatggaattatgttgccaccttttcaaacatgtctggggagcaattgcatgatctctatttgaaacttagtcaagaccaactggaaggtggagttggcccatctcatggtgccaatttcacatccattccttccagcaagggaggtaactcaaatcaacttcatcctacaagaaaccataggccaaccaggtctctccagtacaattctgagtctttgcacaataatgagagctctggaagttctgaagcctggaagcgtcgacggagagcagaccctgataatcagtttgacacccagcctttgtatcaacctccaattatgacaaatggaaataggttgcaggaatctagtagttctgcaggaattcttggttggggtccagttgaaatgagacggtatggtaatgaaaggccaaagcgtggtgttcatcctagtcattttcctactgggcatggacctttgttgtagctgaaggaattagatgactcgaacaaccttgtccactttggcataactgttcccagtgaatttcagcttccatatagttacaaatggtggaactctgtcggaattgaaattcttttttccataacaagaaggaataaaaagcaagacctgacctggagcgcagtttgaatactgtccctcaaaggttagctaggtgatcaaagccattctacaagtcatttcgcaaaagcaaacaatttaggagttgcatgaggcctactttaccctggatgcctcacttttgttatttagatgcagtgaggatgtttctagctctgtgctccctccctcataaatatgacattgcgaaactttgatcatccgtctcattcaaaaaattcttgag

SEQ ID NO: 199496 - DNA, 6625 bp, Zea Mays
atctgcccttcctaatcgcccttacccccttgtgttagataaccacccctctcccttgcgcgccgccgccgccgccgccgcgcctccccgccgggagcccgtctccggcgatcgccgccgtctagcccccctcctgtccccgccttcgatccgaatcctagacgaaaaatcgtggaaaataccgcaaaaaatcgcggaaattcgcccggttctgtttgaataaatcgcacgggcgttgcgccccgcccctctcgctcccctcccgccgccagccccgcggccgccggcgacggcgatcgcgcagacaaataggcgcccgcgtcgagccagaaaaacccgcctcgtgccggtccgagcattcgtctctgtcgtggggactgagcacccgttgcctgtccccgcccgcctgcccgccgcctcctgctcctctcgtcggccgcggcacaaggagtgatactgagcctgtgagaggtattccatataatgccataatctgggatggcattcttcagcaactccgggagcaaggctgattcaggagggtacaacctgaatgaaaaggccgaagatgagggcatctacgagtcagttcaggatgggaatgttgacctgagttctaggcagtggaacttaaatgagaaagcagatgatgcttaccattgtgaagcagagcaatatgaggcgggccagtcaggtttgtactcttctgagaaggcatcagggcagcatatccagaaaggaggcagatcttctggtggtccatggggcacaaattttctgaaggattccaggtccaaacagatggccgaggatgttccatcgaatagtggtagaggaatgaatgctgctagcttgcatgatggcttggatgatagtggagaggatgatgagctgaacagggcaaatggtgaggtgcctgctgaggaaatgctctccgatgactattatgagcaggacggagaggagcagattgaatcgttgcatcgtggcgggacgaagcaatcaagctgttccacttctgaagacgaccccgctgatgtggattttgagccagacagcgaaacggacaaagctactgataaggataagtttatggatagtgagaattctgatggcgacgatgatgatggccttgaactctcagatgatgatgatgactttgttgagaaccggaggcaacctaaacgacttaagattgtagcaactaaaacttccaagggaaggaagttgcccatgccagctcaacgaaaacgaggggtgtctcacagcgatgaagaatattcttcaggaaaagattcagatcttcccagtgatgctgatttcaaacacagatcgaaaagacctgacaggttgcatcagaaatctgtgggccgcagtgatgttgccccaatcaattctcataatgagcttcgaacttctggaaggaggacagtgaaaaagatctcatatgttgaaagcgaagaaagtgatgatagcgaggagaagtcaactaaacaacaaaagctcatgaaggaggagctggaagaggaagacggagaaacaattgaaaaagttctttggcatcaacccaagggtgtagctgaagaagcaataaagaatcaccaatcagctcaacctactgttgtcagcctaacatcggactttgatcaacagtgggatgaattagagttctatataaaatggaaaggccagtcttacctgcattgtcaatggaagacattatcagagcttcaaagtgttagtggattcaagaaggtaataaattacacgaaaagagttgctgaggaacagaggtacaagagggcactatcacgtgaagaggttgaggtgcatgatgtgggcaaggagatggagctggatcttattaaacaatatagtcaggttgaacggatatttgctgatagggtcagcaaagctgatggagatgatctggttcctgaatatttagtcaaatggcaaggacttccttatgcagaatctacctgggaaaaagatacagatatcgattttgctcaagatgcaattgatgaatataaggctcgtgaagctgccacatctatacttgggaaaacagtagatttccaacgaaagaaaagcaaagctagtttgaggaggcttgatgatcagccagaatggctaaaagctggtaagcttcgtgattatcagctggaaggactaaactttctcgtgaatgggtggagaaatgatactaatgttatacttgctgatgaaatgggtctggggaaaactatccaatctgtttccatgcttggcttccttcataatgctcaagaaatcaatggtccatttcttgtagttgtgccactgtcaacattgtcgaactgggcaaaagaatttcggaagtggctgcccaacatgaatgttgtcatttatgttggcaaccgtgccagcagagagatgtgccagaagcatgagtttttttcagacaagaagggtgggcgtcatgtaaaattccatacgttgataactacatatgaggtgattctcaaggacaaagcggttctttccaagatcaaatggaactatcttatggttgatgaagcccaccggttgaaaaattgtgaagcatcactatatactacccttttggaattcagcactaagaataagctgcttatcactggaacacctttgcagaacagtgtggaagagctttgggcattacttcatttccttgatccagttaaattcaacagcaaggatagttttgttgaaagatacaaaaatttgagttccttcaatgaaaccgagcttgcgaatctgcataaggaattgaggcctcatattctaaggcgggttataaaagatgtcgagaagtctttacctcctaaaattgaacggattctacgtgtcgagatgtcaccccttcagaaacaatactacaagtggattttagagcggaatttccagaatctaaataaaggagtccgtgggaatcaggtatcacttttgaacattgttgttgaattgaagaaatgctgcaaccatccatttttgtttgaaagtgccgatcacggttatggtggagatagcattggcgatcggaataaagttgaacggattgttatgagtagtggtaaacttgtcttgttggacaaactattggtgagactacgggagactaaccatcgtgtgcttatattctcacagatggttaagatgttggacatccttgcagaatatctctcccttcggggatttcagtttcagaggcttgatggtagtacaagagcagatcttcgtcatcaagccatggaacattttaatgctcctggaagtgatgacttctgttttcttttatccacacgtgccggaggacttggtattaatcttgcaactgcagatacagtgataatttttgattcagattggaatccacaaaatgatctgcaggccatgagtagggcacataggattggccaacaggaaactgttaatatctaccgcttcgtcacatgcaaaagtgttgaagaggatattttggaacgcgcaaagaaaaagatggttcttgatcacttggttattcagaagctaaatgctgagggcaggcttgagaagaaagaatccaaaaagggtggctccatatttgacaagaatgaactttcggctatcttgaggtttggagcagaggaattgttcaaagaagacaagactgatgaagaggccaagagaaaccttgaaagtttggacattgatgaaattcttgagagagcagagaaagtcgagacaaagggtggtgaaggggaggaaggaaatgagcttcttagtgctttcaaggtcgcaaacttttccagtggcgaggatgatgcaacattctggagtaggctaatacagccagatcctgcagatattattcaggaaactttggcgcctcgtgctgcacgtaataaaaagagttatgttgaagatccccagtttgacaaaaataataacaggaaaagacgtgcagttgaagcacaagaaaagccaaggaggcgttctggcagaacagtggaaacagttaattcagtaccattggttgatggagcagtagctcaagtacgagagtggtcttttggtaatattccaaagaaggatgcttctcgttttgtacgagcggttaaaaaatttgggaatgcaacccagattgacttaattgtggatgatgttggtggtgtactagagaaggcaccacatgaagcacaaatagagctatttgatttgttgattgatggttgtcagaaaagctgttaaagagaatacagatatcaagggcacagttttggattttttcggtgtagctgtgaaggcctatgaattgctagctcgtgttgaagagcttcagttgttgtcaaagcgcattgcacgatacaaagatccaatcaagcaataccgcatccaactaccttataaaaagcctcagtggtcagcaagctgtggatggactgaaactgatgatgctagattgatggttggaattcattggtatggctacgggaattgggagaaaatacgtttggatccaaagcttggcctgacaacaaaaattgcaccagcaacacttggtgagagagagacatttttaccacgtgctccaaacttggataaccgtgctagcgctctcctgcaaaaggaatatgctaagtttagcggtaatagctcaaaagtcaaaggaaatgcccgccagacagtcaataacgacagtaatagtggagctcgatcaatgagaggccgacaaaaggatgcaccagataaagaggataataagccgaacaaagatgacattcagaagcgcaaggtaatgatggaagctgaagcaagagaagaaggtgaaatttctgaatcagaggcagagacaaagtatcgtctggacaaagaggagaagtggctcgaatggtgctctgaagttttaaatgaggaacaggaaactttgaagcgcctggacaggctgcagaatacaagtgtaaacctcccaaaggaaaaggttctttcaagaatccgcaagtatctcctgataattggggacaaaattggtgaagttgtccggcaacacagtgaatcttataggcaatcccgcatgaccatgaggttatggaattatgttgccaccttttcaaacatgtctggggagcaattgcatgatctctatttgaaacttagtcaagaccaactggaaggtggagttggcccatctcatggtgccaatttcacatccattccttccagcaagggaggtaactcaaatcaacttcatcctacaagaaaccataggccaaccaggtctctccagtacaattctgagtctttgcacaataatgagagctctggaagttctgaagcctggaagcgtcgacggagagcagaccctgataatcagtttgacacccagcctttgtatcaacctccaattatgacaaatggaaataggttgcaggaatctagtagttctgcaggaattcttggttggggtccagttgaaatgagacggtatggtaatgaaaggccaaagcgtggtgttcatcctagtcattttcctactgggcatggacctttgttgtagctgaaggaattagatgactcgaacaaccttgtccactttggcataactgttcccagtgaatttcagcttccatatagttacaaatggtggaactctgtcggaattgaaattcttttttccataacaagaaggaataaaaagcaagacctgacctggagcgcagtttgaatactgtccctcaaaggtaatgccaggactccagaggcgacgcagggatttgttaacagctacactgaatatccttctgacaacatcacagtaaaacgaatacatggtggcttgtcaactgccaagaggattaatcgaggaaattttgtcgattcagttttgtgatccaatagaaaagttgggggtcattaggaaaaagttcatctcaacaatgatctatagttcactctatacatgtattatgttttacattgcaatataatgaaatatggttcagttattcccactcagtgtgttttgtgcccttctgtattgatgtaatagatcaaagaaatgcatgttctcgttttttttttttttttttagaaaaccgcaggagaactgcgcatcttatatattagagaggaaaaaagacattacaaaagaggagaagttgcagagcaactctcccacctaataaagaagttgcagctgggggggcatagtatgtgttagtttcaatttctctaaatagaggaaatatatattttgttcacgcgatggaatcggtagatacttgaattgattccatagtatttttttcctgaggtgatgtgagaatgaggtgtgtggttatatgtatttcaaataattgtttgacaacacggtgttatgatttacattttgacatgtcatgatctgtattctgtggtgcaggttagctaggtgatcaaagccattctacaagtcatttcgcaaaagcaaacaatttaggagttgcatgaggcctactttaccctggatgcctcacttttgttatttagatgcagtgaggatgtttctagctctgtgctccctccctcataaatatgacattgcgaaactttgatcatccgtctcattcaaaaaattcttgag

SEQ ID NO: 199497 - DNA, 590 bp, Zea Mays
gttcgattggtgtcggattggtgataggaactcaggtccaaacttgaatggtctttttgggaggcagtcgggtaccaccacaggctactcctattccgcgggaaacaaaaacaaggctgtgatctgggaggagaacactctgtatgactacctgcttaaccctaagaagtacattcctggaaccaagatggtcttccctgggctgaagaagccgcaggaacgtgctgatctcattgcgtacctgaaggaagcaactgcgtagtataatgacacgcctttgccatgaagagaaaattcgttttgcagtttaataataaacatttttagacaatttgggtcactctggttggacagggtacacaatccacgtctcagtatttttgttcttatggtctcggtattgaatgcctaggtgagttttttttagctgtgcacaaaaaaacagttaaactcgatggtatctcaactgctggagaaatgctagtgccctatttttggctgtggaattggaaatctggaatgcatccattttgaaagacttggttgttgggatatgattctgctcgatgtgatggatatcctggatgaat

SEQ ID NO: 199498 - DNA, 1500 bp, Zea Mays
cttctcagctgtactttctgcgtaccttgcaattgtgttcacttgcttagcggtggagacaaaaattcttggcggtatccaagacttgccaaagggaatagcgagagagaataagatcattcaaacggtgatgagacaactcttatttgctcttgacggacttcattcgacaggaattgttcacagagatataaaacctcaaaatgtgatattttcagagggatcacgaaccttcaaaattattgatcttggagcagcagctgacttacgtgtaggaattaactatattcctaaagagttccttttggatccaaggtatgctgctccagaacaatatattatgagcacacaaaccccgtctgctccttctgttccagttgcaacaactttgtctccagtcctgtggcagctgaaccttcctgacagattcgacatatatagcttgggtctcatattcttacagatggcattcccttcactacgaactgatagcaacctcatacaatttaatcgccaactgaaaagatgtgattatgacttacaagcttggaggaatctggtggagccacgagcgagtgctgagctccggaggggctttgacatcatggatttagacggtggtatcggatgggaactcctcacctcgatggtccggtacaaagcacggcagaggaccagtgctaaggccgcattggcacacccgtacttcaaccgtgaagggctccttggcctctccgtcatgcaaaacgtacggctgcaactgttccgcgcaacccagaaggactacagtgaagcagcgcggtgggttatcggcctcatggcaaggtcaggaactgaagatgtgggaggctttacagaagcacagcttcaagagcttagggaaataaaaccaaagaaaagcagcacccagcggaacgcgcttgcctccgtgctgcgcctgcagaggaagatcatgagaacgatcaaggagagcatggacgagctcaacagccagcgcaaaagcatctggtggagccggtggatacccagggaggagtaggccggccgcaggcgcacatgtacatcgtccacttctgtatgaaacgtcacctattagcactggtgaattggtgatagtataatacactatcctacttactgctttgtacatgctgacgactggtgagtaaaattcatctgaaaaaaaaatcggagtaacgcgatgtatagctgtaaatattttgcattgaagcatcatgatttttgagatcagctctctgcttgaatatccaatcaccgaagctttctgcactggaactctggaagagccttccacgtgggatagtacaagattccatgacaggtcatcatctgtgccgtggcgccatgattgggacagcgatcttttgaaccgtagcaaaacactgcagctcgtgatgggctgatgaatagtttactgcatggcgcagttggacacttgggagtaccactaccacagtacagctcgtgaatgaagtttac

SEQ ID NO: 199499 - DNA, 4695 bp, Zea Mays
taaaaaattggaactttcaactgccaaaacatacaatcaatactaggtgatgtggagaccataggtatccagctacttattatgtaggatgtaagccgaacaggttgaggtaagaaaggttatggtaaggaaaagacttcatccgaactgtttaagtcttgagtcatcttgagattcgctttgattataatgtccttccttgccggtgtcgatcttttcttctccagtctttgtctcactgatttgaggtgtgtgttttatcggagttggggaatatggttaagatagttatggatgagatggactatatgactacatgatgtaggtcaaaatattgtttgatgctaggcgagtataaagaggacttggggaaaagttaggtaacagaaacatttattctagatggtggatcatgattcatccgaagatattttttttacttgtatccttcattttcgaggttaaccttcttgttgggcttgatttagtagaaacagatcttcagatgaggtagggtataggttagattggatataactagattagactggataagatctacctaatttattttggaatagatcatgtgtgttacactattatgatataagcaaagtggttgggataagtatgattattaggacaagataagtctctaagaataagatataatcttttcgagataagatgaatcaattaaggtaagaaagaatcttttaagatcagataggtcaattaagatatgagagaatcttttaagataagatggatcatttaagataagatagattcctttaggttaagagggatccaatatagtaagagtgagtcttttgagataagagggatccattaaggtatggaagaatcttttaaggtaagaaggatccatttaaattagatatactttaatggaggataatctaaattgtttagttatctcataaattttatttatttacatttatacctatatgtatatgcagatgtaatcatggacgttactccacaacttatcacactcaatcaaaaatccaaatcaaacaaatatcacaagaacaaacactcaagcgtatagatacatataaaaatagttttgtttttggtcctaagagtaggtctcctattcctaaaggtcactttaggcacaagatttcaaaagtgtgaaatccacatttttctttagaaggaaaaggtaagaatgatcagagtatagcgaaaatagatgagaaaagattaagataagttcataaaataattagagtagcaaaggtaaggttaatcagagtagaacagtagaaggtgaaacaggatcaagaagagataagtatagaatgaatcagagtaaggtaagtaagtattggttgtccagttctatttaggtttcgtcctacagtcaacattcctctgataccacttctgtaacacccggttttaagggacaaagccgggtgcatctcatacatgcgccaaagaagacaatatatataatcacagagtgtatagagataaatgtcacaataatcagagtacttattacatagcggaagtcttacaaaataaaagataaatatagcaggatctaaaatctatccttggcgccagaaagtcaactgggagacgccaccttttgttgatgcatcctactatatatgtttcatatatgaagtctcatgtactcctaaaaatatatgtatatatgagtactactaaacaagaactgtttgaagcttgctacaccctatggtgacaatttactatgtaatgcttttacagtcgtccgtatcgctctatatacatgtgtaatagtataataatgtcccttctatatgatttagatagaaataagtattaaatttccataacaagaacgcgcgcgctggcgcgtgccatttgctagtttcttactgtcccgccacccttatctttagtgagtactgagtacaattccagtttatcttttaacgacatattagtagtctagtggatgtactgatgtaccagtatcaagggaaattatcatgcatacatagatcgtgctaaaagcaattacctgagttgcaatcatgaagtaacaacggcagtcattttttctccaccaagcaagcacgaccgagaataattgatttttctaacctctttgttttcttattttgatatataagcaattggagcaactcatccttgatttctggacggaagaagatgattatgaattgaccgtgtcttgtccgggagtctgagagtgagacactcggagcagatcctagccacggaagcaatcgatgcttccccaccacgttaatcttcccgtaaccacaaattatggcctcctcgtcttttttatttttatttcagaaacaaccaaaactcctcctttgtcacatgcattttgagtcactgacatgtggaccctcagctacgtgtcaaactcatatattccacacgtttgaacaaaattatctctcgaacgataattcaaactcggaatatatagcgggagccgcatttttcaaccaggaaaaggtcgggaaaaaaatccgaaatggccgctagtggcctcggtctctccacctccttcctccccggccacgacaccctcctccggcgccggcgccggcggccggcgggccacgccgccgcgtcgttccggccggtgacggcggagctcggcggcgtcgcgacggagctgggccgccagctggtggaggcggtgggcgtggggctcccctgcaccgtcatgcagtgcggcgacgtcatctaccgcagcacgctcccccggaacgacgggctcaccatcacggcccccggcctcacgctcgcgctcgctaccgtgtcgtacctctggtccacgccaggcgtcgcgccggggttcttcgacatgttcgtcctcgccttcgccgaacgcctcttccgccctaccttccgcaaggatgacttggtatttgggaagaagctcggggagggcgcattcggggtcgtgtgtaaggcttcactggcgaaccccgaagcggcgaagaagcaaggggatttggtcgtgaagaaggcaacagagtatggtgcagtggagatttggatgaatgaacgtgtcaggagggcatgcgctagtagctgtgcggattttatttatggcttttgcgagacaaaagcaaaaggtaagggagctgaagaatattggcttatttggcgttttgaaggtgaggatacactttatgatctcatgcaaagcaaggaattcccttacaatgtggagacaaaaattcttggcggtatccaagacttgccaaagggaatagcgagagagaataagatcattcaaacggtgatgagacaactcttatttgctcttgacggacttcattcgacaggaattgttcacagagatataaaacctcaaaatgtgatattttcagagggatcacgaaccttcaaaattattgatcttggagcagcagctgacttacgtgtaggaattaactatattcctaaagagttccttttggatccaaggtatgctgctccagaacaatatattatgagcacacaaaccccgtctgctccttctgttccagttgcaacaactttgtctccagtcctgtggcagctgaaccttcctgacagattcgacatatatagcttgggtctcatattcttacagatggcattcccttcactacgaactgatagcaacctcatacaatttaatcgccaactgaaaagatgtgattatgacttacaagcttggaggaatctggtggagccacgagcgagtgctgagctccggaggggctttgacatcatggatttagacggtggtatcggatgggaactcctcacctcgatggtccggtacaaagcacggcagaggaccagtgctaaggccgcattggcacacccgtacttcaaccgtgaagggctccttggcctctccgtcatgcaaaacgtacggctgcaactgttccgcgcaacccagaaggactacagtgaagcagcgcggtgggttatcggcctcatggcaaggtcaggaactgaagatgtgggaggctttacagaagcacagcttcaagagcttagggaaataaaaccaaagaaaagcagcacccagcggaacgcgcttgcctccgtgctgcgcctgcagaggaagatcatgagaacgatcaaggagagcatggacgagctcaacagccagcgcaaaagcatctggtggagccggtggatacccagggaggagtaggccggccgcaggcgcacatgtacatcgtccacttctgtatgaaacgtcacctattagcactggtgaattggtgatagtataatacactatcctacttactgctttgtacatgctgacgactggtgagtaaaattcatctgaaaaaaaaatcggagtaacgcgatgtatagctgtaaatattttgcattgaagcatcatgatttttgagatcagctctctgcttgaatatccaatcaccgaagctttctgcactggaactctggaagagccttccacgtgggatagtacaagattccatgacaggtcatcatctgtgccgtggcgccatgattgggacagcgatcttttgaaccgtagcaaaacactgcagctcgtgatgggctgatgaatagtttactgcatggcgcagttggacacttgggagtaccactaccacagtacagctcgtgaatgaagtttac

SEQ ID NO: 199500 - DNA, 2901 bp, Zea Mays
ctcattctctcttcccaggcgataaggctcaagtgggtcaacaaaaaaaggaaggaaagaccaaacgataaggctggaggcttatctagaaaggtccctagcgccctgcgacgacgcttggatcacaacgttgttggacgaatgcgcatctaccttcgcagttatctggaatttggagttacagtccacgttcgcatgaattggaactttcaactgccaaaacatacaattatctggattttggagttatagtccacgttctaaaaaattggaactttcaactgccaaaacatacaaaatagtcctcaaactgaagacaatcttcaaaatgaagaccagaacatactggcttttgaatcaccaccaaaaagcaattggagcaactcatccttgatttctggacggaagaagatgattatgaattgaccgtgtcttgtccgggagtctgagagtgagacactcggagcagatcctagccacggaagcaatcgatgcttccccaccacgttaatcttcccgtaaccacaaattatggcctcctcgtcttttttatttttatttcagaaacaaccaaaactcctcctttgtcacatgcattttgagtcactgacatgtggaccctcagctacgtgtcaaactcatatattccacacgtttgaacaaaattatctctcgaacgataattcaaactcggaatatatagcgggagccgcatttttcaaccaggaaaaggtcgggaaaaaaatccgaaatggccgctagtggcctcggtctctccacctccttcctccccggccacgacaccctcctccggcgccggcgccggcggccggcgggccacgccgccgcgtcgttccggccggtgacggcggagctcggcggcgtcgcgacggagctgggccgccagctggtggaggcggtgggcgtggggctcccctgcaccgtcatgcagtgcggcgacgtcatctaccgcagcacgctcccccggaacgacgggctcaccatcacggcccccggcctcacgctcgcgctcgctaccgtgtcgtacctctggtccacgccaggcgtcgcgccggggttcttcgacatgttcgtcctcgccttcgccgaacgcctcttccgccctaccttccgcaaggatgacttggtatttgggaagaagctcggggagggcgcattcggggtcgtgtgtaaggcttcactggcgaaccccgaagcggcgaagaagcaaggggatttggtcgtgaagaaggcaacagagtatggtgcagtggagatttggatgaatgaacgtgtcaggagggcatgcgctagtagctgtgcggattttatttatggcttttgcgagacaaaagcaaaaggtaagggagctgaagaatattggcttatttggcgttttgaaggtgaggatacactttatgatctcatgcaaagcaaggaattcccttacaatgtggagacaaaaattcttggcggtatccaagacttgccaaagggaatagcgagagagaataagatcattcaaacggtgatgagacaactcttatttgctcttgacggacttcattcgacaggaattgttcacagagatataaaacctcaaaatgtgatattttcagagggatcacgaaccttcaaaattattgatcttggagcagcagctgacttacgtgtaggaattaactatattcctaaagagttccttttggatccaaggtatgctgctccagaacaatatattatgagcacacaaaccccgtctgctccttctgttccagttgcaacaactttgtctccagtcctgtggcagctgaaccttcctgacagattcgacatatatagcttgggtctcatattcttacagatggcattcccttcactacgaactgatagcaacctcatacaatttaatcgccaactgaaaagatgtgattatgacttacaagcttggaggaatctggtggagccacgagcgagtgctgagctccggaggggctttgacatcatggatttagacggtggtatcggatgggaactcctcacctcgatggtccggtacaaagcacggcagaggaccagtgctaaggccgcattggcacacccgtacttcaaccgtgaagggctccttggcctctccgtcatgcaaaacgtacggctgcaactgttccgcgcaacccagaaggactacagtgaagcagcgcggtgggttatcggcctcatggcaaggtcaggaactgaagatgtgggaggctttacagaagcacagcttcaagagcttagggaaataaaaccaaagaaaagcagcacccagcggaacgcgcttgcctccgtgctgcgcctgcagaggaagatcatgagaacgatcaaggagagcatggacgagctcaacagccagcgcaaaagcatctggtggagccggtggatacccagggaggagtaggccggccgcaggcgcacatgtacatcgtccacttctgtatgaaacgtcacctattagcactggtgaattggtgatagtataatacactatcctacttactgctttgtacatgctgacgactggtgagtaaaattcatctgaaaaaaaaatcggagtaacgcgatgtatagctgtaaatattttgcattgaagcatcatgatttttgagatcagctctctgcttgaatatccaatcaccgaagctttctgcactggaactctggaagagccttccacgtgggatagtacaagattccatgacaggtcatcatctgtgccgtggcgccatgattgggacagcgatcttttgaaccgtagcaaaacactgcagctcgtgatgggctgatgaatagtttactgcatggcgcagttggacacttgggagtaccactaccacagtacagctcgtgaatgaagtttac

SEQ ID NO: 199501 - DNA, 5047 bp, Zea Mays
caagcgataaggctcatctcattctctcttcccaggcgataaggctcaagtgggtcaacaaaaaaaggaaggaaagaccaaacgataaggctggaggcttatctagaaaggtccctagcgccctgcgacgacgcttggatcacaacgttgttggacgaatgcgcatctaccttcgcagttatctggaatttggagttacagtccacgttcgcatgaattggaactttcaactgccaaaacatacaattatctggattttggagttatagtccacgttctaaaaaattggaactttcaactgccaaaacatacaaaatagtcctcaaactgaagacaatcttcaaaatgaagaccagaacatactggcttttgaatcaccaccaaaaagtcaatactaggtgatgtggagaccataggtatccagctacttattatgtaggatgtaagccgaacaggttgaggtaagaaaggttatggtaaggaaaagacttcatccgaactgtttaagtcttgagtcatcttgagattcgctttgattataatgtccttccttgccggtgtcgatcttttcttctccagtctttgtctcactgatttgaggtgtgtgttttatcggagttggggaatatggttaagatagttatggatgagatggactatatgactacatgatgtaggtcaaaatattgtttgatgctaggcgagtataaagaggacttggggaaaagttaggtaacagaaacatttattctagatggtggatcatgattcatccgaagatattttttttacttgtatccttcattttcgaggttaaccttcttgttgggcttgatttagtagaaacagatcttcagatgaggtagggtataggttagattggatataactagattagactggataagatctacctaatttattttggaatagatcatgtgtgttacactattatgatataagcaaagtggttgggataagtatgattattaggacaagataagtctctaagaataagatataatcttttcgagataagatgaatcaattaaggtaagaaagaatcttttaagatcagataggtcaattaagatatgagagaatcttttaagataagatggatcatttaagataagatagattcctttaggttaagagggatccaatatagtaagagtgagtcttttgagataagagggatccattaaggtatggaagaatcttttaaggtaagaaggatccatttaaattagatatactttaatggaggataatctaaattgtttagttatctcataaattttatttatttacatttatacctatatgtatatgcagatgtaatcatggacgttactccacaacttatcacactcaatcaaaaatccaaatcaaacaaatatcacaagaacaaacactcaagcgtatagatacatataaaaatagttttgtttttggtcctaagagtaggtctcctattcctaaaggtcactttaggcacaagatttcaaaagtgtgaaatccacatttttctttagaaggaaaaggtaagaatgatcagagtatagcgaaaatagatgagaaaagattaagataagttcataaaataattagagtagcaaaggtaaggttaatcagagtagaacagtagaaggtgaaacaggatcaagaagagataagtatagaatgaatcagagtaaggtaagtaagtattggttgtccagttctatttaggtttcgtcctacagtcaacattcctctgataccacttctgtaacacccggttttaagggacaaagccgggtgcatctcatacatgcgccaaagaagacaatatatataatcacagagtgtatagagataaatgtcacaataatcagagtacttattacatagcggaagtcttacaaaataaaagataaatatagcaggatctaaaatctatccttggcgccagaaagtcaactgggagacgccaccttttgttgatgcatcctactatatatgtttcatatatgaagtctcatgtactcctaaaaatatatgtatatatgagtactactaaacaagaactgtttgaagcttgctacaccctatggtgacaatttactatgtaatgcttttacagtcgtccgtatcgctctatatacatgtgtaatagtataataatgtcccttctatatgatttagatagaaataagtattaaatttccataacaagaacgcgcgcgctggcgcgtgccatttgctagtttcttactgtcccgccacccttatctttagtgagtactgagtacaattccagtttatcttttaacgacatattagtagtctagtggatgtactgatgtaccagtatcaagggaaattatcatgcatacatagatcgtgctaaaagcaattacctgagttgcaatcatgaagtaacaacggcagtcattttttctccaccaagcaagcacgaccgagaataattgatttttctaacctctttgttttcttattttgatatataagcaattggagcaactcatccttgatttctggacggaagaagatgattatgaattgaccgtgtcttgtccgggagtctgagagtgagacactcggagcagatcctagccacggaagcaatcgatgcttccccaccacgttaatcttcccgtaaccacaaattatggcctcctcgtcttttttatttttatttcagaaacaaccaaaactcctcctttgtcacatgcattttgagtcactgacatgtggaccctcagctacgtgtcaaactcatatattccacacgtttgaacaaaattatctctcgaacgataattcaaactcggaatatatagcgggagccgcatttttcaaccaggaaaaggtcgggaaaaaaatccgaaatggccgctagtggcctcggtctctccacctccttcctccccggccacgacaccctcctccggcgccggcgccggcggccggcgggccacgccgccgcgtcgttccggccggtgacggcggagctcggcggcgtcgcgacggagctgggccgccagctggtggaggcggtgggcgtggggctcccctgcaccgtcatgcagtgcggcgacgtcatctaccgcagcacgctcccccggaacgacgggctcaccatcacggcccccggcctcacgctcgcgctcgctaccgtgtcgtacctctggtccacgccaggcgtcgcgccggggttcttcgacatgttcgtcctcgccttcgccgaacgcctcttccgccctaccttccgcaaggatgacttggtatttgggaagaagctcggggagggcgcattcggggtcgtgtgtaaggcttcactggcgaaccccgaagcggcgaagaagcaaggggatttggtcgtgaagaaggcaacagagtatggtgcagtggagatttggatgaatgaacgtgtcaggagggcatgcgctagtagctgtgcggattttatttatggcttttgcgagacaaaagcaaaaggtaagggagctgaagaatattggcttatttggcgttttgaaggtgaggatacactttatgatctcatgcaaagcaaggaattcccttacaatgtggagacaaaaattcttggcggtatccaagacttgccaaagggaatagcgagagagaataagatcattcaaacggtgatgagacaactcttatttgctcttgacggacttcattcgacaggaattgttcacagagatataaaacctcaaaatgtgatattttcagagggatcacgaaccttcaaaattattgatcttggagcagcagctgacttacgtgtaggaattaactatattcctaaagagttccttttggatccaaggtatgctgctccagaacaatatattatgagcacacaaaccccgtctgctccttctgttccagttgcaacaactttgtctccagtcctgtggcagctgaaccttcctgacagattcgacatatatagcttgggtctcatattcttacagatggcattcccttcactacgaactgatagcaacctcatacaatttaatcgccaactgaaaagatgtgattatgacttacaagcttggaggaatctggtggagccacgagcgagtgctgagctccggaggggctttgacatcatggatttagacggtggtatcggatgggaactcctcacctcgatggtccggtacaaagcacggcagaggaccagtgctaaggccgcattggcacacccgtacttcaaccgtgaagggctccttggcctctccgtcatgcaaaacgtacggctgcaactgttccgcgcaacccagaaggactacagtgaagcagcgcggtgggttatcggcctcatggcaaggtcaggaactgaagatgtgggaggctttacagaagcacagcttcaagagcttagggaaataaaaccaaagaaaagcagcacccagcggaacgcgcttgcctccgtgctgcgcctgcagaggaagatcatgagaacgatcaaggagagcatggacgagctcaacagccagcgcaaaagcatctggtggagccggtggatacccagggaggagtaggccggccgcaggcgcacatgtacatcgtccacttctgtatgaaacgtcacctattagcactggtgaattggtgatagtataatacactatcctacttactgctttgtacatgctgacgactggtgagtaaaattcatctgaaaaaaaaatcggagtaacgcgatgtatagctgtaaatattttgcattgaagcatcatgatttttgagatcagctctctgcttgaatatccaatcaccgaagctttctgcactggaactctggaagagccttccacgtgggatagtacaagattccatgacaggtcatcatctgtgccgtggcgccatgattgggacagcgatcttttgaaccgtagcaaaacactgcagctcgtgatgggctgatgaatagtttactgcatggcgcagttggacacttgggagtaccactaccacagtacagctcgtgaatgaagtttac

SEQ ID NO: 199502 - DNA, 2516 bp, Zea Mays
ggaaaagctccattaacgggggtcggggcgtaaagctgcgtacggcggcacggtggtagtgatacacaccgaagcacccaggaaagcatcctggctcctgtccctcctcgccatttcacgagctcccatttcacacgctcactccgtcactcgctcgcctccgccgtcgcaaagcctgccggaaccggcgtgtgcggtcagttccggtgccgcgcagggcctgaggaatgccgcactccgtcctggcccgtctgccccccggctccgtccggctcgtagctgccttcgggctgctgctcctcgtctcgctgctcgttctccaccgccgccccgggaggccccatgtggcggcggccgccgccagcgaccgactcactgatccctcccggtcccggctgttcctgtcgcagtcccccggggccaacgcgagcatcgcggctgacctccgcgcgctcaccgcggggccgcacctcgcggggacgcctgcgtcggcgggtgcagccgcgcacgtgctcgcccgcctccgcgccgcgggactccaaaccctaacgcgcgagtacgagccgctgctctcgtaccctgggcacgcctccctcgcgctgctccggcccgacgggtccctgctcgcgcgcctgtcgctcgaggagcccgcggacgaggggcgccgcgtcgtgcctccgtaccacgcgtacgcgccgtccggcggggccgtcgcggaggcggtgttcgtcaacctcggccgcgaggaggactacgtcgtgctcgagaggcttggagtgggcgtgcgcggccgcgtcgcggtggcgcgccgcgggggtgggtaccgcggcggggttgtggcgcgcgctgcggacaagggagccgtcgccgtgctcatcgcgggcaacgcggacggcggcgtcgagagaggagtcgttcttctcggcggccccggcgatccgctcacccccgggtgggccgccaccagcggtgcggagcgtttgaagttcgacgataaggcagtcaagcagcggtttccgagtatcccctccatgccggtgtcggccaagacggcagcagcgatcattcgaagcctgggcggtccggccataccggcggaatggaaggacggcctcggggtggataccggtggtcttggacctggccccacgctggtcaacttcacgtatcaggaggacaggaagttttataagatacgagacatttttggtatcataaaagggcaagaggaacctgaccgatatgtgatactcggtaaccacagagatgcatggacctatggagcagttgatcctaacagcgggacagctgcacttctagacattgctcggcgtcttggaataatgctgcaatcaggatggaaaccacggaggtccatcattctttgtagttgggacggtgaagaatttgggatggctctttttcgtccccagattggatcaactgaatgggttgaagacaaccttgaagatctgcattccaaagctgtagcttacttgaatgttgattgtgctgtgcaaggtgtgggattttttgctggttctactccccagttggacaaactcttggttgatattacaagacaggtaagggatcctgatgtcacgggaaagatggttcatgatacatggaatgaaatgagtggcggcatcaaaatagaaaggcttgccagaactgattccgattttgctccatttctacatcatgctggaattccatctgtagacttgtactacggagaagaatttcctggttaccatactgctcttgacacttataattggatggaaaagcatggcgatccattctttcttcgtcatttggctatcacagaaatttggggactattagctcttcgattggccaatgatcctgtgttaccttttgattatcaagcttacacttcgcagttacaggagcatataaaaacattgtctgccctgacgagcaatggccatgcagtaaatttgatgaatgggtgcgtcaatgatctttctggtgcagctatggaagttctgaaggagatgaagaaactacagcagatggatttatatgatgaacacgccaggatgagaaggcgattgttgaacgatcgcctcctacttgctgaaagaagcttcctgcaacctgaagggctccaaggaagaggatggtttaagcatctgttgtactcgcctccggaggactacgaaagcaagctgtcgttcttccctgggatcgctgacgccatctcacggtccgccaatctgagtgacaaggaacaggaggtggcaatgcagcatgaagtgtggaaagtctgccgtgcgattcaaagggctgcgagtgttcttagaggtgaattcagtgagcaaaaaccgacgaattttagttctttggtgaccccatgagatgtgtttgtgcaaacaaataacaaacaatggttatttagtatctgcgcgaaatggaagtgtgatgaagaatgtgatgcttttgggcgtacactttacagcgcagcgttggggcagcagcgagtagag

SEQ ID NO: 199503 - DNA, 2394 bp, Zea Mays
cctgtccctcctcgccatttcacgagctcccatttcacacgctcactccgtcactcgctcgcctccgccgtcgcaaagcctgccggaaccggcgtgtgcggtcagttccggtgccgcgcagggcctgaggaatgccgcactccgtcctggcccgtctgccccccggctccgtccggctcgtagctgccttcgggctgctgctcctcgtctcgctgctcgttctccaccgccgccccgggaggccccatgtggcggcggccgccgccagcgaccgactcactgatccctcccggtcccggctgttcctgtcgcagtcccccggggccaacgcgagcatcgcggctgacctccgcgcgctcaccgcggggccgcacctcgcggggacgcctgcgtcggcgggtgcagccgcgcacgtgctcgcccgcctccgcgccgcgggactccaaaccctaacgcgcgagtacgagccgctgctctcgtaccctgggcacgcctccctcgcgctgctccggcccgacgggtccctgctcgcgcgcctgtcgctcgaggagcccgcggacgaggggcgccgcgtcgtgcctccgtaccacgcgtacgcgccgtccggcggggccgtcgcggaggcggtgttcgtcaacctcggccgcgaggaggactacgtcgtgctcgagaggcttggagtgggcgtgcgcggccgcgtcgcggtggcgcgccgcgggggtgggtaccgcggcggggttgtggcgcgcgctgcggacaagggagccgtcgccgtgctcatcgcgggcaacgcggacggcggcgtcgagagaggagtcgttcttctcggcggccccggcgatccgctcacccccgggtgggccgccaccagcggtgcggagcgtttgaagttcgacgataaggcagtcaagcagcggtttccgagtatcccctccatgccggtgtcggccaagacggcagcagcgatcattcgaagcctgggcggtccggccataccggcggaatggaaggacggcctcggggtggataccggtggtcttggacctggccccacgctggtcaacttcacgtatcaggaagttttataagatacgagacatttttggtatcataaaagggcaagaggaacctgaccgatatgtgatactcggtaaccacagagatgcatggacctatggagcagttgatcctaacagcgggacagctgcacttctagacattgctcggcgtcttggaataatgctgcaatcaggatggaaaccacggaggtccatcattctttgtagttgggacggtgaagaatttgggatgattggatcaactgaatgggttgaagacaaccttgaagatctgcattccaaagctgtagcttacttgaatgttgattgtgctgtgcaaggtgtgggattttttgctggttctactccccagttggacaaactcttggttgatattacaagacaggtaagggatcctgatgtcacgggaaagatggttcatgatacatggaatgaaatgagtggcggcatcaaaatagaaaggcttgccagaactgattccgattttgctccatttctacatcatgctggaattccatctgtagacttgtactacggagaagaatttcctggttaccatactgctcttgacacttataattggatggaaaagcatggcgatccattctttcttcgtcatttggctatcacagaaatttggggactattagctcttcgattggccaatgatcctgtgttaccttttgattatcaagcttacacttcgcagttacaggagcatataaaaacattgtctgccctgacgagcaatggccatgcagtaaatttgatgaatgggtgcgtcaatgatctttctggtgcagctatggaagttctgaaggagatgaagaaactacagcagatggatttatatgatgaacacgccaggatgagaaggcgattgttgaacgatcgcctcctacttgctgaaagaagcttcctgcaacctgaagggctccaaggaagaggatggtttaagcatctgttgtactcgcctccggaggactacgaaagcaagctgtcgttcttccctgggatcgctgacgccatctcacggtccgccaatctgagtgacaaggaacaggaggtggcaatgcagcatgaagtgtggaaagtctgccgtgcgattcaaagggctgcgagtgttcttagaggtgaattcagtgagcaaaaaccgacgaattttagttctttggtgaccccatgagatgtgtttgtgcaaacaaataacaaacaatggttatttagtatctgcgcgaaatggaagtgtgatgaagaatgtgatgcttttgggcgtacactttacagcgcagcgttggggcagcagcgagtagag

SEQ ID NO: 199504 - DNA, 2357 bp, Zea Mays
atgccgcactccgtcctggcccgtctgccccccggctccgtccggctcgtagctgccttcgggctgctgctcctcgtctcgctgctcgttctccaccgccgccccgggaggccccatgtggcggcggccgccgccagcgaccgactcactgatccctcccggtcccggctgttcctgtcgcagtcccccggggccaacgcgagcatcgcggctgacctccgcgcgctcaccgcggggccgcacctcgcggggacgcctgcgtcggcgggtgcagccgcgcacgtgctcgcccgcctccgcgccgcgggactccaaaccctaacgcgcgagtacgagccgctgctctcgtaccctgggcacgcctccctcgcgctgctccggcccgacgggtccctgctcgcgcgcctgtcgctcgaggagcccgcggacgaggggcgccgcgtcgtgcctccgtaccacgcgtacgcgccgtccggcggggccgtcgcggaggcggtgttcgtcaacctcggccgcgaggaggactacgtcgtgctcgagaggcttggagtgggcgtgcgcggccgcgtcgcggtggcgcgccgcgggggtgggtaccgcggcggggttgtggcgcgcgctgcggacaagggagccgtcgccgtgctcatcgcgggcaacgcggacggcggcgtcgagagaggagtcgttcttctcggcggccccggcgatccgctcacccccgggtgggccgccaccagcggtgcggagcgtttgaagttcgacgataaggcagtcaagcagcggtttccgagtatcccctccatgccggtgtcggccaagacggcagcagcgatcattcgaagcctgggcggtccggccataccggcggaatggaaggacggcctcggggtggataccggtggtcttggacctggccccacgctggtcaacttcacgtatcaggaggacaggaagttttataagatacgagacatttttggtatcataaaagggcaagaggaacctgaccgatatgtgatactcggtaaccacagagatgcatggacctatggagcagttgatcctaacagcgggacagctgcacttctagacattgctcggcgtcttggaataatgctgcaatcaggatggaaaccacggaggtccatcattctttgtagttgggacggtgaagaatttgggatgattggatcaactgaatgggttgaagacaaccttgaagatctgcattccaaagctgtagcttacttgaatgttgattgtgctgtgcaaggtgtgggattttttgctggttctactccccagttggacaaactcttggttgatattacaagacaggtaagggatcctgatgtcacgggaaagatggttcatgatacatggaatgaaatgagtggcggcatcaaagggaaaatgcgaacacccgggccaagtcaagacattgcttgtcttatatttgtttgccctatttctaaagaatgtcaaatctgcagatagaaaggcttgccagaactgattccgattttgctccatttctacatcatgctggaattccatctgtagacttgtactacggagaagaatttcctggttaccatactgctcttgacacttataattggatggaaaagcatggcgatccattctttcttcgtcatttggctatcacagaaatttggggactattagctcttcgattggccaatgatcctgtgttaccttttgattatcaagcttacacttcgcagttacaggagcatataaaaacattgtctgccctgacgagcaatggccatgcagtaaatttgatgaatgggtgcgtcaatgatctttctggtgcagctatggaagttctgaaggagatgaagaaactacagcagatggatttatatgatgaacacgccaggatgagaaggcgattgttgaacgatcgcctcctacttgctgaaagaagcttcctgcaacctgaagggctccaaggaagaggatggtttaagcatctgttgtactcgcctccggaggactacgaaagcaagctgtcgttcttccctgggatcgctgacgccatctcacggtccgccaatctgagtgacaaggaacaggaggtggcaatgcagcatgaagtgtggaaagtctgccgtgcgattcaaagggctgcgagtgttcttagaggtgaattcagtgagcaaaaaccgacgaattttagttctttggtgaccccatgagatgtgtttgtgcaaacaaataacaaacaatggttatttagtatctgcgcgaaatggaagtgtgatgaagaatgtgatgcttttgggcgtacactttacagcgcagcgttggggcagcagcgagtagag

SEQ ID NO: 199505 - DNA, 2272 bp, Zea Mays
gaccgttgtgcctaaagcccacaatgaccatatcgcgcagcatatccgaacctagccaaccagccccagcgcccaacgcacgaactgtaagaaaccctagcggagcaactgacacactcgcctacatcctcggccgccagctcgccaccatcgcctcccggtcggccgcgccacctcccggaagattggataacaatatcatgccattaggtggataacatttgacgtgctcctggtttgttcatttccgggcatcatcaaaatgtcaggaccgctgaattcaaacattagtgggggcccctcgaaccttagagattccacaggaaggccatttacatcatcgttttctggtcaatctggatcacttccaggttttcatcactcaggcattccgtctgcaggggttcaacaacccagtggtggcatttccagtggccgtttccctccaaataatcttcaagcttccttgtctcagattcctcatgggcattctgggattagcaacagaggagcttctccagtcttaggaaatttaggcccaagaatagcaagttctgggaatattttgggtgggagcaatattgggagaagtataagctctggaggactgtctatgcctggtattgcatctcgcatgaatttaagtggcaactctggtagtggggctatcaacattcaaggatccaaccgtattggtatgcttcaacaagcatccccacaatttatgaacttgcttggaagttcttacccaacacctggagggtcactatctcagaatcaagtacagtcaggaagtggttctttaggatcttctggaatgctatatgaaggaagctcaggtgacaatgctccatttgatattaatgactttcctcagttaactggacgacctaattctgctggaggtggtcaaggacaatatggatcactgagaaagcatggagtaagcgtcaatgccattgtacaacaaaaccaggaattcagcattcagaatgaagattttccagctttaccaggaaataaaggtagttcctcagattatcctatggatattcatcacaaggaccaccttcaagagaatataaatattatgcaagcacaacattatcctatggctagaccatctggctttagcttgggaagcagttatccaccccgtcaacatcagcagagtgctaattcagttcaaaatgctgggctggaaactattggactaagaccggcaaattctccaagtctgtcaactaattcaggggtttatgagcaattcatgcagaagtaccatcaaccacagactcaaaattcacttaggttgcaggcagcttcaggtcctcaacagtacaaggatcagagccaaaaatccgttcagggaacacaggctgtgccggatccatatagcttacttggactgttgagtttaataagaatgaaagagcctggaccaacaactcttgctttagggattgatttgacctcgttggggttgaatttgaactcccaagataatctttacaagacatttggctctccgtggtcaagcgagccagctgtaggagaacctgattatcagatcccagcttgtttctctgcagagccaccaccagcactgcaaccatttcattttcagaagtttcaccctttgacactattctacatcttttacagcatgcctaaagatgccgctcagttatatgctgctaatgaactatacaataaagggtggttttaccacaaagactaccgtgtttggctaacaagagctcctaattccgcacctcttgtgaaaactccacttcatgaacgagggtcctacatttgttttgatccaagcatctgggatactgttcataaggacaactttgttctccattacgaagcagtggagaagagacctgtccttccttctgctggccaaaatattaggcgagaactataaggttctcctgcatttgaagttaatttggtttgatcagtagctgttgtcatggatgggctgagttcatacaaaatgattctataagaacttatgacccccaggtggcagttgtagaaatgtagctgagatttagattttcttcataatttgttggcattatttagtagggccattgttgtaccaatgttgtgacttgatttgttgttgttgttgttgtgacgcagtcaccgtgatgataataaatgttttgaccgttatgagtcagcatgaaaatataatgagacttttgatttgagatgtatgcgcctgtttgatgattggaattttgctgaatta

SEQ ID NO: 199506 - DNA, 2086 bp, Zea Mays
gaccgttgtgcctaaagcccacaatgaccatatcgcgcagcatatccgaacctagccaaccagccccagcgcccaacgcacgaactgtaagaaaccctagcggagcaactgacacactcgcctacatcctcggccgccagctcgccaccatcgcctcccggtcggccgcgccacctcccggaagattggataacaatatcatgccattaggtggataacatttgacgtgctcctggtttgttcatttccgggcatcatcaaaatgtcaggaccgctgaattcaaacattagtgggggcccctcgaaccttagagattccacaggaaggccatttacatcatcgttttctggtcaatctggatcacttccaggttttcatcactcaggggttcaacaacccagtggtggcatttccagtggccgtttccctccaaataatcttcaagcttccttgtctcagattcctcatgggcattctgggattagcaacagaggagcttctccagtcttaggaaatttaggcccaagaatagcaagttctgggaatattttgggtgggagcaatattgggagaagtataagctctggaggactgtctatgcctggtattgcatctcgcatgaatttaagtggcaactctggtagtggggctatcaacattcaaggatccaaccgtattggtatgcttcaacaagttaactggacgacctaattctgctggaggtggtcaaggacaatatggatcactgagaaagcatggagtaagcgtcaatgccattgtacaacaaaaccaggaattcagcattcagaatgaagattttccagctttaccaggaaataaagttcctcagattatcctatggatattcatcacaaggaccaccttcaagagaatataaatattatgcaagcacaacattatcctatggctagaccatctggctttagcttgggaagcagttatccaccccgtcaacatcagcagagtgctaattcagttcaaaatgctgggctggaaactattggactaagaccggcaaattctccaagtctgtcaactaattcaggggtttatgagcaattcatgcagaagtaccatcaaccacagactcaaaattcacttaggttgcaggcagcttcaggtcctcaacagtacaaggatcagagccaaaaatccgttcagggaacacaggctgtgccggatccatatagcttacttggactgttgagtttaataagaatgaaagagcctggaccaacaactcttgctttagggattgatttgacctcgttggggttgaatttgaactcccaagataatctttacaagacatttggctctccgtggtcaagcgagccagctgtaggagaacctgattatcagatcccagcttgtttctctgcagagccaccaccagcactgcaaccatttcattttcagaagtttcaccctttgacactattctacatcttttacagcatgcctaaagatgccgctcagttatatgctgctaatgaactatacaataaagggtggttttaccacaaagactaccgtgtttggctaacaagagctcctaattccgcacctcttgtgaaaactccacttcatgaacgagggtcctacatttgttttgatccaagcatctgggatactgttcataaggacaactttgttctccattacgaagcagtggagaagagacctgtccttccttctgctggccaaaatattaggcgagaactataaggttctcctgcatttgaagttaatttggtttgatcagtagctgttgtcatggatgggctgagttcatacaaaatgattctataagaacttatgacccccaggtggcagttgtagaaatgtagctgagatttagattttcttcataatttgttggcattatttagtagggccattgttgtaccaatgttgtgacttgatttgttgttgttgttgttgtgacgcagtcaccgtgatgataataaatgttttgaccgttatgagtcagcatgaaaatataatgagacttttgatttgagatgtatgcgcctgtttgatgattggaattttgctgaatta

SEQ ID NO: 199507 - DNA, 2454 bp, Zea Mays
gaccgttgtgcctaaagcccacaatgaccatatcgcgcagcatatccgaacctagccaaccagccccagcgcccaacgcacgaactgtaagaaaccctagcggagcaactgacacactcgcctacatcctcggccgccagctcgccaccatcgcctcccggtcggccgcgccacctcccggaagattggataacaatatcatgccattaggtggataacatttgacgtgctcctggtttgttcatttccgggcatcatcaaaatgtcaggaccgctgaattcaaacattagtgggggcccctcgaaccttagagattccacaggaaggccatttacatcatcgttttctggtcaatctggatcacttccaggttttcatcactcaggttcacacaacattcatggaaatcttaatcttgcaaatatctctggatcattagcaccacgaaataattcaatggcaggcattccgtctgcaggggttcaacaacccagtggtggcatttccagtggccgtttccctccaaataatcttcaagcttccttgtctcagattcctcatgggcattctgggattagcaacagaggaggtatgaatgttgggggaaatcctggatttggtagtagcatgaatgctattggtggttcaatacaaggtttatcctcaaacttggctaatgtgggtaaccgcaattctgctcctgggttggcagcttctccagtcttaggaaatttaggcccaagaatagcaagttctgggaatattttgggtgggagcaatattgggagaagtataagctctggaggactgtctatgcctggtattgcatctcgcatgaatttaagtggcaactctggtagtggggctatcaacattcaaggatccaaccgtattggtatgcttcaacaagcatccccacaatttatgaacttgcttggaagttcttacccaacacctggagggtcactatctcagaatcaagtacagtcaggaagtggttctttaggatcttctggaatgctatatgaaggaagctcaggtgacaatgctccatttgatattaatgactttcctcagttaactggacgacctaattctgctggaggtggtcaaggacaatatggatcactgagaaagcatggagtaagcgtcaatgccattgtacaacaaaaccaggaattcagcattcagaatgaagattttccagctttaccaggaaataaagttcctcagattatcctatggatattcatcacaaggaccaccttcaagagaatataaatattatgcaagcacaacattatcctatggctagaccatctggctttagcttgggaagcagttatccaccccgtcaacatcagcagagtgctaattcagttcaaaatgctgggctggaaactattggactaagaccggcaaattctccaagtctgtcaactaattcaggggtttatgagcaattcatgcagaagtaccatcaaccacagactcaaaattcacttaggttgcaggcagcttcaggtcctcaacagtacaaggatcagagccaaaaatccgttcagggaacacaggctgtgccggatccatatagcttacttggactgttgagtttaataagaatgaaagagcctggaccaacaactcttgctttagggattgatttgacctcgttggggttgaatttgaactcccaagataatctttacaagacatttggctctccgtggtcaagcgagccagctgtaggagaacctgattatcagatcccagcttgtttctctgcagagccaccaccagcactgcaaaagtttcaccctttgacactattctacatcttttacagcatgcctaaagatgccgctcagttatatgctgctaatgaactatacaataaagggtggttttaccacaaagactaccgtgtttggctaacaagagctcctaattccgcacctcttgtgaaaactccacttcatgaacgagggtcctacatttgttttgatccaagcatctgggatactgttcataaggacaactttgttctccattacgaagcagtggagaagagacctgtccttccttctgctggccaaaatattaggcgagaactataaggttctcctgcatttgaagttaatttggtttgatcagtagctgttgtcatggatgggctgagttcatacaaaatgattctataagaacttatgacccccaggtggcagttgtagaaatgtagctgagatttagattttcttcataatttgttggcattatttagtagggccattgttgtaccaatgttgtgacttgatttgttgttgttgttgttgtgacgcagtcaccgtgatgataataaatgttttgaccgttatgagtcagcatgaaaatataatgagacttttgatttgagatgtatgcgcctgtttgatgattggaattttgctgaatta

SEQ ID NO: 199508 - DNA, 2257 bp, Zea Mays
gaccgttgtgcctaaagcccacaatgaccatatcgcgcagcatatccgaacctagccaaccagccccagcgcccaacgcacgaactgtaagaaaccctagcggagcaactgacacactcgcctacatcctcggccgccagctcgccaccatcgcctcccggtcggccgcgccacctcccggaagattggataacaatatcatgccattaggtggataacatttgacgtgctcctggtttgttcatttccgggcatcatcaaaatgtcaggaccgctgaattcaaacattagtgggggcccctcgaaccttagagattccacaggaaggccatttacatcatcgttttctggtcaatctggatcacttccaggttttcatcactcaggggttcaacaacccagtggtggcatttccagtggccgtttccctccaaataatcttcaagcttccttgtctcagattcctcatgggcattctgggattagcaacagaggagcttctccagtcttaggaaatttaggcccaagaatagcaagttctgggaatattttgggtgggagcaatattgggagaagtataagctctggaggactgtctatgcctggtattgcatctcgcatgaatttaagtggcaactctggtagtggggctatcaacattcaaggatccaaccgtattggtatgcttcaacaagcatccccacaatttatgaacttgcttggaagttcttacccaacacctggagggtcactatctcagaatcaagtacagtcaggaagtggttctttaggatcttctggaatgctatatgaaggaagctcaggtgacaatgctccatttgatattaatgactttcctcagttaactggacgacctaattctgctggaggtggtcaaggacaatatggatcactgagaaagcatggagtaagcgtcaatgccattgtacaacaaaaccaggaattcagcattcagaatgaagattttccagctttaccaggaaataaaggtagttcctcagattatcctatggatattcatcacaaggaccaccttcaagagaatataaatattatgcaagcacaacattatcctatggctagaccatctggctttagcttgggaagcagttatccaccccgtcaacatcagcagagtgctaattcagttcaaaatgctgggctggaaactattggactaagaccggcaaattctccaagtctgtcaactaattcaggggtttatgagcaattcatgcagaagtaccatcaaccacagactcaaaattcacttaggttgcaggcagcttcaggtcctcaacagtacaaggatcagagccaaaaatccgttcagggaacacaggctgtgccggatccatatagcttacttggactgttgagtttaataagaatgaaagagcctggaccaacaactcttgctttagggattgatttgacctcgttggggttgaatttgaactcccaagataatctttacaagacatttggctctccgtggtcaagcgagccagctgtaggagaacctgattatcagatcccagcttgtttctctgcagagccaccaccagcactgcaaccatttcattttcagaagtttcaccctttgacactattctacatcttttacagcatgcctaaagatgccgctcagttatatgctgctaatgaactatacaataaagggtggttttaccacaaagactaccgtgtttggctaacaagagctcctaattccgcacctcttgtgaaaactccacttcatgaacgagggtcctacatttgttttgatccaagcatctgggatactgttcataaggacaactttgttctccattacgaagcagtggagaagagacctgtccttccttctgctggccaaaatattaggcgagaactataaggttctcctgcatttgaagttaatttggtttgatcagtagctgttgtcatggatgggctgagttcatacaaaatgattctataagaacttatgacccccaggtggcagttgtagaaatgtagctgagatttagattttcttcataatttgttggcattatttagtagggccattgttgtaccaatgttgtgacttgatttgttgttgttgttgttgtgacgcagtcaccgtgatgataataaatgttttgaccgttatgagtcagcatgaaaatataatgagacttttgatttgagatgtatgcgcctgtttgatgattggaattttgctgaatta

SEQ ID NO: 199509 - DNA, 2350 bp, Zea Mays
gaccgttgtgcctaaagcccacaatgaccatatcgcgcagcatatccgaacctagccaaccagccccagcgcccaacgcacgaactgtaagaaaccctagcggagcaactgacacactcgcctacatcctcggccgccagctcgccaccatcgcctcccggtcggccgcgccacctcccggaagattggataacaatatcatgccattaggtggataacatttgacgtgctcctggtttgttcatttccgggcatcatcaaaatgtcaggaccgctgaattcaaacattagtgggggcccctcgaaccttagagattccacaggaaggccatttacatcatcgttttctggtcaatctggatcacttccaggttttcatcactcaggttcacacaacattcatggaaatcttaatcttgcaaatatctctggatcattagcaccacgaaataattcaatggcaggcattccgtctgcaggggttcaacaacccagtggtggcatttccagtggccgtttccctccaaataatcttcaagcttccttgtctcagattcctcatgggcattctgggattagcaacagaggagcttctccagtcttaggaaatttaggcccaagaatagcaagttctgggaatattttgggtgggagcaatattgggagaagtataagctctggaggactgtctatgcctggtattgcatctcgcatgaatttaagtggcaactctggtagtggggctatcaacattcaaggatccaaccgtattggtatgcttcaacaagcatccccacaatttatgaacttgcttggaagttcttacccaacacctggagggtcactatctcagaatcaagtacagtcaggaagtggttctttaggatcttctggaatgctatatgaaggaagctcaggtgacaatgctccatttgatattaatgactttcctcagttaactggacgacctaattctgctggaggtggtcaaggacaatatggatcactgagaaagcatggagtaagcgtcaatgccattgtacaacaaaaccaggaattcagcattcagaatgaagattttccagctttaccaggaaataaaggtagttcctcagattatcctatggatattcatcacaaggaccaccttcaagagaatataaatattatgcaagcacaacattatcctatggctagaccatctggctttagcttgggaagcagttatccaccccgtcaacatcagcagagtgctaattcagttcaaaatgctgggctggaaactattggactaagaccggcaaattctccaagtctgtcaactaattcaggggtttatgagcaattcatgcagaagtaccatcaaccacagactcaaaattcacttaggttgcaggcagcttcaggtcctcaacagtacaaggatcagagccaaaaatccgttcagggaacacaggctgtgccggatccatatagcttacttggactgttgagtttaataagaatgaaagagcctggaccaacaactcttgctttagggattgatttgacctcgttggggttgaatttgaactcccaagataatctttacaagacatttggctctccgtggtcaagcgagccagctgtaggagaacctgattatcagatcccagcttgtttctctgcagagccaccaccagcactgcaaccatttcattttcagaagtttcaccctttgacactattctacatcttttacagcatgcctaaagatgccgctcagttatatgctgctaatgaactatacaataaagggtggttttaccacaaagactaccgtgtttggctaacaagagctcctaattccgcacctcttgtgaaaactccacttcatgaacgagggtcctacatttgttttgatccaagcatctgggatactgttcataaggacaactttgttctccattacgaagcagtggagaagagacctgtccttccttctgctggccaaaatattaggcgagaactataaggttctcctgcatttgaagttaatttggtttgatcagtagctgttgtcatggatgggctgagttcatacaaaatgattctataagaacttatgacccccaggtggcagttgtagaaatgtagctgagatttagattttcttcataatttgttggcattatttagtagggccattgttgtaccaatgttgtgacttgatttgttgttgttgttgttgtgacgcagtcaccgtgatgataataaatgttttgaccgttatgagtcagcatgaaaatataatgagacttttgatttgagatgtatgcgcctgtttgatgattggaattttgctgaatta

SEQ ID NO: 199510 - DNA, 2242 bp, Zea Mays
gaaggagattaagaaattgaaggaaaagctaagtagagcctttgagattggataacaatatcatgccattaggtggataacatttgacgtgctcctggtttgttcatttccgggcatcatcaaaatgtcaggaccgctgaattcaaacattagtgggggcccctcgaaccttagagattccacaggaaggccatttacatcatcgttttctggtcaatctggatcacttccaggttttcatcactcaggcattccgtctgcaggggttcaacaacccagtggtggcatttccagtggccgtttccctccaaataatcttcaagcttccttgtctcagattcctcatgggcattctgggattagcaacagaggaggtatgaatgttgggggaaatcctggatttggtagtagcatgaatgctattggtggttcaatacaaggtttatcctcaaacttggctaatgtgggtaaccgcaattctgctcctgggttggcagcttctccagtcttaggaaatttaggcccaagaatagcaagttctgggaatattttgggtgggagcaatattgggagaagtataagctctggaggactgtctatgcctggtattgcatctcgcatgaatttaagtggcaactctggtagtggggctatcaacattcaaggatccaaccgtattggtatgcttcaacaagcatccccacaatttatgaacttgcttggaagttcttacccaacacctggagggtcactatctcagaatcaagtacagtcaggaagtggttctttaggatcttctggaatgctatatgaaggaagctcaggtgacaatgctccatttgatattaatgactttcctcagttaactggacgacctaattctgctggaggtggtcaaggacaatatggatcactgagaaagcatggagtaagcgtcaatgccattgtacaacaaaaccaggaattcagcattcagaatgaagattttccagctttaccaggaaataaaggtagttcctcagattatcctatggatattcatcacaaggaccaccttcaagagaatataaatattatgcaagcacaacattatcctatggctagaccatctggctttagcttgggaagcagttatccaccccgtcaacatcagcagagtgctaattcagttcaaaatgctgggctggaaactattggactaagaccggcaaattctccaagtctgtcaactaattcaggggtttatgagcaattcatgcagaagtaccatcaaccacagactcaaaattcacttaggttgcaggcagcttcaggtcctcaacagtacaaggatcagagccaaaaatccgttcagggaacacaggctgtgccggatccatatagcttacttggactgttgagtttaataagaatgaaagagcctggaccaacaactcttgctttagggattgatttgacctcgttggggttgaatttgaactcccaagataatctttacaagacatttggctctccgtggtcaagcgagccagctgtaggagaacctgattatcagatcccagcttgtttctctgcagagccaccaccagcactgcaaaagtttcaccctttgacactattctacatcttttacagcatgcctaaagatgccgctcagttatatgctgctaatgaactatacaataaagggtggttttaccacaaagactaccgtgtttggctaacaagagctcctaattccgcacctcttgtgaaaactccacttcatgaacgagggtcctacatttgttttgatccaagcatctgggatactgttcataaggacaactttgttctccattacgaagcagtggagaagagacctgtccttccttctgctggccaaaatattaggcgagaactataaggttctcctgcatttgaagttaatttggtttgatcagtagctgttgtcatggatgggctgagttcatacaaaatgattctataagaacttatgacccccaggtggcagttgtagaaatgtagctgagatttagattttcttcataatttgttggcattatttagtagggccattgttgtaccaatgttgtgacttgatttgttgttgttgttgttgtgacgcagtcaccgtgatgataataaatgttttgaccgttatgagtcagcatgaaaatataatgagacttttgatttgagatgtatgcgcctgtttgatgattggaattttgctgaatta

SEQ ID NO: 199511 - DNA, 4770 bp, Zea Mays
aaagaaagtagttcgtgcaacgtaggaaccccaagataactcagacacttatagccaaaaacaacctatatacttaacttgacctgaccaaactaagggcttcagctaagcctaaacttccaagatgtttagctccagcttgtacccaacatgccaactcatccaagaagcttctctgcacgttgctgatggaaggagaatcaccatgaaagactacccggttaagctttaaccacaaagaccacacccccagaataatgacactattaggcctttcttcgcgaaagggcctctagctgagttggttaggtggtctgagtagcactcctcagtcctcactttctcaggtcctgggttcgactcctcgtgggaacgaattttaggctgtggtttaaaaaatcccctcgtctgtcccacgccaaagcacaggtctaaggctcgtccccggtcgcggtcgtcctcacatgggcttcgatgacgctgtgtatggatggggcaggggtttaggggttttctcgacctgtgtgagaaggtcttcttcttaatacaattctcgggggctgtcttacccccgcaggtcgagttattaggcccttcttcttgtctttgtggacccttttgcaagcacttttccaccattcagaaaaagagctatcttccacatgaccatagcaggagtgagacgtccaagaccaaaaggggataaatattgtgccaaaactgccgagcaaaggcacacatagctaggaggtgctgaactgtttcttgctcttgatcaaaaagagcgcaagcttcaggaatcaggatgggagaggcttctcttatctaatctatcagctgtccaacatttattcctcatggccagccatagacaactcttgcatttaggaggggcccaattcttccataatctttcatttttttgaagcttcagcttgtttagagtgagctatatttgatttagtggtgattctggtggcataacttcttgttttgtcaattaccttgtgtttactagactctgcatctttcccagatagttgtgtgcactctataaaaacaaggattgatagggctatgagagtaattttttgaaattagtgactgcttacatgttgtgattcaatatgcaatttgcaatgccacttatctgatactacctccctttgtgtttaatgttggtaagttcaattttgcaattagtgtctgcttacatgttgtgattcaacattcagtgtcacttgtctgatactacctcccttcctttaagtttgatgttggtaagttcaactttgcactaaccagcatcaaacataaaagatcagagggaatagcttaaaacgaaatgctcaacttttggtgtgatcataaatgatacaaagaagaaaggattgggagtatctaattggatttggtggacgtcgataaatggagattctaggcattgctcttttctgtttcttggataatgttgtgtggaccactctaggtatctctggtggataaacaagaagataccaccatatagtgtggtgttactcattaaaattgctttgaatatatcgacttcaaacatcagtgtaaagttatacaaggttagctgataccacactctttctctacgtggtcactgtgtcaaatcagaagaattgctgtcttgcacttgagttatagtggagggtgatgtcagattggatagcagtgccatgttgtaataccaattgaacccatcagaacacaatttctattttttttgaatgcctttattttttttactatgcagttttcttggacagtgaatcttctaacttttgttaaagaaactacagggtgtgatctttggagtgctttcataaggaatcttccagtgttgtgctttgcatacattggccgagcatctttatgatcggatttgtgtggcttcagctctatagaggaaagtggttgatttttattttcctttacctgaataacgcacttattcctaattgtttaatatgatgccactaaagcacaatacacattgttttataggaactagttttagttttgttctttaatggtgcttcacctatttattataaagcaccattgagattcaagacactattggtgtcattttgtaccttttgcattcttattttgtcacccaaaaagagacatcacatagtgggaggactcatccaaatattctatatcccaaaagttgggttgccatatattactttctgctgtgatggtttgatgtgaaaaacatttatagtgccttcatgattcagtatataatactaaatatatcaattgtttctgttgtccaatttatttttttctccataaggctgttagttttgcatgaggataatcattccaggtacacttctattctctccatacatcacacatttaggtatatcattggtttttcacatctgttgctgttggcttttgaaattgtgggtcgccaattaaaataaacatcagttcatgacatccgatgatatagcctcatgtgtttcatgtatgtattacatgttaagtttttattattgaaaagcttgatatgaggaagttagctcatttgtgttgtagtaaaaatcataagcatatggataaagtattaccgtctgttatgtgatatactttttggttccattgcttatttatgatcattactgtcaggacaagtacattttcaacctttttactgtgcttgtgatttcttttcaaacctttaaaactaaaatcatccatttgcatccttaaaactataaaatctctaatctgcatacattttaaggcttttttgtgctgacatgggtactatgtatcatcgaaaaccgctggattttgggatgaaggttgcgttttaattagatggttttgagagacatgtgattaagtgaatgattcaagcacgattttgattaaatattgttctttataatttggctacttgttggtaaatttactgctgcctgctcactatggccaagttagaatttcccctgaagttttcactcgactgtcctggcgattgcaaccctttacccctggttctgtgtaactgatatagaactcaggctagctttgtatattctgattccagtaaagtgcacatatggatatatgctgcaatatggtggtccgtgacatcactgcatgcgattaagaagtggtgatatgcagtgggtccgctgtcctaaccacatgcaccatacctctttaaaaccccagcctaatgtgcatcctccagtccaaggccactaggagtttgtaatggagaacaatacccctccaaagactgggacgggcttcttaaaaacttgcttcaatggagttaatgctctctcaggcgttggaatattatctattccatatgcattgtctcaaggaggatggctgagcttacttatcttcttaaccatagcaatcatctgtttctacactggtattctcctacagagatgtatagactcgagttcgcttgttaagacctatcctgatatcggtgagctagcttttgggcggaaaggaaaaatcatagtagcaatattcttgtacctagagctgtatcttgtggctattgatttcttgatattagaaggtgacaacttggagaaattatttccaaatgctaacttccatgctgccgggctgaaggttggaagcaagcaagggtttgtgttgatgttcagtctacttgttttaccaacaacatggcttcagagcttgaacatgcttgcatatgtcgcccttggtggagtcatggcttctgtcattttaatcgcctctgttctgtgggttgggacatttgatggggttggttttcataagaaaggtgtgcctgtggactggtctggtatgccaactgccatgagcttatatgcgttctgcttcagtggccatgctgtttttccgatgatatacactggcatgaggaacagaaaaacgttccccacagtgttactcatctgcttcattatctgcactcttagctatggcctgacaggtgtcattggatacttgatgtttgggaaatcattaagctcccaggtgactctgaaccttccagctaaccattttgcctccaacattgcgatctacacgacgttgatcaatccgtttaccaagttcgcgctgctgatcactccaatagcagaggctatcgaagataaacttcatgtggacaagaataagaccgtcagtatcttaatccggactgcgctggttgtcagcacaaccattgtggcccttgccgtgcccttctttgcctatgttgtcgctcttactggttcgtttctcagcagcacggtcacaattttgctaccatgtgtttgctacctgaagatcagctcacggacctccaggaatctgaggttggagctggtagtttgcttgggtattatcatgattggggtgggattagttttggtcggcacgtatagctcactgaaaaagattgttcatagcttttgatttctgaatgatatatgcaccttgaggccttagttcgtttcatcctttattaaaccatgaagactgaaggggatgattgatgaacaaggcctgagtgggtgtaatgtaaggcagaagaaaccctaggcagatactgtagcaaatgaatcgtagacaagccgatcttgcgatctagaataagtcgcttactgagaagtcaaactcgtgtaaatttaatcaaatatatgtaaaaaattactaatgtctatgtaataaacgccattaaattagatgtgaaatatttttataatgaat

SEQ ID NO: 199512 - DNA, 1276 bp, Zea Mays
ctatttttagggttacagtttaactatcttccaaaccgctttttctggtgaagttgctgggctttctctgcagtaagctcagtagaaagcgttaaccaaattgttactggtgagatggtgaccttgtccgagcaggagcttgtagagtgctcgactgatggagggaacagcggctgcaatggtgggcttatggatgccgcatttgattttatcataaagaacgggggcattgatactgaaggagactacccttacaaagctgtggatgggaagtgtgacatcaacagggaaaatgccaaggttgtgagcatcgatggctttgaagatgtgcctgaaaacgacgagaaatcattgcagaaggcagttgctcaccagcccgtcagcgttgccattgaggctggtggccgggagttccagctgtacaaagcgggtgtctttactggaacttgcaccacgaatcttgaccacggtgtcgtcgctgtcggctacggcaccgaaaatgggaaggactactggattgtccgcaactcttggggtgcaaagtggggcgaggatggttacatccgtatggagaggaacgtcaatgccaccactgggaagtgcgggattgctatgatggcatcctaccctaccaagaagggcgcaaaccctcccaagccgtctccaacccctccaacgccgccgcctcccccggttgccccggacaatgtctgcgatgagaacttctcctgcgcagcgggcagcacctgctgctgtgcgtttggtttcaggaacgtctgcttggtctggggttgctgtccgatggaaggtgccacctgctgcaaggaccacgccagctgttgcccgccgggttaccctgtgtgcaacgtcagagccggaacttgctcggtgagcaagaacagcccgctgagcgtgaaggccttgaagcgcaccctcgccaagctgaacagcgcatgagctcgtccagacatcagggatcatcgatctggagaggaatgggaccaccgcccggagcttttcagactctgcgtcctgatacaagctttcatagataacattatattgtatctaagtattacttggcgtcccatgaatccgttgtaaatatcaagctataatttctactatctttgttctcgaatttttattgcccgctaatttttttttttgaacagggctcctttgaaatgtaggaatttcatagaaatgatatagaaattttacaggaattagttcaaaaaacataggattcagggattttttctttgttccaaag

SEQ ID NO: 199513 - DNA, 791 bp, Zea Mays
gttccctttctccatcgcttcctccaccatctcaccgatcccttgctgcgatcgccctgtcagtaggcgaaggatggtgacgccgaacgagttcacgtcggaccacagcatgagctccgctgccgacttgaatccaccgccctgctccgtgtagcggagtgttcccttactacggtctgctgctgaagggcggcttcgcaggctggtggccgttatgtcgtcttcaccaccacctagaagaaggcagcagatgcccaagcctcccagcttgctgacgaaattggcgtcaaggaggatgtttcccaggttcagatcgccgtgaacgatcggatatggcttgtgtgagtggatgaaggccaaggctgagcatatctccccgacgatccttgtgcgcgccttccatgtcagaggcggcatgcttttcttgcacgagagccaatcctcgagactgccgtttgggaggaattcggacaccagcgcgaagtcgtcgggacatactcctaccagcgtgacaatgttaggatgcctcaccctactgaggacagcaacctgcaggagcgagtgagtagtgatgtcactgctcgttcgaaaaagggggcggtaagaacttgaaggtctttaatctgcacgagcaatcaccacttccatgaccacctgtgatttgtattaaggaccaatggtgcagaaaaggaagaagaaaacataccctttgaagggcaataatggacatgagctatggcaagcttggatccgtccttgaccagattgcgcagcgcccacagaagggtgct

SEQ ID NO: 199514 - DNA, 755 bp, Zea Mays
gctaccactgatttggcccagtaaaatttgttcttaacacttgcaagcgcttgaaggagaagaagtcgtaccttgtctggaatgctgttggctgccttggtgtcactgctgtcaatgatcttgttagagaggtggaggctattcagaagtgtggtgggcagactattgctgatggaagccgctttcgcactggtggtggaattctctggaacatcttaaagtcgcgggaacccaaggcttacaaggaaataatggcaaagggaaaggaacttgagaagcagtttaggtgtacgaaacgaccacagattagcagaaacgaagatgcaagttcacagggcagtgctttaattgatgatgaaattgaagcgcgagaccaaaaggaaacattggatgaccctaagcaattggatgatgtggagatacacgtatcagacaataaagctcaacgcaaaccactggcggacagaattcgcgctcctgttgcatatgatgatctgtttgaagagggggagatacacgacggagaaccacgtagttagcatttcaaagattatgcctcgtcatgagtgcccaaaggatgtcacataattgcaagagcatgagtatgatttaagaactaccactgcaatgtagcagtttttcctctaaacatcatccccgtgaacttgcagcgatggagattttgttgcgttcggtgaaaccattgttgggcctgaattcagtggtcaatggaaatcatggttaaacgagttttg

SEQ ID NO: 199515 - DNA, 650 bp, Zea Mays
ttgatttggtgaaaaatcaatttgcagtggaggctattcagaagtgtggtgggcagactattgctgatggaagccgctttcgcactggtggtggaattctctggaacatcttaaagtcgcgggaacccaaggcttacaaggaaataatggcaaagggaaaggaacttgagaagcagtttaggtgtacgaaacgaccacagattagcagaaacgaagatgcaagttcacagggcagtgctttaattgatgatgaaattgaagcgcgagaccaaaaggaaacattggatgaccctaagcaattggatgatgtggagatacacgtatcagacaataaagctcaacgcaaaccactggcggacagaattcgcgctcctgttgcatatgatgatctgtttgaagagggggagatacacgacggagaaccacgtagttagcatttcaaagattatgcctcgtcatgagtgcccaaaggatgtcacataattgcaagagcatgagtatgatttaagaactaccactgcaatgtagcagtttttcctctaaacatcatccccgtgaacttgcagcgatggagattttgttgcgttcggtgaaaccattgttgggcctgaattcagtggtcaatggaaatcatggttaaacgagttttg

SEQ ID NO: 199516 - DNA, 3088 bp, Zea Mays
tataaaccctagccgcctcattttcattcctcctctccctcgccggagttgagtttcatttgaataggcgggtgggaaagcatcctaaaccaccctccgctatccccaaccgccccgaaccatagcctcccctccgtgtcgccgtccggatctcgtgggttcgcgtgcagcggggatccgtccaggcttggattgatttcttatctgcgcgccatggatatcactcaggttctgatagctgctcaatctccagatgctaaccttcggaccgtggcagaaggcaacctcacacagttccaggagcagaattttcctaactttctcctctccttatcaatagagctctcgaacgatgaaaaacctccagagtctagaaggcttgctggtattatccttaagaattctttggatgcaaaggattctgcgaaaaaggagctactgactcagcaatgggtaagtgtggatccatctatcaaattgaaaatcaaggagttgttgctggtgacactaggatcttctgtgcatgatgcaagacatacctcttcacaagtcattgccaaggttgcatcaattgagatagcacgtcgagaatggcaagatctcgttgccaaattactggggaacatgacttctgcaggtgcacctgctcctttgaaacaagcaacactagaggcattggggtatgtgtgtgaggagatttctccacaggacttggagcaggaccaagtgaatgctgttctgactgctgttgtccagggaatgaaccagacagagctcagccctgaagttcgtcttgctgcagttaaagccctatataatgctcttgactttgcggagagtaactttgcaaatgaaatggagaggaattatataatgaaggtggtttgtgatactgctgtgtctaaagaagtggagatcagacaggctgcatttgaatgccttgttgcaatagcatccacctattattcacacttagagccttttatggaaaccatattctacctgacagctaatgcagttaaaggtgatgaggaaccggttgcacttcaagctgttgagttctggagcgctatctgtgacgaagagattgcactccaagatgaatatgagggatctgaggatggtaactctgctatacacttccgctttattgaaaaggccctccctttacttgttccgttgctgctagaaactttgttgaagcaagaggaagatcaagatcaagatgataatgcttggaatatttctatgagtggtggaacatgccttggactcatttctagaactgttggtgatgcagttgtccctcttgtgatgccatttgtcgagaccaacatcacaaagcctgattggcattgtcgtgaggcagctacctttgcatttggttctatccttgaaggcccctctgttgggaaacttgctccacttgtccaggctggtcttgatttcttgctcaacacgatgaatgatgcaaatagccaggtaaaagatactactgcttggactcttgggagagtatttgagctcttgcattctccagctggtataaactcaatcataaatggttcaaaccttccccgtatcatgtctgtattgcttgagagtactaaagatgctccaaatgtagccgagaaagtctgtggagctatttattttctcgcccaaggttatgaagatgcagagtcaacgtcttctgtcctcacaccttatctatctaatacgattgctgctcttctttctgccgcagaccgtgctgagaccacccatttcaggcttcgtgcttctgcttatgaagcactgaatgagatcgtgagggtcagcaacatacctgaaacttcaggcatcatagcacaattattgcaggagatcatgagaagattaaaccttacatttgatctccatatactttcttctggtgataaggagaaacaaagcgatctgcaggctttgctatgtggtgttctacaggtcatcatccagaaactgagcagcacagatgcaaagtctataatttctcagaccactgatcagctgatggtgctttttctgcgtgtctttgcctgccacaattctactgttcatgaagaagcaatgcttgcaattggtgctcttgcatatgctactggtccagattttgtgaaatacatgcctaacttctttacatacctggaggctggtttgcagaattatgaagagtaccaagtgtgttccatctctgttggagtggttggtgatatttgtcgtgccttagaagataaaagtttgcctttctgtgatcgcattatgacggttcttcttaaggacctatcaagctctatgctcaatcgatctgtgaagcctctgattttctcgtgctttggagacattgctcttgctattggtgagaattttgagaaatacctaccttatgccgtgccgatgcttcaaggagctgcaggactccttggtacacttgacctgagtgatgatgatatggttgattatggcaaccagctcagacgtggcatttttgaggcatactctggtatactccagggcatcaagggcccaaaagctcagctgatgatcccatatgcaacccatctactacagttcactgaagctgtctccaaagataggagcagggatgacagtgtgacaaaggctgcagttgctgtccttggggatctcgcggacacgcttggccaaagctcaaaggatctgttcaagacccacctattccatgttgagttcttgagggaatgtcaagctcaagagttggatgatgaagttcgggagactgcacaatgggcccaggggatgataaaccaggcggtggtctcttaatgcgggatgattttggtttgttagttacgggtggtttcttctgtggtggtgccaagttcatttgccacagatgaacgaaaggataccaatatatatgtagcgtcagtcttaggatcctggttggtctgtcaagccggtgtgggtcacattggaccgggtggtttctgtccatgaatgtcttgaacagcaaaaattggttcatttatcatgatattttttaatgctggggatgtgtttgcctccaaatttccatttattttcc

SEQ ID NO: 199517 - DNA, 3709 bp, Zea Mays
accatggtgacaccagcctccaccgcccctgcgtccaccgcttccgccgccgcggcgaccggctccggccgcggcgtactccgcctcctccgctatcccgcccgctgcctccttcctttggctgcggcgcccaggacaggcacgcggctgaccaccgtgctccgcgcaagaacccagccggcggagcccgagctggtggagcagtaggtgaacactatccggttcctggccgtcgacgccgtggagaaggcgcattctggccatccaggcctccccatgggctgcgcgccgctgggacacgttctattcgacgagttcctccggttcaacccgaagaaccccgcctggttcgaccgcgaccgcttcgtgctctccgccggccacgggtgcatgatccagtacgctctcctccacctcgctgggtacaatggcgtcaagatggacgatctgaaaactttccgacaatggagaagcagaactcctggtcacccagaaaattttgaaacacctggcgttgaagtcaccacaggtcctcttgggcagggttttgcaaatgctgttggactagcacttgctgagaaacatctagcttcacgtttcaacaagactgacatgaaagtcgtggaccattacacgtatgttatacttggggatggttgccaaatggaaggtgtttcgaatgaagcggcctctcttgctggtcactggggccttggaaaattgatagctttttatgatgacaaccacatatcaattgatggtaatacagatattgcattcactgaagatgtgcttgcacgatatgaggcactagggtggcatacaatctgggtgaagaatggcaacactgggtatgatgacatacgtactgcaataaacgaagccaagggagttaaagacaagccaactcttatcaaggtgactaccactattggttttggatctccgaacaaggccaacacatatagtgttcatggtaacgctttaggttcaaaagaggtagaggcaactagaagcaaccttggctggtttcatgagcctttccatgttccagatgaggtgaagaggcactggagtcgccatatcgatgagggtgcttcacttgaagctgaatggaatgccaggtttgtagaatatgaaaagaaatacaaccaggaggctgctgagttaaagagcataatttcaggggaactggcttctggaactacactcctgaaatgtctcctgatgctactaggaacttatctcagcagtgcttgaatgcacttgccaaagtaatacctggatttcttggaggtagttcggatctcgcaacgtcaaacatgacactgcttaagaagtttggtgacttccagagggatactcctgaagagagaaacattcgcttcggtgtgcgagagcatgctatgggtgccatttcgaatggcatcgctgttcacagccctggtctgataccttattgtgcaacgttctttgtcttcaccgactatatgagagcttccatccgcctttcagccttaagcgaatctggggtgatcttcgtgatgactcacgactccgttggcctcggggaagatgggccaacccatcagcctgttgagcatttattcagcctccgagcaatgcctaacatcttaatgcttcgtccagctgatggaaacgagacatcgggggcctataagattgcagttcttaacaggaaaaggccctcagtcattgccctctcacggcagaagctcccgcagctgagaggaacatcggtcgatgctgtttctaaaggagggtatattgtctccgatgactcatcaggcaacaaacctgatttcattctcattggcactggttcagagcttgagatcgcagaaaatgcagcaggcgagctgcggaagaaggggaggaccgtacgagtggtttcactagtttgctgggagctatttgaggagcagcctgaggagtacaaggaaagtgttctcccgagtgaggttacttctaggattagcattgaggcaggggtcacatttggatgggagaagtatattggacagaaaggcaaagctattggtatcgaccgttttggtgcaagtgctcctgcggggaaaatatacaaggaacttggtttgacagtggaacacgtcattgcagcagccgaggccctgtaaatggtcgtcacattactgaaacacatagtttgataggtatatggtgccactgggttgaaggcttgaagcactatttatggtcatatgtaagtatctgaacttctaaggatctttacgagctgcaagttgcatgttcacctaatgatgtgtagcttgtcaggcaaatttgcgctttgctccgatgctcctatacattcagactctaagaacctgaagccaggtcctggtcaccaaattagtcgtaataataaaaattatccttcttagggctgatttggtgattagggatccatgggaggaatccccttgcaattcaattttgaatagcaagagaatttcttcccctcgggatccccggtcaccaaatcagcctttaatgagaacgtccagttgcacgttcttgaataaataaaatgctggtgatattatcatatctatactatacttaaagcaccagtttcaacggtcgtcatgcatcattttttataaataacccctcacagctatttcaaattaatccgttgcacgtctataaatgtcaaacgacgcctaacacgggctagatgcacgcgggccacaactatggcacaggcacgtcatgtcggcctgtaactgtgtcgggccaaaccgttagcccgttgatccatttaattaaatcagcgtaacgacgcccgatacgggctagatgcacgtgggccacaactatggcacaggcacgtcataccggcctgctaactgtgtcgagccatctcgttagcccgttaatctatttaattaaatcaacgtaaaatgttaaaaaacggagcaggaggtggggttcgaacctatgccctgatggaagaagggcgggagacacgggatgaaactatctaaccagtagaacatcacgctaagatgtttttaatattgaatataaattgtatataggtatatatgtttttttctaaaataaaaaataattgtgtcgggctgggccagcactacgggctgaggctataacccaagcacggcacgacgttctttgctcttgcaagcattaggtcgtttctgagaccacattgacgctgttgggggccttcggcttccgaaggtcctcaaaaacgtggtttgacaatgttttctaagtatacgagcaggtatcttcggaatcgggaatcaggttgcgggtatacagaagcacggtcaagacgaagcttgactgggacggcgatcatgacgaaggttaagatgatcacgaagctatatgcaaaagagcttcggtatcacggcgggaaggggaaaccgacttaaagatgaaaagccaaactagacctcgaagaattactatagggttattgataaatgtaaagggcattattgtaattttgcatgggctgcgacccgtgcctataaataggtgaacagtatctctgtactgttcacgctgacttggcattcacttttgcgtcacgcctgtattattttccttcaagacgaaggtacatttataatttatctttgttcaagcaagtaataagaatagaaatagattaataataatgtctatagaa

SEQ ID NO: 199518 - DNA, 3480 bp, Zea Mays
acacgccacaagcctttcctcctcttcgtcacccaccgccgacggctagccatgtccgccgagcccacctctccgcctctatcgacggcgcaggtccgcgggagcctcatcccgccgcttccagacgacttggctgtccactgcatcgctctcttgccgcgcgccgcgcacccatccctggccctcgtctcccgcgctttccacgccctcctgtgccgccacccggagccgctcctcgccgcgcgccgcaccctccgctgctccgaaccccacgtcctcctctccctccgcccaccctcctccgcgtcccctatcttcttcctcctgctcccgcaccccgggtggcccccgctcccgcttccctcccctcccgtccccgtctcgtcctccgcgtcggccgccaccgacggcgcccggctcttcctcgtcggcggatccgtatccgcggtcccctctgcgtccgtgcagatcctggacccccgggccagatcctggtccgccggcccgcgcctgtcctctacgcgggagttcgccgcggccgtcgcgcactccggggcgctgttcgtcgccggcggctgcatcccctcgtcccctttctgggccgaggctctcgacctctccactccgaacgccaagtggagagccgtcgccagcccggcccacctccgcgagaagtggatgcacggctgcgcgtcgctcgacgggaaggtcgttgtggtggcggaccgtggcggcttgtcctacgatccttcggcgccacctgcggaggcgtgggcaccggtgtcgccggtgcttgacatgggatggaagggccgagctgcagtggttgagggaatcctctactcttacgattacctgggacaggtcaaggggtatgatccgtacactgattcttggagcacagtggaggggttggagggggagctacctaagttcttgtgcggcgccacacttgccgatgttggaggattgctctacttggtttgggaaggaaagtggaaagggaaattaaaaggtaagatggaaatgaggagcatggtagtgattgaatgggccagcattcagattacaagggtccaagagggacggctaagaggaaaggttgtctctagggacactgttctgttcccggatatgccaagaggttcaacgatcacacattgcattgcattggagttgtgatgcagcagatgcagatgtaaagcaggttccaacgatgattcaggcggtttgttccacttatattggctttcaaggcttgctggctaacggtaatttgtcattgttttatgcgaataagtttgctgcaatgctttagcactgtgtataattaagctgttttgctaataggttgatatcatggggccattgcaacagaaaaatacttcagttgtgttgattagatatgccatcagttagtccagtcggtgctgattatgctgatacattcatgacacggttatattcagccagtgtaccatttattagtagttgtatagcaggtactctgttagtcttgcccctgttcccaaacaaactcttttagcggtcacacttgttagatattatttcggggtgtttgaatgtactagacctaatagttagtagctaaaattagttgaagagattcaaacaccctagctaatagttcaactatttgttagctaataattcaactattagttatttttagtaaattagttaatatttagctagctatttgttagctagatacttgcactagcaaatttttagccagctaactattagctctaatgcattcaaacaccctattagtgtatctgtacgaagtctcttgagttgtggcaccgataggttgcattctgaggcatcattagagtatacccacctatttttgtgccaaaatgccatgccatggatcacatctcagtactagccatgtcaaagaaacgttctttcatcctcaggcatcaaatgatggaattttagtatgtcactgaattgcaggaacaatattcccgaagtatcgcaatgccttcatcgcaactccttgagtgatcccatcattctaaagatatatgtaagaattggaagttcaaaattggtccgcctagaatttctgtgcatcttagagcatctccaagaggggtcttattaaacaaggttgtatattgaaatatagggcttgggacctaagagcaactccagtagttctctaaaagacttcctaaatcaataatttaggtagttaacatgaaaactattctccaacagttctctaaatgaactttctaaatttaacaacttgtcatctaacctcattttctctctacatttggcaaccatttaacaactccctaaacaaaaatgttgactgcattatatagtttttgtgacttattttttatgtggataaatacaaaacaaaattacaacctatatttagagaactattggagaactcatatttttttactctaaaagtcatttagcaacttcttaaatctgtaatttagagagctaaaatttacataactattggagttgctctaagcggtgaccctatttcatcaaaatttatcaaatgattatagggtttggcatctgaggttctaaatatagtatcacatatattgaagtcctatccttattttctcttaatctacaactatttattttcttagatagcattatttgaggccaaactgttggagtaaatttcttttgaggcactaaacactttaataatggttctatttcaattctaaggcgctattttagagttctttgttagagatgctccatgtaaaacttactccctttggtgtcctattagttgttgttttggataaggtttgagtcaaacttataaaattttgactataaataattttttgttgtttatttttgaaatctaatatttatatgcatcgatttatattaaaaagtattttttttataaaagtataaatgaattaagagtttatttgtatatttttttaaatatttgtcaaagttatattttggagaccgtctaaacgacaactaatagaacaccgaagtgagtaatctttagccaagcgtgttgctttttttacttgcagggagcagacaatgctaagcctcgtggtcacggtgtgtttcgattcgactggctacaggtgttcggacggctacaaatgcaatacataaagataaaatactaaaatagttatagccgcagtcggattaagccacagtcaggattaaaaccgtagtaaacagccatggttgagcgcttgggaaggacatcatccgcttggaatcttcaggtctttgaagtagcgaagtttgacggcaaagaaactacctggactagccactgtaaggtgtagatggatattacttgttttgtttctatattttctctccggattcggatataaatataaatattatcgagttttggcggttcgagtgactattgatattttatatatttactagtcagttgctcgt

SEQ ID NO: 199519 - DNA, 3979 bp, Zea Mays
aaaaaaaaaaaaaaaccaaacgtgttattgctgcacctaaggaaacgcggccgaggacgagagtgggccagcggggtcgaggaggtaaagaaaactaatggcagcgaaggagggaggcagtggggaaggtgggaagcggctgcccaaagccacctccaccaccaggccttcttctacccccatcccaacgcccaggccacaccagcgcagcgagctctctcctcgtagcggagtcccagcccctcacgccctcccgatcgcgctcgtcggcgcccttgtcgactcgagcccgcttctgggccgatcgacagcgagagcgagagcagcggcgcgccgaggagagctctttcggtgctgctgtataacgacgacgacagcaggcggcagataacacataaaggcgcgcgatgtgcgacgcggcggccgtggcggctccgcggtacaggggcgtgcggaagcggccgtggggccggttcgcggcggagatccgggacccggcgaagcgcgcgcgcgtctggctcggcaccttcgactccgccgaggccgcggcgcgcgcctacgacgtggccgcgcgggccctgcgcggcccgctcgccaggaccaacttccccgcgctcacctcccgccctcctgccaacctgcccgcgcccacgcccacgtgcagctcaagctccaccgtcgagtcctccagcgggccccgggccggggtgcccagggcgggcaggcgcgctgctgggaagccgcgtgccccgcggcaggcggccgcgcccgccgacgccgactgccgtagcgactgcgcctcgtcggcctccgtcgtggacgacggcgacgacgcctccacggtccggtcgcgcccggcgctcgacctcaatctccccgcgccgctcgacgtcgacgatggtcatgacctcgagctttgcacggacctgcggctctgaataggcgaccggatccacggacggatcgggacgaagggagagaaggcggtttttgctttggtcttcttttcttgatcagattctgccttgctttgacttgtcgtgctcgagggagcttgtaccagtgctgcactgtactactcgatacgaatggcaatagaattggatgacgattcctgcaacgctatgcagactgcggatccgttcagagaggctccgctcggcgctcctgacaccatcggccatcgcgcttcgcgcccgcaactgctcgaccgagccgggaccgggcggcgcccgttcgttgcgtatcccgcaagttggccggcctccctccgccttgggaggggaaagcggaggaggaagagggagccaagcggtcaagccggctcggccgatcgcctcccaccaaaatacccccgaatccccatccccaagcaacacccagaaaaggcgacaagtgccgaggtctggggagcgatggttgtgcggcggctgggcggcacggggcgcgcgctgctcacgctccccaacatccggaggcgggcgtccaactcctgggccgccgtctgcgacaccttcttctccaccaagcaagtgttcgagagccaccgcatcgtcttcaccgtcggcacctcaatcgcctccgtcctcacggcttgggccggttattcacttcgccatgtgcaacaattaaagattgaaaggaggcttgagtcaattgaatcatctgtaagtaatttagaaggaatactgtttttgttggtgaagcgagtttgttctctcctttcggctctgtttatttataagctgataatccagcaggtggtgtgagcgctaagacgctgttgtgtaaactcttagcctctgaccaaaaaaggaaaaaaaaacactgattttctcaagtgtgcaggagtgttatgtgtctttaagtcaaaaagagataactggtctgaaaacacacacttttgaaatacaaactctctcacataagcactgacaacaaatgcacaccccccagacagacagtaagatcacacagaagaaatactgtcaaagctttttttagttactctttaacagtgttgtatcctctacacctgtttgggccattttcatttctcacttcttagcttaaccttaacctacatatgcaaagatgaaagctgacaacaaagcaattttggaatttggactgctccaccgtaggcttaaaatttcagggcatattagaaacttatgtggtgctattttgtttcccgagcaacattttgtttgttgaaacgaacatgcaggaaagctgcctgttgtattacaaggaaaattggttttgggggactatttttttcctgattttttcagtaggatgctgttaattaaccccttgtctgcaggacagtgtctagaagttttttttcatgtgtctagaagttttttcgtcctgtagacaaatttttcatattagaaaggaagagcaaaaatgtcttgcagacaaacttcccatattagaaaggaagagcaaaacactctctgaaggggaactaccatcacagattacaataccaccttaagccacacctagtattccaacagaacataccttgttgtgctgttgacaacaagattaaagtgttctcactgttcacttcatttgcatctatttcagttgcttattttcatttttatggtgcactccgatgttgaagatacactctttaacccagccaaaaaaacttgatgctttaggtttttatattgtatcacgttgctttttgaatggttggattatctgctttctttgtccctttctattttcatctgttcttttttctcgtattgactgctggacatatttacttgtaccatttcttgatatgttaacagctgaaggataaccacaaagttgaacatgaagagataaaaaagatcgtcacttccagcaatattagcgctccaggctgtgtagccacggcgatgaccacaatggttgttgggtacgcgttaggctggcgaggcggtgcttggtacgctcgaagggccttcagaagagagcagcaaaagctgatgatgggtcacatgaagtcgtcacagaacaggtggcactggcggcccttcaacaggctcaggaacagcaggaggaggctccgcgtggaggcgatcaggacgcagcgaacggaggtgcccgtcgaggagtccgcccccgccagggacgccgccgctgccgcgcccctggacggaaacggagccggagcggacggctccgtggttccttcctcggacgacagctgggttgtcaagctcgagcagtcgttcaacattttcgccacggattcggtgattatggtactcaagggcgtgtacggtgatcggtactacgccaggttctttgcgctggagacgattgcgagggtgccgtacttcgcattcatatcggtgcttcacttgtatgcgacctttggatggtggagacgagctgattacataaaggttcactttgcgcagagctggaacgagttccatcacctcttgatcatggaagaattgggtggcgactctttgtggtttgactgttttcttgctcggtttatggcattcttttactacttcatgactgttgcaatgtacatgctgagcccacgaatggcatatcacttttccgaatgtgtggagagacatgcatattccacctatgatgagttcctcaagctccatgaagatgagtttcaggcatcaagaactccaggttctaggaggcctaaaatagataacttatacgatgtattcgttaatatacgagaagatgaggcagagcactgcaagacaatgaagacctgtcaaacacatggaaatcttcgttctcctcattcaacgccgaactgcttagaagatgatacggaatgtgtaatacctgaaaacgactgtgaaggtgtcgtagtatacaaagtataaaattttgatgatatcctctcttttttctatgtctcattcaaagtaaaatccaggtcatatatcacagaaaccaatttaaatgcaggatcaaatat

SEQ ID NO: 199520 - DNA, 2521 bp, Zea Mays
aaaaaaaaaaaaaaaccaaacgtgttattgctgcacctaaggaaacgcggccgaggacgagagtgggccagcggggtcgaggaggtaaagaaaactaatggcagcgaaggagggaggcagtggggaaggtgggaagcggctgcccaaagccacctccaccaccaggccttcttctacccccatcccaacgcccaggccacaccagcgcagcgagctctctcctcgtagcggagtcccagcccctcacgccctcccgatcgcgctcgtcggcgcccttgtcgactcgagcccgcttctgggccgatcgacagcgagagcgagagcagcggcgcgccgaggagagctctttcggtgctgctgtataacgacgacgacagcaggcggccgcgcccgccgacgccgactgccgtagcgactgcgcctcgtcggcctccgtcgtggacgacggcgacgacgcctccacggtccggtcgcgcccggcgctcgacctcaatctccccgcgccgctcgacgtcgacgatggtcatgacctcgagctttgcacggacctgcggctctgaataggcgaccggatccacggacggatcgggacgaagggagagaaggcggtttttgctttggtcttcttttcttgatcagattctgccttgctttgacttgtcgtgctcgagggagcttgtaccagtgctgcactgtactactcgatacgaatggcaatagaattggatgacgattcctgcaacgctatgcagactgcggatccgttcagagaggctccgctcggcgctcctgacaccatcggccatcgcgcttcgcgcccgcaactgctcgaccgagccgggaccgggcggcgcccgttcgttgcgtatcccgcaagttggccggcctccctccgccttgggaggggaaagcggaggaggaagagggagccaagcggtcaagccggctcggccgatcgcctcccaccaaaatacccccgaatccccatccccaagcaacacccagaaaaggcgacaagtgccgaggtctggggagcgatggttgtgcggcggctgggcggcacggggcgcgcgctgctcacgctccccaacatccggaggcgggcgtccaactcctgggccgccgtctgcgacaccttcttctccaccaagcaagtgttcgagagccaccgcatcgtcttcaccgtcggcacctcaatcgcctccgtcctcacggcttgggccggttattcacttcgccatgtgcaacaattaaagattgaaaggaggcttgagtcaattgaatcatctctgaaggataaccacaaagttgaacatgaagagataaaaaagatcgtcacttccagcaatattagcgctccaggctgtgtagccacggcgatgaccacaatggttgttgggtacgcgttaggctggcgaggcggtgcttggtacgctcgaagggccttcagaagagagcagcaaaagctgatgatgggtcacatgaagtcgtcacagaacaggtggcactggcggcccttcaacaggctcaggaacagcaggaggaggctccgcgtggaggcgatcaggacgcagcgaacggaggtgcccgtcgaggagtccgcccccgccagggacgccgccgctgccgcgcccctggacggaaacggagccggagcggacggctccgtggttccttcctcggacgacagctgggttgtcaagctcgagcagtcgttcaacattttcgccacggattcggtgattatggtactcaagggcgtgtacggtgatcggtactacgccaggttctttgcgctggagacgattgcgagggtgccgtacttcgcattcatatcggtgcttcacttgtatgcgacctttggatggtggagacgagctgattacataaaggttcactttgcgcagagctggaacgagttccatcacctcttgatcatggaagaattgggtggcgactctttgtggtttgactgttttcttgctcggtttatggcattcttttactacttcatgactgttgcaatgtacatgctgagcccacgaatggcatatcacttttccgaatgtgtggagagacatgcatattccacctatgatgagttcctcaagctccatgaagaggaattgaaaagactaccagctccagaggcagcattgaactattacatgaatgaggacctttacttattcgatgagtttcaggcatcaagaactccaggttctaggaggcctaaaatagataacttatacgatgtattcgttaatatacgagaagatgaggcagagcactgcaagacaatgaagacctgtcaaacacatggaaatcttcgttctcctcattcaacgccgaactgcttagaagatgatacggaatgtgtaatacctgaaaacgactgtgaaggtgtcgtagtatacaaagtataaaattttgatgatatcctctcttttttctatgtctcattcaaagtaaaatccaggtcatatatcacagaaaccaatttaaatgcaggatcaaatat

SEQ ID NO: 199521 - DNA, 2521 bp, Zea Mays
aaaaaaaaaaaaaaaccaaacgtgttattgctgcacctaaggaaacgcggccgaggacgagagtgggccagcggggtcgaggaggtaaagaaaactaatggcagcgaaggagggaggcagtggggaaggtgggaagcggctgcccaaagccacctccaccaccaggccttcttctacccccatcccaacgcccaggccacaccagcgcagcgagctctctcctcgtagcggagtcccagcccctcacgccctcccgatcgcgctcgtcggcgcccttgtcgactcgagcccgcttctgggccgatcgacagcgagagcgagagcagcggcgcgccgaggagagctctttcggtgctgctgtataacgacgacgacagcaggcggcagataacacataaaggcgcgcgatgtgcgacgcggcggccgtggcggctccgcggtacaggggcgtgcggaagcggccgtggggccggttcgcggcggagatccgggacccggcgaagcgcgcgcgcgtctggctcggcaccttcgactccgccgaggccgcggcgcgcgcctacgacgtggccgcgcgggccctgcgcggcccgctcgccaggaccaacttccccgcgctcacctcccgccctcctgccaacctgcccgcgcccacgcccacgtgcagctcaagctccaccgtcgagtcctccagcgggccccgggccggggtgcccagggcgggcaggcgcgctgctgggaagccgcgtgccccgcggcaggcggccgcgcccgccgacgccgactgccgtagcgactgcgcctcgtcggcctccgtcgtggacgacggcgacgacgcctccacggtccggtcgcgcccggcgctcgacctcaatctccccgcgccgctcgacgtcgacgatggtcatgacctcgagctttgcacggacctgcggctctgaataggcgaccggatccacggacggatcgggacgaagggagagaaggcggtttttgctttggtcttcttttcttgatcagattctgccttgctttgacttgtcgtgctcgagggagcttgtaccagtgctgcactgtactactcgatacgaatggcaatagaattggatgacgattcctgcaacgctatgcagactgcggatccgttcagaggttattcacttcgccatgtgcaacaattaaagattgaaaggaggcttgagtcaattgaatcatctctgaaggataaccacaaagttgaacatgaagagataaaaaagatcgtcacttccagcaatattagcgctccaggctgtgtagccacggcgatgaccacaatggttgttgggtacgcgttaggctggcgaggcggtgcttggtacgctcgaagggccttcagaagagagcagcaaaagctgatgatgggtcacatgaagtcgtcacagaacaggtggcactggcggcccttcaacaggctcaggaacagcaggaggaggctccgcgtggaggcgatcaggacgcagcgaacggaggtgcccgtcgaggagtccgcccccgccagggacgccgccgctgccgcgcccctggacggaaacggagccggagcggacggctccgtggttccttcctcggacgacagctgggttgtcaagctcgagcagtcgttcaacattttcgccacggattcggtgattatggtactcaagggcgtgtacggtgatcggtactacgccaggttctttgcgctggagacgattgcgagggtgccgtacttcgcattcatatcggtgcttcacttgtatgcgacctttggatggtggagacgagctgattacataaaggttcactttgcgcagagctggaacgagttccatcacctcttgatcatggaagaattgggtggcgactctttgtggtttgactgttttcttgctcggtttatggcattcttttactacttcatgactgttgcaatgtacatgctgagcccacgaatggcatatcacttttccgaatgtgtggagagacatgcatattccacctatgatgagttcctcaagctccatgaagaggaattgaaaagactaccagctccagaggcagcattgaactattacatgaatgaggacctttacttattcgatgagtttcaggcatcaagaactccaggttctaggaggcctaaaatagataacttatacgatgtattcgttaatatacgagaagatgaggcagagcactgcaagacaatgaagacctgtcaaacacatggaaatcttcgttctcctcattcaacgccgaactgcttagaagatgatacggaatgtgtaatacctgaaaacgactgtgaaggtattgtggactgtgtcaaaaagtcccttacaaagtaaatagactatattctttaatgtgtttgactgttttcaggtgtcgtagtatacaaagtataaaattttgatgatatcctctcttttttctatgtctcattcaaagtaaaatccaggtcatatatcacagaaaccaatttaaatgcaggatcaaatat

SEQ ID NO: 199522 - DNA, 1964 bp, Zea Mays
atggagctcctcgttcttggaccctttgaggttctcagatccgagcttcaccaggaaggagcgccagtggagcctctcctccgcgggaaccccatggaatctgcgcaagagagacgtgtgattgtctggcctcgtcgtcctctggacgacttttcccccgtcttccacaaccccgagtccccaacccaccacggcgttgcggaatccacctgcaactgcaagcccacgaaatcgagccgagccccgacgccaccaaatcgtgtggcctcggagatcgagcagggtctggaagaaccaggggagagaccgtcagaagaggaggaccagcagcaggcaggcggtggtggcgaagtcgtcggcgtcggcggccggggtatctacgatgataacccggtcgaagctggtggagcaactgcgcgactaccagatccgatcccagcacaagtaaatcccccgcccgtctccattcccctgaacctgaaaccccaaccggtaactccgcctagtaataatggggtagtcacggtcgcggtgtgctcagatctcgtgggcctggacgcgggtggtgctagatttggttccattagtctgtggttaggttttgtgtcggaacttcagtgggtcgagttgcattagttgtagctaatggtggttttgccgattgaattctgtttctcttcgcgcatgcattgttagttcatagtgtagaactgtagctaatccaatacagtcggtggctattgatctttcttagagcagtgtttgtgctagtgattattttgtcgatcttgccgtgttctctatcgtgatatgtgatgttaacctcgggggagtattggtacttgacatgcccatactcaagcactgaactgtcaattccaccttctgccacttgacccatgaccagtgacccgctctttgcaaatgaacaggggtactcagattcaaactgtcctggtttttgcatctcataactttgcctgaacgtagcactatggcatctggtgggtttgatccctggttgataaattgtcttgactcttgacttactatttaccactgcatttttaaccacatcactataaggaacttattgtctgtgccctaagttgtacaacatgcactttcttgattatcctagagtggcaatggtaaaccttgctagcgtaccacttcatgcttcatgtcagtctggaagctgatagttctttaacatatcatacaataccgatggaaagcataaaactatttcttctctctgctagttgttacttggtagatcacacattcacacctgcttcttcaacgacctgaacatgaatctgctttctgcattctgtaggcgtgacgttatcggagctatatcatggggcttgttgtgttgttttctgataatatcatcgtacatgacgctatacttcaggcacttttggcttagtgccattattatctcactcggtattcttcttcctgctggcctgtatattttgaggcaaagaaagctggctaagaaacgagagagaagactgttgttgcctctctctgtgtaaggttgttgtgttttcctaagtgctacaggagaaatgatagttttgcgagtagataccagttgtgttgtcagctacaaaactcatttttgtaaatttgtttggtcgatgacttcagcccaaggaaacaactcaacatgtcataatacattgggcgtcgccatacacgtgtatgcagatactagttcgtacttctgatggattttgttagctgcattccatcctagctcatttgctaagtgagtttttggttaaaatgaggacactggatggttttctgtttcttgtgcccagttgatgtttgtttctgacaaggttgtatatttgatggtttgtattgtgttacggaaaaaatgtatattattggctgaatccagcttggtactgaatgaatttacgttattgccgcgcgagata

SEQ ID NO: 199523 - DNA, 1235 bp, Zea Mays
ctgcattccttgggcatttcgacaccttcattttcattcgtatttctacaaggtttacatgatcgattcctcctattctctactggggtgagcattggtattctatggtcttctctgtcaaacaagaaggaatttgatacgctgaagggcacactaaaacgaatggaaaacttagttcaggatttacaagatgaactggagatgaaagagggtttaactgtgaaggaattgcctaatgaaacttctagcgaacatgatgatgataatagcaaaccacaagtagttgattcagaggcaatgagcaaaattgaagcggagcttgaagctgagcttgcaagactggaactgaatatcacttcgaaacgtttggaagaagaaacatctgacttcaatgaggctgacaaggagttcattggtgacattgtttgtggggaactgaaagctgatatggtcccccgggacgtcacagattacagcagtgaatgtgactatggcagggacagcagggaaagttccccagactacacatgtggagcaaactatcccgtctcacctagagatctcagcattcgtctccacaaggtgatccaacgtaggcttgaagaccgagtcaaggagcttgaatcatcaattgcccacagacagaagcaggcgcaactacagatgatggtgactgatgaaatattctctgaaccgatatgctcaaacagtgaatcaggttcttcaggacgaggaagtcccattttcatacaagaaattagctccttggcagaaccatattgtctaaacctatctggagacgcgcttgaagcttatgacgaagcttacgaagaattcatgagaattgcggactccccttgcactacaagtacaaatgggaaggcacaggcaaccgaagattacctggtagaccgtggtttaatctggggaatggaggacagctctacgaagctgaaagaagtacccacttgggagagagttctaaagagcacagatcctaacagggatcaagagagcgatagagatgagtcggacgacgaagacgacgactgtaaagtgctgattcagcagattgtagagagaactaaacaaggttcccctgtacttgttaacgctcaaaaacttctgttttctgtggatcaataggccacttcactatacaccatttatttttgagatatagcatgtagtgtcgaattattattgagaaaggaaaattattaattgttttgcgg

SEQ ID NO: 199524 - DNA, 4341 bp, Zea Mays
atgggtttaagatgtggttttctttctttctattttggtttaccgaggactggcattagttgaaatgtctcatgacatctgtaacaatattcatggatgaatgattttggcaatatctagtttctttccatctcttttggctggacttgaagaagacattgttgaactcctgaaagaggataatgaagtgcttaaagagggtattgcacatgtgttatcaaaggctggtgtcaatattcgtgaacagttagcctcaacaagttcccttgatcttctattagagcgtttatgcttagagggtacgcggaggcaggctaaatactctgttcatgcacttgctgccattacaaaagatgatggtcttatgtcactatctgttctttacaagaggcttgtggatttgttggaagagaagaaagtgaatataccatctatcttgcaatctttgggttgtatagcccaaatagcgatgccgatttttgaaacacggaaagaagagatattaagtttcataattaaaaaaattcttgactgcaatgatgatatggttcaaaattcttctaataaatctgaatggggtgatagtacacataattgtttgctgaagatttatggcatcaaaactttggtgaagagctatataccttgcaaggatgctcatgcacagccaggaatagagaagttaattgatattctgaagaatattcttacctatggtgatatatctccaaatatggtctcaagtgctgctgataaggcccatttgaggcttgcagcagcaaaagctgttctccgcttatcaaaacaatgggaccataaagtgcctgttgatgtattttatttgactttgaggatttcacaggacgattttcctcaggtgaggaaattatttctttgtaaagtacttcaatatatcaaggaaagggccttggatgcaaaatatgcttgcgccttcatgtttggtgttaacgattatcatggcccacagttagaagagttcaagtacaatctgactgaagtggttcagatatgccaacaagttaagatgcgccaactttcagtccaagcagatatgaatttgttgacggcttacccagaatatataatttcctttttggttcatgcccttgctcatgatccttcatccccggacattgaagaacatgaaaatgtcaaagcatttggtccaacttactggcgactttacctgattctttcaatcctcctgggggaagaaggtttgcaacatagtgttccaggcatgaaaaaggatagcttcactacaataatatctatattcaaaagtatcaaatcttcacaggatgtggttgatggaaataagaacaagactctgtgggctatatgtgatcttggtactcttattgcaaagaggctatgccaagaccaaacgagtttatcagaagctcaaaccgttccattgcctccccaactttatgcaccgcttcaggataaccaaaatgaaaattctgtggagagttatgggcagatttggccgggatgtgagaaagtactggctcattttgaggctgtaatgactgcaaacatggataaggttgaatctcccaaacataagatgcttattgatatgactgatgaatttggaaatgaagttcctcttgggaaaattgtcaaacttcttaaattgcgaggagaaaagaaggcggagaaaaagcagaaggcaccatctagtagttcagtaaatgccgagaacgatgatgatgtcctgggtttagtaagagaaattaacttgagcaaccaagaagatttggaggaattgcaaaagggcaagcctaagaagcgccagacagatacaaaaaatagtaacaagaagccacttgatttttcttcacctaaacgcaaaagatcaatttctaagagtagaccacattcagcaaaaggtagtaaaaacagtgatgaccgtctaatacatactcctaacacagagaggaccagtatctccttggaaactaaattgaaggagaaaaacagagatgattcaatcgatacggaactgttagtatctcccagcattagaacccctgtatctaaaggaaataagggtgctaagagatctcatattgatattttgagcagtgttccaaagaagtctgctgatgcagagagtactaagagaactgttgagccgagaagtctaaatgggtcactcaaaagtcaaaagtcaaaaccgatttctgggttagtacagtgctcaacacaggactcaagcggtaccgacttggtaggacaccgaataaaagtttggtggcctttggataagcgattttatgaaggtactgttcaatcatacgattcatccaagaaaaaacatacggtgctatatgatgacggagatgttgaagtgcttatattggctaaagagaagtggatattgattgaaagtaatgattcatcagtgaagaagcaaaagaaggatcttgggacaaaccaaggaaggtaagctggtattttgtttgctttagaatctactatagcaaactgctgtgacactgttggaagctaagaaacaggcccatgcagtattggattaacataaataactaaacataaatttagtattgaagtccttgtattctatagtaacatgtgtcatttataaactattgacccctagttaccttgcagagcatgggagggaactagcagcaacaagtctccgcctagccaaccaaagtcaaaaaagaggtccttgcctccaaagaagaaagggcaacccaatgataagcgaagaaagactgcagaaagaaacaattctgtagaagaggagggtattggagctggtgacaatgattcagattcatccagtcctcttgcgcactcagatgttgacaaagatgtaaactctgttggccacatggaggaagtaatagttagcttagctgagaaagagaagaccaggaaggactccaaaggcatggaaatgaaagagaagggagggaaggactccaaagacgtgaaaataaaagagaaggctgggaaggagtccaaagacgtggaaatgaaagagaagatagggaaggagtccaaagatgtaaaaatcaaagaaaaggcagggaaagaatccaaagatgcggaagtgaaagagaagacagggaaggactccaaagacgtggaaacgaaagacaaggcagagaaagactccaaggacgtggaaatggaagaggaggcagggaagcactccaaagacgtgaatatgaaagagaagacagggaaggaatccaaatatgcaaaaatgaaagagaaggcagggaaagaatccaaagatctggaagtgaaagagaaggcagggaaggactccaaagacgtggaattgaaacatgaggcagggaaggactccaaagacgtgaaaatgaaagagaaggcagggaaggagtccaaagactcggaaatgaaagagaagatagggaaggagtccaaagatgtaaaaatgaaagataagtcagtgaaagaatccaaagatgtggaaatgaaagagaagcccgggaaggactcaaaagatgtaaaaacgaaagagaaggcagggaaagagtccaaagacctggaagtgaaaggggaggcagggaaagaatccaaacatggcgaagcgaagaagccagggaaggactcaaaagatgtaaaaacgaaagagaatgcggcaggcaaagagtcgaaagacgcggaagtgaaagaaaaggcagtcaaggacccaaaagatgtggaaatggaagggatggcaggaaaggagcccaaagatgtggaaaagctggatggccatactttgagcaacgaggaatcagacaacgatactcttagcgtgtggaaaaaacgtacagcaaaagcaacatagtcttgctttctcagctgaccattcatagtaggatttgcagatttcacaggcaggcaaacgttcggagatgtggatatctcattgattgaccctttgcaatttgacagttgtactgtagaaaatgtttgtttggatagcaacacgttagtatacaacagtggaataggatttgtttgtaatgttattagatgcgggcacctgttgcccattaagctatggcatggtatccctggtttcttgtatatcttggagagcgtcagctcttttgcaggacatagtgctatgccgtcgaactcttgtagaaatgttgtaggcaataaaccagtgacacttgtcgaactacctgtgggcatccatttttcgtttgccatattactttggatctagaatctgacgctggaggtttagtatttgtactcggtatggtttctgtttagagttttggcataattaccgcacaagttttgtactgtcaa

SEQ ID NO: 199525 - DNA, 5719 bp, Zea Mays
gtaactatcatacccttcaaatcacctggatatattctatctgattgtgggtacatttggcggactcagtgatgttaatagtcaatcctttggcaggagagttgctattcttgaaacagttgctagataccgagcatgtgttgtgatgttagatcttgaatgtgatgatcttattacaaacatgtttcaaacatttttaggagttgtcagcgacagtcatgaagaaaacattgtaaagtcaatgcaggcaataatgatccttattatagatgagagtgaagatgtacaggagagtcttctacgtgtactgctgtcagcattggggcagaaaaaaactggtgctgcaatgtctgctcgtaaacttgctcgcagtgtcattgagcattccgctacaaagcttgaaccttacataaagaagtttctaacgtcatcatgggctgggaatggcagttcttctaatgatcaaattgatcaccagggagttgtatttgatttatatcagtgtgctccgaaggttcttaaggcgatcgtgccgtatattactggggagctactggcagatgaagtagataacaggtctaagtcagttgaattacttggggaaattttttccttacctggagcctctattgtggaatgtttcaagactcttttcacagaattcctcaagagactgactgatagagttgttgaaatccgtatttctgtggttgagtatttgaagagatgtctaatatcaaatccttccagagctgaagctcctgaaatcatcaaggcactttgtgacagattgttggattatgaagaaaatgtgcggaagggagtggtggctgcactttgtgatgtagctacccattctccttatgctattccaattgatacaattaaagtagtagcagagcgtgtccgcgataaatcgcaggctgtgaagtgctataccatggagaggttggcagatatttacaagctgtactgccagagggattctgatagctcaacaaattctgatgattttgagtggatacctggaaaaatattaagatgtctttatgacaaagagtttaggccagagtcaatcgactctattttgagtggttcattgttctcaccagagtaccaaatgaagggaagagtgaaacattggattacagctgcgacatacttcgataaagttgagatgaaagcccttgaacaaattctcctgcacaagcaaagactgcaacaagaaatgctgaaatacatatcgcttcgggaaccaagccaggaagatgcccctgatctgcaaaaaagaatctttggatgtttccggaacatctctcgcttatttagtgactccgcgaagtgcgaggagaacttgaacatgcttcatcagctaaaagatgccgatttctggaaaatattcactagcctgcttaattgttcaactacatttgagaaggcttggtctcttcgggcagagttgcttaagatacttggtgaaaaccatgtgctttataattttgttggcacattaacaatgagatgttcatatttacttgtaaacaaggagtatgcaaaagagatccttgcagaagcttctgcacagaagacttctgggaatacaaaactcatctcatcgtgcatgaatcttctaacggcaatatctagtttctttccatctcttttggctggacttgaagaagacattgttgaactcctgaaagaggataatgaagtgcttaaagagggtattgcacatgtgttatcaaaggctggtgtcaatattcgtgaacagttagcctcaacaagttcccttgatcttctattagagcgtttatgcttagagggtacgcggaggcaggctaaatactctgttcatgcacttgctgccattacaaaagatgatggtcttatgtcactatctgttctttacaagaggcttgtggatttgttggaagagaagaaagtgaatataccatctatcttgcaatctttgggttgtatagcccaaatagcgatgccgatttttgaaacacggaaagaagagatattaagtttcataattaaaaaaattcttgactgcaatgatgatatggttcaaaattcttctaataaatctgaatggggtgatagtacacataattgtttgctgaagatttatggcatcaaaactttggtgaagagctatataccttgcaaggatgctcatgcacagccaggaatagagaagttaattgatattctgaagaatattcttacctatggtgatatatctccaaatatggtctcaagtgctgctgataaggcccatttgaggcttgcagcagcaaaagctgttctccgcttatcaaaacaatgggaccataaagtgcctgttgatgtattttatttgactttgaggatttcacaggacgattttcctcaggtgaggaaattatttctttgtaaagtacttcaatatatcaaggaaagggccttggatgcaaaatatgcttgcgccttcatgtttggtgttaacgattatcatggcccacagttagaagagttcaagtacaatctgactgaagtggttcagatatgccaacaagttaagatgcgccaactttcagtccaagcagatatgaatttgttgacggcttacccagaatatataatttcctttttggttcatgcccttgctcatgatccttcatccccggacattgaagaacatgaaaatgtcaaagcatttggtccaacttactggcgactttacctgattctttcaatcctcctgggggaagaaggtttgcaacatagtgttccaggcatgaaaaaggatagcttcactacaataatatctatattcaaaagtatcaaatcttcacaggatgtggttgatggaaataagaacaagactctgtgggctatatgtgatcttggtactcttattgcaaagaggctatgccaagaccaaacgagtttatcagaagctcaaaccgttccattgcctccccaactttatgcaccgcttcaggataaccaaaatgaaaattctgtggagagttatgggcagatttggccgggatgtgagaaagtactggctcattttgaggctgtaatgactgcaaacatggataaggttgaatctcccaaacataagatgcttattgatatgactgatgaatttggaaatgaagttcctcttgggaaaattgtcaaacttcttaaattgcgaggagaaaagaaggcggagaaaaagcagaaggcaccatctagtagttcagtaaatgccgagaacgatgatgatgtcctgggtttagtaagagaaattaacttgagcaaccaagaagatttggaggaattgcaaaagggcaagcctaagaagcgccagacagatacaaaaaatagtaacaagaagccacttgatttttcttcacctaaacgcaaaagatcaatttctaagagtagaccacattcagcaaaaggtagtaaaaacagtgatgaccgtctaatacatactcctaacacagagaggaccagtatctccttggaaactaaattgaaggagaaaaacagagatgattcaatcgatacggaactgttagtatctcccagcattagaacccctgtatctaaaggaaataagggtgctaagagatctcatattgatattttgagcagtgttccaaagaagtctgctgatgcagagagtactaagagaactgttgagccgagaagtctaaatgggtcactcaaaagtcaaaagtcaaaaccgatttctggtgctcaacacaggactcaagcggtaccgacttggtaggacaccgaataaaagtttggtggcctttggataagcgattttatgaaggtactgttcaatcatacgattcatccaagaaaaaacatacggtgctatatgatgacggagatgttgaagtgcttatattggctaaagagaagtggatattgattgaaagtaatgattcatcagtgaagaagcaaaagaaggatcttgggacaaaccaaggaagttaccttgcagagcatgggagggaactagcagcaacaagtctccgcctagccaaccaaagtcaaaaaagaggtccttgcctccaaagaagaaagggcaacccaatgataagcgaagaaagactgcagaaagaaacaattctgtagaagaggagggtattggagctggtgacaatgattcagattcatccagtcctcttgcgcactcagatgttgacaaagatgtaaactctgttggccacatggaggaagtaatagttagcttagctgagaaagagaagaccaggaaggactccaaaggcatggaaatgaaagagaagggagggaaggactccaaagacgtgaaaataaaagagaaggctgggaaggagtccaaagacgtggaaatgaaagagaagatagggaaggagtccaaagatgtaaaaatcaaagaaaaggcagggaaagaatccaaagatgcggaagtgaaagagaagacagggaaggactccaaagacgtggaaacgaaagacaaggcagagaaagactccaaggacgtggaaatggaagaggaggcagggaagcactccaaagacgtgaatatgaaagagaaggcagggaaggagtccaaagatgtggaaatgaaagagaagacagggaaggaatccaaatatgcaaaaatgaaagagaaggcagggaaagaatccaaagatctggaagtgaaagagaaggcagggaaggactccaaagacgtggaattgaaacatgaggcagggaaggactccaaagacgtgaaaatgaaagagaaggcagggaaggagtccaaagactcggaaatgaaagagaagatagggaaggagtccaaagatgtaaaaatgaaagataagtcagtgaaagaatccaaagatgtggaaatgaaagagaagcccgggaaggactcaaaagatgtaaaaacgaaagagaaggcagggaaagagtccaaagacctggaagtgaaaggggaggcagggaaagaatccaaacatggcgaagcgaagaagccagggaaggactcaaaagatgtaaaaacgaaagagaatgcggcaggcaaagagtcgaaagacgcggaagtgaaagaaaaggcagtcaaggacccaaaagatgtggaaatggaagggatggcaggaaaggagcccaaagatgtggaaaagctggatggccatactttgagcaacgaggaatcagacaacgatactcttagcgtgtggaaaaaacgtacagcaaaagcaacatagtcttgctttctcagctgaccattcatagtaggatttgcagatttcacaggcaggcaaacgttcggagatgtggatatctcattgattgaccctttgcaatttgacagttgtactgtagaaaatgtttgtttggatagcaacacgttagtatacaacagtggaataggatttgtttgtaatgttattagatgcgggcacctgttgcccattaagctatggcatggtatccctggtttcttgtatatcttggagagcgtcagctcttttgcaggacatagtgctatgccgtcgaactcttgtagaaatgttgtaggcaataaaccagtgacacttgtcgaactacctgtgggcatccatttttcgtttgccatattactttggatctagaatctgacgctggaggtttagtatttgtactcggtatggtttctgtttagagttttggcataattaccgcacaagttttgtactgtcaa

SEQ ID NO: 199526 - DNA, 6220 bp, Zea Mays
gaacaacccgatctcaacccactctgctttgccattccgctcacgagctctccgcctctctctctctctctctctcgctcttttccgccaccccgtcacgccaaatttcgaaacagcgcgagagcagcaaaagccgagggagcccttctttctcagattagaacctaacgagtgcgcttggaggcggaggctgcgagcttgctgcgcgaatttgggcggtcgatccggcgcggcggccgggtatggcggccgcggagcagctgaaggagctgggggagaagctgcaggcggtggcgccggctcctgcggacgaactcgccaagctcctcgagaaagctgtggaatgcttacgtggaatagagcaatcaccggggtcctcagtgatggaagctattcaaccaagtcttaaggctgttaccagagaagaattgctgaagcatgaggatgacaatgtcaaagttctcttggcaacatgtttctgtgaaattacaagaataactgcacctgatgctccctacaacgatgacattttaagggatatattctatctgattgtgggtacatttggcggactcagtgatgttaatagtcaatcctttggcaggagagttgctattcttgaaacagttgctagataccgagcatgtgttgtgatgttagatcttgaatgtgatgatcttattacaaacatgtttcaaacatttttaggagttgtcagtcatgaagaaaacattgtaaagtcaatgcaggcaataatgatccttattatagatgagagtgaagatgtacaggagagtcttctacgtgtactgctgtcagcattggggcagaaaaaaactggtgctgcaatgtctgctcgtaaacttgctcgcagtgtcattgagcattccgctacaaagcttgaaccttacataaagaagtttctaacgtcatcatgggctgggaatggcagttcttctaatgatcaaattgatcaccagggagttgtatttgatttatatcagtgtgctccgaaggttcttaaggcgatcgtgccgtatattactggggagctactggcagatgaagtagataacaggtctaagtcagttgaattacttggggaaattttttccttacctggagcctctattgtggaatgtttcaagactcttttcacagaattcctcaagagactgactgatagagttgttgaaatccgtatttctgtggttgagtatttgaagagatgtctaatatcaaatccttccagagctgaagctcctgaaatcatcaaggcactttgtgacagattgttggattatgaagaaaatgtgcggaagggagtggtggctgcactttgtgatgtagctacccattctccttatgctattccaattgatacaattaaagtagtagcagagcgtgtccgcgataaatcgcaggctgtgaagtgctataccatggagaggttggcagatatttacaagctgtactgccagagggattctgatagctcaacaaattctgatgattttgagtggatacctggaaaaatattaagatgtctttatgacaaagagtttaggccagagtcaatcgactctattttgagtggttcattgttctcaccagagtaccaaatgaagggaagagtgaaacattggattacagctgcgacatacttcgataaagttgagatgaaagcccttgaacaaattctcctgcacaagcaaagactgcaacaagaaatgctgaaatacatatcgcttcgggaaccaagccaggaagatgcccctgatctgcaaaaaagaatctttggatgtttccggaacatctctcgcttatttagtgactccgcgaagtgcgaggagaacttgaacatgcttcatcagctaaaagatgccgatttctggaaaatattcactagcctgcttaattgttcaactacatttgagaaggcttggtctcttcgggcagagttgcttaagatacttggtgaaaaccatgtgctttataattttgttggcacattaacaatgagatgttcatatttacttgtaaacaaggagtatgcaaaagagatccttgcagaagcttctgcacagaagacttctgggaatacaaaactcatctcatcgtgcatgaatcttctaacggcaatatctagtttctttccatctcttttggctggacttgaagaagacattgttgaactcctgaaagaggataatgaagtgcttaaagagggtattgcacatgtgttatcaaaggctggtgtcaatattcgtgaacagttagcctcaacaagttcccttgatcttctattagagcgtttatgcttagagggtacgcggaggcaggctaaatactctgttcatgcacttgctgccattacaaaagatgatggtcttatgtcactatctgttctttacaagaggcttgtggatttgttggaagagaagaaagtgaatataccatctatcttgcaatctttgggttgtatagcccaaatagcgatgccgatttttgaaacacggaaagaagagatattaagtttcataattaaaaaaattcttgactgcaatgatgatatggttcaaaattcttctaataaatctgaatggggtgatagtacacataattgtttgctgaagatttatggcatcaaaactttggtgaagagctatataccttgcaaggatgctcatgcacagccaggaatagagaagttaattgatattctgaagaatattcttacctatggtgatatatctccaaatatggtctcaagtgctgctgataaggcccatttgaggcttgcagcagcaaaagctgttctccgcttatcaaaacaatgggaccataaagtgcctgttgatgtattttatttgactttgaggatttcacaggacgattttcctcaggtgaggaaattatttctttgtaaagtacttcaatatatcaaggaaagggccttggatgcaaaatatgcttgcgccttcatgtttggtgttaacgattatcatggcccacagttagaagagttcaagtacaatctgactgaagtggttcagatatgccaacaagttaagatgcgccaactttcagtccaagcagatatgaatttgttgacggcttacccagaatatataatttcctttttggttcatgcccttgctcatgatccttcatccccggacattgaagaacatgaaaatgtcaaagcatttggtccaacttactggcgactttacctgattctttcaatcctcctgggggaagaaggtttgcaacatagtgttccaggcatgaaaaaggatagcttcactacaataatatctatattcaaaagtatcaaatcttcacaggatgtggttgatggaaataagaacaagactctgtgggctatatgtgatcttggtactcttattgcaaagaggctatgccaagaccaaacgagtttatcagaagctcaaaccgttccattgcctccccaactttatgcaccgcttcaggataaccaaaatgaaaattctgtggagagttatgggcagatttggccgggatgtgagaaagtactggctcattttgaggctgtaatgactgcaaacatggataaggttgaatctcccaaacataagatgcttattgatatgactgatgaatttggaaatgaagttcctcttgggaaaattgtcaaacttcttaaattgcgaggagaaaagaaggcggagaaaaagcagaaggcaccatctagtagttcagtaaatgccgagaacgatgatgatgtcctgggtttagtaagagaaattaacttgagcaaccaagaagatttggaggaattgcaaaagggcaagcctaagaagcgccagacagatacaaaaaatagtaacaagaagccacttgatttttcttcacctaaacgcaaaagatcaatttctaagagtagaccacattcagcaaaaggtagtaaaaacagtgatgaccgtctaatacatactcctaacacagagaggaccagtatctccttggaaactaaattgaaggagaaaaacagagatgattcaatcgatacggaactgttagtatctcccagcattagaacccctgtatctaaaggaaataagggtgctaagagatctcatattgatattttgagcagtgttccaaagaagtctgctgatgcagagagtactaagagaactgttgagccgagaagtctaaatgggtcactcaaaagtcaaaagtcaaaaccgatttctgggttagtacagtgctcaacacaggactcaagcggtaccgacttggtaggacaccgaataaaagtttggtggcctttggataagcgattttatgaaggtactgttcaatcatacgattcatccaagaaaaaacatacggtgctatatgatgacggagatgttgaagtgcttatattggctaaagagaagtggatattgattgaaagtaatgattcatcagtgaagaagcaaaagaaggatcttgggacaaaccaaggaagagcatgggagggaactagcagcaacaagtctccgcctagccaaccaaagtcaaaaaagaggtccttgcctccaaagaagaaagggcaacccaatgataagcgaagaaagactgcagaaagaaacaattctgtagaagaggagggtattggagctggtgacaatgattcagattcatccagtcctcttgcgcactcagatgttgacaaagatgtaaactctgttggccacatggaggaagtaatagttagcttagctgagaaagagaagaccaggaaggactccaaaggcatggaaatgaaagagaagggagggaaggactccaaagacgtgaaaataaaagagaaggctgggaaggagtccaaagacgtggaaatgaaagagaagatagggaaggagtccaaagatgtaaaaatcaaagaaaaggcagggaaagaatccaaagatgcggaagtgaaagagaagacagggaaggactccaaagacgtggaaacgaaagacaaggcagagaaagactccaaggacgtggaaatggaagaggaggcagggaagcactccaaagacgtgaatatgaaagagaaggcagggaaggagtccaaagatgtggaaatgaaagagaagacagggaaggaatccaaatatgcaaaaatgaaagagaaggcagggaaagaatccaaagatctggaagtgaaagagaaggcagggaaggactccaaagacgtggaattgaaacatgaggcagggaaggactccaaagacgtgaaaatgaaagagaaggcagggaaggagtccaaagactcggaaatgaaagagaagatagggaaggagtccaaagatgtaaaaatgaaagataagtcagtgaaagaatccaaagatgtggaaatgaaagagaagcccgggaaggactcaaaagatgtaaaaacgaaagagaaggcagggaaagagtccaaagacctggaagtgaaaggggaggcagggaaagaatccaaacatggcgaagcgaagaagccagggaaggactcaaaagatgtaaaaacgaaagagaatgcggcaggcaaagagtcgaaagacgcggaagtgaaagaaaaggcagtcaaggacccaaaagatgtggaaatggaagggatggcaggaaaggagcccaaagatgtggaaaagctggatggccatactttgagcaacgaggaatcagacaacgatactcttagcgtgtggaaaaaacgtacagcaaaagcaacatagtcttgctttctcagctgaccattcatagtaggatttgcagatttcacaggcaggcaaacgttcggagatgtggatatctcattgattgaccctttgcaatttgacagttgtactgtagaaaatgtttgtttggatagcaacacgttagtatacaacagtggaataggatttgtttgtaatgttattagatgcgggcacctgttgcccattaagctatggcatggtatccctggtttcttgtatatcttggagagcgtcagctcttttgcaggacatagtgctatgccgtcgaactcttgtagaaatgttgtaggcaataaaccagtgacacttgtcgaactacctgtgggcatccatttttcgtttgccatattactttggatctagaatctgacgctggaggtttagtatttgtactcggtatggtttctgtttagagttttggcataattaccgcacaagttttgtactgtcaa

SEQ ID NO: 199527 - DNA, 1608 bp, Zea Mays
acggctctatacctctcgccctctgagtctcgcgcggtcagtcggtctctctctctcactctctcttgtctccaagtttgtaaccctagccgccaagcttgaagctccagccgtgctcgtgtagggctgcaggccatccgagctccggcttccggcatccaccagacgtccttagaatacggtgcagcgagcagcaagtcgccgagcagccgagccaccgccgagcagccgagccgccgccgagcgccgagtcttctatgtttgcttctccggtgaaaggtgtttgctaggggaccatggaggagcacggagcggaagacctcctgtgcgaggcgatgggatctgcggcgcaggtcgtggtggtagaggattgcgtggaagcaccgggggccttcgtcctccacctcctcctcaagcgcgcgctcgccggctgcggctccgctgccttcctcgccctcgcgcagcccttctcccattacgatcgcgtcctgcgcaagatggtggagcaagggaaggcaccattgctgatagctttgctctattgtacaatgaaattcaaagactggtggaggcaaacagggctggagaaaatgaaggccagttcaccatcgttatagacgacgcttccctgttggaagtcgtggcccttggttctgtaagcgatgtgctggatttcttgcactattgtttcacactcacgtctgagatgaattgcaagctagtgatcctcattcacgaggatatatacgcaaatgaggagaacatgggtctccttttacatctgcgctacattgcggatcttgtgattaaagcagcacctttaagcactggtttggctgctgatgttcatggacagctggcggttgtgaacaagggtacattcagcgagcaaagggcaaaagcacagaaagtttggaacttccatttcaaagtgaaagaaaacggtgctgacttcttctatccagggagtagacattagggaatacttgtatacagtagaaacaactctggttgtgataactgataaccagtgctgctattcttcgtgtaccttgtgctaagcacagtaaagttttgtccaatccttcatttcacaattttgtttgtgttcaagtcaacatagcttacaaagtgttcgccacagccaagttcattgagcttgatctcgcacaagagacctattttgcatctcacgcaacagtcacatttctttttcaaggaaacagggaatgcaaaccccaacttgttttcatttggaaacatgatctttccgcccccaatctgaatttgttcaatgcagctgctcattgggagaaccgattctgatacatgtcattgccactcccacttacaatgccacctccaccgatattttggctcatggtaccattaacatgctctatgtttggtcttgcaatattggcgacagcgctacttccattctgcccattgcacccagtatgaccaactgagataccccttcacactgtagtttgcagcatgtccttcaacaggaggatcaaacacatctgatgaaccacactgaacatgccaaagccttgatgccatcctttggtgattgcagaggcaaccagcgagtgattgagg

SEQ ID NO: 199528 - DNA, 7724 bp, Zea Mays
caacactttcttggctgtccttcagtctgctgacattttgacaacgaagcactcatgcgtgcgacagcgagagcagccgctgcactgcacagtacgagtgcacagctgcactggcagaagggcacttcaaaagattttgaaaacctgcggaacaaattaataaacgaaccagtagaagccaaacgaaatctttgtatttcatacacttagcttttcccctcctttttcaaaaaaaaaaaccctctcccccaactccacctgcttcgttcgcttcccttcatccccactccaccaaaccctcgcgtcgctgggactgggagcagagtagagcacagcggagcagattagcagaaggtgtcgagtggaagcaaatggccaatgagtggccgcggtggtggtagcatcctcctcgccttttctccccgtctcccgcgttctggttgttgcagcgagcgggagcgggaggacacgtgctacccccgtcgcttctcgggcacgcctccctcactcggatctgggccgcgcgcgcgagatcctgagctccgggttggagagctcccgtgctccagctcaggtgacgtcgatggagcccgcggtggctacagcgggtgaagggcagcggttcaagcggattccgcggcaggcgtggtcggggaacctcgaactgggtcctctgcttaatgaaagcttagatcactggccacatctaaatgagctggtacagtgctacaaggctgattttgtgaaggatgactgcaaatatggacactatgagagtgttgcatcaccgtctttccaaaatcaaatttttgagggacctgatactgacatagaaacagaattgcagctttgcaatgcaaggcattccaagtctgaggatgctactgaagatgatacaccaagcacctcagggaggcaaatatatgaaactgaatcatctggttcgtcttcaaaagtgcactgtagtttgtcaccattgccagcatatgaggctgcatttgattgggagaatgagaggtctttgatatttggccaaagggtgccagaaagtatacctgcaataagcaacagtggcttgaagataactgtcaaggtactatctttgtcattccaagctggattagtcgaacctttcagtggaacgatttgcttgtataacagagatagaagagagaggctgtcagaggacttctatttccatatgcttccaacagatatgcaggaccagggttccttggatcgtcgaggtgttttttcattggacgcaccttctccatcggtctgccttttgattcaattggaaaaggctgctactgaagaagggggagtaacaccttctgtttattctcgtaaagagcctgtgcacttagctgagaaagagaagcaaaagctgcaagtatggtctcgaatcatgccttataaagagtcatttgcatgggccatgattcctctgtttgaaagtaaccgtgcgggtggtcttagtgatgctgcttctcctagcagtcctctagcaccgagtttatcaggatcaagttctcaagatagtattgtggaccctatttcgaagcttgctttagatggaaaagtcaaccattactcaagtggaagctcagttattgtagagatatcaaacctaaacaaagtgaaggaaagctatatagaggactccctccaagacccaaaacggaaagtacataaaccagtgaaaggtgttttgagattagaagtggaaaaacttcatgatgaccataatgatgtggataacgcttctgaaggtggaagcatggccaatgatttgaatgatgctggtgacatcaataatggcagaagcaacagaagtagctttgatgggattcacagttctgtgaattctattgccattgccaaaaaagatgctcatcacaatggacacacttctaatgctgagaatgttgacaattttcaagcttttgactttcgggtgctgacccgaagtgagccattttcgcaactttttcattgcctctatgtgtacccattgactgttagcttgagccgcaaaagaaacctctttgttagagtggaactgagaaaggacgattctgacatcaggaagcctccattagaggctgttcatcctagggagcggaatacgatgctacagaagtggggccatacacagattgctgttggaacaagaatggcttcctaccatgatgaagttaaaatcagcctacctgctcttttgacaccccaacatcatcttgtgttcacatttttccatgtagatcttcaaatgaaacttgaagcaccgaaaccagtgatcattggatattctgtacttccactgtcgacacatattcagttactttcagatgtgtccttgccgattttgagagagctcgttccacattacctgcaggaaagtggaaaggagagaatggactatctggaagatgggaaaactgttttcaggttacgtttaaggctctgctcttcattgttcccaattaatgaaaggataagggacttttttgttgagtatgatcgccatactctacatacaagtcccccatggggttctgagcttcttgaggccataaatagtttgaaaaacgtcgaatctactgcattattacaatttctgcaaccaatacttaacatgttgcttcatcttattggtgatggcggtgagacccttcaggttgctgcatttcgagccatggttaacattttaacccgtgtgcagcaggagtcatcagatggggctgaaagaaatagattccttattaactatgttgattttgctttcgatgacttcggtgatcggcaagcccctgtgtatcctggtctgactactgtttggggaagtcttgctcggagtaaggagagctgcacatcaataatattaaagagaaaaaaggtccaaagtggacctagtacaagaagaccttatggaggccagaatttagagtacagaaacacacacacagtaaaaaaaactcagcagacacctcagcactagctaggcataaaactctaccacacagctagaacaggagctaatcgacctgaaggaaagacagagctttggtctccgttagagaccagaggatagcttcctctcttgctgcccgaaaggccaccaccagacttgtactgcagccatcgaacacgcacctgttcctatgcttccagataatccaagctcctaaaataaccaaagagttgaagtctttccttgctgcctcaatcactctggagcttctactcatccaccgtgtctcaaaagaatggtcttcctattggggacagaggccttgccaacatccaatcttcaagagctcaaaccagaattgtttggcaaagacgcagtcaaccagtaaatggttgattgattcagcaacctgatcacacaacaagcacctctccggatggtcaagacctcgctttgtgagtctatcagctgtccaacatctgtcatgctcaactaaccaaatgaaaaatttgcaccaggggcaggggaggctggcggcggctggagggagggaagacgaggaaactagaaaccctagctctgataccatgtagaatgggagtaaacctaaccctagcaggggttgggagatgtatttataataggaatagttgggcctaggcccattacagagggacgagagggtggaccctaatacagttctaacacttttgatctctagcctagcccaactagtttgggactaaaaggccttattgttattttacttgatttatcgattatttccatgtttaaattgtatctgctgcatagaagaccttgacagtgacagctgtcatattgcttataaaacatctcagatcttgaatgctgccatgttgccacacattgtttgatcacactgtattttgtaacttatgaaatctcgagaaattcacattgtattgatttttcaaatcaaaagggctacaagtaaaagggcaaactggggttaggcccagtgctatttttgcaatttctctattgttaacataattacatccttgtactgctcccactatttactcttttggcttttaggcgaaaggttatagagttggtcctgtgtatgatgatgtgttggcaatggcttggttttttctggagcttattgtaaaatcaatgggattggaacaaaagttcgtcttctttctaccacaatcttccactaggtgaagatgtcccaccactgcaattgaaagaaggtgtcttcaggtgcatcatgcagctctttgattgccttctaactgaggttcatgagcgttgtaaaaagggtttaagcttggcaaaacgcttgaacagcacacttgctttcttttgctatgatcttttatcaattattgagcctcgccaagtttttgagctggtttcgttgtacatggacaagtttgcaggagtttgtcaatcagtccttcatgactgcaaattgacattcctgcagataatatgcgaccatgatctattcgttgagatgcctgggcgggatccttctgatagaaactatctctcgtcagttctcatccaagagatctttctgaccttagaccatgatgatttatctcaacgagcgaaggctgctcggattttggttgtccttatatgcaaacatgaatttgatgcacgctatcaaaaaagcgaagacaaattgtacattgctcagctgtattttcctcttatagggcagatccttgatgagatgcctgttttctataatctgaatgccattgaaaagcgtgaagtgctagttgtcattttgcaaattgtgaggaacttggatgatgcaactcttatcaaagcatggcaacaaagcattgctagaaccagattgttcttcaagcttcttgaagaatgtataatccatttcgagcacaacaaaacaggagacaacatgctacttggtgctagttctcggagcccagatgtcgagcatcctgcatccccaaagtactctgaacgattgtccccatcggtcaacacatatttgtcggaggcttcgaggcatgaaataaggcctcagggaacaccagaaaatggatacatgtggaacagggttagccctcaattaagttcccctaatcagccctattcattgagagaagcacttgctcaagcacaatcttcaagaatcgggtcaaccgccagggcattgagagagtctctacatccagtgctgagacaaaaaatggaactttgggaagaaaatctcagtactgccgtgagcctcgaagtgttgggaataactgagaagttttcagttgctgcaggcgctcgaagcatcactactgattacgcgaagctagattgtgtaacatcaatcttaatgggtcttttatctaggaaccaatccttggctttttggaaggctttccttcctgtggtctacaatatatttaatgttcatggtgcaacactaatggcaagggagaatgaccgcttcttgaagcaaattgcttttcatcttttgcggcttgctgttttccgaaacgattcgattagaaaaagagctgttgttgggctgcagattcttgttaggaactcattcaactatttcaaaaacactacaaggttaagggtcatgttgacaattactttgtccgagttgatgtccgacgtgcaagtaactcaaatgaaattcgatggttctcttgaagaaagtggtgaagctcggcgccttaggaaatcactggaggaaatggctgatgtgagaagcaaggatctgttaaaagattgtggcctccctgttactgcattggaggcggcccctgaaggctcctctgataataggtggtcttgggtagaggtgaaacatttgtctaaatgtctagtccaggcccttgatgctggtctggaacacgccctcctgggttctgtagtgactgtagacaggtatgcagctgccgagggtttctataaactagctatggcctatgcacccgttccagatcttcacattatgtggttgcttcatctgtgtgatgcacaccaggagatgcaatcatgggctgaagcagcacaatgtgcagttgctgtagctggcgtgatcatgcaggcacttgttggaaggaatgatgctgtgtggagcaaggagcatgttgcttcgctgcgcaagatttgccctattgtcaacactgatgtgagtgcagaagcatctgcagctgaagtcgagggatatggtgcatccaaattaacagtggactcagcggtcaaatatcttcaactagccaataaacttttcacacaagctgaactctaccatttttgtgcaagcattcaggaactcataattcctgtgtataaaagcagaagggcttatggacagctggccaaatgccacacatcgctcacaaacatctatgagtcaattcttgaacaggaggctagccctataccattcattgatgccacatactaccgagttggtttctatggtgagcgttttggcaagctcaataaaaaggagtatgtatttagagaaccacgggatgtacgtcttggtgatattatggagaagcttagtcatatatatgaggctaaaatagatggaagtcacactttacacataattccagactctagacaagtcaacgctgatgagttgcagcctggcttctgctatttacagatcactgctgttgatcctgtgatggaggatgaggacttgggtagcaggagggaaagaatattttctttatctactggtactgttcgtgcacgtgtttttgaccgttttcttttcgatacaccattcacaaaaaatggaaaaacacaaggtggtctagaagaccagtggaagaggcgcacagtgctccaaacagagggttcctttcccgctttggtgaaccgtctgccagttatcaaatctgaatctctggagttctctcctgtcgagaatgcgattggaatgatcgaaacaaggacagctgcattgagaaatgagctagaagaaccacggagttctgaaggtgatcaactcccaaggcttcagagcttgcaaaggatactccaaggaagtgtggctgtgcaggtcaacagtggggtattaagtgtgtgcactgcattcttatctggtgagccagcgactaggctcagatcccaagaactgcagcagctcatcgctgcattgcttgaattcatggctgtctgcaagcgtgcaatccgtgtgcatttcagattgataggggaagaagaccaggaattccacacccaacttgtcaatgggttccagtcactcaccgctgagctatctcactatatccctgctatactctccgagctatgatagaactgtagcaagccagaaattaggtagcatgtgaatggttgttcattcattcagttgcaggttcccaccaaatgtccatatttccattagctttggttgtatagttctaggaaccggaaattaactagtcttcgaagttctgtaccgtattgcagaaccgattcctgattttggagtgtaaagtctgtataatacctagtgttatctgttatgcaccagttatatgctgagttccttcttttttgcagtttgctactatgtcacaactagcggacattttgcacttgtattgtgatacatagtgcatatatatatatatatatatatatatatatatatataaaatgcacctgggtgcattttagtttgtggatgcacagacccaagacttcctgtctccgtcgctgcctcgcgcacagacccaag

SEQ ID NO: 199529 - DNA, 2665 bp, Zea Mays
gggcacttcaaaagattttgaaaacctgcggaacaaattaataaacgaaccagtagaagccaaacgaaatctttgtatttcatacacttagcttttcccctcctttttcaaaaaaaaaaaccctctcccccaactccacctgcttcgttcgcttcccttcatccccactccaccaaaccctcgcgtcgctgggactgggagcagagtagagcacagcggagcagattagcagaaggtgtcgagtggaagcaaatggccaatgagtggccgcggtggtggtagcatcctcctcgccttttctccccgtctcccgcgttctggttgttgcagcgagcgggagcgggaggacacgtgctacccccgtcgcttctcgggcacgcctccctcactcggatctgggccgcgcgcgcgagatcctgagctccgggttggagagctcccgtgctccagctcaggtgacgtcgatggagcccgcggtggctacagcgggtgaagggcagcggttcaagcggattccgcggcaggcgtggtcggggaacctcgaactgggtcctctgcttaatgaaagcttagatcactggccacatctaaatgagctggtacagtgctacaaggctgattttgtgaaggatgactgcaaatatggacactatgagagtgttgcatcaccgtctttccaaaatcaaatttttgagggacctgatactgacatagaaacagaattgcagctttgcaatgcaaggcattccaagtctgaggatgctactgaagatgatacaccaagcacctcagggaggcaaatatatgaaactgaatcatctggttcgtcttcaaaagtgcactgtagtttgtcaccattgccagcatatgaggctgcatttgattgggagaatgagaggtctttgatatttggccaaagggtgccagaaagtatacctgcaataagcaacagtggcttgaagataactgtcaaggtactatctttgtcattccaagctggattagtcgaacctttcagtggaacgatttgcttgtataacagagatagaagagagaggctgtcagaggacttctatttccatatgcttccaacagatatgcaggttgaccagggttccttggatcgtcgaggtgttttttcattggacgcaccttctccatcggtctgccttttgattcaattggaaaaggctgctactgaagaagggggagtaacaccttctgtttattctcgtaaagagcctgtgcacttagctgagaaagagaagcaaaagctgcaagtatggtctcgaatcatgccttataaagagtcatttgcatgggccatgattcctctgtttgaaagtaaccgtgcgggtggtcttagtgatgctgcttctcctagcagtcctctagcaccgagtttatcaggatcaagttctcaagatagtattgtggaccctatttcgaagcttgctttagatggaaaagtcaaccattactcaagtggaagctcagttattgtagagatatcaaacctaaacaaagtgaaggaaagctatatagaggactccctccaagacccaaaacggaaagtacataaaccagtgaaaggtgttttgagattagaagtggaaaaacttcatgatgaccataatgatgtggataacgcttctgaaggtggaagcatggccaatgatttgaatgatgctggtgacatcaataatggcagaagcaacagaagtagctttgatgggattcacagttctgtgaattctattgccattgccaaaaaagatgctcatcacaatggacacacttctaatgctgagaatgttgacaattttcaagcttttgactttcgggtgctgacccgaagtgagccattttcgcaactttttcattgcctctatgtgtacccattgactgttagcttgagccgcaaaagaaacctctttgttagagtggaactgagaaaggacgattctgacatcaggaagcctccattagaggctgttcatcctagggagcggaatacgatgctacagaagtggggccatacacagattgctgttggaacaagaatggcttcctaccatgatgaagttaaaatcagcctacctgctcttttgacaccccaacatcatcttgtgttcacatttttccatgtagatcttcaaatgaaacttgaagcaccgaaaccagtgatcattggatattctgtacttccactgtcgacacatattcatatgcaaagatactgtggtgaattttggataagcaacagtacttggatttgttttatactaacagagcactgcagtgattcatgatttactaacacgggttactttcagatgtgtccttgccgattttgagagagctcgttccacattacctgcaggaaagtggaaaggagagaatggactatctggaagatgggaaaactgttttcaggttacgtttaaggctctgctcttcattgttcccaattaatgaaaggataagggacttttttgttgagtatgatcgccatactctacatacaagtcccccatggggttctgagcttcttgaggccataaatagtttgaaaaacgtcgaatctactgcattattacaatttctgcaaccaatacttaacatgttgcttcatcttattggtgatggcggtgagacccttcag

SEQ ID NO: 199530 - DNA, 1997 bp, Zea Mays
aagattttgaaaacctgcggaacaaattaataaacgaaccagtagaagccaaacgaaatctttgtatttcatacacttagcttttcccctcctttttcaaaaaaaaaaaccctctcccccaactccacctgcttcgttcgcttcccttcatccccactccaccaaaccctcgcgtcgctgggactgggagcagagtagagcacagcggagcagattagcagaaggtgtcgagtggaagcaaatggccaatgagtggccgcggtggtggtagcatcctcctcgccttttctccccgtctcccgcgttctggttgttgcagcgagcgggagcgggaggacacgtgctacccccgtcgcttctcgggcacgcctccctcactcggatctgggccgcgcgcgcgagatcctgagctccgggttggagagctcccgtgctccagctcaggtgacgtcgatggagcccgcggtggctacagcgggtgaagggcagcggttcaagcggattccgcggcaggcgtggtcggggaacctcgaactgggtcctctgcttaatgaaagcttagatcactggccacatctaaatgagctggtacagtgctacaaggctgattttgtgaaggatgactgcaaatatggacactatgagagtgttgcatcaccgtctttccaaaatcaaatttttgagggacctgatactgacatagaaacaggcattccaagtctgaggatgctactgaagatgatacaccaagcacctcagggaggcaaatatatgaaactgaatcatctggttcgtcttcaaaagtgcactgtagtttgtcaccattgccagcatatgaggctgcatttgattgggagaatgagaggtctttgatatttggccaaagggtgccagaaagtatacctgcaataagcaacagtggcttgaagataactgtcaaggtactatctttgtcattccaagctggattagtcgaacctttcagtggaacgatttgcttgtataacagagatagaagagagaggctgtcagaggacttctatttccatatgcttccaacagatatgcaggttgaccagggttccttggatcgtcgaggtgttttttcattggacgcaccttctccatcggtctgccttttgattcaattggaaaaggctgctactgaagaagggggagtaacaccttctgtttattctcgtaaagagcctgtgcacttagctgagaaagagaagcaaaagctgcaagtatggtctcgaatcatgccttataaagagtcatttgcatgggccatgattcctctgtttgaaagtaaccgtgcgggtggtcttagtgatgctgcttctcctagcagtcctctagcaccgagtttatcaggatcaagttctcaagatagtattgtggaccctatttcgaagcttgctttagatggaaaagtcaaccattactcaagtggaagctcagttattgtagagatatcaaacctaaacaaagtgaaggaaagctatatagaggactccctccaagacccaaaacggaaagtacataaaccagtgaaaggtgttttgagattagaagtggaaaaacttcatgatgaccataatgatgtggataacgcttctgaaggtggaagcatggccaatgatttgaatgatgctggtgacatcaataatggcagaagcaacagaagtagctttgatgggattcacagttctgtgaattctattgccattgccaaaaaagatgctcatcacaatggacacacttctaatgctgagaatgttgacaattttcaagcttttgactttcgggtgctgacccgaagtgagccattttcgcaactttttcattgcctctatgtgtacccattgactgttagcttgagccgcaaaagaaacctctttgttagagtggaactgagaaaggacgattctgacatcaggaagcctccattagaggctgttcatcctagggagcggaatacgatgctacagaag

SEQ ID NO: 199531 - DNA, 1212 bp, Zea Mays
gagacttcaaacgccgtagcatacatccaagttgccaggatacagtgcagagtccctgaatatggatggacaacccaaaaggtcttccagttcctgaatttcgtggtcaatggggccaggtgctctatctttgctttccgtcgccaagtgcaacaagtgaaccctccgatctttcagcatgttattcttgatcttcctggccttgcattcttcactacctatgcactgttagcgcttttctgggccgagatactttaccaagcacgtggaataatgactgatcgacttagatcaggtttctacatcattaattgtgttgtttatgcattgcagggttttctgtggttgtggctgtggtggaatccaaatcattctatgctagtcacttctaagttattcattgcaggtctttcttttttcactgccttgggttttctgatctatggaggaaggcttttcatcatgctgaaatattttcctattgagtcaaaagggaggcaacaaaagctgagagaagtcggcagagttgccaccatatgtttctgttgtttctcggcacgatgcataatgatgtgcttcaatgcatttgacgaggaagctgacctcgatgttcttgaccatccagttctgaatttgttctattacctgcttgtggagattctcccttcatctcttgtcctgtacattctaaggaggattcctgcaaagctacggctatcccagtatcaccccgtcagcagcagctagagacgatgcattaccatctgctgagccaaaaatggtgactgctgtcaagccatgaaaaatcaactgcaatgccctctatataatatttgtattggtagcctctctgcaaaatatatatagggataagacttgcctcggttatttcttttctagaccctactcacatggaagccatccaatatttttcctagctcacctattgctaaccctgttagttcaatctgctaattttatgatttttagtgtttgagcataatgaaggaaagcaccattgtaaaaactgaactacatgaaaagttgaacatagattttttttccctggagatgagtttaacagtgagttgccctttggaatcattgaacttgttttggtattcttcctcatgtgacttgtaatgctttagattatctccgtttcagtaatcagaatgtgcgaggaagctgccaacgtctttactccataac

SEQ ID NO: 199532 - DNA, 1488 bp, Zea Mays
catacccaacaacaagccaaccgccaacacagccggacaccaacctgtggtcgcgacgccacccggccgtataaatccacgccgccccgtcgccgccggatcctgccagtgccagcacaccacgggtttcccctgtcggagagaggacgccttttggtgctgtccctgtacttctcctttcgaaaggatctctctgcgcgccggggcggcgatggcggcggcgccggcgcccctgccggcgcccgtcgcagactggtgggagcgcgtcaacggctcgccggcgtggcaggacgggatcttctggaccctcgccgtcctctacggtgccattgctaccgcctcattcatccaagttgccaggatacagtgcagagtccctgaatatggatggacaacccaaaaggtcttccagttcctgaatttcgtggtcaatggggccaggtgctctatctttgctttccgtcgccaagtgcaacaagtgaaccctccgatctttcagcatgttattcttgatcttcctggccttgcattcttcactacctatgcactgttagcgcttttctgggccgagatactttaccaagcacgtggaataatgactgatcgacttagatcaggtttctacatcattaattgtgttgtttatgcattgcagggttttctgtggttgtggctgtggtggaatccaaatcattctatgctagtcacttctaagttattcattgcaggcttttcatcatgctgaaatattttcctattgagtcaaaagggaggcaacaaaagctgagagaagtcggcagagttgccaccatatgtttctgttgtttctcggcacgatgcataatgatgtgcttcaatgcatttgacgaggaagctgacctcgatgttcttgaccatccagttctgaatttgttctattacctgcttgtggagattctcccttcatctcttgtcctgtacattctaaggaggattcctgcaaagctacggctatcccagtatcaccccgtcagcagcagctagagacgatgcattaccatctgctgagccaaaaatggtgactgctgtcaagccatgaaaaatcaactgcaatgccctctatataatatttgtattggtagcctctctgcaaaatatatatagggataagacttgcctcggttatttcttttctagaccctactcacatggaagccatccaatatttttcctagctcacctattgctaaccctgttagttcaatctgctaattttatgatttttagtgtttgagcataatgaaggaaagcaccattgtaaaaactgaactacatgaaaagttgaacatagattttttttccctggagatgagtttaacagtgagttgccctttggaatcattgaacttgttttggtattcttcctcatgtgacttgtaatgctttagattatctccgtttcagtaatcagaatgtgcgaggaagctgccaacgtctttactccataac

SEQ ID NO: 199533 - DNA, 836 bp, Zea Mays
cttgggcccaacacgaggctcccggactcctcagttccttcgctcctctgtaacccggggcggccgacgaggccgggaccaccgacggcgacgatgggcggcggcgagggcaagtccaagaaacgccgctcttctacctcctcagggggggaacggaagaggcgggacaagaaggagagcaagaggaggagccgagacgacagggaggatgacgatgacagacacaagaagaaggggaaacacatcgacaggaacaaaggaaaagagagagattcgaaggataggcattccaaggagaagacgagcaagagaaaagacaaggacgctgccttcaaagaaatatccaaggatgactactttgcaaagaacaacgagttcgctacctggttgaaggaggaaaagggcaaatatttctcagatttgtcttcagagtctgctcgtgatcttttcttgaagtttgtgaaacaatggaacaaaggcaagctgccatcacaatactatgaggggattacgagtggcccacgatcagcgcacaattggaacatcaaagcatgatacgttttctggttaatcgggtccttcggcttgagatgttttttgctttcctggcgagatttttctaatagttgcatctagcaactgcttttaatattctgggttgttgtatttaagctgatgttcagaatgtctgtctaagcaggagggtagatcgtgggtctctctagtatccagtgtttaacatcaacgctacttttccattgatcactactgtttgatcctacaatgagcaaacatattgtttctaaggaaagttgtgttctttttatcggatgcgc

SEQ ID NO: 199534 - DNA, 1274 bp, Zea Mays
ctaccggcccacgccaccacggcccgttccacgccctaagtttgccgcaacgctgccaccaattcgcagctccaccaaacggctcgtcgccgtcgcagtcgcagccatttttctgtcggtctgtcccccgcgcgtgccgcttctcacctgtgcacctcgccgactcctcggatttgtcatattcgcctgaggtgggctcagtcgctgagagtggccacggtgaggaaggacgaggaagagggggccgcggaccgcgtgccgcacctgccgtggatgcggtaccccgtcgatatcgacaccttctctggctgccccgtcacacagctcccccgcctcgacccgaggttagagaggtttttgatgatattgctcctatggtgggcttgtcagtaggttcagcagttggtcaatcatcaatagcagatgaagtttctagtcttgtcccgaagcccaaacaagagttttacccaactattgacgaagaatatgtccaaatggaaccacagactaaaattgatatattggtggcaacccctgaaagactaatggatcacattaacatgacaaatggtttcagtctggagcatcttcagtacctggtcattgatgaaacagatcgaatggtaagagaggcttatcaatcctggttgccaacagtgatccaacttacacactcaattagccaaggggtgtggagcgtgtatttaaaggtaaatgctatccaagattggggaagatggttttatctgctacactgactcaagatcctagcaagctatcacaacttgaattgcaccatcccttgttgttgaatagtgggaagaagcgctattgaattcctacaaaacttgagtcctacaaactgatatataaattaaacttaaaaccactctctctccttgttcttctccaagaactgcaagggaataagtgcttagttttacgtcatctgtggaatcaagtcaccgactaagcacattagcagagatgttctcgccatctctctttagtgttgcgggtgtttagtctgatgttgccgctgtttttctcgctgtgcgtgcagcacatccgcgtcgcggcatttcatctctttctctgcacatgtgggtactgctattactgttggtcaacaacgaacttgactagaagggtgaacatgttgttgttgtatattattttacttgaatctgtttacgccgatctgaatgtcaaacactgggagatgaatcgtctgtcggtgctctatggagacgcggacggtccgcgacctggac

SEQ ID NO: 199535 - DNA, 2160 bp, Zea Mays
cagggtcgaagggccgctttgtaaaggcgcagcagcagttgcactgcactgcaccgggcgcgggatcacgcggggaccgttaaaaccaccatctctctgtcgaccacaggcgtccccgacctctagttacggacgcgatctctcggcctcccattcattcgattaagtcctagatctgcattttggaagagccttttggatcaggagatggcgacggacagtgccgacgcccagaggctcttgctcgggcgccagaactcgcatcagcaggctgacggagcagacgggttcgaggacaacgaccttgccgcaccgccggagcccttgtcccgcgacaatggagcgagtttccggaggaatccaagctctgcagattcgtcgtcgggcgtgttcgggagcctgaaggccgtgctgctcaaatccaagctcaatttgcttataccgtgtgggttcttggcggtcctggtggactgtctcagccagaacaaggcctgggtgtttcctctgagcctgctgggcatcattcctctggccgagcgcctgggtttcgctaccgagcagctagggctctacactggccgaacagctgggggcctgctgaacgccacgttcggcaacgccacggagctggtcatctccatccacgcgctgcggagcgggaagctgcgggtggtgcagcagtcgctgctcggctcgatcctgtccaacacgctgctggtcctcggctgcgcgttcttcggcggcgggctcacctgcggcaggaccgagcaggtgttcagaaaggaagacgcggtgctcaactccgggctgctcctgatggccgtgatggggctggtctcccccgccatgctgtactacacgcacaccgaggccaacctgggcgagtcggcgctggcgctgtcgaggttcagcagctgcgtcatgctcttcgcctacgccgcgttcgtcttcttcgagctgtccaacagtcgccgccgagacgaatctaccgagggaggaggaggaggtggtggtggtggtgaccaggcggacgacgactgcgagtacgcgttccctgagatcaccaagtgggaggccattgcctggctcgcgatcttcactgcctggatctcagtgttctctgactttctagtcggtgcaatcgagggggctgccaaggcttggaagataccggtcgcgttcatcagcactgtcttgctcccgatcgtagggaatgctgcagaacatgccagcgctgttatgtttgcgatgaaagacaaactggacctttcgcttggagtcgccatcgggtcttcgacgcagatatccatgtttgtgataccgttcagtgtagtggcaggatggatgatgggccagccaatggacttgaacttccatctgtttgaaaccgccagcctcttgataaccgtgctggttgtagcacttctgctgcaggatgggacctcgaactgtttcaaagggctgatgctgattctctgctacctgatagtggctgccagtttttatgtgtatgctgatccaaatatcgatggtgtttagcctcttcgaaactagcaccttcaatgatgggatgggactatacttctagttctccaaagaaacctcttcgaagagggcaagaggagctcctgcgattcactgaagaagaaaacagaagtggctggcctattcagcattcctcacctgaaggggccattcaagcacacccactgctgtagaggacttcatgtcttcatcgagcatgcaaaagaaccaacaagcaagttcatcagggcgaatttccaacacaaagcgatggccagcacttaattaaagataggcatgaattgcaactttaagcttctgaaaatgtaccttcttttgtctccggaagatacttggcaaaacgatacttctgcattccaggacaaaatggacgacagtccatcagaattcagaaacgatggctgttttatactatacaggaggaaagtgaagaaactccacccaaaatacctgcaaatggctcttcacatgatagatggtcaagccttctaccttcataagcctcaacacgcccttaggagttgcctctgcaagatttggttttgtaccacccatacattaacagtttgcttggacaccaaaactgtgtggatctatttaaatcggagtacaaag

SEQ ID NO: 199536 - DNA, 2070 bp, Zea Mays
cagggtcgaagggccgctttgtaaaggcgcagcagcagttgcactgcactgcaccgggcgcgggatcacgcggggaccgttaaaaccaccatctctctgtcgaccacaggcgtccccgacctctagttacggacgcgatctctcggcctcccattcattcgattaagtcctagatctgcattttggaagagccttttggatcaggagatggcgacggacagtgccgacgcccagaggctcttgctcgggcgccagaactcgcatcagcaggctgacggagcagacgggttcgaggacaacgaccttgccgcaccgccggagcccttgtcccgcgacaatggagcgagtttccggaggaatccaagctctgcagattcgtcgtcgggcgtgttcgggagcctgaaggccgtgctgctcaaatccaagctcaatttgcttataccgtgtgggttcttggcggtcctggtggactgtctcagccagaacaaggcctgggtgtttcctctgagcctgctgggcatcattcctctggccgagcgcctgggtttcgctaccgagcagctagggctctacactggccgaacagctgggggcctgctgaacgccacgttcggcaacgccacggagctggtcatctccatccacgcgctgcggagcgggaagctgcgggtggtgcagcagtcgctgctcggctcgatcctgtccaacacgctgctggtcctcggctgcgcgttcttcggcggcgggctcacctgcggcaggaccgagcaggtgttcagaaaggaagacgcggtgctcaactccgggctgctcctgatggccgtgatggggctggtctcccccgccatgctgtactacacgcacaccgaggccaacctgggcgagtcggcgctggcgctgtcgaggttcagcagctgcgtcatgctcttcgcctacgccgcgttcgtcttcttcgagctgtccaacagtcgccgccgagacgaatctaccgagggaggaggaggaggtggtggtggtggtgaccaggcggacgacgactgcgagtacgcgttccctgagatcaccaagtgggaggccattgcctggctcgcgatcttcactgcctggatctcagtgttctctgactttctagtcggtgcaatcgagggggctgccaaggcttggaagataccggtcgcgttcatcagcactgtcttgctcccgatcgtagggaatgctgcagaacatgccagcgctgttatgtttgcgatgaaagacaaactggacctttcgcttggagtcgccatcgggtcttcgacgcagatatccatgtttgtgataccgttcagtgtagtggcaggatggatgatgggccagccaatggacttgaacttccatctgtttgaaaccgccagcctcttgataaccgtgctggttgtagcacttctgctgcaggatgggacctcgaactgtttcaaagggctgatgctgattctctgctacctgatagtggctgccagtttttatgtgtatgctgatccaaatatcgatggtgtttagcctcttcgaaactagcaccttcaatgatgggatgggactatacttctagttctccaaagaaacctcttcgaagagggcaagaggagctcctgcgattcactgaagaagaaaacagaagtggctggcctattcagcattcctcacctgaaggggccattcaagcacacccactgctaggacttcatgtcttcatcgagcatgcaaaagaaccaacaagcaagttcatcagggcgaatttccaacacaaagcgatggccagcacttaattaaagataggacaaaatggacgacagtccatcagaattcagaaacgatggctgttttatactatacaggaggaaagtgaagaaactccacccaaaatacctgcaaatggctcttcacatgatagatggtcaagccttctaccttcataagcctcaacacgcccttaggagttgcctctgcaagatttggttttgtaccacccatacattaacagtttgcttggacaccaaaactgtgtggatctatttaaatcggagtacaaag

SEQ ID NO: 199537 - DNA, 1645 bp, Zea Mays
attcgattaagtcctagatctgcattttggaagagccttttggatcaggagatggcgacggacagtgccgacgcccagaggctcttgctcgggcgccagaactcgcatcagcaggctgacggagcagacgggttcgaggacaacgaccttgccgcaccgccggagcccttgtcccgcgacaatggagcgagtttccggaggaatccaagctctgcagattcgtcgtcgggcgtgttcgggagcctgaaggccgtgctgctcaaatccaagctcaatttgcttataccgtgtgggttcttggcggtcctggtggactgtctcagccagaacaaggcctgggtgtttcctctgagcctgctgggcatcattcctctggccgagcgcctgggtttcgctaccgagcagctagggctctacactggccgaacaggtctggtccagtgtcctcatctcctgaagaataccgaactgaaccgcatcgcatcgcatcgcgcttagcaaacttactctgcttcaccaccgtgaccacttctcctccgcaatcgcagctgggggcctgctgaacgccacgttcggcaacgccacggagctggtcatctccatccacgcgctgcggagcgggaagctgcgggtggtgcagcagtcgctgctcggctcgatcctgtccaacacgctgctggtcctcggctgcgcgttcttcggcggcgggctcacctgcggcaggaccgagcaggtgttcagaaaggaagacgcggtgctcaactccgggctgctcctgatggccgtgatggggctggtctcccccgccatgctgtactacacgcacaccgaggccaacctgggcgagtcggcgctggcgctgtcgaggttcagcagctgcgtcatgctcttcgcctacgccgcgttcgtcttcttcgagctgtccaacagtcgccgccgagacgaatctaccgagggaggaggaggaggtggtggtggtggtgaccaggcggacgacgactgcgagtacgcgttccctgagatcaccaagtgggaggccattgcctggctcgcgatcttcactgcctggatctcagtgttctctgactttctagtcggtgcaatcgaggtttacatctcagtgatgcgacggatgggggctgccaaggcttggaagataccggtcgcgttcatcagcactgtcttgctcccgatcgtagggaatgctgcagaacatgccagcgctgttatgtttgcgatgaaagacaaactggacctttcgcttggagtcgccatcgggtcttcgacgcagatatccatgtttgtgataccgttcagtgtagtggcaggatggatgatgggccagccaatggacttgaacttccatctgtttgaaaccgccagcctcttgataaccgtgctggttgtagcacttctgctgcaggatgggacctcgaactgtttcaaagggctgatgctgattctctgctacctgatagtggctgccagtttttatgtgtatgctgatccaaatatcgatggtgtttagcctcttcgaaactagcaccttcaatgatgggatgggactatacttctagttctccaaagaaacctcttcgaagagggcaagaggagctcctgcgattcactgaagaagaaaacagaa

SEQ ID NO: 199538 - DNA, 567 bp, Zea Mays
aaatcttccaaaacaaataggtgctgcatgctcaggctctcacgctggctgccttggctgggtccgcgctggtggagtactacgaccaccagcaagggtcaggatcgaaagttcaccaatatgcaaagcagttcctttcatctgatagcaatagcggccaacaaaaggagtagctagccagtgtccttgcgaagtgcaagcagcggagtgggcgttatttcctgatcaaataattttgcctatggcacattctgtggaaactttgacggatctttgcctgcttttctatgcgatgtaagctgctgaaacctgcactcatcaaatgttgtgtatgcagatggtaccatgcatttgtttccctgaatggcttcaaatgaaatgaatgtttttttttatcggtatgcatcatgggacgtcacaacgattttagctgtttgtctaagtcgagttcagcagaatgttctctgtttacacaacatctgagtgcaggctttgatggccaaaaagtcacttcccactgacaacgacaacgagatctaatatccagtcacaggacatcggctggag

SEQ ID NO: 199539 - DNA, 585 bp, Zea Mays
gagaactctcaaccttgtgcttccgacgaacgaaattgatgctgcatgctcaggctctcacgctggctgccttggctgggtccgcgctggtggagtactacgaccaccagcaagggtcaggatcgaaagttcaccaatatgcaaagcagttcctttcatctgatagcaatagcggccaacaaaaggagtagctagccagtgtccttgcgaagtgcaagcagcggagtgggcgttatttcctgatcaaataattttgcctatggcacattctgtggaaactttgacggatctttgcctgcttttctatgcgatgtaagctgctgaaacctgcactcatcaaatgttgtgtatgcagatggtaccatgcatttgtttccctgaatggcttcaaatgaaatgaatgtttttttttatcggtatgcatcatgggacgtcacaacgattttagctgtttgtctaagtcgagttcagcagaatgttctctgtttacacaacatctgagtgcaggctttgatggccaaaaagtcacttcccactgacaacgacaacgagatctaatatccagtcacaggacatcggctggag

SEQ ID NO: 199540 - DNA, 1297 bp, Zea Mays
ccctcttatccgttctcgtctcctgtcccggactcccgggaccggggaggccgggatcgagaagggcaacgagcgcgtcccgtgctcgccgctcctcgccgatggcgtcctccactctgccagcctaccccttccgtatgtctcttcccggactacgagccccggaccctgctaaggttaagcacgtatccgttcgagcccccgctcgccgtcttcccgttgcagcctccgcggcaccatcaggcgccgcggcggcggcggcgagggagcgcaggcgtttcctggagagctacgggctcaacccaaacgacttcgaggaagatgcagaggagaatccgagggaagagagaaaggacaggcggagacgtcggcagtcggggagaggggagcaaactgcggaagcggcagtgactccagcgaaggtggaggagcctcgggagactcacaaaatgctccaggtgctaggtggaaaagtccgcagaaggaaattactttcacccaaagataggaatgtccgtccaatgatggaagttgtccgaggagcagcctttgacattttacagctggtggttctcctgcttcactcagaccgggtcggtggctagacttgtatagtggtactggatccgttggaattgaagctatgagccgaggatgttcagaggcacatttcgttgagatggatccttgggtcatctctgaggtcctcaaaccaaatctggagtgtactggatttattgacgtgtcacagatacatatgctccgcgttgaaaaattcttggccaatgccgaaaaatctcatggtaaatatccttcattcgattatatcagtgtaacaccaccatatctggaggtcaactatagcacactgctcgcccaacttgcaaggtcaccattggttggaaaagactgcttcatcctagttgagtacccgctgaaaacagacatggctgaatcatgcggaaaccttgtacagatagctgacaggaggtttggtaggaccaacttgctgatatatgggccaacttggtcagagaaaaagaagaaaagatgatttctgaagggggggttcaggcaaggtttgcatgcagggtgtcatgataatcacggttgggaatggttaaggtttcaagatttgcacaggggatatttggcctagtgtaaggcataagaaggtggttgatcttggttcactgggcctatacctgaataacttgcacagcacagagagctcgcatttcgctttcctttgtggtcagagatccacatccgacaagagggggggggggggggggaa

SEQ ID NO: 199541 - DNA, 2097 bp, Zea Mays
cacctaccaccacccgatgcagaatgcacgcagtcccggtcagctcgactgctccagttcttcccatttcccagccgccgcggcgccacgcagacctagcagagaaacacccacccgagatggcgatggctctgcgccgccttgcgggcgtgtccggatcgccgtcggcctcctctgccgcggccacggtgctactccggtcggcgctgacccgcccgatctccaccggcttccgcgaggagcgcgacaccttcggtcccatccaagtccccaacgacaagctgtggggcgcgcagacgcagagatcgctgcagaactttgacattggcggggagcgtgagaggatgcccgttcccatcatccgtgcctttggcgtgctaaaaaagtgcgccgctaaggtgaatatggactatggccttgatccaacaatagggaaggccataatacaggcagctgaggaggtcgcagagggaaagttggatgatcacttcccacttgttatctggcaaactggcagtggcacacaaagcaacatgaatgccaatgaggtaattgcaaatagggcatctgagatccttggacacaagcgcggtgagaagtttgtgcacccaaatgaccatgtgaataggtcacaatcttcaaatgatacatttcccactgtaatgcatatagcgacggccgttgagatacattcgaggtttatcccaagtttgcaacagttgcatgattcacttcattcgaaaactattgagtttaaagacataattaaaattggacgtacacatacccaagatgccaccccattgactcttggccaagaattcagtggctacactacacaggtcaaatatggaattgaccgcattaattgtacattacctcggatgtaccagcttgctcaaggtggaactgcagttggaactggcttgaacaccaagaaaggatttgatgccaaaatagctgctgcagtggctgaggaaacaaacctaccctttgtgacagcagagaacaagtttgaagctttggcagcacatgacgcttttgttgagagcagtggtgccgtaaatacaatttctgcatctcttatgaagatagcaaacgacatacgtttgctaggaagtggtcctcggtgtggtcttggtgaactaatcctaccagaaaatgagcctgggagcagcattatgcctgggaaagttaatccaacccagtgtgaggctctgacaatggtttgtgcacaggttatgggtaatcatgttggtgttacaattggtggtgccaatgggcattttgaactgaatgtttttaagccaatgatcgcagccggattacttcgatcattgaggttgttaggggatgcatccgtgtcctttgagaaaaattgtgtcaggggaattcaagcaaaccacaagagaatttcacaacttttgcatgagtctctgatgttagtgacatctttgaaccctaaaattggctatgacaatgctgcagctgttgctaagaaagcccacaaagaaggaaccacgttgaaggaagctgcattagaccttggagtattaacggagcaagaattccatgagcttgtcgtcccggagaaaatgattggtccttctgattgataaccccatgttcactatgtttctttgaagcattcaggttgccacatccgcgagttctggtggccctgtgtttccaagttaatgattctagcgcacccataaataaagcaaataatttttcatatggtcattaggtcctcaccgtaccgcactagagaaatgatttttgcatggcggatggtatctgagaaaacagttgtattcttgttcaaatagggagcagtgcactttgattcatgaggcgccttccattatcttggcatcagtcaaccttttcttgccaagtagctagtgctatgtaacaagtgacatggcaaccatgtatagaaattatttgcatgggtttgtgttcttgccaggtagctaatgttatgtaataagtgacaaggaaacaatgtcatgaattatttgcattgggttttgacgagtgaaatagaaatatacgccctgttttagttttctttttagggctagtttgacc

SEQ ID NO: 199542 - DNA, 2107 bp, Zea Mays
gcgtgagatccgcccatcaaagctccctggttccctgcctcctctgtatactaactctcctctctcccagagtcccggtcagctcgactgctccagttcttcccatttcccagccgccgcggcgccacgcagacctagcagagaaacacccacccgagatggcgatggctctgcgccgccttgcgggcgtgtccggatcgccgtcggcctcctctgccgcggccacggtgctactccggtcggcgctgacccgcccgatctccaccggcttccgcgaggagcgcgacaccttcggtcccatccaagtccccaacgacaagctgtggggcgcgcagacgcagagatcgctgcagaactttgacattggcggggagcgtgagaggatgcccgttcccatcatccgtgcctttggcgtgctaaaaaagtgcgccgctaaggtgaatatggactatggccttgatccaacaatagggaaggccataatacaggcagctgaggaggtcgcagagggaaagttggatgatcacttcccacttgttatctggcaaactggcagtggcacacaaagcaacatgaatgccaatgaggtaattgcaaatagggcatctgagatccttggacacaagcgcggtgagaagtttgtgcacccaaatgaccatgtgaataggtcacaatcttcaaatgatacatttcccactgtaatgcatatagcgacggccgttgagatacattcgaggtttatcccaagtttgcaacagttgcatgattcacttcattcgaaaactattgagtttaaagacataattaaaattggacgtacacatacccaagatgccaccccattgactcttggccaagaattcagtggctacactacacaggtcaaatatggaattgaccgcattaattgtacattacctcggatgtaccagcttgctcaaggtggaactgcagttggaactggcttgaacaccaagaaaggatttgatgccaaaatagctgctgcagtggctgaggaaacaaacctaccctttgtgacagcagagaacaagtttgaagctttgtggtgccgtaaatacaatttctgcatctcttatgaagatagcaaacgacatacgtttgctaggaagtggtcctcggtgtggtcttggtgaactaatcctaccagaaaatgagcctgggagcagcattatgcctgggaaagttaatccaacccagtgtgaggctctgacaatggtttgtgcacaggttatgggtaatcatgttggtgttacaattggtggtgccaatgggcattttgaactgaatgtttttaagccaatgatcgcagccggattacttcgatcattgaggttgttaggggatgcatccgtgtcctttgagaaaaattgtgtcaggggaattcaagcaaaccacaagagaatttcacaacttttgcatgagtctctgatgttagtgacatctttgaaccctaaaattggctatgacaatgctgcagctgttgctaagaaagcccacaaagaaggaaccacgttgaaggaagctgcattagaccttggagtattaacggagcaagaattccatgagcttgtcgtcccggagaaaatgattggtccttctgattgataaccccatgttcactatgtttctttgaagcattcaggttgccacatccgcgagttctggtggccctgtgtttccaagttaatgattctagcgcacccataaataaagcaaataatttttcatatggtcattaggtcctcaccgtaccgcactagagaaatgatttttgcatggcggatggtatctgagaaaacagttgtattcttgttcaaatagggagcagtgcactttgattcatgaggcgccttccattatcttggcatcagtcaaccttttcttgccaagtagctagtgctatgtaacaagtgacatggcaaccatgtatagaaattatttgcatgggtttgtgttcttgccaggtagctaatgttatgtaataagtgacaaggaaacaatgtcatgaattatttgcattgggttttgacgagtgaaatagaaatatacgccctgttttagttttctttttagggctagtttgacc

SEQ ID NO: 199543 - DNA, 2884 bp, Zea Mays
gcaaggcaggcggggcttttgcacaaaccccctccgatgtcgggcggaaacgccaaggagcagaaccttctcctgcccggttgcccgccgtcgtcgcgacgtcgagcgtataattagcaggcgcagcgcgacggggcaacggccgacgacgaggaatagactataggacacgctgtcgccctcttgcaacccccccttccatgccccttggcccagcaaccccgcccccgaccccgacccaagataaaggccctcctcctcccctcgtcgtcgcgcttgcgtgcgcgcttggccggaggctggctgggaggaggatctgactccgagccgcgtcgccgtgctgggcgctgcggcgagggatcgggggccgacccgcctcccgccaccgctcggaactcgatcgtcctggaggagctgtacctgtagacttccagtcctctgcaacctacaaaatgtcagtgcgtcgtcggtcaaccagcatggaagggctgctcacgcttgatgactggaaagaacggagatcagatgtggacaactcagaggacgagcgaaggcggctatccatagggtcactgaagaaaaaggcattgaatgcatcaaacaagctcacacattcactcaagaagaggggaaaaagaaaggtggagcatcgggcatcgtccttcacaatcgaagatgttagggatgagcaagaggagcgagccgtcttcaccttccagcaaaaacttctggacatgaacttgctgcctgacaaacacaacgattatcactcgttgctgaggtttttgaaggctagaaaatttgacacagagaaagcgatccatatgtgggctgagatgctccagtggaggaaagaatctggagcagatacaatactagaggacttcagttttgaagagctagatgatgtgctatgctattatcctcagggctaccatggagttgacaggcagggaagaccagtatacattgagagattagggaaagtggaaccaaataaattgatgcacattactacagttgatcgctacatgaagtatcacgtgcaagagtttgagagagccttcagggacaggtttcctgcatgctctgttgcagcaaaaaggcatattgattctacaactactatactagatgtcgatggcgtgggtctcaagaacttcagcaaaacagcaagagatatgttaagtagaatgcagaagattgacagtgactattatccagagacgctgcatcagatgtttgttgtgaatgctggtagtggtttcaagctactatggagttctgtgaaaggctttcttgaccctaaaactgcctcgaagatacatgttttgggaacaaagtttcagaacaagcttcttgaagtaatagatgcaagtcaacttcctgaatttttgggggggacatgcacttgtgctgctgtgggaggatgtatgaggtctaacaaaggtccatggaatgatccagatattatgaagcttgcacataataaggaagcaaagtttacaagacataccagacgtttatccgagattgagcaagggcggagttcatttgctaggttacatcttttgaagggtagaaacagtgacacgtcaactgtggagtcaggatctgaaattgatgatcttggtgctccgatcatgagaagcacagtggggtgtagtcgattggccccagttcgcgaagagatgcagatgagagcacgagactctgcagcttattacagctgtgacgatcactttgttgtggtggacaaaacagttgactatggtcgaggaggatcaccgtcagataaaagcagtgcttcagaagtaagaactcatgttcggccactggatgctagcacagcagcccacgtggcaggtccctcaagtaacaggcgagctacagttgtgcctgaagaggtttcagatgaaggagtgttccgtcgctttgtcagactacttctggccttcattgtcaaagtctttgccttctttcacatagtacgtagtcagcaggaaacgagggtcaacaacctactacctcctgccgaaccagaactgatttctgacgatcatccggcagtagagactttcaatgtagaccacatcagtcctgtcatagagcgccttcagagacttgaagggaaggtcgatgagcttggcagcaagcctccagcgattcctgtggagaaagaacgatccctcttggagtcatgggataggataaaatgcatcgaatctgacctggagcgaacaaagaagccactgtgaggaagcaactggaaagcgctgagtccctagaggaagtgattagatcaagcctacctagacgaagattttgtttataacaaggaaccagtactgctgaaatcaagatacatcctgtcgcggagaaaaatatgcacaggaattcgattggtgatgtgatgaaggccgtgcattcagttgtccacattactggcagaaaagatggtgaccacggatagtgaaaaacacggtccacttatttatttttttcttgtgaccctaagaggcctgtgcatttttcatgttaacagaggatgttaggatggatggcattgcaagggctagaaaaataggagatagaaatgtggaaagtggggtggtacccgaacaactgaacaagtgcgcatattgtgatatacaggtccgcgtctatgttatctttgcaaagaattgtgcgatattactaatgttagggaaggggataaaatagacacaaatatttacgtgaaataatctcctccaatattaagaagcaaacaaccacgaggaaacagatttactatttatcgtcgagtacaagttacagggaggtcctatatttataggcgtatagaaaaaaatatttcaaaacatattctaaatatataaaa

SEQ ID NO: 199544 - DNA, 1805 bp, Zea Mays
cacatgaatgcggcggcggcggcggcggggtcggaccagaagggggagtgcgccggcagccgcgcggcgcggcggcggaggatggagattcggcggctcagggtggtggccgaggaggcgtccgccaagaggcggagagacatggaggacgcggtgaccgcccgtccggagttcatcaacggccaccacttcttcggggtgttcgacggccacggctgctcacatgtggcgacgtcgtgcggggagcggatgcaccagattgtggccgaggaggcgacagctgccgcaggctcgtcggtttcggacgagaccgcgcggtggaggggtgtcatggagaagagctacgcgaggatggacgccgaggccgtcgtctccagggagaccgccggcccggcgcccacctgccgttgcgagatgcagcttcccaagtgcgaccacgtgggctccactgccgtcgtggccgtggtggggcctcgccacctcgtcgtcgccaactgcggcgactcccgcgcggtcctctccagcggaggcgccacgatccctctctcagctgaccacaagcctgaccgccccgacgagctcgaacggatccacgcagcgggagggcgcgtcatcttctgggacggcgcccgcgtcttcggcatgctcgccatgtcccgagccatcggtgacagctacctgaagccgttcgtgatctccgacccggaggtgctggtggtggagaggaaggacggcgaggacgagttcctgatcctggccagcgacgggctgtgggacgtggtgagcaacgaggtggcgtgcaaggtcgtgcgcacctgcctccggaacagggcgccgcgcggtggccgggagcggtcgagcccgacctccaacctgagccctaggcagagcagcgccagcggcggcagcagcagcagcggggacgaggaggctggtgggcccagcggcgacggcgcggggtccgagagcgacggcgagagcgccgaggacagggcgtgcgccgaggcggccatcctgctgaccaagctagcgctggcgcggcagagcgccgacaacgtcagcgtcgtcgtcatcaacctcaggcggcgcccgcgatcgtgatcggtggtggtggctctgtgatggactagccgttcttggttggtttggttttctggccccctccgtaagttcaaatgggagcccggttcaccttcgcttcggcagagcaatcatcagacaagatgtcaaagcgaagatcgaacaaaatgtgagatccttagcaaaattgcatgctacttccttttacagtagtacagcaggactattgtttcgttagcgtttttttatgggtgggttgaggggtgcgtttctgatctggtcggacagatcatcccgcctttcttcccccggtaaattctccaaatagaaaagcgcatgcgtctccgatgtttgaagaaactttaccgtgcgtccgagagatttaattgtaatatatagtccagtgcccctttcactagccaaatgcccaaatccttccaaccttctctgactaagatcgtgatgtgctcctccggttccgtgtttcatgttttatataaataaatttgacccaccatgattgtccagaacgcgttcggcgacgctgcgtcagctgcgcaaccctggatacaatatcccgggggacggatgttttcttggtggcgtcccgtgtcctccaaagttttttcattaacttccagatgagatggaacacacgcacagaacaaacatgacagtgtttcctgccggctcgttcgtcgctgaaaagtccgtcggtccttgct

SEQ ID NO: 199545 - DNA, 2149 bp, Zea Mays
ctcaattctgctcggtgcactcgaagctactgctattgccaattccgtctctattattatctgataatactcgtctctctgctcacaagtcacaaggaggggagcgaggcggcggccaacacctagcagctccgaaccctagctccggccactggcggcgatggctgctgctacggcgttccggtcggggacgaggcggggcgacgctctcgcgcccgtagaggacgcgggctccgccactcgcgagcgccaggccgcgggccgcggcggaggcagcgtccgccggtcgaagagcctgagccggttcccgccgccgtcgccctccaccgaggacacggcgacgccgtcgtcgaggttcgtcaacaaggtgcggggcgggggaagcggcggcgtcttcccgccgcaggtcagcctcgacgacctcgccgacgagttcttccgggccagggccgagtccgaggacgacgacgacgaggagactgctgcgcgcggccggtcaaggcttccagcggccgcagagcgtgggggcggtggcgctggcggtcggcggagctccaccgcgcggtacgctaggcagacggagtcttcgcggcagcgcgggcgctccgtgtcgcggccgccagccgagcggcgaggcgtagcggccaatgcggtggatggcggccctgcagccaggaggcagcgttatgcgtcggtcgaccggcgcgctgccatggatcgacaacggtggtgcgattcggataatgatatggaagttcctcaccagtatgtttctagggggatgcataccaaaagtagcagtggcaatagcctgcagagttcattccataagccatctaaagcaaatcaagctttgaagaggtctacaagtcaaaaggatttctttcattctagagacagcagctccagccattcttcaattactgatgatgagtctaggagttcactctctttccatagcagaaatcagaaggctgtctgtgcagtttatggtcttgacaaggagcacggaattgatgatggggctggaaatgtattgtacgatgtaatgcgaaaagaagttaggcaagctgttgaggaaataaggaatcagcttgaagaggccatgacaaaatctgaaccttcagaaaaggcaataaacagtgatgcacaaccaacccaagttattactcagctccgaaggagctacactagtaaattggaagagagaagcggaagcaggaactgttagctcaattggcagcagaagaacaccatggtcatgagctcacaaaaatagttagagaattgctacctactcctaaaaagactgcaaacttacaaagacagccacactacagaagaaggagcaatgatagatcaaggatgtcaaaacgacttactgaagaggctgaacaatactttgaagatttcctgtcgaatgttgaagacactgacttttcttcttttgatggagagaaaagtgactcaagttcaaccaggaaagacctgttgttacttcatgctatgacagaaactccagttaagctcccagaagttgctttacctgcagaggcagatggcgttgtccttccctggctgcaatgggaaactaccaatgactttcagacctccccgtgcaaaaccaaggcccagggagaaagtaccagaggcagcactagcaatcagactgcgagcagccgtgggagttggagccctggagaccatgccacttcatcagttgcctctaaaaatagtttactgaccagatttggtgaggttgggatttgccgaagcagcttgtctgactatgctcgaaccttgtcgtttcacatcgacgactatttgcatttaaggcagagtgaggatctcctcttggagacgtggatgcagaaacaaaggatcgactctggcggcctagtcctgtgcagtaaatcgacgatattgtagagtgcagccaaataggtagttgatggggttgagttagactaataattgcttggatttttacctttagctgccatggctcctgccgcctagtgtgtatagatgcatgcattatagttaacagattggataagctttttttaacgcttcatcgtgattaagaaaatttattttttacaccatcattctgcaagtgcaaatgatccacgacaatattgccgag

SEQ ID NO: 199546 - DNA, 2117 bp, Zea Mays
ccagcaccaatgaaatatgggtccagtcacaaggaggggagcgaggcggcggccaacacctagcagctccgaaccctagctccggccactggcggcgatggctgctgctacggcgttccggtcggggacgaggcggggcgacgctctcgcgcccgtagaggacgcgggctccgccactcgcgagcgccaggccgcgggccgcggcggaggcagcgtccgccggtcgaagagcctgagccggttcccgccgccgtcgccctccaccgaggacacggcgacgccgtcgtcgaggttcgtcaacaaggtgcggggcgggggaagcggcggcgtcttcccgccgcaggtcagcctcgacgacctcgccgacgagttcttccgggccagggccgagtccgaggacgacgacgacgaggagactgctgcgcgcggccggtcaaggcttccagcggccgcagagcgtgggggcggtggcgctggcggtcggcggagctccaccgcgcggtacgctaggcagacggagtcttcgcggcagcgcgggcgctccgtgtcgcggccgccagccgagcggcgaggcgtagcggccaatgcggtggatggcggccctgcagccaggaggcagcgttatgcgtcggtcgaccggcgcgctgccatggatcgacaacggtggtgcgattcggataatgatatggaagttcctcaccagtatgtttctagggggatgcataccaaaagtagcagtggcaatagcctgcagagttcattccataagccatctaaagcaaatcaagctttgaagaggtctacaagtcaaaaggatttctttcattctagagacagcagctcctttgtatttttacctttaattatgcagagccattcttcaattactgatgatgagtctaggagttcactctctttccatagcagaaatcagaaggctgtctgtgcagtttatggtcttgacaaggagcacggaattgatgatggggctggaaatgtattgtacgatgtaatgcgaaaagaagttaggcaagctgttgaggaaataaggaatcagcttgaagaggccatgacaaaatctgaaccttcagaaaaggcaataaacagtgatgcacaaccaacccaagttattactcagctccgaaggagctacactagtaaattggaagagtcagagaagcggaagcaggaactgttagctcaattggcagcagaagaacaccatggtcatgagctcacaaaaatagttagagaattgctacctactcctaaaaagactgcaaacttacaaagacagccacactacagaagaaggagcaatgatagatcaaggatgtcaaaacgacttactgaagaggctgaacaatactttgaagatttcctgtcgaatgttgaagacactgacttttcttcttttgatggagagaaaagtgactcaagttcaaccaggaaagacctgttgttacttcatgctatgacagaaactccagttaagctcccagaagttgctttacctgcagaggcagatggcgttgtccttccctggctgcaatgggaaactaccaatgactttcagacctccccgtgcaaaaccaaggcccagggagaaagtaccagaggcagcactagcaatcagactgcgagcagccgtgggagttggagccctggagaccatgccacttcatcagttgcctctaaaaatagtttactgaccagatttggtgaggttgggatttgccgaagcagcttgtctgactatgctcgaaccttgtcgtttcacatcgacgactatttgcatttaaggcagagtgaggatctcctcttggagacgtggatgcagaaacaaaggatcgactctggcggcctagtcctgtgcagtaaatcgacgatattgtagagtgcagccaaataggtagttgatggggttgagttagactaataattgcttggatttttacctttagctgccatggctcctgccgcctagtgtgtatagatgcatgcattatagttaacagattggataagctttttttaacgcttcatcgtgattaagaaaatttattttttacaccatcattctgcaagtgcaaatgatccacgacaatattgccgag

SEQ ID NO: 199547 - DNA, 2362 bp, Zea Mays
gtttgtctcacttgtcccgtgttcggtggtcacggtcgagccgagcggcgagaccgcgagaggagagaacaacgcaggctgcaggcagtggtccgtcacgctgccacggtgcaacgacacccaaccaactaccaggatcccgtgtgccaactgcctgcctgctgttgtagagcctcgtaaattccccttgaaacacggccgcaagtttgaaattcaaattcactcaccagcacctgcaaacccaggcattcattactcccaccgcccagcagccagcaccaatgaaatatgggtccagtcacaaggaggggagcgaggcggcggccaacacctagcagctccgaaccctagctccggccactggcggcgatggctgctgctacggcgttccggtcggggacgaggcggggcgacgctctcgcgcccgtagaggacgcgggctccgccactcgcgagcgccaggccgcgggccgcggcggaggcagcgtccgccggtcgaagagcctgagccggttcccgccgccgtcgccctccaccgaggacacggcgacgccgtcgtcgaggttcgtcaacaaggtgcggggcgggggaagcggcggcgtcttcccgccgcaggtcagcctcgacgacctcgccgacgagttcttccgggccagggccgagtccgaggacgacgacgacgaggagactgctgcgcgcggccggtcaaggcttccagcggccgcagagcgtgggggcggtggcgctggcggtcggcggagctccaccgcgcggtacgctaggcagacggagtcttcgcggcagcgcgggcgctccgtgtcgcggccgccagccgagcggcgaggcgtagcggccaatgcggtggatggcggccctgcagccaggaggcagcgttatgcgtcggtcgaccggcgcgctgccatggatcgacaacggtggtgcgattcggataatgatatggaagttcctcaccagtatgtttctagggggatgcataccaaaagtagcagtggcaatagcctgcagagttcattccataagccatctaaagcaaatcaagctttgaagaggtctacaagtcaaaaggatttctttcattctagagacagcagctccagccattcttcaattactgatgatgagtctaggagttcactctctttccatagcagaaatcagaaggctgtctgtgcagtttatggtcttgacaaggagcacggaattgatgatggggctggaaatgtattgtacgatgtaatgcgaaaagaagttaggcaagctgttgaggaaataaggaatcagcttgaagaggccatgacaaaatctgaaccttcagaaaaggcaataaacagtgatgcacaaccaacccaagttattactcagctccgaaggagctacactagtaaattggaagagtcagagaagcggaagcaggaactgttagctcaattggcagcagaagaacaccatggtcatgagctcacaaaaatagttagagaattgctacctactcctaaaaagactgcaaacttacaaagacagccacactacagaagaaggagcaatgatagatcaaggatgtcaaaacgacttactgaagaggctgaacaatactttgaagatttcctgtcgaatgttgaagacactgacttttcttcttttgatggagagaaaagtgactcaagttcaaccaggaaagacctgttgttacttcatgctatgacagaaactccagttaagctcccagaagttgctttacctgcagaggcagatggcgttgtccttccctggctgcaatgggaaactaccaatgactttcagacctccccgtgcaaaaccaaggcccagggagaaagtaccagaggcagcactagcaatcagactgcgagcagccgtgggagttggagccctggagaccatgccacttcatcagttgcctctaaaaatagtttactgaccagatttggtgaggttgggatttgccgaagcagcttgtctgactatgctcgaaccttgtcgtttcacatcgacgactatttgcatttaaggcagagtgaggatctcctcttggagacgtggatgcagaaacaaaggatcgactctggcggcctagtcctgtgcagtaaatcgacgatattgtagagtgcagccaaataggtagttgatggggttgagttagactaataattgcttggatttttacctttagctgccatggctcctgccgcctagtgtgtatagatgcatgcattatagttaacagattggataagctttttttaacgcttcatcgtgattaagaaaatttattttttacaccatcattctgcaagtgcaaatgatccacgacaatattgccgag

SEQ ID NO: 199548 - DNA, 2023 bp, Zea Mays
attccccctaattcacatgtgttgagatatattggggtgtaaattagtttaatttatactctaataaacctcaacacacgtggattgcggtgaatactagagtatccaaataaggcctaaggggtattaaccccctcccccccaaaaaaaagtcctgggaatctatttactgatttcacttatataggtgtagtgttaggaaacattttagcgtcggaaaacaagattttgaagcaattaagtgattttgtattttgtgctctttgaggttgtggaaaacaagactcgaagtggttgaagtgattctgaccagacctactgcattatgttttgagcatatctggtcgtgtagtgggtttatggcagtagggattcagtgctatcgttttcactcattagcgcatttgattgtaaacaaatacatccttgaaagtgtttatgatacattctccggtgaacctcatcttcaggtgaggcaaagagaggggagattaactctcccagcaaatttataatcctgacatggtttcttgaacttttttattgtagctagatggaacaagatactggatgaagtaccaagaatcagattgttttgttctagaagactctactgaccaccttcacatgctataggcttcagaaaggttgatcctgacaggtgggagtttgcaaatgaaggtttcctcagaggtcaaaggcacctgctgaagatgataaagagaaggaagccaccatcagctgtggcaccattgcgacagcaacgtgcccctgcttcttgcctggaggttggtgagtttggatttgaggaggagattgataggctgaagcgtgacaagaacattttaatcacagaagtagtaaaactaaggcaggagcagcaaagtactaaagatcatgtgagagccatggaggaaaggctacgagtggctgaacagaagcaggtacagatgatggggttcttggcaagagcaatgcggaacccagagttcttccagcagttggcccagcagcaagacaagaggaaggagctcgaggataccatctcaaagaaaagaaggcggcccattgacaacacaccattctacagtgatggggaaagcgaacagcttgattcacagttgaaaatgttcgagtcaggtgttctcaatgggctcaatgaacctgagctggagaatttagcagtgaacattcaggagcttgggaagggaagcatagatgatgggaacttgactcaagttagtgaccagtcagagctgaacgacgacttctgggcagagcttttggtcgaagattttggagacaaggcaggacagccagagttggagggaagaactgaagacgtgaatgaccttgctcaacaactggggtatctgagttcttctagcccaaaatagagccagttcctaatggttgcccccacaatcactggtgctttccctaccctactgttgcagaccatcctgatcaaaccgccaggaatgatgatggatctggcagacaagttgactggtggtggagaggtgttcatactgaaggcgtgctgtggagaggtcactgccttgacgttgaaggcttagcgctgtactctgctgtgggagttacgtgtggggtgttggctaaatgtctcttccggcgtcttctggcaaaatgatctcgtggacggtgactggcaaagatgcctaggggccaacgtatacgtacacagctgttatcagatcttgttcaaagtcattgcgcggttttgacggtgctatgtatcgatcagggttctggccttctggggttgggttgtagaattgactggctgatctagtgttctccatgtatgactggtgtaaccttaaaacaccctcagcttgttgttgaactgtgacaagcatctcgtttttttgttgtactccattttcatcatcattgtacatcaaattgctgaattatgaacagatccctaataatttggtggactgcgtcttggcatttggctacggcccagcttgcagtgtagttgatacatgctttt

SEQ ID NO: 199549 - DNA, 2019 bp, Zea Mays
attccccctaattcacatgtgttgagatatattggggtgtaaattagtttaatttatactctaataaacctcaacacacgtggattgcggtgaatactagagtatccaaataaggcctaaggggtattaaccccctcccccccaaaaaaaagtcctgggaatctatttactgatttcacttatataggtgtagtgttaggaaacattttagcgtcggaaaacaagattttgaagcaattaagtgattttgtattttgtgctctttgaggttgtggaaaacaagactcgaagtggttgaagtgattctgaccagacctactgcattatgttttgagcatatctggtcgtgtagtgggtttatggcagtagggattcagtgctatcgttttcactcattagcgcatttgattgtaaacaaatacatccttgaaagtgtttatgatacattctccggtgaacctcatcttcaggtgaggcaaagagaggggagattaactctcccagcaaatttataatcctgacatggtttcttgaacttttttattgtagctagatggaacaagatactggatgaagtaccaagaatcagattgttttgttctagaagactctactgaccaccttcacatgctataggcttcagaaaggttgatcctgacaggtgggagtttgcaaatgaaggtttcctcagaggtcaaaggcacctgctgaagatgataaagagaaggaagccaccatcagctgtggcaccattgcgacagcaacgtgcccctgcttcttgcctggaggttggtgagtttggatttgaggaggagattgataggctgaagcgtgacaagaacattttaatcacagaagtagtaaaactaaggcaggagcagcaaagtactaaagatcatgtgagagccatggaggaaaggctacgagtggctgaacagaagcaggtacagatgatggggttcttggcaagagcaatgcggaacccagagttcttccagcagttggcccagcagcaagacaagaggaaggagctcgaggataccatctcaaagaaaagaaggcggcccattgacaacacaccattctacagtgatggggaaagcgaacagcttgattcacagttgaaaatgttcgagtcaggtgttctcaatgggctcaatgaacctgagctggagaatttagcagtgaacattcaggagcttgggaagggaagcatagatgatgggaacttgactcaagttagtgaccagtcagagctgaacgacgacttctgggcagagcttttggtcgaagattttggagacaaggcaggacagccagagttggagggaagaactgaagacgtgaatgaccttgctcaacaactggggtatctgagttcttctagcccaaaatagagccagttcctaatggttgcccccacaatcactggtgctttccctaccctactgttgcagaccatcctgatcaaaccggaatgatgatggatctggcagacaagttgactggtggtggagaggtgttcatactgaaggcgtgctgtggagaggtcactgccttgacgttgaaggcttagcgctgtactctgctgtgggagttacgtgtggggtgttggctaaatgtctcttccggcgtcttctggcaaaatgatctcgtggacggtgactggcaaagatgcctaggggccaacgtatacgtacacagctgttatcagatcttgttcaaagtcattgcgcggttttgacggtgctatgtatcgatcagggttctggccttctggggttgggttgtagaattgactggctgatctagtgttctccatgtatgactggtgtaaccttaaaacaccctcagcttgttgttgaactgtgacaagcatctcgtttttttgttgtactccattttcatcatcattgtacatcaaattgctgaattatgaacagatccctaataatttggtggactgcgtcttggcatttggctacggcccagcttgcagtgtagttgatacatgctttt

SEQ ID NO: 199550 - DNA, 2094 bp, Zea Mays
attccccctaattcacatgtgttgagatatattggggtgtaaattagtttaatttatactctaataaacctcaacacacgtggattgcggtgaatactagagtatccaaataaggcctaaggggtattaaccccctcccccccaaaaaaaagtcctgggaatctatttactgatttcacttatataggtgtagtgttaggaaacattttagcgtcggaaaacaagattttgaagcaattaagtgattttgtattttgtgctctttgaggttgtggaaaacaagactcgaagtggttgaagtgattctgaccagacctactgcattatgttttgagcatatctggtcgtgtagtgggtttatggcagtagggattcagtgctatcgttttcactcattagcgcatttgattgtaaacaaatacatccttgaaagtgtttatgatacattctccggtgaacctcatcttcaggtgaggcaaagagaggggagattaactctcccagcaaatttataatcctgacatggtttcttgaacttttttattgtagctagatggaacaagatactggatgaagtaccaagaatcagattgttttgttctagaagactctactgaccaccttcacatgctatagtatattgctggcctatcattatccctgttattgcagatataaatatacaaaagctgaaatttacagagaacctcatccaagcgaacataatgccttatgactgacctgctgatgaccatttctggtctattgcaacctgcagggcttcagaaaggttgatcctgacaggtgggagtttgcaaatgaaggtttcctcagaggtcaaaggcacctgctgaagatgataaagagaaggaagccaccatcagctgtggcaccattgcgacagcaacgtgcccctgcttcttgcctggaggttggtgagtttggatttgaggaggagattgataggctgaagcgtgacaagaacattttaatcacagaagtagtaaaactaaggcaggagcagcaaagtactaaagatcatgtgagagccatggaggaaaggctacgagtggctgaacagaagcaggtacagatgatggggttcttggcaagagcaatgcggaacccagagttcttccagcagttggcccagcagcaagacaagaggaaggagctcgaggataccatctcaaagaaaagaaggcggcccattgacaacacaccattctacagtgatggggaaagcgaacagcttgattcacagttgaaaatgttcgagtcaggtgttctcaatgggctcaatgaacctgagctggagaatttagcagtgaacattcaggagcttgggaagggaagcatagatgatgggaacttgactcaagttagtgaccagtcagagctgaacgacgacttctgggcagagcttttggtcgaagattttggagacaaggcaggacagccagagttggagggaagaactgaagacgtgaatgaccttgctcaacaactggggtatctgagttcttctagcccaaaatagagccagttcctaatggttgcccccacaatcactggtttgactggtggtggagaggtgttcatactgaaggcgtgctgtggagaggtcactgccttgacgttgaaggcttagcgctgtactctgctgtgggagttacgtgtggggtgttggctaaatgtctcttccggcgtcttctggcaaaatgatctcgtggacggtgactggcaaagatgcctaggggccaacgtatacgtacacagctgttatcagatcttgttcaaagtcattgcgcggttttgacggtgctatgtatcgatcagggttctggccttctggggttgggttgtagaattgactggctgatctagtgttctccatgtatgactggtgtaaccttaaaacaccctcagcttgttgttgaactgtgacaagcatctcgtttttttgttgtactccattttcatcatcattgtacatcaaattgctgaattatgaacagatccctaataatttggtggactgcgtcttggcatttggctacggcccagcttgcagtgtagttgatacatgctttt

SEQ ID NO: 199551 - DNA, 2117 bp, Zea Mays
ctttgccttgtttggatactctagtattccccctaattcacatgtgttgagatatattggggtgtaaattagtttaatttatactctaataaacctcaacacacgtggattgcggtgaatactagagtatccaaataaggcctaaggggtattaaccccctcccccccaaaaaaaagtcctgggaatctatttactgatttcacttatataggtgtagtgttaggaaacattttagcgtcggaaaacaagattttgaagcaattaagtgattttgtattttgtgctctttgaggttgtggaaaacaagactcgaagtggttgaagtgattctgaccagacctactgcattatgttttgagcatatctggtcgtgtagtgggtttatggcagtagggattcagtgctatcgttttcactcattagcgcatttgattgtaaacaaatacatccttgaaagtgtttatgatacattctccggtgaacctcatcttcaggtgaggcaaagagaggggagattaactctcccagcaaatttataatcctgacatggtttcttgaacttttttattgtagctagatggaacaagatactggatgaagtaccaagaatcagattgttttgttctagaagactctactgaccaccttcacatgctatagtatattgctggcctatcattatccctgttattgcagatataaatatacaaaagctgaaatttacagagaacctcatccaagcgaacataatgccttatgactgacctgctgatgaccatttctggtctattgcaacctgcagggcttcagaaaggttgatcctgacaggtgggagtttgcaaatgaaggtttcctcagaggtcaaaggcacctgctgaagatgataaagagaaggaagccaccatcagctgtggcaccattgcgacagcaacgtgcccctgcttcttgcctggaggttggtgagtttggatttgaggaggagattgataggctgaagcgtgacaagaacattttaatcacagaagtagtaaaactaaggcaggagcagcaaagtactaaagatcatgtgagagccatggaggaaaggctacgagtggctgaacagaagcaggtacagatgatggggttcttggcaagagcaatgcggaacccagagttcttccagcagttggcccagcagcaagacaagaggaaggagctcgaggataccatctcaaagaaaagaaggcggcccattgacaacacaccattctacagtgatggggaaagcgaacagcttgattcacagttgaaaatgttcgagtcaggtgttctcaatgggctcaatgaacctgagctggagaatttagcagtgaacattcaggagcttgggaagggaagcatagatgatgggaacttgactcaagttagtgaccagtcagagctgaacgacgacttctgggcagagcttttggtcgaagattttggagacaaggcaggacagccagagttggagggaagaactgaagacgtgaatgaccttgctcaacaactggggtatctgagttcttctagcccaaaatagagccagttcctaatggttgcccccacaatcactgttgactggtggtggagaggtgttcatactgaaggcgtgctgtggagaggtcactgccttgacgttgaaggcttagcgctgtactctgctgtgggagttacgtgtggggtgttggctaaatgtctcttccggcgtcttctggcaaaatgatctcgtggacggtgactggcaaagatgcctaggggccaacgtatacgtacacagctgttatcagatcttgttcaaagtcattgcgcggttttgacggtgctatgtatcgatcagggttctggccttctggggttgggttgtagaattgactggctgatctagtgttctccatgtatgactggtgtaaccttaaaacaccctcagcttgttgttgaactgtgacaagcatctcgtttttttgttgtactccattttcatcatcattgtacatcaaattgctgaattatgaacagatccctaataatttggtggactgcgtcttggcatttggctacggcccagcttgcagtgtagttgatacatgctttt

SEQ ID NO: 199552 - DNA, 2025 bp, Zea Mays
atcagccctttgccttgtttggatactctagtattccccctaattcacatgtgttgagatatattggggtgtaaattagtttaatttatactctaataaacctcaacacacgtggattgcggtgaatactagagtatccaaataaggcctaaggggtattaaccccctcccccccaaaaaaaagtcctgggaatctatttactgatttcacttatataggtgtagtgttaggaaacattttagcgtcggaaaacaagattttgaagcaattaagtgattttgtattttgtgctctttgaggttgtggaaaacaagactcgaagtggttgaagtgattctgaccagacctactgcattatgttttgagcatatctggtcgtgtagtgggtttatggcagtagggattcagtgctatcgttttcactcattagcgcatttgattgtaaacaaatacatccttgaaagtgtttatgatacattctccggtgaacctcatcttcaggtgaggcaaagagaggggagattaactctcccagcaaatttataatcctgacatggtttcttgaacttttttattgtagctagatggaacaagatactggatgaagtaccaagaatcagattgttttgttctagaagactctactgaccaccttcacatgctataggcttcagaaaggttgatcctgacaggtgggagtttgcaaatgaaggtttcctcagaggtcaaaggcacctgctgaagatgataaagagaaggaagccaccatcagctgtggcaccattgcgacagcaacgtgcccctgcttcttgcctggaggttggtgagtttggatttgaggaggagattgataggctgaagcgtgacaagaacattttaatcacagaagtagtaaaactaaggcaggagcagcaaagtactaaagatcatgtgagagccatggaggaaaggctacgagtggctgaacagaagcaggtacagatgatggggttcttggcaagagcaatgcggaacccagagttcttccagcagttggcccagcagcaagacaagaggaaggagctcgaggataccatctcaaagaaaagaaggcggcccattgacaacacaccattctacagtgatggggaaagcgaacagcttgattcacagttgaaaatgttcgagtcaggtgttctcaatgggctcaatgaacctgagctggagaatttagcagtgaacattcaggagcttgggaagggaagcatagatgatgggaacttgactcaagttagtgaccagtcagagctgaacgacgacttctgggcagagcttttggtcgaagattttggagacaaggcaggacagccagagttggagggaagaactgaagacgtgaatgaccttgctcaacaactggggtatctgagttcttctagcccaaaatagagccagttcctaatggttgcccccacaatcactggtgctttccctaccctactgttgcagaccatcctgatcaaaccgttgactggtggtggagaggtgttcatactgaaggcgtgctgtggagaggtcactgccttgacgttgaaggcttagcgctgtactctgctgtgggagttacgtgtggggtgttggctaaatgtctcttccggcgtcttctggcaaaatgatctcgtggacggtgactggcaaagatgcctaggggccaacgtatacgtacacagctgttatcagatcttgttcaaagtcattgcgcggttttgacggtgctatgtatcgatcagggttctggccttctggggttgggttgtagaattgactggctgatctagtgttctccatgtatgactggtgtaaccttaaaacaccctcagcttgttgttgaactgtgacaagcatctcgtttttttgttgtactccattttcatcatcattgtacatcaaattgctgaattatgaacagatccctaataatttggtggactgcgtcttggcatttggctacggcccagcttgcagtgtagttgatacatgctttt

SEQ ID NO: 199553 - DNA, 2280 bp, Zea Mays
gatcgtgctcttctcgcccgcccggtcttgtctctcctctccagaaccttccaacggcagagtgctcgccgcgtggtctagaaccttccacaagcctcgcgacgtgtctcgacgcgccggtacggcggtgggggtatttaggggtccggccaccggccaccgcccgcccttctcccgatttcaccgaccatttttccccatttcacagcgggcgaatatctctcatctcccccatcctctttcctgcaacaactcctacccacccgacagaaatatcctaagcgctgacccgaatacccgattcgctcctcgtccggtcgattcctgctcctaatcgctcgaatcgagtccttgccccgtgttccgtgccacaatctgggcgcttggctcccgcgagccggggttcttgggcctgggcggaggccatggacaagccggtggcgccgggcattatcaaggaggagctcctggagcagcagccgccgacgcaggacggtgtgggtggcggcggggatgcgccgcgcccgatggaggggctgcacgaggtgggtcccccgcctttcctcaccaagacgttcgaccttgtggaggacccggccaccgacgccgtcctctcctggagccgcgccggcaacagcttcatcgtctgggacccgcacgtcttcgccgacgggctgctcccgcgcctcttcaagcacagtaacttctccagcttcgtgcgccagctcaacacctatctagatggaacaagatactggatgaagtaccaagaatcagattgttttgttctagaagactctactgaccaccttcacatgctatagtatattgctggcctatcattatccctgttattgcagatataaatatacaaaagctgaaatttacagagaacctcatccaagcgaacataatgccttatgactgacctgctgatgaccatttctggtctattgcaacctgcagggcttcagaaaggttgatcctgacaggtgggagtttgcaaatgaaggtttcctcagaggtcaaaggcacctgctgaagatgataaagagaaggaagccaccatcagctgtggcaccattgcgacagcaacgtgcccctgcttcttgcctggaggttggtgagtttggatttgaggaggagattgataggctgaagcgtgacaagaacattttaatcacagaagtagtaaaactaaggcaggagcagcaaagtactaaagatcatgtgagagccatggaggaaaggctacgagtggctgaacagaagcaggtacagatgatggggttcttggcaagagcaatgcggaacccagagttcttccagcagttggcccagcagcaagacaagaggaaggagctcgaggataccatctcaaagaaaagaaggcggcccattgacaacacaccattctacagtgatggggaaagcgaacagcttgattcacagttgaaaatgttcgagtcaggtgttctcaatgggctcaatgaacctgagctggagaatttagcagtgaacattcaggagcttgggaagggaagcatagatgatgggaacttgactcaagttagtgaccagtcagagctgaacgacgacttctgggcagagcttttggtcgaagattttggagacaaggcaggacagccagagttggagggaagaactgaagacgtgaatgaccttgctcaacaactggggtatctgagttcttctagcccaaaatagagccagttcctaatggttgcccccacaatcactgttgactggtggtggagaggtgttcatactgaaggcgtgctgtggagaggtcactgccttgacgttgaaggcttagcgctgtactctgctgtgggagttacgtgtggggtgttggctaaatgtctcttccggcgtcttctggcaaaatgatctcgtggacggtgactggcaaagatgcctaggggccaacgtatacgtacacagctgttatcagatcttgttcaaagtcattgcgcggttttgacggtgctatgtatcgatcagggttctggccttctggggttgggttgtagaattgactggctgatctagtgttctccatgtatgactggtgtaaccttaaaacaccctcagcttgttgttgaactgtgacaagcatctcgtttttttgttgtactccattttcatcatcattgtacatcaaattgctgaattatgaacagatccctaataatttggtggactgcgtcttggcatttggctacggcccagcttgcagtgtagttgatacatgctttt

SEQ ID NO: 199554 - DNA, 2994 bp, Zea Mays
tgttattagttgtctgtgagttattacagactttggtatcatcctgctactgtagccccgttccatccacccatcaaagtgatgaaagctaaatttcgatttgatgggttggaaaacaggcccagtcattactacgaagtttccgttttgaaaaagaagtaatctaaattccatacgtccagtccaagtgttcagtgttcttcatcgtcatctacacacacggtatttccttcacattgtgcttccattccaagcagcctcgaatggcaaccagcaagaaaggcctgatggctatggtgtatattcgttctgccttcatcctcatattcttgagttcaccctgtcaatccaacgaccagctgactcaaacaaagccactcttgctcgaagacacgctcatctcggagggcggggactttgctcttggcttcttttcccctaccaattccagcaagaagctatacataggaatttggtaccaccgcgtcacagaacgcacagtggtatgggtcgccaaccgtgacaatccaatcaccacaccttcagccatgctcgccatcaccgacaatttagagctagtgttatcagactcccaaggacacactctttggatggcaacaggaaacacaagtggagatgctggaggagctgcttctgcggtgctactcaactctgggaactttgtccttcggttgccgaacggcacggaggtatggcatagcttcgatcacccgaccgatacaattcttccaaccatgaggatcctcctaagcttcaagacacaaccggcaacacgtttgattgcttggaagggccctgacaatccgtcaactggggatatttcttctggcatggattcaacgaaccttcagatgttcatttggaaaggggcactgccatactaccgtttccctgttgttaatgatatggcagtcgccggtgctatgtaccagcagagcaatggaaacgccgccatcatgtatgaaacgagggtgaacgcaggggatgcgttgtattatacgtacacagtctcgtccggttcaccctacacacgcttttcacttgactacacaggcaaagggagattactgagctggaacagcaccacatcgtcatggacagtcattatcgagcatcctcatagctgtgatctctatgcttcttgtggtccattcagctactgtgaccaaatggggccactaccgacgacatgccagtgccctgatgggtttgagctcctcaacagtctaaatttctctagaggatgccggagaaaggaagagctgaaatgcggagtggggaactatttcatggccatgtctagtatgaagcttcctgacaagttcttgcacattaagaatagaacctttgaccagtgtgctgacgagtgcactagaaactgctcctgtatggcatacgcctatgccaacctaagcagcattggtgctgtgggtgacacatcaaggtgtttggtttggagcggggatctcatcgacatggagaagaacagcttttcagaggtcttgtacatccggcttggtggatctgttcgaaggaagagcagtttgctgaaaattttactcccaattatactgtgtgtgctgctactcatgcttggagcccttgtctggacatgtaaaagcagaggcaaacggcaaaagaagagagttcaaaagagaaggatgctagaatacttgagttctactgatgacgctggggacaagaacataaacttcccatttattagctttgaaaacattgtcacagcaacagataatttctctgaatctaatttgcttgggaaaggaggttttggcaaagtgtacaagggaatgttggaaggcacaaaggaagtagctgtcaagagacttagcacgggttccggccaaggcaaggaggagttcaaaaatgaagtagtcctaattgcaaagttgcagcacaagaacctagttaagcttctcggttgttgtattcatgaagatgagaagctgttagtttatgagtacttacccaacaaaagcttggattacttcctctttgcttctgcaagaaaatcaatgcttcagtggccaacaaggttcaagataatccagggggttgctagaggaattatgtatctccatcatgactcaagattaactgtaattcatcgagatctaaaagcaagcaacatcttgctagataaggagatgaacccaaagatatcagatttcggcatggctaggatattctctggtgatcagctccaagcaaatactaaccgagttgtagggacatatggctacatgtctcctgaatatgcaatgaaaggtgcattttcagttaagtctgacacctacagctttggtgttcttatattggagattgtaagtggattaaagataagctcaccatatcttatcatggatttttctaaccttataacatttgcatggaacatgtggaaagatgggaaaccagaagattttcttgactcatctgtaacggagagttgctccctcgatgaagtttcacgatgcatccatataggactcctgtgcgctcaagacaatccgagttgcaggccactcatgtcaacagttgtgtccatgctggagaacaaagcaacaccactgccaacaccgaagcaacctaaagattttgcacttcgggactacaatcctggaaacgaaggtgtccacagggaattgtccgtaaatgatacaagtctcactatggtggagggccgttagattattgtttttgatactacgatgggggagcacatagcccaccagaaatattcattgaagacagacgtttagtccctattttgtttatgggtatttctgtttagacaaatttagtatcaatttaatctataaaatttattatgcaagaacaatctattggaaaggtaaagtttattatgcaatttatcaatttaggtttagattcagtatcaatttagtatcaattggaaaggtaaagtttattatgcaatgtataacagag

SEQ ID NO: 199555 - DNA, 753 bp, Zea Mays
agcctagaaggaaacaggaacagacagctctgaaagactgaaactcacggccatggccatcctgggtgccctcaggctcgcgccgtctccacccgccctcgccggcgccgcgccaccggcgacgtcgccgtatacggctggaggaggaccgtacgggaagcaggtgacgcgggggcaggacctcaccggcaaggacttcagcggccagacactcatcaagcaggacttcaagacgtctatactgaggcaggcgaacttcaaaggcgcgaacctgctcggcgcgagcttcttcgatgcagacctcacaagcgctgatctctctgacgctgatcttagaggcgctgatttgtcgctggcgaatttaacgaaggcaaacttatcaaatgccaacttagaaggggcacttgccactgggaacacttctttcaaaggtgccgacataactggggcagattttaccgatgtgccgctgcgagatgatcaacgggagtacctctgcaaaatcgctgacggagtaaattcaaccactggaaacccaacaaaggagactctgttctgcagctgatcgacggaaggacctgggacttgtgacttattcaacgtcttgataaacttgcatctgctgctgtaagcacgtgaggaatgtaaattgagttatagagggttcctagaaataataactggtaattacgtgtaaatcaaccaacaatataagtgtgtgctgccctttgaatgtgcaaacgattttttatt

SEQ ID NO: 199556 - DNA, 490 bp, Zea Mays
caacttcagttcagactactgataatagtagcacctttgagcactgctgctgaaaatgagctgcgccgaattgccacctgaaaccccagctgtgaacggagaagggtcatctgccgccaccgccgccgctcctggtgccgggtcgaagccgaaaaagaagatatgctgcgcgtgccctgatacaaagaggctgagggatgagtgcgtcgtcgagcacggtgagcctgcttgcaccaagtggatcgaagctcacaagcgatgcctccgtgctgaggggttcaatgtctgaaacttgtagtctgtcgggctcgctttcctagaaccgtaggaaatggaaacattagaaaaatagagttatacaactagtcataataataccttaatgccaggagttatacggtaaggggaaatcacgatgtgaaaattatgttggcgatgaaacgtatttgagaatgagattgttgaattttattcgctaaatcattgcaac

SEQ ID NO: 199557 - DNA, 1353 bp, Zea Mays
ggtcgtcaagccatcgcagcccgcaggtgaaagggcctaagcgtattggggcactctatgttacctgccagctattcaaaatttacttcaggcttggaacagtaaacctttgccgtagtgtcataagaagtatcgaaactgcaaggaattttgattttgaagactttccagtgaaagacaaggtcacttatatgtactacactgggcggttggaggtgtttaacgagaactttcttgttgcagatcagaagctaacttatgctttgatgcattgcaatcctcaaagcgagtcaaatttgaggagaattttgaagttccttatccctgtaaagctttcaataggtgtactgccaaaaaggactcttttggagcggtatagtttgcttgagatgttgtcactgcacttaagagaggagatctcaggcttctcaggcaagctctagacaggcacgaagaccaatttttgaaatctggcgtctaccttgtactggagaaacttgaacttcaagtctatcagagattagttaagaaaatccacatcattcagagacagaaggaaccagctaaggcacatcagattaagctagatgttgtcgtaaaagctctgaaatggcttgaaatcgacatggatgtggatgaggtggagtgcatcatggcatgccttatatacaagaaccttataaaagggtactttgctcacaagagtaaggtccttgtcctcagcaaacaagaccccttccccaagttgaacgggaagcctgtttaaatacaattgtcacggagaaatcctgtaatacaatggtattttttttgtttagtatgcagagatgctttccatattaagtgaaactccaagcctgacaaggacatttagggcctgatcggttataccggaataagccaggattcattctagctcatcaaaatctatataaggccttgttcgtttgtgccggattggtgggtcggaacgattcctaaccggattgtttctctaaattatataaactttgattagctgaaacgatttcgggtgcaatccgacacaaacgaacaaggcctaaattagagaagtaatccagctaggaattaatccgggactccaatcccaaacaaccgaacaaggccttatatttaatcacctctggatgtaatgtaacctgtatcattattgcctcattgaccttcattttccatacgcgaatgcgctatgtttatttttctatcatgtttagaagagagttcttgtccggtacccaggtcagcaaaatcacttaaggccttgttcggttattcccaatacacatggattggatgtgattgaaaaaaattattaagaattttgacttgttc

SEQ ID NO: 199558 - DNA, 1179 bp, Zea Mays
cccaaccctagccgccactacctgctccctctccctagcagccgacagctgccatccagcgccaccaggaaagccgcccaggcgccccgcctctgcatccgcccgccaggagcagcgcccctgcaacccgctctgaagactcgacgcccagagccgcgcgcaaccccgttcgccgccccgccctccgtctcccgtcgcctcgcccctgcgctccgtcagctgcccctccccgaaccttctgcaaattcctattgtttcaagctgcatagaagtctgggattttctgagtgtggattcacagacactctctcagttatccaaatattgtcagtcagtttagatggtcggtcagccaccagggcctccccgtccggccgtcgtgcgtccaacagtcgggcaccggcgggcggcggccgctcgcccctgcggcttgggcgctcggccacagccagtgcgggccgtgcggcagtgtccactcgggcctcggccagctgctagctaatcctaatcagtaattacttttgcactttgtggacaagaagttgtgaatgccttcagtgctgcagtgttgggcctatcttcaggttgtgtttcttctcaagtcaaccaagagcagcctcatgatggttcccctcctctgagagaagatgacaagaatgggcattatgtttttgctgttggagataatctcacatctcgttataagatcaatgcaaaaatgggagaagtctacaggaatcagtggtcttctccgctacgctcctgaaatatttgagcagtctggagtggctagtttgttttcagacattggactttctcctcattcaacatcaattctcatgagtacccttaatgctttgctgatactcccttgtataactgccgcaatgctgctgatggatgtctgcgggagaaggtagaatctgagacaccatgaaaattagtgatgcagttgtggacttttgaacaatagctggagtgatatgaaacattagtgatgtagttgtgggcttttgaactgcttcaagctggagtgatgtcgctgtggtgcttttgtgactgatctagctagctatctgtaaatgatctagttgtgaatgatattataattgtgatgtttttgtgaatatataattgtggtgcttttgtgtttatgtgatggatctataactgtggtat

SEQ ID NO: 199559 - DNA, 1498 bp, Zea Mays
cccaaccctagccgccactacctgctccctctccctagcagccgacagctgccatccagcgccaccaggaaagccgcccaggcgccccgcctctgcatccgcccgccaggagcagcgcccctgcaacccgctctgaagactcgacgcccagagccgcgcgcaaccccgttcgccgccccgccctccgtctcccgtcgcctcgcccctgcgctccgtcagctgcccctccccgaaccttctgcaaattcctattgtttcaagctgcatagaagtctgggattttctgagtgtggattcacagacatatattttcacagacactctctcagttatccaaatattgtcagtcagtttagatggtcggtcagccaccagggcctccccgtccggccgtcgtgcgtccaacagtcgggcaccggcgggcggcggccgctcgcccctgcggcttgggcgctcggccacagccagtgcgggccgtgcggcagtgtccactcgggcctcggccagctgctagctaatcctaatcagtaattactgttgtgtttcttctcaagtcaaccaagagcagcctcatgatggttcccctcctctgagagaagatgacaagaatgggcattatgtttttgctgttggagataatctcacatctcgttataagatcaatgcaaaaatgggagaaggttagtttggatgaccatatattctgaaatagttgatttaactcgattgggcatgccaatacattcaacaaattttgtctataactgaatgtagctgggactacttggtgtaacctgttagcccctttgatcttattgtgcacacagaaaaaagataactaattttatgagataattccttgcctttgtttgcaaaagtactttggccgataagctggtgttgactaatcattgtatgttgattatgtattcaattcagcatggagttcagtttacttgcatactggctaccatgtatacagaatgctagtgtctgctgacacgttcttttttgcttgttttttgtttgctcttctcaaaaatatagtctacaggaatcagtggtcttctccgctacgctcctgaaatatttgagcagtctggagtggctagtttgttttcagacattggactttctcctcattcaacatcaattctcatgagtacccttaatgctttgctgatactcccttgtataactgccgcaatgctgctgatggatgtctgcgggagaaggtagaatctgagacaccatgaaaattagtgatgcagttgtggacttttgaacaatagctggagtgatatgaaacattagtgatgtagttgtgggcttttgaactgcttcaagctggagtgatgtcgctgtggtgcttttgtgactgatctagctagctatctgtaaatgatctagttgtgaatgatattataattgtgatgtttttgtgaatatataattgtggtgcttttgtgtttatgtgatggatctataactgtggtat

SEQ ID NO: 199560 - DNA, 1149 bp, Zea Mays
cccaaccctagccgccactacctgctccctctccctagcagccgacagctgccatccagcgccaccaggaaagccgcccaggcgccccgcctctgcatccgcccgccaggagcagcgcccctgcaacccgctctgaagactcgacgcccagagccgcgcgcaaccccgttcgccgccccgccctccgtctcccgtcgcctcgcccctgcgctccgtcagctgcccctccccgaaccttctgcaaattcctattgtttcaagctgcatagaagtctgggattttctgagtgtggattcacagtcagtttagatggtcggtcagccaccagggcctccccgtccggccgtcgtgcgtccaacagtcgggcaccggcgggcggcggccgctcgcccctgcggcttgggcgctcggccacagccagtgcgggccgtgcggcagtgtccactcgggcctcggccagctgctagctaatcctaatcagtaattacttttgcactttgtggacaagaagttgtgaatgccttcagtgctgcagtgttgggcctatcttcaggttgtgtttcttctcaagtcaaccaagagcagcctcatgatggttcccctcctctgagagaagatgacaagaatgggcattatgtttttgctgttggagataatctcacatctcgttataagatcaatgcaaaaatgggagaagtctacaggaatcagtggtcttctccgctacgctcctgaaatatttgagcagtctggagtggctagtttgttttcagacattggactttctcctcattcaacatcaattctcatgagtacccttaatgctttgctgatactcccttgtataactgccgcaatgctgctgatggatgtctgcgggagaaggtagaatctgagacaccatgaaaattagtgatgcagttgtggacttttgaacaatagctggagtgatatgaaacattagtgatgtagttgtgggcttttgaactgcttcaagctggagtgatgtcgctgtggtgcttttgtgactgatctagctagctatctgtaaatgatctagttgtgaatgatattataattgtgatgtttttgtgaatatataattgtggtgcttttgtgtttatgtgatggatctataactgtggtat

SEQ ID NO: 199561 - DNA, 1131 bp, Zea Mays
cccaaccctagccgccactacctgctccctctccctagcagccgacagctgccatccagcgccaccaggaaagccgcccaggcgccccgcctctgcatccgcccgccaggagcagcgcccctgcaacccgctctgaagactcgacgcccagagccgcgcgcaaccccgttcgccgccccgccctccgtctcccgtcgcctcgcccctgcgctccgtcagctgcccctccccgaaccttctgcaaattcctattgtttcaagctgcatagaagtctgggattttctgagtgtggattcacagacatatattttcacagacactctctcagttatccaaatattgtcagtcagtttagatggtcggtcagccaccagggcctccccgtccggccgtcgtgcgtccaacagtcgggcaccggcgggcggcggccgctcgcccctgcggcttgggcgctcggccacagccagtgcgggccgtgcggcagtgtccactcgggcctcggccagctgctagctaatcctaatcagtaattactgttgtgtttcttctcaagtcaaccaagagcagcctcatgatggttcccctcctctgagagaagatgacaagaatgggcattatgtttttgctgttggagataatctcacatctcgttataagatcaatgcaaaaatgggagaagtctacaggaatcagtggtcttctccgctacgctcctgaaatatttgagcagtctggagtggctagtttgttttcagacattggactttctcctcattcaacatcaattctcatgagtacccttaatgctttgctgatactcccttgtataactgccgcaatgctgctgatggatgtctgcgggagaaggtagaatctgagacaccatgaaaattagtgatgcagttgtggacttttgaacaatagctggagtgatatgaaacattagtgatgtagttgtgggcttttgaactgcttcaagctggagtgatgtcgctgtggtgcttttgtgactgatctagctagctatctgtaaatgatctagttgtgaatgatattataattgtgatgtttttgtgaatatataattgtggtgcttttgtgtttatgtgatggatctataactgtggtat

SEQ ID NO: 199562 - DNA, 1173 bp, Zea Mays
cccaaccctagccgccactacctgctccctctccctagcagccgacagctgccatccagcgccaccaggaaagccgcccaggcgccccgcctctgcatccgcccgccaggagcagcgcccctgcaacccgctctgaagactcgacgcccagagccgcgcgcaaccccgttcgccgccccgccctccgtctcccgtcgcctcgcccctgcgctccgtcagctgcccctccccgaaccttctgcaaattcctattgtttcaagctgcatagaagtctgggattttctgagtgtggattcacaggttagtttccttatttaactctttatcatctcaatattttcaaaactgacgttcaataaattggggaatgtctctttgcagacatatattttcacagacactctctcagttatccaaatattgtcagtttgcactttgtggacaagaagttgtgaatgccttcagtgctgcagtgttgggcctatcttcaggttgtgtttcttctcaagtcaaccaagagcagcctcatgatggttcccctcctctgagagaagatgacaagaatgggcattatgtttttgctgttggagataatctcacatctcgttgtaattttctgccatcagcgtctcttgttaccaatgcaaatctgtttccatggttggttcttattgattcttttctatgcttgcagataagatcaatgcaaaaatgggagaagtctacaggaatcagtggtcttctccgctacgctcctgaaatatttgagcagtctggagtggctagtttgttttcagacattggactttctcctcattcaacatcaattctcatgagtacccttaatgctttgctgatactcccttgtataactgccgcaatgctgctgatggatgtctgcgggagaaggtagaatctgagacaccatgaaaattagtgatgcagttgtggacttttgaacaatagctggagtgatatgaaacattagtgatgtagttgtgggcttttgaactgcttcaagctggagtgatgtcgctgtggtgcttttgtgactgatctagctagctatctgtaaatgatctagttgtgaatgatattataattgtgatgtttttgtgaatatataattgtggtgcttttgtgtttatgtgatggatctataactgtggtat

SEQ ID NO: 199563 - DNA, 1191 bp, Zea Mays
cccaaccctagccgccactacctgctccctctccctagcagccgacagctgccatccagcgccaccaggaaagccgcccaggcgccccgcctctgcatccgcccgccaggagcagcgcccctgcaacccgctctgaagactcgacgcccagagccgcgcgcaaccccgttcgccgccccgccctccgtctcccgtcgcctcgcccctgcgctccgtcagctgcccctccccgaaccttctgcaaattcctattgtttcaagctgcatagaagtctgggattttctgagtgtggattcacagacatatattttcacagacactctctcagttatccaaatattgtcagtttagatggtcggtcagccaccagggcctccccgtccggccgtcgtgcgtccaacagtcgggcaccggcgggcggcggccgctcgcccctgcggcttgggcgctcggccacagccagtgcgggccgtgcggcagtgtccactcgggcctcggccagctgctagctaatcctaatcagtaattacttttgcactttgtggacaagaagttgtgaatgccttcagtgctgcagtgttgggcctatcttcaggttgtgtttcttctcaagtcaaccaagagcagcctcatgatggttcccctcctctgagagaagatgacaagaatgggcattatgtttttgctgttggagataatctcacatctcgttataagatcaatgcaaaaatgggagaagtctacaggaatcagtggtcttctccgctacgctcctgaaatatttgagcagtctggagtggctagtttgttttcagacattggactttctcctcattcaacatcaattctcatgagtacccttaatgctttgctgatactcccttgtataactgccgcaatgctgctgatggatgtctgcgggagaaggtagaatctgagacaccatgaaaattagtgatgcagttgtggacttttgaacaatagctggagtgatatgaaacattagtgatgtagttgtgggcttttgaactgcttcaagctggagtgatgtcgctgtggtgcttttgtgactgatctagctagctatctgtaaatgatctagttgtgaatgatattataattgtgatgtttttgtgaatatataattgtggtgcttttgtgtttatgtgatggatctataactgtggtat

SEQ ID NO: 199564 - DNA, 1562 bp, Zea Mays
cccaaccctagccgccactacctgctccctctccctagcagccgacagctgccatccagcgccaccaggaaagccgcccaggcgccccgcctctgcatccgcccgccaggagcagcgcccctgcaacccgctctgaagactcgacgcccagagccgcgcgcaaccccgttcgccgccccgccctccgtctcccgtcgcctcgcccctgcgctccgtcagctgcccctccccgaaccttctgcaaattcctattgtttcaagctgcatagaagtctgggattttctgagtgtggattcacagacatatattttcacagacactctctcagttatccaaatattgtcagtcagtttagatggtcggtcagccaccagggcctccccgtccggccgtcgtgcgtccaacagtcgggcaccggcgggcggcggccgctcgcccctgcggcttgggcgctcggccacagccagtgcgggccgtgcggcagtgtccactcgggcctcggccagctgctagctaatcctaatcagtaattacttttgcactttgtggacaagaagttgtgaatgccttcagtgctgcagtgttgggcctatcttcaggttgtgtttcttctcaagtcaaccaagagcagcctcatgatggttcccctcctctgagagaagatgacaagaatgggcattatgtttttgctgttggagataatctcacatctcgttataagatcaatgcaaaaatgggagaaggttagtttggatgaccatatattctgaaatagttgatttaactcgattgggcatgccaatacattcaacaaattttgtctataactgaatgtagctgggactacttggtgtaacctgttagcccctttgatcttattgtgcacacagaaaaaagataactaattttatgagataattccttgcctttgtttgcaaaagtactttggccgataagctggtgttgactaatcattgtatgttgattatgtattcaattcagcatggagttcagtttacttgcatactggctaccatgtatacagaatgctagtgtctgctgacacgttcttttttgcttgttttttgtttgctcttctcaaaaatatagtctacaggaatcagtggtcttctccgctacgctcctgaaatatttgagcagtctggagtggctagtttgttttcagacattggactttctcctcattcaacatcaattctcatgagtacccttaatgctttgctgatactcccttgtataactgccgcaatgctgctgatggatgtctgcgggagaaggtagaatctgagacaccatgaaaattagtgatgcagttgtggacttttgaacaatagctggagtgatatgaaacattagtgatgtagttgtgggcttttgaactgcttcaagctggagtgatgtcgctgtggtgcttttgtgactgatctagctagctatctgtaaatgatctagttgtgaatgatattataattgtgatgtttttgtgaatatataattgtggtgcttttgtgtttatgtgatggatctataactgtggtat

SEQ ID NO: 199565 - DNA, 1433 bp, Zea Mays
ccactacctgctccctctccctagcagccgacagctgccatccagcgccaccaggaaagccgcccaggcgccccgcctctgcatccgcccgccaggagcagcgcccctgcaacccgctctgaagactcgacgcccagagccgcgcgcaaccccgttcgccgccccgccctccgtctcccgtcgcctcgcccctgcgctccgtcagctgcccctccccgtcagtttagatggtcggtcagccaccagggcctccccgtccggccgtcgtgcgtccaacagtcgggcaccggcgggcggcggccgctcgcccctgcggcttgggcgctcggccacagccagtgcgggccgtgcggcagtgtccactcgggcctcggccagctgctagctaatcctaatcagtaattacttttgcactttgtggacaagaagttgtgaatgccttcagtgctgcagtgttgggcctatcttcaggttgtgtttcttctcaagtcaaccaagagcagcctcatgatggttcccctcctctgagagaagatgacaagaatgggcattatgtttttgctgttggagataatctcacatctcgttataagatcaatgcaaaaatgggagaaggttagtttggatgaccatatattctgaaatagttgatttaactcgattgggcatgccaatacattcaacaaattttgtctataactgaatgtagctgggactacttggtgtaacctgttagcccctttgatcttattgtgcacacagaaaaaagataactaattttatgagataattccttgcctttgtttgcaaaagtactttggccgataagctggtgttgactaatcattgtatgttgattatgtattcaattcagcatggagttcagtttacttgcatactggctaccatgtatacagaatgctagtgtctgctgacacgttcttttttgcttgttttttgtttgctcttctcaaaaatatagtctacaggaatcagtggtcttctccgctacgctcctgaaatatttgagcagtctggagtggctagtttgttttcagacattggactttctcctcattcaacatcaattctcatgagtacccttaatgctttgctgatactcccttgtataactgccgcaatgctgctgatggatgtctgcgggagaaggtagaatctgagacaccatgaaaattagtgatgcagttgtggacttttgaacaatagctggagtgatatgaaacattagtgatgtagttgtgggcttttgaactgcttcaagctggagtgatgtcgctgtggtgcttttgtgactgatctagctagctatctgtaaatgatctagttgtgaatgatattataattgtgatgtttttgtgaatatataattgtggtgcttttgtgtttatgtgatggatctataactgtggtat

SEQ ID NO: 199566 - DNA, 669 bp, Zea Mays
ccactacctgctccctctccctagcagccgacagctgccatccagcgccaccaggaaagccgcccaggcgccccgcctctgcatccgcccgccaggagcagcgcccctgcaacccgctctgaagactcgacgcccagagccgcgcgcaaccccgttcgccgccccgccctccgtctcccgtcgcctcgcccctgcgctccgtcagctgcccctccccgtctacaggaatcagtggtcttctccgctacgctcctgaaatatttgagcagtctggagtggctagtttgttttcagacattggactttctcctcattcaacatcaattctcatgagtacccttaatgctttgctgatactcccttgtataactgccgcaatgctgctgatggatgtctgcgggagaaggtagaatctgagacaccatgaaaattagtgatgcagttgtggacttttgaacaatagctggagtgatatgaaacattagtgatgtagttgtgggcttttgaactgcttcaagctggagtgatgtcgctgtggtgcttttgtgactgatctagctagctatctgtaaatgatctagttgtgaatgatattataattgtgatgtttttgtgaatatataattgtggtgcttttgtgtttatgtgatggatctataactgtggtat

SEQ ID NO: 199567 - DNA, 1479 bp, Zea Mays
ccactacctgctccctctccctagcagccgacagctgccatccagcgccaccaggaaagccgcccaggcgccccgcctctgcatccgcccgccaggagcagcgcccctgcaacccgctctgaagactcgacgcccagagccgcgcgcaaccccgttcgccgccccgccctccgtctcccgtcgcctcgcccctgcgctccgtcagctgcccctccccgacatatattttcacagacactctctcagttatccaaatattgtcagtcagtttagatggtcggtcagccaccagggcctccccgtccggccgtcgtgcgtccaacagtcgggcaccggcgggcggcggccgctcgcccctgcggcttgggcgctcggccacagccagtgcgggccgtgcggcagtgtccactcgggcctcggccagctgctagctaatcctaatcagtaattacttttgcactttgtggacaagaagttgtgaatgccttcagtgctgcagtgttgggcctatcttcaggttgtgtttcttctcaagtcaaccaagagcagcctcatgatggttcccctcctctgagagaagatgacaagaatgggcattatgtttttgctgttggagataatctcacatctcgttataagatcaatgcaaaaatgggagaaggttagtttggatgaccatatattctgaaatagttgatttaactcgattgggcatgccaatacattcaacaaattttgtctataactgaatgtagctgggactacttggtgtaacctgttagcccctttgatcttattgtgcacacagaaaaaagataactaattttatgagataattccttgcctttgtttgcaaaagtactttggccgataagctggtgttgactaatcattgtatgttgattatgtattcaattcagcatggagttcagtttacttgcatactggctaccatgtatacagaatgctagtgtctgctgacacgttcttttttgcttgttttttgtttgctcttctcaaaaatatagtctacaggaatcagtggtcttctccgctacgctcctgaaatatttgagcagtctggagtggctagtttgttttcagacattggactttctcctcattcaacatcaattctcatgagtacccttaatgctttgctgatactcccttgtataactgccgcaatgctgctgatggatgtctgcgggagaaggtagaatctgagacaccatgaaaattagtgatgcagttgtggacttttgaacaatagctggagtgatatgaaacattagtgatgtagttgtgggcttttgaactgcttcaagctggagtgatgtcgctgtggtgcttttgtgactgatctagctagctatctgtaaatgatctagttgtgaatgatattataattgtgatgtttttgtgaatatataattgtggtgcttttgtgtttatgtgatggatctataactgtggtat

SEQ ID NO: 199568 - DNA, 1244 bp, Zea Mays
ccactacctgctccctctccctagcagccgacagctgccatccagcgccaccaggaaagccgcccaggcgccccgcctctgcatccgcccgccaggagcagcgcccctgcaacccgctctgaagactcgacgcccagagccgcgcgcaaccccgttcgccgccccgccctccgtctcccgtcgcctcgcccctgcgctccgtcagctgcccctccccgtttgcactttgtggacaagaagttgtgaatgccttcagtgctgcagtgttgggcctatcttcaggttgtgtttcttctcaagtcaaccaagagcagcctcatgatggttcccctcctctgagagaagatgacaagaatgggcattatgtttttgctgttggagataatctcacatctcgttataagatcaatgcaaaaatgggagaaggttagtttggatgaccatatattctgaaatagttgatttaactcgattgggcatgccaatacattcaacaaattttgtctataactgaatgtagctgggactacttggtgtaacctgttagcccctttgatcttattgtgcacacagaaaaaagataactaattttatgagataattccttgcctttgtttgcaaaagtactttggccgataagctggtgttgactaatcattgtatgttgattatgtattcaattcagcatggagttcagtttacttgcatactggctaccatgtatacagaatgctagtgtctgctgacacgttcttttttgcttgttttttgtttgctcttctcaaaaatatagtctacaggaatcagtggtcttctccgctacgctcctgaaatatttgagcagtctggagtggctagtttgttttcagacattggactttctcctcattcaacatcaattctcatgagtacccttaatgctttgctgatactcccttgtataactgccgcaatgctgctgatggatgtctgcgggagaaggtagaatctgagacaccatgaaaattagtgatgcagttgtggacttttgaacaatagctggagtgatatgaaacattagtgatgtagttgtgggcttttgaactgcttcaagctggagtgatgtcgctgtggtgcttttgtgactgatctagctagctatctgtaaatgatctagttgtgaatgatattataattgtgatgtttttgtgaatatataattgtggtgcttttgtgtttatgtgatggatctataactgtggtat

SEQ ID NO: 199569 - DNA, 10456 bp, Zea Mays
acagaaaccgcctctcgaacctcctggaggccgtctgccggcgacttggagttggaggtggacgcctcgagcggtcgagcctcgctggaccagtcggtcgccgcggtgtcgtacccgtacgcgtggaagcgggagcatgcgcgatgcgggcgtgtgcgtggggaggagtcgacgacgggtaaccacggcgagcggcgaatgcaaagcccgcccagtctcgtcgttctcctccccttcgcctcccgccaggcacgtctgccagtgcgtggcggccgcggcgcgagtgttggaggtctcgaggggctggtggttcggagcacgtcgaatttgttcgcgtgggctactatagccgccgcatggggcacgaaagctagcgtcgagagctctggatggcgatgctcggcgaatcggccatccaatcaccaagcttcgaacggaccgccggcaaccggcggtgaggaggcgaacgtcgtaaagcttcttctccaggtgtgctttgcattcgcccattcgccctactctcttctcgcgcacgggactgctggtgggattacactatcggagcgggcctgaaaattgatcttgcatttacagaccagcttaatttaatcggttgaggtggattgtgttttatggggtagctcatagctggagtcaatgtttggttcatttataggcccaattaggtgggctgaagctgcataatgtaggacccgtctcctccaggtatcgatgctattagcctattacacgaaccttgtgcatgcttcctcaaattgggtcttgtcggccaggaactaccgtgcgcttttgctgagcaacatccatgttagggcttgttcggtttcatctcaatccatgtggattggaggggattgagcgggttcaaatccatagtaagtcaaaatgtctactaaaattttccaatcccgtccaatccatgtgacgtaggaataaccgaacaaacccttattggttgctatggttcttatggaaaagtaggtaacttgcagattgagttttgggaccagttatagtaaggctcactgttgggatcttcttggctaattgtttgtttggatcttcttgtttttcagtgattaacaattagccaacaaatacttagttggcaaacaattagtcaggtatgtttggagtctaggcacatatgtctttttatttttttaatctattagcacatattagcaagttctaatgtctaataggcaaacaatttgtcagccttccggctaataattaaccaatttattattcatcccttggagtacaaggtgctaaaattagccgacagtgtcagatggatccaaacagggatcacaaaacttgtcactgagagaccacgttaggcctcgcatttggatcaacgactaaacttttatcatctgcaacggcaagaggggaaacaagctaatactccctccatttttatttgacgtttttagtttaattttgtactatttggcgtcaaatataaaaggatggaggcaatacctttttaacagttagcaacttattttagatcatccgaacagggctggtagtgaaagcggagtgcaactaataactcatgtattttaacttagcaacctatttgcacaccatatgcattttctattggatctgtgactgaatcttggaggagcaccagaacaaattgtagatgcatgatggtgttcatggaggagtaaggtcgattagggtttaggggtgtcacttcagtggtcgagttggaacactagtgtccattatacattaattgataaatcaataacataacatatataaactgctattcttatgtggctttaggcccccggcctgaggggggaatagagtgtgtttctatatttattttcctttttgttagaaactcaggacactctaaccagtaatagttcctatgaattattataatattgttaggaactcttttttttatcatgcatggaacataaattatgttagcctttcttagtattcaacttttgtttggcataagctactatacatatatattagaagaaagcttctacaatttttttgtgtaccacatccatatgttttgcatttattggactgtgtatctctatggattccttaatgcggtcatagaaattttcaattttagtgttattttttctcataaataatgcgaagcaaatcacataggtaccagtctaccaatttataatgtttttgtagacataaatgaccgattaacatctcaaggagccaattactgattaaggtaaaatacttttttcttgcgtgagttccaaggaaaccttggtactattgttctctgtcatctcaagtgaattgccatttgttattttgccatgggcatactttgatagccctgagccaaactgtgaaactattatgatgcccggcggctgcactgtacaaagggcaggaataagacagaaaataggaactcttgatctattttgtacttaatccaaagtagatgtttttttctcaaacacataggagagttagagtataagaatacaacacaacctaaaatatagactatgtttgcgctattagcagaataaaatgaccccaccataagaataactatatgagtgaggggacaacctcggattttgggatccatgcctccagggtggccgcccctcttgcccaaggttattaaaaacgttttaaaatgataaaacgttgaaacgcatatgggttaagttttgacttttaaacgacattgggaaaataccaatatattataattttaaacaataacatgaagttaaatactaaaacagaaagtctagtagcttaccaaaacagaggcatagaggatgagtggagtcgactgctgggtgctggccaccgcctgctagtaaacataggcgtggagagagagggcagcacgaagggagaggagaggcgtggatggcgcagacggctcacggtgcggagaaacgactgcacatgccgcggaaggagggtacactcggcacggagggaaagggagagggctcacaaggtgcaacaaacgacgacaacaacacctttaggcagtggcggcgatagagagcagagtagtgcgctactagccattgggcttggtaggggagtagagcaagcgtgtggagactgggttggattggacccaaaagtaactaacaaattggacccaaaagtagctaatggtctaaaacgcatgaaactacgttttacagtttagaacgccaaaacacagtttcaacctctaattagagttttgacaaacgtagttttaataacactgctctgccccctagattatgtgtggggacttcaatatgattaggtttgccagtgaaaagaaatagtagcaacttccgtttggcggaggccgaggcttttaacgatattattaggaggtaccttggcctccttgagttagctctcgttgttagaaaatatacctagtctaacatgagatctaccccaccctcgaacgccttgatagggcctttttaaaccttgcttgggactaggctctccctaacaccactctttcatctttcccttgtaccacttctgatcataccccccttaaggtctgcattttgatgactgctctcatgtctaaagtttttcgtttcaaaattttctggtgttgtcggccgggctacaaggatatggtggctagtgtctagcacctcaactaccccccgatgatgttgttgcctccctatgtgtgtgtctgaaacgggtcaggaaagcggccaaaagtttttttaagcgaaccaagcaaagcttgccgattatatttaaaaaggagaaaccagactgatcaacaaaacaaacaaaaccggacgatcggattaggacatcaacacacaccacaaaacattcgaattgctatggaccgacacgttggattgggacatcaacgcacgccacgccacaagcacagtccgagaaggtagctctgcacggagcaaacaaatgatacacgaagggctaaccaaccaacacgatgtaggagggcacacaaaactgctaaggtcatcattgccaaacaaggatgcagagcatcgagcagcttcgacttcccatggcagcctacaggctaaccaaactaaaacagacagccagccagaagcgaaagctctcaataggccatcgttgtcgacacataacagctacgacttccaatattgaccctcaaagcggccaagagttggagtaagaaaacaagttctattaagctaagagaaattgactgcaagcttgttctctaccttttggactatatggtggaaaatcgcccttatctctttccaagcttactctctgccttgagattattgttgtcctcaaccgtacggtaaaagaaaaaaaattacgttttggcgcctctgcccaaagtcagggcgactattgaagggaatgactgatgagaatacccgttattatttccatgctttcgcctctgcccgcctcaaagctaataaagtcgagatttttgaagaagatggtcgtgagtattataagcatgcttagaaagcctgaatccttcatgacttctacgccgatttattagggacgacccaacctccacctggaacttcgtcctgtctgatctctatccaacatacaatcccgatttatctagcctcgatggctagtttagtagggaagagcttgaggttgttatcatgcacatgaaaaaggattcgagcagggctggatggttttggtcctagtttttactccactacctgggatgttacttcggtggttattcaagatttcttctctaccttctatgattgcaaattgcaatgccgaccttgagaggatcaacacatcttatgttgttctcctgccaaaaaaagattcggccaggtctcctgcggactttcgctctatttgcctgtaaaattgccctatcaaagctattacaaaagttctttctcatagattatagccccttatccccagtctcgtactcttgttgggggcgttcagactagtttcgttcgaaatagaaacattggaaaaattatgcttatgccatggatcttttactctgttgtttcaagcggaaaattcataccattgttctaaaaattgactttcataaggctttcgactctgttagggcttgttcggttagttctcaatccacatggattgagagggattgggtgagtttaaatcccaagtaagtcaaactccttcttaattttttccaatctcattcaatccatgggtaatgggattaacagaacaaaggacaagcttacacttggtaattttaacttggtaatcagtcagttggggcttcaagaaattcctctcaaaggacaagcttacacttgatcaaatatgcaacgtcaccctctactcgaaaaattggattggtgctttgtttcacaggcatggtctgtcaacttcccggccacttttgcactttcgctccctagaggaacctcggatcacattctttggatggtcaatgtccaaattaatgttcccaaaccgccaatcttcagatttgaaaattattagcttcagcttgaagatttccactcaattttccaagattcttggagtcagcctctatttcaaccagacctagctaaaaggctcatggccaagtttaaaagggcatgcaaagcaatccaagtttggtgtaagtctctccctaatttagcaaaattgattggtaaggttaaattggtgattcagctattggacttcattgaggagagtagagacttaactatacaggaatggaacttcaaaggaattcttattctccatctgcatgaccttttatctaaatagcggacctattggaaacaaagaggtcaaattaaatgggtcaccttaggtgatgctggcactaagttctttcacgccaacgctactgtcaagcaccgacacgacctcatttcttcgctaaaggatgacaatggaaatacgactctttctcatacaggcaaaaatttgtacttttcaatgccttcaagaacagattggggacctctcaacaaacatccatggtttttaacttaccttccttgattcagccgattgacaatttgtcagaacttgagcaccccttctcttgtcatgagattgatcagatcattaaaagtctgccgtcaaataaatcgcccggtccagatggatttaatacggactttgtaaaaaagtgctggccggtgattgcccctgacttctatgaattatgcaataaattctttgaaggatctctctgcatgcgcagcattaatggttcatacgtgactctcatccccaaaaacagttctccagactcagttggtgactataggcctatctccctacttaacacaagtgttaaagtgttgacaaaaattttagccaatcgtttgcaacaggtgatcacaaagttagttcatcagaatcaatatggtttcatcaaggccaggtcgatccaggattgcttagcctgggcttttgaatatatttccctttgccacaagtccagaaaagaaatggtcattctaaagctagattttgaaaaggcttttgacaaattggaacatgcaactcttatagaggttttgagacacaaggtgttcggtgacaaatgaattcactgggtttctatgattcttgattccggcaccttagaagttcttttgaatggagttcctgggaaaagatttcactgcaaatgcggagtcagacaaggagatcctctgtccccacttctttttgttcttgcagctgatcttctgcagttaattgttaacaaggcttgtgaatgtggcattctacggctccccctaccgagcaattgtggtccagatttccctattatccaatatgcagatgatactattctcataatggaagcttgccctagacaacttttctttttaaaagcgatgctcaattcttttgctgaatccatagggctacatgttaactatcacaaatctaatatttatccaatcaatgtcacataccagaaaatggaaatccttgcaaatacatttcactgcaaaattggatcaatgccattcacttacttagggcttcccttgggatcacaaagacccaacatgggtgcttttcttcctcttatccagaaaattgaaaaaagactggcgtcaacctctatcttcttatcacaggctgacatgcttcaaatggttaatgcaatcttctcctcacttccaacatactacatgtgcactctcaagctccccaaaacggtgatcaaacatattgacaaactcagacgacattgcctttggagaggtgcagatttaaatgccaagaaaccccaagttgcctggaaatcggcctgcaagccaaaatttcagggggattgggtgtcataaatttggccttacaaaataaatccctgctcatgaaaaatcttcataaattctataacagagccgacatcccatggatcaatataatctgggccaatcattatagccattcactgccctcagataaaccagttggttctttctggtggagagacgtccttaaaactcttgaatcctttaaggccccgtttgtttcgttggaattgaattccattttaataattataatttagacaaaactaattaagttcatatatttatatatttaatatatttgtatattattctaaattatatgaaagagatagttatatactatatttatgttatagcaaaacaagtagaatagtgtgctataagttgtacatcggaaacatagcatgtaaatctatagaatcaatttctatctctcaccccatgaatttgagataggcttatatgataactttggaaagtggtggaatgtcacattctaaaaaattagcatattctattagtaagattccaattcctcaaaatgaaaggaaacaaacgggacctaagggaattgctcgggtggagatcggagatggaaaaacaacgcttctatggcatgacaactgggatggtatttgcaaatcggcacaatatccagaactttggtctttcgcctcatgcaaggacatcaccatccaacaagcaagattggcagcttcgcacgagatgtttcacaccccactgtcagcagatgcctttgttcaatttcaagctttgaatggtcgtttggttaatcttccgcataataatcagagagacaaatggctctgcaatgcttcttctagcctcttttcatcacaaaagatttattctcacttgatgggcaaccagtggactcatcccatcttcacttggctgtggaaatcaaaatgtcaacccaagcacaaggtcttcttctggcttttacttaaggacagattaaatacccgggcatttttaaggcagtgagctatgctactggactcatacacatgtgacaactgtattctacaagctgaagagacaatcacccatctttttttccgatgcaattttgctaggagatgctggtcctttataagaatctccccgtcatggtcaactgatttaatcaacatcattctgaggatcagaagacggtgccaagtaccacatggaaacttgaaactatcatactattaacctggtgcatctggaaaagcagaaacaattgggtgttcaatgagattccgcccacggtggagggatgtcgggacatgttcaaaacagaaatgaatttattgtgtcaccgagttaaaccagtgataggagataaaattaaaacctggattcagtgttctgtaatgtaattttcgttttctttcctgtatctgctctcctctgccctcctgtattgactttttctttttctctttatgcaataaaaatactgtaggtcctccctacagtaatttaagcttaaaaaaaacgggattaaccgtacaaggccttaactggatgagcctaattcagatccttaagcagagaggattcacccagaggtggttataagtgtctggtggcgtgggacaatgtctatattcctaggaatgccggcgacctaggcataaaaaatctgaagactcaaaaacctttgcctccttctcaagttcgctgacaaagccctccatggcccctatgtcccttggagagactggtgcttcgagggtaacgatccggacttggttcccacccctcctcccccacgtacttgggtcgtgtctacaattatgttattgatcacttcagagaccatactcatctatgtcagggatggtagatccacttcttttttgtttgatcggtggctttcaaacgactcgctctattgtaccttcctctccctcttttctcatactacccagcctgacctcgcagtgtctagagtttttgggcataatttcgatttgcacttatgcccagctggttaactaacactgctgcggccgagctagatttgctgcctgctctcctgtcacaggttctttggtcagcgtgatgctcgaaggatggtggcttcaaggaaacccttcttagtgaagcttattcctttcgcaggtctggaaactaaagttgtcgaataattttgatgtttctctagttgtttttcaaagactggttgaacatgcggatgagtttgtttaacaataatatcctccccgaccctacatgcccaatgtggcgcgacgactgaggatagattccacatcttcctggagtgtgcccgtgtcagaaacgtttggcgatctctctgcctccacattgctaggttggatgggtccctcctacttcgtacatgtttgccctctgatgttgtccccaccgacatccatacgcaagttctttgtgccatcttctggaggatttaggagaataggaataaccatgtgtttaggggagaagatcatcatgtgcatgtcattattgcgaggggtagttagtgatcttaacatttagctccatcgtttgtgtgcgtgaaggaacttgtcacacaacggtgtgcacacatgcatgtaacctcaaattaaaactgcttgtcctctcaatagcattctgcttgaatgtttccaatcaatcaataaaaggtgggcatcacccctcgttattctaaaaaataattcaataccctcctatctccatgcaacccgataaagacttgttgatatttttctaagatgttttttaactgaaaaaaaatgaaaagttgcaataggattggtgccactacctatattcaataccctcctctctggtattctttgagtcgttgttctgacgattctacctttactaattatttcaaagatttggtcgaatggtttccacaagttgtactataatttattaatggatgaggcaataactgggtcacaacaaaattgcaatgacgggctaaaaattaatcctttatatataatgtttacataccttaagcttgccatgttattatgcttcatttattgttagcaaatattttctcataacactgtcatagttcacatagatagttgaacactgcgactggg

SEQ ID NO: 199570 - DNA, 3792 bp, Zea Mays
cccactgccgagggcccaggccgctcgtcgtcgtcgtcgacctcctccacttgggctgcatgaattgacgtcacagttccatggtcggcaaacgaaagctgcctgagggagagtgttcaatcaaaagtgacccacctgtaaaccataggggttaaaaaaaagaaagaaaagtagggagaggccttgacgacgctgacagtgagagactacaatgaatggtattgataaagaatagtgtagatgtggagtagatctgcatcgcggcgcaggaacgaccgaacgagtggctcccgtgcatcctgctcccagccaaacgcccaaacccatccgtcttcgggactagggtcccggcatccatcagtgcaagggcaaggcagttggccgccgcgcccccgccccgcgggtctcccctcctgctccggtccagggcgccccggccccccctcgtccgaatcccgtcggtggtgagccgccgccgggtgtggcccgcgagctgcgacgcgccgacgatgctgccaaacggagaagctccctccggatccatgccgccggtgcctgccgccgacgcgaacacctctaattcagatgacactagatttgatgcgtcacagtatgccttttttggcaacaatgtgctggaggagattgaactaggcggattcgaagatgataacagcagtaatgctgctttcgctggactcgatgatttagagcgcccactttcttctcaggggattgcactagaggctgaagatagttcattttcagatcttgatgatcttgcaaatacattctcaaaggttctgctgctgctgactgggcgccggaatttgaatccccactctggtccgatcagcatgtgctagttgctaaccaaggaccgaatggcaatggctggtggtctccacagcatcattcttctctccttgctgattccagattgcacagaacatcctcatcccctcagcaacaggaacaacacaatcatgatgcacctattcttggaccaaggccatctcctttgcaccggacatcttcatacccgcaaaaggagcctcagtacaacccagctgaagtcattccaaatgcaccatacatgtcaaactatctacctggtgggccacccaattcagtgcctcgacaaccacatcagatgaacatgccatctttcaatgaatttcagatgcatatgtctgcgcaaagtgagaccccattctcccagtttcctcgtggagggacacctccagagccattatttggtggaaaccggggtcatatgatttcaacaggcttctcaactaacagcagtggacaacgagaccatctgctgaataatgggcagtttcatggggaaactgccagcatcatgccaaatttgctgccaaaccatctacaacgtccgaatacattcatgccccctcaattgttgacagtacgccaacagcatggcatgctcccaattcagcaatcttcaaagcagtcatcaagaacacagacacacatgtttggcccccagcatccaccacaaatgatgaataggtttgataattttgggatgcctgagttcagtgatccaagagcaagatcatcaatgcaccatggcaggcaaggtcaacattttcctctccatggctctgagtttggtattatgaagatgggtaatgggaggtcaaggtttagatccaagtatatgtccactgaagaacttgaaaacattttaagaatacagcatgccgccactcatataaatgatccatacatcgatgattattaccatcaagcttgtctggccagcagatatgtggatgcaaggtcgaagcaccgcttctgcccaaccttgattcgtgatccatcatcctgtacacggagtaaggatgagccacatgcataccttaaggttgatgcccttgggagactgccattttcttctgtacggagaccgcgtccactccttgacgttgagccagcttctgcaactgatgatgacaccgttatttcaaagcctcttgatcaggaacctctgctagctgctaggatcacgattgaggatggactctccctattacttgacatagacgatattgaccgcttgcttcagtttagccagcagcaagatggtggtttcgaacttaaaaatagaaggcaatctctacttggtcagctggcagaatcgctgcagttggttgatccactaggtgcaaataaaaacacacatctgtccgcaaatgatgatttggtatttcttcgcattgtttctctacccaagggccggaaactactttcacgctatatcaacctcatggtacctggtagcgatcttgcaaggatagtttgcatggcagtattcaggcacctgaggtttgtgtttggaaatctgccctctgatgacggcgcagctgagacagtaactaaactggctagcgctgtagcatcatgcattcgcgggatggacttaagtggcctcagtgcttgtctcgcagcaattgtgtgctcgtctgagcacccaccccttcggccccttggccatgctgctggcgatggtgccactgtcgtcataaaggctgtcctggatagagcaacagagctcctcaccgagcagcctgccgcgccagactatggcgctccaaaccgagccttgtggcaagcgtcgttcaatgccttctttgggctgctcactaagtactgcatgagtaagtttgatagcatggttcacacgatgcacaagctcggtgctgctgctgcaacagcgatacgcaaggaacttccggttgagcttctgcgcgccagccttcctcacacggatgagcagcagcgcagactactgctcgagttcgcccagcggaccgtgcccgtctctggccatggctccgacgggtgacggacgggcgggtggcggctggtggaaccatggcatctgaaacaataccagcttaaggtggtcagcgaatattggtgcgctagatgcggtattttattctatcatacgcagacctgcccaatgaatcgagcgttccttgagctgcagttcagatgggcatgccggcgttaagtggatgtatgtcccaggtttggatccgtctgtttaggctaatagtattctctctgcacggttgcatcgcatcaccactggatagattagcatgattagcttccgtctgcagggctgtgtttcgttggctctgggtgggaacggaacccccctgcacgttccttgaaggcaattgcaagaaaatactgcgagctgttggtgtttcggtttgcagtgtttgtttgtagtggcgtcaaggcttccaaggttctcatctcatcactccggacgggtgccaggaagatgtggtttaacacatgtataaactagcaaatgcttggaaggttgatatttggttctgtagccagccattcgaagattgttgggtggggggttttgtttcctgttatattcgcaactgaatacattatcttgcgaagctgttcagtctgtaacgagttcattgggaattccactatatatccttgttatggatggtcaggagctttgtatttttgtgattctgggtattacccttgtgttccataaaggacgctttcttcctcgctcctgaatccattgcatcgtgtcctgtccgaatgggtgatctacacttttagctttgcctttgccctctaaagataatagtcaaattaaaggactggattcaagaatcatcattttctaaaagtcgatttggaaaacaactctagacctgtttttagtggctttcgaatggaactgtaaaaacatatatcgaaaaa

SEQ ID NO: 199571 - DNA, 2798 bp, Zea Mays
cccaagatcaccaccctctttgccaacgaacgaacgaacaaggcgcaccaaatgtccaaaccttaaaaccgacggaaagagaagacccacatctcaccgttcactctccctctctcctccccctcctcccagatcccgatccgcggctgcctccggcggatccagccgcttcctcccgccgcagatccgccgcggccgccatggagaagccatgctctctcctggtccacttcgacaagggctcggccgcgatggcgaacgagatcaaggcggatctggagggcagcgatggccccgccaaggccgacgccatgcgccgcgccatctcgctcctcctaaacggcgagacgctcccgcagctcttcatcaccatcgtccgctacgtgctcccctccgaggaccacaccgtgcagaagctcctcctcctctacctcgagatcatcgaccgccgggatccggccggccgcgccctgccggagatgatcctcatctgccagaacctccgcaacaacctgcagagtcccaacgagtacatccgcggcgtcacgctgcggttcctctgcaggctctccgagcccgaggtgctcgagccgctcgtgccgtccgtgcttgcgaacctcgagcacaggcaccacttcatcaggagacacgctgtctcctccgtatccgcgatctaccgcctcccgcatggggaccagctcatcccggacgcgccggagctcgtcgagcggttcctcgcatctgagcaggacgcgtccgcgcggaggaacgcattcctcatgctctgtgcatgtgcacaggaccgcgctgtcgcctacctgctctcaaacgccgaccgggttgctgagtggcccgatctactgcagatggccgttgtggatctcatccgcaaggtctgccgatcccagaaccgtgccaacaagggaaggtatatcaccatcattacctcgctgctctccacgcccagcacagcggttgtttatgaatgtgctggcgcgctggtgtcactctcttcagcacccacggcagtgcgagccgctgccaacacctactgccagttgctctcttcgcagagtgacaacaatgtgaagctcattctactggatcgcctcaacgagctgcacactttgcaccgggatgtcatggtgggggtggtaatggatgtgcttcgtgcactggccagccccaacttagatgtcaagagaaaggttcttgatttagttctcgatctgctcaccccgcgtaatgttgaggaggtggtgctttatctcaagaaggaggtggtcaagacgcaagctggagacctcgagaagggtggcgagtaccgtcagatgctggtgcaggccatccatgcctgtgctgttgagtactcagaggtggctgggtctgtagtacacctccttatggacttccttggagacaccaatgttgctgcagctgttgatgttgttctgtttgtacgtgagatcattgagaccaatccaaagctgcgtgtttccatgatccagaggctaattgatacattctaccagattcgagcatcccgggtctgctcatgtgctctctggattcttggggagtactccctctctctatcagaggttgaaagtgccattgctaccattaaacaatgtcttggggatctaccattctacactgtatctgatgaaggggaggcaactgattctgctaagccagccaaggcagtggtgaactctgtcactgtatcttccaggcggcctgttgttcttgcagatggcacttatgccacacaaagcgctgctactgagaccattttgactccatcagttgctcctgggtcattggcatcaaccctgaacctcagatcactcattctatcaggtgatttctttctggctgctgttgttgcatgtaccctggccaagcttgtgctgaggctggaagaagtgcagccatctaaggttgagtcaaacaaggcttgcactggagcattgctgatcatgacatcgattctgcagctgggccagtcttcttaccttccccacccaattgataatgattcatatgataggattgtgctgtgtgtgagattgctttgcaatactggtgatgatgtcaggaagatttggttgcagtcatgcagacagagctttgcgaaaatgcttgctgagaagcagttcagggagacagaggagatgaaggcaaaggcacagatctctcatgcccagccagatgatcttattgatttttaccacctgaagagcaggaagggcatgagccagcttgagttggaagatgaggtgcatgatgatttgaaggctgcaactggtgggtttaccaaggatgcagatgacgcaaacaagctcaaccgcattcttcaattgactgggttcagtgatcctgtgtatgctgaagcatttgtaacagttcaccattatgacattgtacttgatgttactgtaattaatcgcacaaaggagacacttcagaacttgtgcttggaattggctacaatgggagacctcaaacttgttgaccgccctcagaactacaccttggctcctgagtctagcaaacagatccgcgctaatatcaaggtttcatcaacagagactggagttatatttggcaacatagtttacgagacttcaaatgtgatggaacgatcagtggttgtcctaaatgatattcacatcgacatcatggattacatctcacctgctacctgtgctgatgttactttccggaacatgtgggcagaatttgaatgggaaaataagggttactgtgctaaataggacaaatggtggtctctg

SEQ ID NO: 199572 - DNA, 1469 bp, Zea Mays
ctttttcaatggaacgagggaaggcccccagaatatcatgtcggccggggccatctccaccgtacgtccactccatccgcacccagtctcggcgcctcaccccccaaaatcctctcgcggtcgcggatcgctcttccctccccctcttatctctttctcttctcccattccttccttccactcccccgcccagcgccaccatggcctcctccgtcgcggtgtccctccgcgccctcgctgccgccccgctccccaagtccagccccgccacttcctgccccttcttcgtgctccttgcgccggcgctgccccgacgcctgctccgcctccgctccgcacgccgcctgccgctcgccccgctcgccgcctccgattccgccttcgagtcctccgtcggagttaactacgcggagcccgacgactcggagaaggataaggaggtggagttgttcggatcgggtgacgacgagggggcgggtgagttggtggatgaccattccgtagaggtctcagccgctgtcgaggacgaggtggaggaggaggtcggggagtacgttgagccgcccgaggaggccaaggtctacgtcggaaacctgccctacgacgtcgacagcgagcgcctcgctcagctcttcgaccaggccggcgtcgtcgaggtcgcagaggtcatttacaacagagaaacagatcaaagtcgtgggtttgggtttgtcactatgagcactgtcgaggaggctgagaaggctgtggagatgttccatcgctatgatgtcaatggaaggcttctgactgtaaataaagcagctcctagaggctctcgtgtggacagacctcccagacaatctgggccttctctcagaatttatgttggcaacctgccttggcaagtggatgattctagattggtggagttgttcagcgagcatggtaaagtagttgatgccagagttgtctatgaccgagaaactgggcgttcgcggggatttggttttgttactatggcatcgcaggacgaattggatgatgctattgctgcccttgatggacagagtttggatggccgtgccttgcgggtgaatgttgcagaggagcggccacggcgaggtttctaatgagtttggctcttctgctttcttggcgagatcatgttcacgaaacgtacacttgtagctgccagccggcggtggtgccaaaatacacaaacaccgtatcaatgacacatgggccacatgctagaggaagctagccaatggctcgatgatgtacaacatttatagagaagggatcccatttaggacttgttcggttattttcaatctatatggattagagatgattgatacggattgaaggggattttgacttactggggattgaaaccccctcaatccatatggattaggatagaaccgaacaagtccttaatgtcattttgttgtggctagctatcacacctaaatcgattttat

SEQ ID NO: 199573 - DNA, 1311 bp, Zea Mays
gtacgtccactccatccgcacccagtctcggcgcctcaccccccaaaatcctctcgcggtcgcggatcgctcttccctccccctcttatctctttctcttctcccattccttccttccactcccccgcccagcgccaaggtctacgtcggaaacctgccctacgacgtcgacagcgagcgcctcgctcagctcttcgaccaggccggcgtcgtcgaggtcgcagaggtcatttacaacagagaaacagatcaaagtcgtgggtttgggtttgtcactatgagcactgtcgaggaggctgagaaggctgtggagatgttccatcgctatgatgtcaatggaaggcttctgactgtaaataaagcagctcctagaggctctcgtgtggacagacctcccagacaatctgggccttctctcagaatttatgttggcaacctgccttggcaagtggatgattctagattggtggagttgttcagcgagcatggtaaagtagttgatgccagagttgtctatgaccgagaaactgggcgttcgcggggatttggttttgttactatggcatcgcaggacgaattggatgatgctattgctgcccttgatggacagagtttggatggccgtgccttgcgggtgaatgttgcagaggagcggccacggcgaggtttctaatgaggttgtatcgggtggactgcacgcttgttccatgggttgggagcatcatagcatgttctgatactggtttagacctgccattctctttccttgtgttgctgagcttctatcatcgtgtcttattgtgaagagggaactcttcactaatattttgttatgtacttgttgtgttcaaaagttcttgtactgtaggctactgttatgatgcgcctagctcaatttgtcgatgcaattcgaaattttgtctaacatctgttcatgcaaaatactgtgtatgtgcagtttggctcttctgctttcttggcgagatcatgttcacgaaacgtacacttgtagctgccagccggcggtggtgccaaaatacacaaacaccgtatcaatgacacatgggccacatgctagaggaagctagccaatggctcgatgatgtacaacatttatagagaagggatcccatttaggacttgttcggttattttcaatctatatggattagagatgattgatacggattgaaggggattttgacttactggggattgaaaccccctcaatccatatggattaggatagaaccgaacaagtccttaatgtcattttgttgtggctagctatcacacctaaatcgattttat

SEQ ID NO: 199574 - DNA, 967 bp, Zea Mays
gatataaagaatccaatgtgcagtgacctccattattccaaatccaacttgttggtgcctataaatgcacaccataccacaacccacagcaatgcacaacacttgcagactctccctccacacagagaagcaaagaaaccacaccacagtcgtaggggaagggagaggagggagggtggcttctgctgggttgccatgtgctatgaggtagagaacgggatgcagccaaggatgacttgccggctcctggaacctggaggcgtctcagcttgctgtgctgtggcttagaacttagtcggcaagtctgtccttggctacacctagttctcttcctctcgtgtatggccctcaagcaccgtcaagagatctaggacctgcattcatatatcatcagcccactccagaggaaacgtaagggcaaacgaaaaggccaaatcgaagtacagcaggcgctgcacgacaagattcctcgaggctcctggagaagaagctttacgacgttcgcctcctcaccgccggttgccggcggtccgttcgaagcttggtgattggatggccgattcgccgagcatcgccatccagagctctcgacgctagctttcgtgccccatgcggcggctatagtagcccacgcgaacaaattcgacgtgctccgaaccaccagcccctcgagacctccaacactcgcgccgcggccgccacgcactggcagacgtgcctggcgggaggcgaaggggaggagaacgacgagactgggcgggctttgcattcgccgctcgccgtggttacccgtcgtcgactcctccccacgcacacgcccgcatcgcgcatgctcccgcttccacgcgtacgggtacgacaccgcggcgaccgactggtccagcgaggctcgaccgctcgaggcgtccacctccaactccaagtcgccggcagacggcctccaggaggttcgagaggcggtttctgt

SEQ ID NO: 199575 - DNA, 1836 bp, Zea Mays
aagaaacgcccccaatctgcgcgagtttctttccctcgtgggcaatctgcagcatgagtatgctggaagtgattctgtactactggatgggcctgaggtaaggcaggagctgatttcgctgctcagatatctgaagcaatgcatgtatttctcgaagaagccatacaacgtgtttttggagtatggtggttatggccagaatgatgttcttataaagaaatctaaggcgaggatcttgaagcctgccttcacaattgtctgtgacagaagtagccaatgctttctcctcttcattaggggggctatcagtgttaaggagcggttgacagcagcaactggcgcagaggttccatttcatcacgttgtggtccaggaaggtcaagtctccaacctagtgttgggttacgctcactgtggaatggttgtagcagctcgatggattgcaaaacaagccattccttgcctgagtaaagcaatcgagcaattcccagaatatgaggttaagatcattggacattcaatgggagctgggattgcaacaatactaacatacatccttcgcgagaatgagaagctggcatcatccacttgtattgcatttgggccagctgcttgcatgacatgggacttggctgagtcgggtaaagactttgttacctccatcgttaacagaaatgacctagtgccatcacttggcctagtttctgctgccaagcttcgggcagaggttatgtcatcgtcttgggcacatgaccttcgcaaacaaattcagcagactagattcttaggttttgtgaaccgttctgtgagtttcataaggtctcatgtgccctttgtctctgatccaagatcgaaggttgtggatgttgatatgatgcaatctcagagtcctgaggctgggagtaagccttcagcagatacccatgctgtggtgaagaaacgccctgcactggcttgctggtcatgtgtggctgcacccaaacagagtatggaatcgtcaatacaaattgagggcacgaaagttcaaaccgacactggtgtccaaactgagaaaactaccgaagcggcaactgctgcgctagtctcaatccatcttggtgaactaaaccttcaagaaccagataacagagaggaaaagggatcagcattgacagaaacagatgaagacgccatggagcttctggagtccttgaccgacgagaagcagttgccatcatcgtcaagctctggtcaagagccacaccagctgtaccccccagggaaaatactccacatggttggattgccagcagcggaagaggcaaccacgagtcagcaaggagcccaggaggaggtcatcgccctatatgagacaccccgacatttgtacagtaagattcgcctggcgaggtccatgataggagaacattacatgcccaagtacatcaagacaatggagcagttgatagacaagcttgcagaggacatcgacgaccagctggactccttgtagcatcaaaagtgtgtacaggataattattgtacagatcatgaaaaggaaagtcattctttcagattgcttgtgcgtaattgtagttggtttaagttttgtgatggcgatctagaagatgtacaacactgccagttgggctctggtctgtttattcttggtcattccactttggcaggcacctcaagaaaagctcaaagagctgcgcctggtgatgatctctgtaatttcaacagcactagttttctttagctgtgaatatttaatatattaaccattaatttgtgggcatcatctctttcaggagactagggatggtagtctagctttcgtagccggggtatgga

SEQ ID NO: 199576 - DNA, 1420 bp, Zea Mays
cactcttgcagtaaagtatcagcaacggactttaggattctctagtgctgagcgggaatctgaagaaaatagattgcctaagtactgagatcattggacattcaatgggagctgggattgcaacaatactaacatacatccttcgcgagaatgagaagctggcatcatccacttgtattgcatttgggccagctgcttgcatgacatgggacttggctgagtcgggtaaagactttgttacctccatcgttaacagaaatgacctagtgccatcacttggcctagtttctgctgccaagcttcgggcagaggttatgtcatcgtcttgggcacatgaccttcgcaaacaaattcagcagactagattcttaggttttgtgaaccgttctgtgagtttcataaggtctcatgtgccctttgtctctgatccaagatcgaaggttgtggatgttgatatgatgcaatctcagagtcctgaggctgggagtaagccttcagcagatacccatgctgtggtgaagaaacgccctgcactggcttgctggtcatgtgtggctgcacccaaacagagtatggaatcgtcaatacaaattgagggcacgaaagttcaaaccgacactggtgtccaaactgagaaaactaccgaagcggcaactgctgcgctagtctcaatccatcttggtgaactaaaccttcaagaaccagataacagagaggaaaagggatcagcattgacagaaacagatgaagacgccatggagcttctggagtccttgaccgacgagaagcagttgccatcatcgtcaagctctggtcaagagccacaccagctgtaccccccagggaaaatactccacatggttggattgccagcagcggaagaggcaaccacgagtcagcaaggagcccaggaggaggtcatcgccctatatgagacaccccgacatttgtacagtaagattcgcctggcgaggtccatgataggagaacattacatgcccaagtacatcaagacaatggagcagttgatagacaagcttgcagaggacatcgacgaccagctggactccttgtagcatcaaaagtgtgtacaggataattattgtacagatcatgaaaaggaaagtcattctttcagattgcttgtgcgtaattgtagttggtttaagttttgtgatggcgatctagaagatgtacaacactgccagttgggctctggtctgtttattcttggtcattccactttggcaggcacctcaagaaaagctcaaagagctgcgcctggtgatgatctctgtaatttcaacagcactagttttctttagctgtgaatatttaatatattaaccattaatttgtgggcatcatctctttcaggagactagggatggtagtctagctttcgtagccggggtatgga

SEQ ID NO: 199577 - DNA, 2948 bp, Zea Mays
tactcttctcggcttctccaagcgcgaacaagagccatgggcgcgagccgtctggagcaaaccgatgctctcttcaggaaaaaccttgtaatccagaggcgcgcctgcaagacgaactgctgcctgatcctgttcccgctggccctctgctccgtcatcggcggcttacagatcgccatcaaccacgcgtcgtcgcaggggggaggaggaggaggaggaggagggggtgcgacccctgccatccgtctcgactgcagctgcagcaacgtcagcgtagacgagaacgcgctcggaggcatacaatgcccggacgagtgcccgttgcctcgagcgcccaaatggcctcctgtcgtcaggaccccgtcgcccgagtaccgggcggtccaggacgggctcttcccgttcgctgatctcccggacgcttcgtgcagagccgaagggtcttgcccggcgacattccttgtcaccggcgacaaccactctttcgtagggagtgtgatagataacattcttcctacccatagttcttcggtgaacctgtcggccgatgtttctgcattgtctgattttgttctggctgacgatggagaatttcaccaaagttttcttcagaacaagtgctctcctaacttgacactctcttatccagttcaatacggcaataatgttgtgagtcaagtctatgatttcttaagctctgaccagagcaacttcaacctgatcatctcatataactcgacaaacgactacggtgtttacgatgaatcagaacaatctatccctgtgattaatcaagcaggcccagtgcagaaacctaatttggttcaagtcccacgattagctaatatggcctcaaatgcataccttcatttaaagggcaatggtttgaagatgccatttgaattcgtaaaagaaatgcctagagcagctatacctatacacgatggccagtttgatttggctccatacatagggcagctaccttttgtatggaccatggagcttctttttccggtaattttgacaaaccttgtgtacgagagacagaataagctaaggataatgatgaagatgcatggccttggagatctaccgtattggactatatcctattgctattttctactgttgtcgctgctctatgtgctgtccttcgtgctgtttggttctgcccttggtttaacattcttccgccagaacaactacggcatgcagtttatattctattttgcttacatgaacttgcaaatttcatttgcatttcttatgacaacatacttctctagtgtgaggacagctactgtgacaggatatctatacatatttgtgtctggccttctgtcacaattcatgttcagaccctatgttgaagatagtaacatctcaagtgtgcttaccattatggcagtagaatggctcctgttccttttatttgcgttctatctggatcacttccgttcctacaaagacggaatcaggaaagcagcagcgcttgttcgctcccgcatacatgggaaccattctgaagctgctcagcagcaaaacgtacagcttcaggagttcagagcttccatccaactggagagaacagacgtgctgaaagagagagagatagttgaactgatatcaaaagaatccgacagaagctattcagtcatatgcgacaaccttgggaaggtgtaccgtggaaaagatggaaatgcagataaaattgcagtcagaggaatatccatttccatgtcacgcggtcagtgcttcggcgttcttggcccaaatggcgcgggaaagaccactcttattaacatgctgaccggattttgtaaacctacctctggcaccgcgtacgtccaagggatggacatacgcttcgatatggacagaatatatacaggaattggtgtttgtccacaggatgacttgctatgggaaagcctgactggtcgtgagcatctgttgttctatggaaggcttaagaaactgaaggctgcagcactattcgaggccattgaacaatccttgagaagcatgcacttgcttgccggtggcgttgctgacaaactcgtgggaaaatacagtggcggcatgaagcgtcgtctcagcgttgcgatctctctaatcggtgatcccaaggttgtttatatggatgaaccaagttctggcctggacccagcgtcgaggaaaaacctgtggaaggctgtcaagtctgcaaaacaggatcggacaatagttctcacaacgcattcgatggaagaggctgacgttttgtgcgaccggatcgggatcatcgcgaatggtagcttgcagtgcattggaagctctaaggagctgaaagacaggtacggaggctcatgcctgctcacagtaacaactccggccggcggccaggaggaggaggaggtcgagaggctggtgcagtccatctcgccggcggcgaacagggtgtaccgcgtctcgggaacacagaagttcgagatgccgaagcgggggatgaagatctccgcggttttccaggccatggagcaggcgaagagcagcctggacatcgtcgcctggggcctggctgacaccacgctggaagacgtcttcgttcgagtggccaagcagactgacatgtccactgtgacctgactgaatacctcaggtgatgaactcatgaacgcgagacgcgacacagatttgagcagcctggacttttgcaaaacctcggtaaatgcggtcaggcgcaagcaagcggatcccacggcacgatcgagcgtgcgcgtcaggagcatctgccgcgtgtttcatttccacgcgtgagctagctgctagtagacattgcacctgcacaaccctatagaaaaaaccaatggattcgagttgagtcattttcactgtgtatcattataaaagtttataattattgtgagaatgtctacattacagaagctgtcgcagaacctcccaag

SEQ ID NO: 199578 - DNA, 3225 bp, Zea Mays
atactcttctcggcttctccaagcgcgaacaagagccatgggcgcgagccgtctggagcaaaccgatgctctcttcaggaaaaaccttgtaatccagaggcgcgcctgcaagacgaactgctgcctgatcctgttcccgctggccctctgctccgtcatcggcggcttacagatcgccatcaaccacgcgtcgtcgcaggggggaggaggaggaggaggaggagggggtgcgacccctgccatccgtctcgactgcagctgcagcaacgtcagcgtagacgagaacgcgctcggaggcatacaatgcccggacgagtgcccgttgcctcgagcgcccaaatggcctcctgtcgtcaggaccccgtcgcccgagtaccgggcggtccaggacgggctcttcccgttcgctgatctcccggacgcttcgtgcagagccgaagggtcttgcccggcgacattccttgtcaccggcgacaaccactctttcgtagggagtgtgatagataacattcttcctacccatagttcttcggtgaacctgtcggccgatgtttctgcattgtctgattttgttctggctgacgatggagaatttcaccaaagttttcttcagaacaagtgctctcctaacttgacactctcttatccagttcaatacggcaataatgttgtgagtcaagacgtacgatgcacagaaggactagttctctggcgggacagttcacggctaattaatgatgagttatatggaggttattaccaaggaaataggaaccataagatcgatgaaattgctgcagtctatgatttcttaagctctgaccagagcaacttcaacctgatcatctcatataactcgacaaacgactacggtgtttacgatgaatcagaacaatctatccctgtgattaatcaagcaggcccagtgcagaaacctaatttggttcaagtcccacgattagctaatatggcctcaaatgcataccttcatttaaagggcaatggtttgaagatgccatttgaattcgtaaaagaaatgcctagagcagctatacctatacacgatggccagtttgatttggctccatacatagggcagctaccttttgtatggaccatggagcttctttttccggtaattttgacaaaccttgtgtacgagagacagaataagctaaggataatgatgaagatgcatggccttggagatctaccgtattggactatatcctattgctattttctactgttgtcgctgctctatgtgctgtccttcgtgctgtttggttctgcccttggtttaacattcttccgccagaacaactacggcatgcagtttatattctattttgcttacatgaacttgcaaatttcatttgcatttcttatgacaacatacttctctagtgtgaggacagctactgtgacaggatatctatacatatttgtgtctggccttctgtcacaattcatgttcagaccctatgttgaagatagtaacatctcaagaatctggatcactcttatggaacttctacctgcattttccttataccgcattgtctacgaattctcacgatttgcacaagcacagcctgagaattacatggcctcctcagggattcagtgggctgatatgactaatccagaaagtggattggcaggtgtgcttaccattatggcagtagaatggctcctgttccttttatttgcgttctatctggatcacttccgttcctacaaagacggaatcaggaaagcagcagcgcttgttcgctcccgcatacatgggaaccattctgaagctgctcagcagcaaaacgtacagcttcaggagttcagagcttccatccaactggagagaacagacgtgctgaaagagagagagatagttgaactgatatcaaaagaatccgacagaagctattcagtcatatgcgacaaccttgggaaggtgtaccgtggaaaagatggaaatgcagataaaattgcagtcagaggaatatccatttccatgtcacgcggtcagtgcttcggcgttcttggcccaaatggcgcgggaaagaccactcttattaacatgctgaccggattttgtaaacctacctctggcaccgcgtacgtccaagggatggacatacgcttcgatatggacagaatatatacaggaattggtgtttgtccacaggatgacttgctatgggaaagcctgactggtcgtgagcatctgttgttctatggaaggcttaagaaactgaaggctgcagcactattcgaggccattgaacaatccttgagaagcatgcacttgcttgccggtggcgttgctgacaaactcgtgggaaaatacagtggcggcatgaagcgtcgtctcagcgttgcgatctctctaatcggtgatcccaaggttgtttatatggatgaaccaagttctggcctggacccagcgtcgaggaaaaacctgtggaaggctgtcaagtctgcaaaacaggatcggacaatagttctcacaacgcattcgatggaagaggctgacgttttgtgcgaccggatcgggatcatcgcgaatggtagcttgcagtgcattggaagctctaaggagctgaaagacaggtacggaggctcatgcctgctcacagtaacaactccggccggcggccaggaggaggaggaggtcgagaggctggtgcagtccatctcgccggcggcgaacagggtgtaccgcgtctcgggaacacagaagttcgagatgccgaagcgggggatgaagatctccgcggttttccaggccatggagcaggcgaagagcagcctggacatcgtcgcctggggcctggctgacaccacgctggaagacgtcttcgttcgagtggccaagcagactgacatgtccactgtgacctgactgaatacctcaggtgatgaactcatgaacgcgagacgcgacacagatttgagcagcctggacttttgcaaaacctcggtaaatgcggtcaggcgcaagcaagcggatcccacggcacgatcgagcgtgcgcgtcaggagcatctgccgcgtgtttcatttccacgcgtgagctagctgctagtagacattgcacctgcacaaccctatagaaaaaaccaatggattcgagttgagtcattttcactgtgtatcattataaaagtttataattattgtgagaatgtctacattacagaagctgtcgcagaacctcccaag

SEQ ID NO: 199579 - DNA, 2326 bp, Zea Mays
agaaggactagttctctggcgggacagttcacggctaattaatgatgagttatatggaggttattaccaaggaaataggaaccataagatcgatgaaattgctgcagtctatgatttcttaagctctgaccagagcaacttcaacctgatcatctcatataactcgacaaacgactacggtgtttacgatgaatcagaacaatctatccctgtgattaatcaagcaggcccagtgcagaaacctaatttggttcaagtcccacgattagctaatatggcctcaaatgcataccttcatttaaagggcaatggtttgaagatgccatttgaattcgtaaaagaaatgcctagagcagctatacctatacacgatggccagtttgatttggctccatacatagggcagctaccttttgtatggaccatggagcttctttttccggtaattttgacaaaccttgtgtacgagagacagaataagctaaggataatgatgaagatgcatggccttggagatctaccgtattggactatatcctattgctattttctactgttgtcgctgctctatgtgctgtccttcgtgctgtttggttctgcccttggtttaacattcttccgccagaacaactacggcatgcagtttatattctattttgcttacatgaacttgcaaatttcatttgcatttcttatgacaacatacttctctagtgtgaggacagctactgtgacaggatatctatacatatttgtgtctggccttctgtcacaattcatgttcagaccctatgttgaagatagtaacatctcaagaatctggatcactcttatggaacttctacctgcattttccttataccgcattgtctacgaattctcacgatttgcacaagcacagcctgagaattacatggcctcctcagggattcagtgggctgatatgactaatccagaaagtggattggcaggtgtgcttaccattatggcagtagaatggctcctgttccttttatttgcgttctatctggatcacttccgttcctacaaagacggaatcaggaaagcagcagcgcttgttcgctcccgcatacatgggaaccattctgaagctgctcagcagcaaaacgtacagcttcaggagttcagagcttccatccaactggagagaacagacgtgctgaaagagagagagatagttgaactgatatcaaaagaatccgacagaagctattcagtcatatgcgacaaccttgggaaggtgtaccgtggaaaagatggaaatgcagataaaattgcagtcagaggaatatccatttccatgtcacgcggtcagtgcttcggcgttcttggcccaaatggcgcgggaaagaccactcttattaacatgctgaccggattttgtaaacctacctctggcaccgccttgctatgggaaagcctgactggtcgtgagcatctgttgttctatggaaggcttaagaaactgaaggctgcagcactattcgagttgggccccacacgccacatcccaaaatccccaatcgaacaacagagggaaatccatcgcaaaaatccttgtgccgccgccctaggttcccgtcgccgctggtggtcgccgtcgccgtggaggcgcgcggcgctgcccctgccgtggccccagacgccctcggccacgcggctgctcctcgcccggagcccggtagacatcgccgccgctggtggtcgccgtggaggcgcgcggcgctgcccctgccgtggctccagacgctctcggccacgcggctgctcctcgctcggagcccggtagacatcaccgccgctggtggtcgtcgtggaggcgcacggcgctgcccctgccgtggctccaggcgccctgggccacgcggtcgtcgtcccctgccgtggctccagagtggaatcgccgctctgctcaccttggcctgcgaggcgcgcggcgcagctgctcctgtcgtggccctcgggacgagccgctgctcaccatggtctgctaggcgcgcggcgcagttgctctccagaagctgacccgcggagctcgctcgtcggccacgcgacgctcctcaccctcggctgcgaacctcctcactttggagccactacttatgaaaaacttatgtcaaaataagaaaaaactttttgagagtgcatggtgatataataattgttgtaccactacttacgaaaacatgtggatggtgtagtggtgaggtgctgtactactatcctaaaggttctaggtttgactccttgaagtcctcttttttttttccatttttttccatttttttatttgggcttgctgaag

SEQ ID NO: 199580 - DNA, 2030 bp, Zea Mays
cgcgggcgcggcatccctcaaccgaaactgatgaaggctgcggtctccagcgccggcgagtcggcgggcgagctgcttctccgcgcggcggcgctggtgccgtggacgcgctacttcctcgcggcgctagccctggccgccgtactcctgtacaggttcctggagctccacttgctcggcgacctcctccgcggcctccgcggcggccgcgtctcgcttaccttccaccccgagtctcaagtgtaccaccgggtcgcctccaagtgccgctcgctgcacggcaggtacctgacgacgccgtggttagcgagtcctcatttgcagacgctgttcctgagcatatctggcagaccaccttcattcacctatcggaggcagttgtacactgttcgtgatggcggtaccattgccttagattggttactagcttctgatcttgaagatggagatattggcacttctgacggaaccatttctaaggatgattcaacaccccttcttgttgtgatacctggattaactagtgattctagtgctgcttatgtgaagcacttggtcttttctatggcaatcaaaggatggaatgttgttgtaagcaaccacaggggtcttggtggcatctccataacatctgattgcttttacaatgccgggtggacggcagatatgcgtgaagttgttagtttccttcatcaagagtatcctaaggctccactattcactgttgggacaagcataggtgccaatattgtggtcaagtatcttggagaagaaggtgaaaacacacctgtagctggtgctgcatctatttgttctccctgggatctgctggtgaccagcaaatttatttcacgcaagcttgtgcagcgatgttatgacagagcccttgcgattggtctaaaaggatatgcgaaactacatcaatcagtcttggcacgacttgcaaactgggaagctattacatcgtcacactctatccgggaattcgaccgccatgccacttgtgttgttgcaaaatacgagacagtggacacattctaccgcaagtgcagcagtgcaaattatatcggtaatgtgtcagttccactgctttgtatcagtgccttagatgaccccctctgcacaagggaggccattccctgggatgaatgcagggcaaacaaaaacattgtattggcaactacacctaatggcggacatcttgctttctttgaaggcctaactgctggaaagctttggcacaagggcacgatttgcactcatcgttggaatcatcaattgacaagagcccatatgtgaatttcatggaagatggaatggtagctgcattaacagatgatggtcctaacaacggtgactccttgcttaacgaggttcttggtgaaattgaacctaatgatagcgtggttgtccaacacgtaaaacagaaccaaaacaccagagctatacaaaatgagagtgacagttggttggatgataaaaacagctccgaagggaatgttcaagcccatggaggaactcaagaacagagagaagtgccatatgcgaataaaatcagtgatgccattggtcctgttaagaaatcaataaaccaactcagtcgatcccagggtaagtcaatctggttgcttgcttacattgctcttgtaacctcttggccgttgcttggggccctaggttttttcttcaggaaaaggttgagtaattctctgttatctaggaagctgaagaaatcgtgaacactgtgctaacacagatttatttggtatgtaagagcatgtacagtgatgtttaatatagaggctcttgagattatctaaagagagcatttgcaaaaaaaaaattgtggagctgtctctatgtgaagagacgcctttagctcgtaacctaagtagtaacatatgtcttcacttcacttgtacgaattcgtcgtatgttatatcgatatgatgctttacagtttcattcactttattatttattaatagactatatttatagacacacaattgtataatagagtatcttag

SEQ ID NO: 199581 - DNA, 2063 bp, Zea Mays
atgaaggctgcggtctccagcgccggcgagtcggcgggcgagctgcttctccgcgcggcggcgctggtgccgtggacgcgctacttcctcgcggcgctagccctggccgccgtactcctgtacaggttcctggagctccacttgctcggcgacctcctccgcggcctccgcggcggccgcgtctcgcttaccttccaccccgagtctcaagtgtaccaccgggtcgcctccaagtgccgctcgctgcacggcaggtacctgacgacgccgtggttagcgagtcctcatttgcagacgctgttcctgagcatatctggcagaccaccttcattcacctatcggaggcagttgtacactgttcgtgatggcggtaccattgccttagattggttactagcttctgatcttgaagatggagatattggcacttctgacggaaccatttctaaggatgattcaacaccccttcttgttgtgatacctggattaactagtgattctagtgctgcttatgtgaagcacttggtcttttctatggcaatcaaaggatggaatgttgttgtaagcaaccacaggggtcttggtggcatctccataacatctgattgcttttacaatgccgggtggacggcagatatgcgtgaagttgttagtttccttcatcaagagtatcctaaggctccactattcactgttgggacaagcataggtgccaatattgtggtcaagtatcttggagaagaaggtgaaaacacacctgtagctggtgctgcatctatttgttctccctgggatctgctggtgaccagcaaatttatttcacgcaagcttgtgcagcgatgttatgacagagcccttgcgattggtctaaaaggatatgcgaaactacatcaatcagtcttggcacgacttgcaaactgggaagctattacatcgtcacactctatccgggaattcgaccgccatgccacttgtgttgttgcaaaatacgagtggacacattctaccgcaagtgcagcagtgcaaattatatcggtaatgtgtcagttccactgctttgtatcagtgccttagatgaccccctctgcacaagggaggccattccctgggatgaatgcagggcaaacaaaaacattgtattggcaactacacctaatggcggacatcttgctttctttgaaggcctaactgctggaaagctttggtgggtacgacctgtttccgagttcctctgtgctctgcatgatggcccctacatgcatcggcagaaggcacaagggcacgatttgcactcatcgttggaatcatcaattgacaagagcccatatgtgaatttcatggaagatggaatggtagctgcattaacagatgatggtcctaacaacggtgactccttgcttaacgaggttcttggtgaaattgaacctaatgatagcgtggttgtccaacacgtaaaacagaaccaaaacaccagagctatacaaaatgagagtgacagttggttggatgataaaaacagctccgaagggaatgttcaagcccatggaggaactcaagaacagagagaagtgccatatgcgaataaaatcagtgatgccattggtcctgttaagaaatcaataaaccaactcagtcgatcccagggtaagtcaatctggttgcttgcttacattgctcttgtaacctcttggccgttgcttggggccctaggttttttcttcaggaaaaggttgagtaattctctgttatctaggaagctgaagaaatcgtgaacactgtgctaacacagatttatttggtatgtaagagcatgtacagtgatgtttaatatagaggctcttgagattatctaaagagagcatttgcaaaaaaaaaattgtggagctgtctctatgtgaagagacgcctttagctcgtaacctaagtagtaacatatgtcttcacttcacttgtacgaattcgtcgtatgttatatcgatatgatgctttacagtttcattcactttattatttattaatagactatatttatagacacacaattgtataatagagtatcttag

SEQ ID NO: 199582 - DNA, 2606 bp, Zea Mays
acatatataccggttcctcacagagcgtcgtcgcccggtcgccgtccgtcccaccaccggatcccgcccacccgccagatccaggtgtccagatccccgaagggcgaaggcctgaacccctgcgcatatccccatggagccctcgccggcgcaagcgggcgcgtcggaccgcgaccgctcgccgcctccgcccccgccaccgccgtcccagtcgtctaccgcagcgacgatctcatcgccgcttgccgtcgtctgcagtttctggaaagattttgatttggagaaggaaagaagtggattggatgagcaaggtttaaagattgcggagaatcaagaaactagtcaaaagaacaggcgtaagcttgctgagaacacacgggatttcaaaaaggcatcatcagatgagaaactcagtttactcaattctttgctgaagagttatcaagaggaagttgataacctcacaaagagagcaaagtttggagaaaatgcatttctcaacatctatcagaagctctatgaagctcctgatccatatccagctcttgcttcaatgactgatcaagaccagaaattgtctgaactggagactgagaaccgtaagatgaaactagagcttgaagaataccgtgctgaagctgcacacttgaagaaccagcaggcaacaattaggcgacttgaagagcgtaatcgccaactggaacagcagatggaggagaaagtaagggagatggttgaaatgaagcagcgaagcatggctgaggatagtcagaaaactctagaagccctgaaagatagggaacggtcattgcaggaccaactaaggcaagctacagaaagtgtaaagaatatgcaaaagctacatgaatcggcgcaaagccaattgtttgagcttcgcactcaatcagaggaggatcgagctgcaaaggaggttgaagtcagccttctgatggatgaagttgaaagggctcaagcacgattagtcagtcttgagagggaaaagggggatctgcgttcacaattgcagacaactaatgaggatgcaagcaaaagtagtgactatttggaatcaagtgatatacttgagagttccttgaacgccaaggagaagattatttcggagttgaatgcagaacttcgcaacattgaaagtactttatcaagtgagagagaaatgcatgtgaacgagcttaagaagttgactactttactcactgaacaggaaagtgctcttatggagttgaagaaagaactccaggaaagacctacacaaaaactggtagatgatctcaagaaaaaggttcagattttgcaggctgttggttacaactccattgaagctgaagactgggagcttgctactaatggtgaagaaatgagcaagttggaagcattgcttctagacaagaaccgtaaaatggagcatgagctaacacaactgaagagaaaacaagtgttcttgaggaagctgaaaaaaggattgttgaactaacttcaaaggttgaagagcagcaaaagctgattttgaaacttgaggatgacatactaaagggctacagttcaactgataggaggggctcactcttgaatgactgggatattcaagaaatcggctcaagtgaagcatctgagggctctgatccaaggcatgcatcggcagatcaagatcaaagttcgatgctcaaggtcatttgcaaccagagggatcgtttccgtgcacgtctgcgtgaaactgaggaggaactgaggagactaaaagagaagcatgagatgctgactgttgaactggaaaaaactaaagctgataatgtgcaactgtatggaaagattcgatatgtccaagactatagccacgacaagattgtttccaggggaccaaaaaagtacgcagaagatattgaaagtggttcttctgatgttgaagcaaagtacaagaaaatgtatgaggatgacataaacccgtttgctgctttttcaaagaaggaaaaggatcagcgttataaggaacttggtttaagagacaaaatcacacttagtagtggccgttttgtccttggtaacaaatacgcacggacgtttatattcttctacagcatcggattgcatctccttgtatttacattactgtacagaatgtcagctttgagctatctcaacacaacaactcagcaggatgaaatcattctggatgctggtaatcagaggctaacgcacatgctttaggccaagttccatataacagtagaaaaagaggctctctgggttttgatctatagaatctttggacaggatcgttgctgagattgctattgatttgtttgctttgtacccttaagcgccttgatatgtttctgtagataaaaagaaaaaaaaacctgttttgggggcaggcgtgggtgcggcatgagctttgaactatgtaatactgttgtactgccaatttaccattttgttggtaaatgaaagcacacttgtcacaaaggtatacggtatgccataccatcactacatcgtttagagtgaaatgcctctaaactttttctgcattctcttctagctctatgaactcatggaatggtcattcgttattttttttcactttttaa

SEQ ID NO: 199583 - DNA, 475 bp, Zea Mays
aaaaatctggcttacccttatgtaaagattagcagcctcattgcattatgtcgattgatggtgaaatggaaaagagcagaacttaggcaccgggctcgacttgctcatgacaagaaggattgagagaagagaaaaaaatccttattatgggagaatcgaatgatttagtgattttgaacttttctaagtttgtatgccgcttgtcaacagggcactcaagaattaagtgttggaaatcctggataagcgaggagtgtctacagctattgttcctgctggtcactgtaggacagtagcagctagacatacttcataaaaaaatagatatggtacctgtctctatcttgttttagattgtagatgtaaacatggatgtaatcttgattgaaactgccaagatttgtagaacaaagcctcactgtttcgtttcccatcacaaatatgaaatatgagacgcggaagtgatacgagtaga

SEQ ID NO: 199584 - DNA, 2840 bp, Zea Mays
ggggaatacagcacacgggaactccttggccgtctatatatactccaactctccaggcaaggttagcaagcagctcatattcctactagctagcttccttccaagttccatccatatccacatcgcaagctgaggttttgcctggtagcttccctgccaagtgcaagaccgccaaccacgtccggctgcttgaaacccacggacgatcgaggctacaaccgtgcgtgtggagcgcgacgtacgctgctcagctggtgccctgaagtttcggtacgatggagttcaccggcaccaagaaggacgtcgagatggccgggcagctgaacaccgagctgtcgtcgagagaacacgcgctcccggcgctcctgatcaaggttccgtcgcaggccatcgccggcttcgactgcgtgcccgccgccgccgacgccgccgtcgtctccctgaacgagccgggtgacagggcggaggacgtcgccatcagcatcctccccgcgccggcgagagcctacggcggcgacgcgcacggcgtcccgtactccgtctcgctcagcatgccggcgtcgccgtcggggttccacctgtcgtcgcacttcatgtgcgcgggcgacgcgcccgtggcgacggccgacgtccgcccggtgctgctggaggatcagcggcaggcggcggcggcggcgcactcgccgcggctgatcaagcagacgcggttccactcgcagcccatcctcaacctgcacccgccgtccaagaacgtcgtcgacgaggctgcggcacggcggtgggacagcgcgcgcgacacgcggttcgacccgttcaagaccttctcgggccgcctcgagcgccagctgtccaacctgcgcggccgcccgcaggagcccgtcgacggcatatccccggactccaagatctccgaggaggagaccgaccaggtccccgccgccgaccgctacttcgatgccttggaaggccccgagctcgacacgctcagagtaagcactaaagcttcaagcttgacgacgtgtcggagtggactggagaaccaaaaaaaaaaaacgtgtctaagcagtaagcaccacgatctttcgtcttttgcattgcaggccacggaggtgccggtgctgccgaaagacgagaagtggccattccttctgcggttcccgatcagcgcgttcggtatgtgcctgggcgtgagcagccaggccatcctgtggaagaccctggcgtcggcggcgccgacggcgttcctgcacgtgagccccgcggtgagccacgcgctgtggtacgcggcgctggcgctgacggtgctggtgtccggcatctacctgctgaaggtggtgttctacttcgaggcggtgcggcgcgagttctaccacccgatccgcgccaacttcttcttcgcgccgtggatcgcgtgcctgttcctggcgctgggcgcgccgcggctggtggcggagatgcaccacggcgtgtggtacgcgctgatggcgcccatcttctgcctggagctcaagatctacgggcagtggatgtccggcgggcagcggcggctgtccaaggtggccaacccgtccaaccacctgtccatcgtcggcaacttcgtgggcgcgctgctgggcgccaagatgggcctccgcgagggccccgtcttcttcttcgccgtcgggctggcgcactacatggtgctgttcgtgacgctataccagcggctgcccaccaacatgacgctccccaaggagctccaccccgtgttcttcctcttcgtcgccgcccccagcgtagcgtccatggcctgggccaagatcaacggccagttcgacgccggcgcccggatcgcctacttcatcgcgctcttcctctacatgtcactggcggtgcgcatcaacttcttccgtggtttccgcttctcgctggcgtggtgggcgtacacgttcccgatgaccggcgcgtccgtggcggcgatcacgtacgcgacggaggtggacaacgtgctgacccgggcgctctgcatcgggctgtcgggcatctccaccgtcaccgtcgccgggctcctggtgaccacggtgttccacgccttcgtcctcagggatctcttccccaacgacgtgtccatcgccatcacgaggaagaagcccaagttcagcaagatcctggcgcacttccgctcgtccagctccgacatgaaggagctcgtgctgtccctccccaggacggcgcagtctgactccggcgaaaccgagaccgagccgtccgtgaccgccaaatcccgagccgagccgtgagtgactagctcccggtcgcggtctcgttctctcatgtatagctgctacatcccttagctagctgcacacagagcgaggctactgtatagctactacgacgaagaagtcgccgataagcaagtgtgcagtgcaggcacgcgtccatcgatcggcctaaagcggctgcagcagtcggtcggtcggtcggtcggcgtggattaaatgatcggacatatacgaagggtgcacacggccggtatccttggagcattcctagtgatgatggggatatgatgacgtgaggaaaaaatatatactactcctaccactagtagattgattaattagtttgtataaatctacgtaccgacatattataagtagcttgtgtggactatttaagtaaaagaataaaaaccatgaacatgctctatggccttcaaagatctggaccttgcaaactgcgggcattccgcgcgtacgacgtcgcatttgccgttctgccaggcttggtccacgagcgcatcatcactggagaattggagaccatgtgtttgctgaccattgttgcggggtttcttc

SEQ ID NO: 199585 - DNA, 2748 bp, Zea Mays
cgccctcgcgctccgctgagctgcgatttcttccattaagcggcctgcttcgagttcgagcgtagcttgcgtagggaacccccggttgcttgctcgtcagtcgtcactgtactagagtccagaaaccgctggaactttacgtagtaaaacaaaacataacaacacaggtaaggtgagcacagctaggagtttcgtactagatcgatcggtagatatggcgagcatcggcgtacgggattgccgagccgtgcttcggccgaattggtggatctggtgccctgaagtttcggtacgatggagttcaccggcaccaagaaggacgtcgagatggccgggcagctgaacaccgagctgtcgtcgagagaacacgcgctcccggcgctcctgatcaaggttccgtcgcaggccatcgccggcttcgactgcgtgcccgccgccgccgacgccgccgtcgtctccctgaacgagccgggtgacagggcggaggacgtcgccatcagcatcctccccgcgccggcgagagcctacggcggcgacgcgcacggcgtcccgtactccgtctcgctcagcatgccggcgtcgccgtcggggttccacctgtcgtcgcacttcatgtgcgcgggcgacgcgcccgtggcgacggccgacgtccgcccggtgctgctggaggatcagcggcaggcggcggcggcggcgcactcgccgcggctgatcaagcagacgcggttccactcgcagcccatcctcaacctgcacccgccgtccaagaacgtcgtcgacgaggctgcggcacggcggtgggacagcgcgcgcgacacgcggttcgacccgttcaagaccttctcgggccgcctcgagcgccagctgtccaacctgcgcggccgcccgcaggagcccgtcgacggcatatccccggactccaagatctccgaggaggagaccgaccaggtccccgccgccgaccgctacttcgatgccttggaaggccccgagctcgacacgctcagagccacggaggtgccggtgctgccgaaagacgagaagtggccattccttctgcggttcccgatcagcgcgttcggtatgtgcctgggcgtgagcagccaggccatcctgtggaagaccctggcgtcggcggcgccgacggcgttcctgcacgtgagccccgcggtgagccacgcgctgtggtacgcggcgctggcgctgacggtgctggtgtccggcatctacctgctgaaggtggtgttctacttcgaggcggtgcggcgcgagttctaccacccgatccgcgccaacttcttcttcgcgccgtggatcgcgtgcctgttcctggcgctgggcgcgccgcggctggtggcggagatgcaccacggcgtgtggtacgcgctgatggcgcccatcttctgcctggagctcaagatctacgggcagtggatgtccggcgggcagcggcggctgtccaaggtggccaacccgtccaaccacctgtccatcgtcggcaacttcgtgggcgcgctgctgggcgccaagatgggcctccgcgagggccccgtcttcttcttcgccgtcgggctggcgcactacatggtgctgttcgtgacgctataccagcggctgcccaccaacatgacgctccccaaggagctccaccccgtgttcttcctcttcgtcgccgcccccagcgtagcgtccatggcctgggccaagatcaacggccagttcgacgccggcgcccggatcgcctacttcatcgcgctcttcctctacatgtcactggcggtgcgcatcaacttcttccgtggtttccgcttctcgctggcgtggtgggcgtacacgttcccgatgaccggcgcgtccgtggcggcgatcacgtacgcgacggaggtggacaacgtgctgacccgggcgctctgcatcgggctgtcgggcatctccaccgtcaccgtcgccgggctcctggtgaccacggtgttccacgccttcgtcctcagggatctcttccccaacgacgtgtccatcgccatcacgaggaagaagcccaagttcagcaagatcctggcgcacttccgctcgtccagctccgacatgaaggagctcgtgctgtccctccccaggacggcgcagtctgactccggcgaaaccgagaccgagccgtccgtgaccgccaaatcccgagccgagccgtgagtgactagctcccggtcgcggtctcgttctctcatgtatagctgctacatcccttagctagctgcacacagagcgaggctactgtatagctactacgacgaagaagtcgccgataagcaagtgtgcagtgcaggcacgcgtccatcgatcggcctaaagcggctgcagcagtcggtcggtcggtcggtcggcgtggattaaatgatcggacatatacgaagggtgcacacggccggtatccttggagcattcctagtgatgatggggatatgatgacgtgaggaaaaaatatatactactcctaccactagtagattgattaattagtttgtataaatctacgtaccgacatattataagtagcttgtgtggactatttaagtaaaagaataaaaaccatgaacatgctctatggccttcaaagatctggaccttgcaaactgcgggcattccgcgcgtacgacgtcgcatttgccgttctgccaggcttggtccacgagcgcatcatcactggagaattggagaccatgtgtttgctgaccattgttgcggggtttcttc

SEQ ID NO: 199586 - DNA, 1887 bp, Zea Mays
gaggcagaagagaagaattggaggaccgggaaggccaagcacttgtctctgcttctatccccatcggctctagacgctatggccatcacaaacttctgcaacatcaggcatctggcaggggcagcagcagatgagctacgtgatgctgtgctgcttgttttcgccaacaagcaagatcttcctaatgccatgaatgctgctgagatcactgacaagcttggattacactccctgcgccagcgacactggtacatccagagcacttgtgccacaactggcgagggtctgtacgagggcctggactggctgtccagcaacattgcgagcaaggcttgaatatcaaatgcgaactgactaggagctccggatgtatcatggaaacttaggacagaatcgcctctgcaacctgttaggtgtcttctaccggcacaatatattttttgtttggaatatgtaatgatgttacggttcaacgtttattctaccctactatactgttggatgttctttgggcctgtttcattttgcacaaggattggagttccaatatcatgctacattttaaattcgtaccccatcgcaaattttaggatgtataccaaattataggatattccgacattttttggagagtccgagcatcttgagttggatcaaatttatatcataaaacatttatgatactaaaaagtatcgttatttttttattagttatatttttagtgtatctatttggtgtcatgaaactgtgtttttttgtaattttagttaaatttgaggaaagatgaatctgtgatttccacagatggtggaaatgaggagacagacactgacagcctccatgttgctagaggattgtctcatcctgggcttttgtcaagtttatccaataaggcatcagtggtcccaacccctttgcttccttctggacaatctgatctccggttcaatcgtcttcgaccctcaattgatgaaagtgattgcaaatacaaaagattatttggctactatgttgctcgtgaggctgtaatcgatgaggaatactggatcgttgcatggttgagagcagaagatcagtatgaaaatgagtcaggcaatcggtaagacatttgtttttaagggaaaattctttagtgttccttattgtctgcactgttatatacatttactgttagcatggtcctttcagctactttatcattttttcctgcagctatgttgaaagctttaaaagaaagtttgcatcaaaggtacttgcgtaaacaacttagtagtgttttctatgtgcttaaacataattgagatatgatgtacatcttatttgtagcaagtaatgttaagaaattacaataacctctattcaaaaagatttgttgacgcacgttataaaatattcacattaatttgtcacatcctaatagtttctattctggctcacatgtatgagagtctgtcatctcattgcaggaattccatgcattaaagaagagatgcaacaaacaacatagagagaagtatatctgtcttgtcgtggtaaagaacgatgacatcaggcgaactgtcctgaatagtgttgttggtaccttagatgtatgtgtaaggcatcctctatatggggagaaatttcctgaggagcttggaaaaccgtctcttcactgtcgaatttatcagcctgatcagccaaaatttgggtatgtaacaaatgtatgtgttgctaaatatgcaaggcgtcaagggattgctagcaacatgctattataatatatgtccatatgttaattaaagaaaaacccaaaagccctaacattgacaacgtggccgaaatgacttgccgagctccaaaagtatcaagcaactccaagatttatgaaatgtcggcgtttatgt

SEQ ID NO: 199587 - DNA, 1629 bp, Zea Mays
ccgaacctttcacagccgcgttattattctcgtctccagccccccacacgcgctcccctccaccgtccgccgcgcgtccccaccggcggccaccgccaccggcccacctccccggcgccccttacccttctttggcgcgatggtaactcgcggcggcggtagccagtcctacggcttcccgatctactgcgccgcctggctcccgctcgcccacatcatcaagcccgaccctcccgctgccgaggcggatgcggatgacccctcctcctccaccccctcgcttccgatggctgtcctcgggggcggtggcggggagggccggagcggggtgccgaacaagctcgtggtggcggccctcgccaccggggaagaggccgcgccggctctctcccccgatacggtggtcgaggtgaatagtgaggaggaggtgccgtacagaatggccgtccacccgcgtggcgatggcgtgttctgtgccttccccaacggctgcaggttgtatcgatgggaatcacaggaaggagagggaccacagaggttggctttggagccggaccaggatgctttagcagagctgaaagatgtcggtttgcagttggccgtatccttcagtggagaaggttcaatacttgctattggtggtgaagatgggtatttaagagttttcaactggcctaccatggggtctgttctcacagaaatcgatactaaaacatcgattaaggatcttactatcagttccgacgagaagtttcttgctgtgaataggagcagtggcccatgtagagtgtgggatttgcagtcatctgaagttgtagccagtctgccaagagaaacatggaacaatagaaggaagcatcatcgtagttggctcaaaagacatgcggacacttgtaacagttaaaaaggctcatcttggtattgttactacgctgaccttctctcaggattcaagaacattgctgtcaacttccttcgactcttctgcaagggtgacatctgttgggtctccaaagagtaatggaacaagcatatggcccatgctactagttgttattcttgcaattttggtgtactactgtacgcagcacaaagaagacattttggcaatgttgcagcgttgagatagatttctgttcagcccctgactggtctactctgctggacgtattattagtgttgcttcagtgattgaagaaattttggacttgggccaacttcattattctctcaaggacaaacaatacagcaaaaggcactgagccctgttatgttttgtagtaaaaagggtaatgtacttactcatgttgtcgaagtttttgtaagttgatggccgcaagtgatagacatatgtggcaatgtttcttcatgctgcacttgtgaattgcaagatgttcgccccaagagtccaatatagagagttcagaaacaaatttttttggtgtgcgaaacaatttattatgtatgcgtaataaagctgtacaaagaatatctaaaaatgcagatagcttctgggtgcttatacatgtgatgaccaattattgtttggatgacaaaagggagttgtaacactatgctctacatctgtgtgtcggaaataatcagtttgcgtcggtttcttcttgccca

SEQ ID NO: 199588 - DNA, 1370 bp, Zea Mays
gaatcttgctagtaacaagtgacatggcctgaagcgaaggttgtatcgatgggaatcacaggaaggagagggaccacagaggttggctttggagccggaccaggatgctttagcagagctgaaagatgtcggtttgcagttggccgtatccttcagtggagaaggttcaatacttgctattggtggtgaagatgggtatttaagagttttcaactggcctaccatggggtctgttctcacagaaatcgatactaaaacatcgattaaggatcttactatcagttccgacgagaagtttcttgctgtgaataggagcagtggcccatgtagagtgtgggatttgcagtcatctgaagttgtagccagtctgccaagagaaacaggggaaatatttggattctgcagattctctaataaggctgacaacagtcatgtcctatttataactgtgatggaaggcgattatggaaaaatagtgtcttggaatactacctcatggacgagaaccggatcaaagaaaataactcgtgaggcaatttcagcttttgctgtgtcacccaacggtgctcttcttgcaattggaacaatagaaggaagcatcatcgtagttggctcaaaagacatgcggacacttgtaacagttaaaaaggctcatcttggtattgttactacgctgaccttctctcaggattcaagaacattgctgtcaacttccttcgactcttctgcaagggtgacatctgttgggtctccaaagagtaatggaacaagcatatggcccatgctactagttgttattcttgcaattttggtgtactactgtacgcagcacaaagaagacattttggcaatgttgcagcgttgagatagatttctgttcagcccctgactggtctactctgctggacgtattattagtgttgcttcagtgattgaagaaattttggacttgggccaacttcattattctctcaaggacaaacaatacagcaaaaggcactgagccctgttatgttttgtagtaaaaagggtaatgtacttactcatgttgtcgaagtttttgtaagttgatggccgcaagtgatagacatatgtggcaatgtttcttcatgctgcacttgtgaattgcaagatgttcgccccaagagtccaatatagagagttcagaaacaaatttttttggtgtgcgaaacaatttattatgtatgcgtaataaagctgtacaaagaatatctaaaaatgcagatagcttctgggtgcttatacatgtgatgaccaattattgtttggatgacaaaagggagttgtaacactatgctctacatctgtgtgtcggaaataatcagtttgcgtcggtttcttcttgccca

SEQ ID NO: 199589 - DNA, 1242 bp, Zea Mays
atttaaccttgctttttacgttataacaaggcaaatctggtttgcctccatgatgggtatttaagagttttcaactggcctaccatggggtctgttctcacagaaatcgatactaaaacatcgattaaggatcttactatcagttccgacgagaagtttcttgctgtgaataggagcagtggcccatgtagagtgtgggatttgcagtcatctgaagttgtagccagtctgccaagagaaacaggggaaatatttggattctgcagattctctaataaggctgacaacagtcatgtcctatttataactgtgatggaaggtgacattaaggcgattatggaaaaatagtgtcttggaatactacctcatggacgagaaccggatcaaagaaaataactcgtgaggcaatttcagcttttgctgtgtcacccaacggtgctcttcttgcaattggaacaatagaaggaagcatcatcgtagttggctcaaaagacatgcggacacttgtaacagttaaaaaggctcatcttggtattgttactacgctgaccttctctcaggattcaagaacattgctgtcaacttccttcgactcttctgcaagggtgacatctgttgggtctccaaagagtaatggaacaagcatatggcccatgctactagttgttattcttgcaattttggtgtactactgtacgcagcacaaagaagacattttggcaatgttgcagcgttgagatagatttctgttcagcccctgactggtctactctgctggacgtattattagtgttgcttcagtgattgaagaaattttggacttgggccaacttcattattctctcaaggacaaacaatacagcaaaaggcactgagccctgttatgttttgtagtaaaaagggtaatgtacttactcatgttgtcgaagtttttgtaagttgatggccgcaagtgatagacatatgtggcaatgtttcttcatgctgcacttgtgaattgcaagatgttcgccccaagagtccaatatagagagttcagaaacaaatttttttggtgtgcgaaacaatttattatgtatgcgtaataaagctgtacaaagaatatctaaaaatgcagatagcttctgggtgcttatacatgtgatgaccaattattgtttggatgacaaaagggagttgtaacactatgctctacatctgtgtgtcggaaataatcagtttgcgtcggtttcttcttgccca

SEQ ID NO: 199590 - DNA, 1028 bp, Zea Mays
ataggctgtcaatacaacttggtaggtttgctgcaactttctcatgactgcccatgcatgcatgcatgcagtacatatcatacaacaaaatacaaaactgaaccagcaacaaaccgatgcccatgagattgacatggtgatcgagctacagcaggccgccggtcttctccaacgctagacaacgaagaaggagcaattaatcaagtagatcgattcaatccaatccaatggggttgctgataccagcccgtccggagcaatgcacgttgagccgtatcgtgtctctcatcaccgtcggtgtcgtcatcgtggtttgcacgtacgtcacatcttctccggccggtggcgacgccgggaaggaggagttcttcagcatatggcaccgccgatcatcggatatggacgtgatgtggctgaggaacccgttcccgaagctggaccgcggtgaaggcgaggacttgctgatcagcgccgacaagttcaacggcatgccgcacgactacgccggcaacgagctgaacacaggcttcttcttcgtggtctccaacgaccggacggtggcgctgttcgacgagtggcacgcggcgcggcaggtctcggcggggatgaaggagcaggacgtgctgaaccggatgaagcggcgcggcgcgttccgccggctgcgcgtgggcgcccgcgtcctggacacggcgcgcttcagcggcttctgccaggacagccgggacgcggcgcaggtggccaccgtgcacgccaactgctgccgcaccaagcgggcgaaggtagccgatctcaaggccgttcttcgcgccgcggaggggctcaacaggacaaggatggagattaagtggccagcgcatagcgagtgcgtaaaatcgtggttgtgaggctatcaccatcttaggtctcctatttcaccctctattttcaattttactttacaaatagtatcgtttacagtttcgtgtccctattttaaacaatccactgaactattgtaaaagcttttctcaaggtttgtgtccagcgag

SEQ ID NO: 199591 - DNA, 1390 bp, Zea Mays
gtgctcaactccgcatcctgcaaggattccttgttctcaatctggttagacagcaaactgagactacaaactgatcctatccttatcctagagtattttctctggcggcatggttatgaatatgctatttccaatcactatgatcgccattgtgtttgggaggaagtagcacaaaataaaaagctgaacaagttcaaccacacaataattgaccagcaatttgagttttatcaagcggatggactgacaaggttcaacccatcggatcccagcaggcttctaccaagctatgtccctgaaggctcttttatcgcaagagagcacacaccgatgtccaacttattttcctgcctgtggtacaatgaagttgatcgattcacacctcgtgaccagctcagctttgcatatacatacttaaaactgagaaggacaaatcctgacagaccattccgtctcaatatgtttaaggattgtgagagacgatcaatagcgaagctattccatcaccggacagaagagagacacaacagtgcacaattaacaagatgacacatccttcctagtgatggagggcagaagagagaggtcagggattgtattctttgatatagttcagctatccacaagactctccattgaaactttatgcccctgtctaggagtttgtactttatataatgcaagccttctttcctttgtcactccagtcctgcaggccagttcccgcctaacatttttttgcagttgacaaggcggattaggagtttctaactgtttggtttttctttgttctccgtaaatctctgtttattcttttgataatatggcccatggatgatctggggaagctatgagtgatcatggacttttcccagattgcccatgcacaatgtattattaccacaccactgtaggactgtgtagtgaggccattgttctcctgcaattctgactgaaatgtaccatacacaactagtaaattactcaccccttacgcgagtctttgatcgatgtatttacacagttaaaagaatattgcttaagcatatagaaacaataatatatggatacatgtaaacagaagtgatagaattatcttaaacagtagtagaatggttcagtctagaaatataacaacataagcaggatatatgttatattacatcggtactgcttgtagagattgagtgactataaacatgcacaaaagcaacaaaatattgatcttaaagatcaaagaataatgaggcgcttgaagaaagtttgcaatgagtttttcaagctacgcattgagaatgaatcaggcatatgtacatttttttagacattaaaggccacaaagtatagataaatagaacagacgaccatgtttaatctttatggagtttat

SEQ ID NO: 199592 - DNA, 3701 bp, Zea Mays
tcgccctcctcgccacgcctcccatcgcctgagcgcacttttgtgcccgtgagggcgacccgcggtaaggtgctggcagcatgggctgtcgcgatatctgctcacaaggtctctccgtcacttgagcgtgatcactcccacgacggcgacctgcggcatgccgtcagcggcgcagcacagacttccacgacttctttttcctaacgactgtcgttcgtgatttgttcatttcgtgtcaagcttctgttctaagatgattgttctgttcttaaacacatcacttttatgccagattcttcttaagtttcattcaacaaattttggtattactcccttcgtccccttttgataaccataatagggaaaaaatatgtaccatattgatcgtcaatttgtcaaggagggagccttatcagcgtaaatgtggcattaaccacttgagtttcagctccaatgcaagttccattggttctccatgcaagagggatgccgcagcgcgacgttctcaatcaaggagatccactagccggtgctcaggctgtggcagccggcggcgaaggccgaaatgctgctgctcaattcgtgcactatcccagactttacattgaccacttgagttccatctccaatgcaagttccattggttctccatgcaagagggatgccgcagcgcgatgttctccatcatggagatccactagctggcgctcgggctgtggcagccggcggcgaaggacgaaatgctgctgctcaattcgtgcactatcccagactttacattgaccacttgagttccagctccaatgcaagttccattggttctccatgcaagagggatgccgcgacgcgacgttctccatcaaggaaatccactagccggcgctcgggctgtggcagccggcggcgaaggtcaaaatgttgctgctcaattcgtgcactatcctagagtatgtccctagctgagtagcagttgtcgcatctgttctctattttggtcctaattacttgttcgatattctgtcaatagcagtagtaatcagatcgacttacccaattaatttaattaatttgtccatatgatattgcattttggggaggccttgattggtggtcaggaagtcgctatccaagggctaagtaaagattcagaataagttccattggttctccatgcaagagggatgccgcagcgcgacgttctccatcaaggagatccactagctggcgctcgggctattgcagccggcggcgaaggccgaaatgctgttgctcaattcgtgcactatcccagagtatgtccctagctgagtagcagttgtcgcatctgttctctattttggtcctaattacttgttcgatattctgtcaatagcagtattaatcagatcgacttacccaattaatttaattaatttgtccatatgatattgcattttggggaggccttgattggtggtcaggaagtcgctatccaagggctaagtaaagattcagaataaggtattatggagttcaggaatgaagttattctaactgccaaatcgatcctaatatatacgattgtctagctgtctgcctgacagaagtttggatgctatcctttttggtacgctttgataatcaatacacactaaaccttaaatctttttgggttattattctcttaacaaatatcttacatgcatgtagtgcttttatttgaatatgcacatagataattcaaggaaagatttactagattggccaatgtgatttaacataaacaaaatcacttctcagttctcacctacggccacttcctcgttttttaaaacaaaatttgttggtacttaggaatgggtggtgtgttttggttttcgtcttgtggtttcagctttactttccaatgatatttttcactttaccatttattatataatgtccattgtgtgctaaatttttctgtttattatataatgtttaatgagaagtgtgcatttattttttctttgctatcctaccagacgtatatacttgacgacagttactatagagtttaattgtttgggtcttgtacattctgttattagtttgatctgatttatgccaaacttgtgtgaatgctatcaggaagttgctgctttgtcttgatgtctcagacccttagctatgtatactgactatcaacaccatctttatgattggcaagaattgcttcactatctatgcatgattttctttttgaaaccaattttattgctgcactttattttgttttgcattactcatgtttggatcacttcacaaattaggaaagcctatgtgtcttcctcccctgaagtttcagtgttcattacttttctgttaacctcaaaaattagcttagttgtattgaacactaggttttattctacctgtttatgtttcaaagtgtttgaggttctgcatgtgcaacatcacttgtattatagcagcctcctgttaacgtcaaatactgtagggcgcccgtatgggcgcttaatggtctagtaatatttatgctttattgataccttcggttcgacagaaggtgaaaatgtgagagacgcgagagtgattacagtacagcgtgaacagtacggggtactgttcatctatttataggcgcgggacgcagcccgtatgaaattacatccatgtccttgataactaattatgatcataatacagactaccaagggctatacagtattttcctctttaagccggtatcgtccttcgtctttagcatgacaccaagccgaagctctttcgatcgtagcttcatcttatatcttcatgttgtatctgcctttgtactgtcttaccgaaggtgttttttcctagaggaccttcggcggagaagaagaccccaacaataaccatctttatattacaactaaaggaaaataaagaatctatcacaattctaaatatccaataactctaatggcatttaaaactaactgattcttaaccttctcggccatccttcgaaaaccaatcattaaaatttatcgataaaggcatgaatatcatataagcacaatcatcttacattattgtaatctaacttaacttatttttgcaaaataagttagtcacaattattaatcactgaaaccaaatgagggcctagatgctttcaaataccacaatgatacttaaaaggagataaagtatttagacgttattagttagattgtatacaactaacttagaaaatagggattaagaatgcaaatggactatcccttgaacccacactatgtgtttaattatgtggacttccatgagttgtccacgtaaaaacttagaatcaactatatgtacgtagttgatttgagaagtgctggagcgcaccaacgaaacaaggtatggtagacgtgagggaggttggataccacattaaattgctccatgtcggagaggaagagcaaggaaggtgtaacatcctgattttgggtataaaatttcttttctaatatacaccaaatttaggtgttatcctctatttttcttacatttcttttcttctttctaatatagtggagaattattttgttatatattggcgtaagcctagtgaagtgagtcctataggtgctttagttgttacattcatgccattgtaaaatgtttctaagtgcaaaaggtgtctgaaacatgttaatataccttgtagaggctttcggtaaattttc

SEQ ID NO: 199593 - DNA, 3369 bp, Zea Mays
tcgccaccgccaccgccaccgccggtgtcgtctatcctgaccccgacacctcgccgcccggtgccacctcaccgccggattcacatcgcccagtcgccccaccagccagaacctcgtcgcctcgcccgccttgctccgcaggttaggcagccagtacccccaaaccctagcatcctcggcgctgtcggtcgtagaagagcactgggggcgtgagagagggagtcaccagccctcgagacctcctcccgcttctaccactcagccgacgctcccaaaaggggcatctcaaatcccacctcactcccttcagtctttcatgtgtctatatattttcacttaaacacgcagtcagtacaaaatggaaccctctatctggttttttaaggccccgggaggagaagcaaggctgaaatgccagtggtctcttctccatttcacctgatccggacctctgagatgtcgatatgaatggagacctgtaacttgtatatatattagggcttagttttcttgtttcagtatctgtttggagttagaagcaagggttctcatggcatctccacaagaatccaattctctgtgcttgaagcgaaagcttgttgatgactgcctgtcaaaagactgcaaatctcgccgtgtcaaatctgagaatgagccctcatctgattcatttgctaaacgctgcaactgttgctgcactcgacctaatcttgccaatgattgtgtgaatttcctgaagagtggagcgccaaaccgtgtcatgtattacaaaaaaggttcgtggcacaattttccagagcaaataatgaattccctcatcgatgaatttaaaggaaataaatcaagtgttgtctctgtgatggatgatgaaccaatccttgttgatttcttatcaatgaccctggtcaacctgaaaaccagaaagcagcggtctgttgcctggtttgatgacactggcaagcgtttctttccttctctgttctttgatgaggaaagtgatgaaatgcccaaacaggattctggcaatgttaataacactgcacaaggaataatgttagataaggtcacgagttctccacctgaagtggtcaagcaagttgttcttgaatctagtccaccagtccctcaaaaaccttcaactgtggatgtcttgcgcaagaagatcacatctgtggaaagaggtagcgaagggtttctatttgtccaggacctttttctctctggtatgaacccgtttgcaacaccaaataacatacttcatgtccaccgctactctccaaacgatatcaccgcacaatgtagatttgaagcttttgaaagacagatgaagtcaactaaagaagcacgtggtgatgcaaatgttaagtatggctggctaggatctaggaagagtgacatagttaggattctcattaatggtttgggtactactgcaaatcctgttgagaaagctggtttgagtgctggtgtatatctttcacctgaaaatcgagcctttaccagtgtcggtctttgtgatgttgacgaaaaaggagtgcagtatatgttgctgtgccgtatgatattgggcaatgtagaagctgttgaacctggatcccaagagtcttttccaagcagtgagatatatgattctggtgttgatgattgttcaaaccccaagtgttatgtgatgtggccatcacatctaagcactcacatccgtttagaatatcttgttagtttcaagcttgccccaaaagttcgaaattatttgcttgacctgaaaggtttatggtttaatccatcactaaaagaacttggcacggacatttgtacacttcaacctgtaatgtgtgaaacaggtgaaggaccaacttccccatggatatcattcagagttctgtttgcagttattcaagacaatatatcatctgtggcaagggagttaatcttccatcattatgaagagctgaaggaaagcataattacccgtgaagaaatggtgaagaaaatgataattgtagttggagagaaagtacttttggaggccttgaagaagcttcattactgtccatcattatggtacaggccttctgttgaagcagtgtctagtgattctgtaatggcagcaccaggaaaattatccttggataagcggatatggtgcccaatggtcaagattgtccggcaccaagtggtgtgccagaaacatctagttctgctgttgccatgcgtggggcttctacaagtgtggaacccaagcgcagagatcctcctgtacagattgtgccacctggaagctctgcaaccccatgtgccaaaaatcaagattcttttgtaggaagagtgacacctatagctcgtgatgggcttttgaggacaatttgtggaagctcttcatctcctggcggttatgcttctctagcgcaagctaatacctcccaaaccaatggagtttctgccccaggtgtcactcctaggggctatgaatctgctgtaccaagcttgtcacttggaaattccgaaagtacaggcgtgaaacaagtaaattctgcaccaagaatgacacctgaaggccagaagttcctttcgctgggtattgcgccacgaagcccagcactgcgtgatttagtaaaatgccaggccagttcgacactcgttgccatgcctccagcgggcctgggaaaatcacggtccatgaagatcgagggccatgattctctggcaccgagtgtgaaggagccaaaaggcaatggtggtctagcaccaagtaaaacgccaaagctgcatgaacctgtgatagctgatatgagcatcaagagctgtgattctctagcactgggtatcgcaccaaatggccatacccatgatggtccagcatcaggaagtggggaggccaagaaagagcaggcagcactagtaactggctcgcagagtaaatcatctgtaccaagtcttgacgctagcagccatgttaccggggcagcgagcgcccttgtcgcactatcaactctgcgggagaagggcgggcgttagaggagcagcagcagcagcagtgtagttcccgttggatcagatcctttttctctactgtacatgtttctatgtacaggaatcatccccgtcgactctgatccccagtgcgtacggttgctgttggtggccagtcccctatatgttgcttggcagcaaatgttttggttaataattagtttttataaaaggaatattcacccttgttatgttctctacatgtaaattatctgaggtatacttgcattattatgagtgctataatcttttcttttactacatgctctaaactgtatcgtgtattcaataataaaatgttaatttactccctccatttacttttattagtcgttgttg

SEQ ID NO: 199594 - DNA, 4099 bp, Zea Mays
tcgccaccgccaccgccaccgccggtgtcgtctatcctgaccccgacacctcgccgcccggtgccacctcaccgccggattcacatcgcccagtcgccccaccagccagaacctcgtcgcctcgcccgccttgctccgcaggttaggcagccagtacccccaaaccctagcatcctcggcgctgtcggtcgtagaagagcactgggggcgtgagagagggagtcaccagccctcgagacctcctcccgcttctaccactcagccgacgctcccaaaaggggcatctcaaatcccacctcactcccttcagtctttcatgtgtctatatattttcacttaaacacgcagtcagtacaaaatggaaccctctatctggttttttaaggccccgggaggagaagcaaggctgaaatgccagtggtctcttctccatttcacctgatccggtaatgtttaatgccagcgatctcttctccatttccttcagagtttcgtttgatttgtttgtgcatagatgaatattgtaaggcctgcataatatcatgcaacggatgcacaaaaagaactgctagacttgtcgtttctgtgtgttacttctattagctcgaattttgttcacatgttccacttgctgagttgacagtaaatgatgtaagtatcatcagagcagatttgatttttttgatgacaagttttgaagcgcttgctgtgttatgtttaacacatggaaaatgaattattgctctggaagcagttattggtctgtgcaccatatagtcttacaacctttatcgaaatgccatatgagctttaaattggcatggcttaatattgcttgcagagattgaatcatcagcttgttcctgggccaaatttcaacaactaattgtggagttgatatagctgtttgggatcctttttaggataaaagaatcgtagccacactgcctgatgctcagatttgtgatgttcattattttaaaaacaacttaattagaccctttatttgtatggttgatgtttgctatatgcaactgaacttccttgtccacttagtttttgtgttatgaatgctagcgtcactgttactaatgatccattttatcatttctccaacttctagaatactgaactgtgttttttgcttgagataaattcattcattatcttatacaggacctctgagatgtcgatatgaatggagacctgtaacttgtatatatattagggcttagttttcttgtttcagtatctgtttggagttagaagcaagggttctcatggcatctccacaagaatccaattctctgtgcttgaagcgaaagcttgttgatgactgcctgtcaaaagactgcaaatctcgccgtgtcaaatctgagaatgagccctcatctgattcatttgctaaacgctgcaactgttgctgcactcgacctaatcttgccaatgattgtgtgaatttcctgaagagtggagcgccaaaccgtgtcatgtattacaaaaaaggttcgtggcacaattttccagagcaaataatgaattccctcatcgatgaatttaaaggaaataaatcaagtgttgtctctgtgatggatgatgaaccaatccttgttgatttcttatcaatgaccctggtcaacctgaaaaccagaaagcagcggtctgttgcctggtttgatgacactggcaagcgtttctttccttctctgttctttgatgaggaaagtgatgaaatgcccaaacaggattctggcaatgttaataacactgcacaaggaataatgttagataaggtcacgagttctccacctgaagtggtcaagcaagttgttcttgaatctagtccaccagtccctcaaaaaccttcaactgtggatgtcttgcgcaagaagatcacatctgtggaaagaggtagcgaagggtttctatttgtccaggacctttttctctctggtatgaacccgtttgcaacaccaaataacatacttcatgtccaccgctactctccaaacgatatcaccgcacaatgtagatttgaagcttttgaaagacagatgaagtcaactaaagaagcacgtggtgatgcaaatgttaagtatggctggctaggatctaggaagagtgacatagttaggattctcattaatggtttgggtactactgcaaatcctgttgagaaagctggtttgagtgctggtgtatatctttcacctgaaaatcgagcctttaccagtgtcggtctttgtgatgttgacgaaaaaggagtgcagtatatgttgctgtgccgtatgatattgggcaatgtagaagctgttgaacctggatcccaagagtcttttccaagcagtgagatatatgattctggtgttgatgattgttcaaaccccaagtgttatgtgatgtggccatcacatctaagcactcacatccgtttagaatatcttgttagtttcaagcttgccccaaaagttcgaaattatttgcttgacctgaaaggtttatggtttaatccatcactaaaagaacttggcacggacatttgtacacttcaacctgtaatgtgtgaaacaggtgaaggaccaacttccccatggatatcattcagagttctgtttgcagttattcaagacaatatatcatctgtggcaagggagttaatcttccatcattatgaagagctgaaggaaagcataattacccgtgaagaaatggtgaagaaaatgataattgtagttggagagaaagtacttttggaggccttgaagaagcttcattactgtccatcattatggtacaggccttctgttgaagcagtgtctagtgattctgtaatggcagcaccaggaaaattatccttggataagcggatatggtgcccaatggtcaagattgtccggcaccaagtggtgtgccagaaacatctagttctgctgttgccatgcgtggggcttctacaagtgtggaacccaagcgcagagatcctcctgtacagattgtgccacctggaagctctgcaaccccatgtgccaaaaatcaagattcttttgtaggaagagtgacacctatagctcgtgatgggcttttgaggacaatttgtggaagctcttcatctcctggcggttatgcttctctagcgcaagctaatacctcccaaaccaatggagtttctgccccaggtgtcactcctaggggctatgaatctgctgtaccaagcttgtcacttggaaattccgaaagtacaggcgtgaaacaagtaaattctgcaccaagaatgacacctgaaggccagaagttcctttcgctgggtattgcgccacgaagcccagcactgcgtgatttagtaaaatgccaggccagttcgacactcgttgccatgcctccagcgggcctgggaaaatcacggtccatgaagatcgagggccatgattctctggcaccgagtgtgaaggagccaaaaggcaatggtggtctagcaccaagtaaaacgccaaagctgcatgaacctgtgatagctgatatgagcatcaagagctgtgattctctagcactgggtatcgcaccaaatggccatacccatgatggtccagcatcaggaagtggggaggccaagaaagagcaggcagcactagtaactggctcgcagagtaaatcatctgtaccaagtcttgacgctagcagccatgttaccggggcagcgagcgcccttgtcgcactatcaactctgcgggagaagggcgggcgttagaggagcagcagcagcagcagtgtagttcccgttggatcagatcctttttctctactgtacatgtttctatgtacaggaatcatccccgtcgactctgatccccagtgcgtacggttgctgttggtggccagtcccctatatgttgcttggcagcaaatgttttggttaataattagtttttataaaaggaatattcacccttgttatgttctctacatgtaaattatctgaggtatacttgcattattatgagtgctataatcttttcttttactacatgctctaaactgtatcgtgtattcaataataaaatgttaatttactccctccatttacttttattagtcgttgttg

SEQ ID NO: 199595 - DNA, 3355 bp, Zea Mays
cttgactgctcagcctggtcgacgttagaggatttgatacccctcgccaccgccaccgccaccgccggtgtcgtctatcctgaccccgacacctcgccgcccggtgccacctcaccgccggattcacatcgcccagtcgccccaccagccagaacctcgtcgcctcgcccgccttgctccgcaggttaggcagccagtacccccaaaccctagcatcctcggcgctgtcggtcgtagaagagcactgggggcgtgagagagggagtcaccagccctcgagacctcctcccgcttctaccactcagccgacgctcccaaaaggggcatctcaaatcccacctcactcccttcgacctctgagatgtcgatatgaatggagacctgtaacttgtatatatattagggcttagttttcttgtttcagtatctgtttggagttagaagcaagggttctcatggcatctccacaagaatccaattctctgtgcttgaagcgaaagcttgttgatgactgcctgtcaaaagactgcaaatctcgccgtgtcaaatctgagaatgagccctcatctgattcatttgctaaacgctgcaactgttgctgcactcgacctaatcttgccaatgattgtgtgaatttcctgaagagtggagcgccaaaccgtgtcatgtattacaaaaaaggttcgtggcacaattttccagagcaaataatgaattccctcatcgatgaatttaaaggaaataaatcaagtgttgtctctgtgatggatgatgaaccaatccttgttgatttcttatcaatgaccctggtcaacctgaaaaccagaaagcagcggtctgttgcctggtttgatgacactggcaagcgtttctttccttctctgttctttgatgaggaaagtgatgaaatgcccaaacaggattctggcaatgttaataacactgcacaaggaataatgttagataaggtcacgagttctccacctgaagtggtcaagcaagttgttcttgaatctagtccaccagtccctcaaaaaccttcaactgtggatgtcttgcgcaagaagatcacatctgtggaaagaggtagcgaagggtttctatttgtccaggacctttttctctctggtatgaacccgtttgcaacaccaaataacatacttcatgtccaccgctactctccaaacgatatcaccgcacaatgtagatttgaagcttttgaaagacagatgaagtcaactaaagaagcacgtggtgatgcaaatgttaagtatggctggctaggatctaggaagagtgacatagttaggattctcattaatggtttgggtactactgcaaatcctgttgagaaagctggtttgagtgctggtgtatatctttcacctgaaaatcgagcctttaccagtgtcggtctttgtgatgttgacgaaaaaggagtgcagtatatgttgctgtgccgtatgatattgggcaatgtagaagctgttgaacctggatcccaagagtcttttccaagcagtgagatatatgattctggtgttgatgattgttcaaaccccaagtgttatgtgatgtggccatcacatctaagcactcacatccgtttagaatatcttgttagtttcaagcttgccccaaaagttcgaaattatttgcttgacctgaaaggtttatggtttaatccatcactaaaagaacttggcacggacatttgtacacttcaacctgtaatgtgtgaaacaggtgaaggaccaacttccccatggatatcattcagagttctgtttgcagttattcaagacaatatatcatctgtggcaagggagttaatcttccatcattatgaagagctgaaggaaagcataattacccgtgaagaaatggtgaagaaaatgataattgtagttggagagaaagtacttttggaggccttgaagaagcttcattactgttgtctagtgattctgtaatggcagcaccaggaaaattatccttggataaggcaggtggagttttttcattaactcttagtgttaaccatgttgattcacatgcaccaaatggtgtgtctgaacaatccacagttcttagcaccaaaggatgtgaaacccttgcagcggatatggtgcccaatggtcaagattgtccggcaccaagtggtgtgccagaaacatctagttctgctgttgccatgcgtggggcttctacaagtgtggaacccaagcgcagagatcctcctgtacagattgtgccacctggaagctctgcaaccccatgtgccaaaaatcaagattcttttgtaggaagagtgacacctatagctcgtgatgggcttttgaggacaatttgtggaagctcttcatctcctggcggttatgcttctctagcgcaagctaatacctcccaaaccaatggagtttctgccccaggtgtcactcctaggggctatgaatctgctgtaccaagcttgtcacttggaaattccgaaagtacaggcgtgaaacaagtaaattctgcaccaagaatgacacctgaaggccagaagttcctttcgctgggtattgcgccacgaagcccagcactgcgtgatttagtaaaatgccaggccagttcgacactcgttgccatgcctccagcgggcctgggaaaatcacggtccatgaagatcgagggccatgattctctggcaccgagtgtgaaggagccaaaaggcaatggtggtctagcaccaagtaaaacgccaaagctgcatgaacctgtgatagctgatatgagcatcaagagctgtgattctctagcactgggtatcgcaccaaatggccatacccatgatggtccagcatcaggaagtggggaggccaagaaagagcaggcagcactagtaactggctcgcagagtaaatcatctgtaccaagtcttgacgctagcagccatgttaccggggcagcgagcgcccttgtcgcactatcaactctgcgggagaagggcgggcgttagaggagcagcagcagcagcagtgtagttcccgttggatcagatcctttttctctactgtacatgtttctatgtacaggaatcatccccgtcgactctgatccccagtgcgtacggttgctgttggtggccagtcccctatatgttgcttggcagcaaatgttttggttaataattagtttttataaaaggaatattcacccttgttatgttctctacatgtaaattatctgaggtatacttgcattattatgagtgctataatcttttcttttactacatgctctaaactgtatcgtgtattcaataataaaatgttaatttactccctccatttacttttattagtcgttgttg

SEQ ID NO: 199596 - DNA, 3518 bp, Zea Mays
cttgactgctcagcctggtcgacgttagaggatttgatacccctcgccaccgccaccgccaccgccggtgtcgtctatcctgaccccgacacctcgccgcccggtgccacctcaccgccggattcacatcgcccagtcgccccaccagccagaacctcgtcgcctcgcccgccttgctccgcaggttaggcagccagtacccccaaaccctagcatcctcggcgctgtcggtcgtagaagagcactgggggcgtgagagagggagtcaccagccctcgagacctcctcccgcttctaccactcagccgacgctcccaaaaggggcatctcaaatcccacctcactcccttctcagtacaaaatggaaccctctatctggttttttaaggccccgggaggagaagcaaggctgaaatgccagtggtctcttctccatttcacctgatccggacctctgagatgtcgatatgaatggagacctgtaacttgtatatatattagggcttagttttcttgtttcagtatctgtttggagttagaagcaagggttctcatggcatctccacaagaatccaattctctgtgcttgaagcgaaagcttgttgatgactgcctgtcaaaagactgcaaatctcgccgtgtcaaatctgagaatgagccctcatctgattcatttgctaaacgctgcaactgttgctgcactcgacctaatcttgccaatgattgtgtgaatttcctgaagagtggagcgccaaaccgtgtcatgtattacaaaaaaggttcgtggcacaattttccagagcaaataatgaattccctcatcgatgaatttaaaggaaataaatcaagtgttgtctctgtgatggatgatgaaccaatccttgttgatttcttatcaatgaccctggtcaacctgaaaaccagaaagcagcggtctgttgcctggtttgatgacactggcaagcgtttctttccttctctgttctttgatgaggaaagtgatgaaatgcccaaacaggattctggcaatgttaataacactgcacaaggaataatgttagataaggtcacgagttctccacctgaagtggtcaagcaagttgttcttgaatctagtccaccagtccctcaaaaaccttcaactgtggatgtcttgcgcaagaagatcacatctgtggaaagaggtagcgaagggtttctatttgtccaggacctttttctctctggtatgaacccgtttgcaacaccaaataacatacttcatgtccaccgctactctccaaacgatatcaccgcacaatgtagatttgaagcttttgaaagacagatgaagtcaactaaagaagcacgtggtgatgcaaatgttaagtatggctggctaggatctaggaagagtgacatagttaggattctcattaatggtttgggtactactgcaaatcctgttgagaaagctggtttgagtgctggtgtatatctttcacctgaaaatcgagcctttaccagtgtcggtctttgtgatgttgacgaaaaaggagtgcagtatatgttgctgtgccgtatgatattgggcaatgtagaagctgttgaacctggatcccaagagtcttttccaagcagtgagatatatgattctggtgttgatgattgttcaaaccccaagtgttatgtgatgtggccatcacatctaagcactcacatccgtttagaatatcttgttagtttcaagcttgccccaaaagttcgaaattatttgcttgacctgaaaggtttatggtttaatccatcactaaaagaacttggcacggacatttgtacacttcaacctgtgagccagcctgaatcttgttacccccccggtaatgtgtgaaacaggtgaaggaccaacttccccatggatatcattcagagttctgtttgcagttattcaagacaatatatcatctgtggcaagggagttaatcttccatcattatgaagagctgaaggaaagcataattacccgtgaagaaatggtgaagaaaatgataattgtagttggagagaaagtacttttggaggccttgaagaagcttcattactgtccatcattatggtacaggccttctgttgaagcagtgtctagtgattctgtaatggcagcaccaggaaaattatccttggataaggcaggtggagttttttcattaactcttagtgttaaccatgttgattcacatgcaccaaatggtgtgtctgaacaatccacagttcttagcaccaaaggatgtgaaacccttgcagcggatatggtgcccaatggtcaagattgtccggcaccaagtggtgtgccagaaacatctagttctgctgttgccatgcgtggggcttctacaagtgtggaacccaagcgcagagatcctcctgtacagattgtgccacctggaagctctgcaaccccatgtgccaaaaatcaagattcttttgtaggaagagtgacacctatagctcgtgatgggcttttgaggacaatttgtggaagctcttcatctcctggcggttatgcttctctagcgcaagctaatacctcccaaaccaatggagtttctgccccaggtgtcactcctaggggctatgaatctgctgtaccaagcttgtcacttggaaattccgaaagtacaggcgtgaaacaagtaaattctgcaccaagaatgacacctgaaggccagaagttcctttcgctgggtattgcgccacgaagcccagcactgcgtgatttagtaaaatgccaggccagttcgacactcgttgccatgcctccagcgggcctgggaaaatcacggtccatgaagatcgagggccatgattctctggcaccgagtgtgaaggagccaaaaggcaatggtggtctagcaccaagtaaaacgccaaagctgcatgaacctgtgatagctgatatgagcatcaagagctgtgattctctagcactgggtatcgcaccaaatggccatacccatgatggtccagcatcaggaagtggggaggccaagaaagagcaggcagcactagtaactggctcgcagagtaaatcatctgtaccaagtcttgacgctagcagccatgttaccggggcagcgagcgcccttgtcgcactatcaactctgcgggagaagggcgggcgttagaggagcagcagcagcagcagtgtagttcccgttggatcagatcctttttctctactgtacatgtttctatgtacaggaatcatccccgtcgactctgatccccagtgcgtacggttgctgttggtggccagtcccctatatgttgcttggcagcaaatgttttggttaataattagtttttataaaaggaatattcacccttgttatgttctctacatgtaaattatctgaggtatacttgcattattatgagtgctataatcttttcttttactacatgctctaaactgtatcgtgtattcaataataaaatgttaatttactccctccatttacttttattagtcgttgttg

SEQ ID NO: 199597 - DNA, 3292 bp, Zea Mays
cttggacggcgcagatcgcttgactgctcagcctggtcgacgttagaggatttgatacccctcgccaccgccaccgccaccgccggtgtcgtctatcctgaccccgacacctcgccgcccggtgccacctcaccgccggattcacatcgcccagtcgccccaccagccagaacctcgtcgcctcgcccgccttgctccgcaggttaggcagccagtacccccaaaccctagcatcctcggcgctgtcggtcgtagaagagcactgggggcgtgagagagggagtcaccagccctcgagacctcctcccgcttctaccactcagccgacgctcccaaaaggggcatctcaaatcccacctcactcccttcgacctctgagatgtcgatatgaatggagacctgtaacttgtatatatattagggcttagttttcttgtttcagtatctgtttggagttagaagcaagggttctcatggcatctccacaagaatccaattctctgtgcttgaagcgaaagcttgttgatgactgcctgtcaaaagactgcaaatctcgccgtgtcaaatctgagaatgagccctcatctgattcatttgctaaacgctgcaactgttgctgcactcgacctaatcttgccaatgattgtgtgaatttcctgaagagtggagcgccaaaccgtgtcatgtattacaaaaaaggttcgtggcacaattttccagagcaaataatgaattccctcatcgatgaatttaaaggaaataaatcaagtgttgtctctgtgatggatgatgaaccaatccttgttgatttcttatcaatgaccctggtcaacctgaaaaccagaaagcagcggtctgttgcctggtttgatgacactggcaagcgtttctttccttctctgttctttgatgaggaaagtgatgaaatgcccaaacaggattctggcaatgttaataacactgcacaaggaataatgttagataaggtcacgagttctccacctgaagtggtcaagcaagttgttcttgaatctagtccaccagtccctcaaaaaccttcaactgtggatgtcttgcgcaagaagatcacatctgtggaaagaggtagcgaagggtttctatttgtccaggacctttttctctctggtatgaacccgtttgcaacaccaaataacatacttcatgtccaccgctactctccaaacgatatcaccgcacaatgtagatttgaagcttttgaaagacagatgaagtcaactaaagaagcacgtggtgatgcaaatgttaagtatggctggctaggatctaggaagagtgacatagttaggattctcattaatggtttgggtactactgcaaatcctgttgagaaagctggtttgagtgctggtgtatatctttcacctgaaaatcgagcctttaccagtgtcggtctttgtgatgttgacgaaaaaggagtgcagtatatgttgctgtgccgtatgatattgggcaatgtagaagctgttgaacctggatcccaagagtcttttccaagcagtgagatatatgattctggtgttgatgattgttcaaaccccaagtgttatgtgatgtggccatcacatctaagcactcacatccgtttagaatatcttgttagtttcaagcttgccccaaaagttcgaaattatttgcttgacctgaaaggtttatggtttaatccatcactaaaagaacttggcacggacatttgtacacttcaacctgtaatgtgtgaaacaggtgaaggaccaacttccccatggatatcattcagagttctgtttgcagttattcaagacaatatatcatctgtggcaagggagttaatcttccatcattatgaagagctgaaggaaagcataattacccgtgaagaaatggtgaagaaaatgataattgtagttggagagaaagtacttttggaggccttgaagaagcttcattactgtccatcattatggtacaggccttctgttgaagcagtgtctagtgattctgtaatggcagcaccaggaaaattatccttggataagcggatatggtgcccaatggtcaagattgtccggcaccaagtggtgtgccagaaacatctagttctgctgttgccatgcgtggggcttctacaagtgtggaacccaagcgcagagatcctcctgtacagattgtgccacctggaagctctgcaaccccatgtgccaaaaatcaagattcttttgtaggaagagtgacacctatagctcgtgatgggcttttgaggacaatttgtggaagctcttcatctcctggcggttatgcttctctagcgcaagctaatacctcccaaaccaatggagtttctgccccaggtgtcactcctaggggctatgaatctgctgtaccaagcttgtcacttggaaattccgaaagtacaggcgtgaaacaagtaaattctgcaccaagaatgacacctgaaggccagaagttcctttcgctgggtattgcgccacgaagcccagcactgcgtgatttagtaaaatgccaggccagttcgacactcgttgccatgcctccagcgggcctgggaaaatcacggtccatgaagatcgagggccatgattctctggcaccgagtgtgaaggagccaaaaggcaatggtggtctagcaccaagtaaaacgccaaagctgcatgaacctgtgatagctgatatgagcatcaagagctgtgattctctagcactgggtatcgcaccaaatggccatacccatgatggtccagcatcaggaagtggggaggccaagaaagagcaggcagcactagtaactggctcgcagagtaaatcatctgtaccaagtcttgacgctagcagccatgttaccggggcagcgagcgcccttgtcgcactatcaactctgcgggagaagggcgggcgttagaggagcagcagcagcagcagtgtagttcccgttggatcagatcctttttctctactgtacatgtttctatgtacaggaatcatccccgtcgactctgatccccagtgcgtacggttgctgttggtggccagtcccctatatgttgcttggcagcaaatgttttggttaataattagtttttataaaaggaatattcacccttgttatgttctctacatgtaaattatctgaggtatacttgcattattatgagtgctataatcttttcttttactacatgctctaaactgtatcgtgtattcaataataaaatgttaatttactccctccatttacttttattagtcgttgttg

SEQ ID NO: 199598 - DNA, 1965 bp, Zea Mays
tccaggttcgggtttcgggttacgggttttttgcccagggctcacagcgtccctaccctctcctgtcctgtcgttctcgtgcaagctcacggtcccccacgcccacgagcgcctccgctgcgacgaagagaatcatcaggcagagcgggggtggggcggggcgcagatggatctagagaggtcaccgccagcgtcgtcggcggaggcgcccggggacggcggcgggggcggggccgcggcctgctcaatctgcctggatgcggtgctcgcccgcagcgctggtcgctccgtcgccaagctacaatgcggacacgagttccacctagattgtattgggtctgcattcaatgcaaaaggagcgatgcaatgccctaactgtcggaagattgagaaaggtcgctggctttatgcaagcggacatcgcgcctctgttgatattgatatgggtggctgggtgaccagtgacaactatgatatcacctccgagcttccttttggatttcaatggtgcccctttagtggattcacccggctagcatccatgtttgaggagcgtgaagctgagcttacttatcacacaactggagatcgctcaagtgctgcaagcagttcacttgtttgcccatatcttgccctgcgtggttttctgcatcctgttcatgtgccttctacatctaatcctggtgctgaaagcacttcatttcgtcggcatgcaactggcttggaaggccatgccactcttgatttgaataatgctcaacttttccatgcgattgagtcaataaatcatgacagtgagcacagacatttgagtaatcttcctgtatcaggaattcctgagtattctatgactccatttggtataggactaccaagatatgacagtggcagccaacagagattcagatcatatgcacatcatcatcccctaatccataggccagcacctcgcagtgggagcaatttggtggcaccaccattggggtcggttccagctgtggtggcggcggcggagaccgcaagaggcagccacatgtaccaacgctcgtccgtgcatggcagcccgttccctcctaccaccactagaagggtgaggccgagagccttgacgatcacatcgttcatcgcagcgacgtcctcagacccattgaccggccgtacaatgcatggggccgggagggcttcgctccgttcccctggatccccgctgaaggcgagtctcactggtggggcaccttcaaccctgtgcagaaccatgcgcatggaggctttagcagaaggcctgctggggagcggatgccgccgcagagccaaagccacccggagaacagctatcaggctgtgccgccgtcacagaggatgccgccgttcttgtgattcgacaaggctgttcctacgtccgatcgctgtgtataaaatgaagtattcggttcggggcctgagagagcacattgagcgaagatcgactgcactgcagtctccagcgttgggacctgtgtgatgtttatgccgctggtatttcagcgcttttctttttccctccggtccagcagcactctggtttcattgagcgctgtagactgtctgtcctaactgatgttgtgttgcgttgaggaggacgatttggaaacgtgagccgaagctgaactgcatctctggtctccgggactaaaaaatgccgtttgctgctatgaaagttgtatcgatttgcgaccgcaggtcgcctgcaaatttgttagaacaggtgaaatttagtgaacacaaatgttggagacctgcggcgtttacattttttttgttggttaccgagattgtatttaaaggtcgtgatgcgccatcaagcgattgtgatggatcaatttatctccctattgtagcaatgggttttttttgaaaccgatggatgtatatgtcactagaagtaaataccagacaaatatagttgtatccatgctaatttgacca

SEQ ID NO: 199599 - DNA, 2104 bp, Zea Mays
cgtccctaccctctcctgtcctgtcgttctcgtgcaagctcacggtcccccacgcccacgagcgcctccgctgcgacgaagagaatcatcaggcagagcgggggtggggcggggcgcagatggatctagagaggtcaccgccagcgtcgtcggcggaggcgcccggggacggcggcgggggcggggccgcggcctgctcaatctgcctggatgcggtgctcgcccgcagcgctggtcgctccgtcgccaagctacaatgcggacacgagttccacctaggatttcatagcgtcgtcgacgtggttcagacttaataacggagatgctctgacacatgttcggatggtgagcctgatgatgctgatgctgatgggagtgaaaactgcacgtgtaagagcaagtagtgctgttcctgcataattggagctccaggttgacttgcgaatccgaggcttggatttagcgattgtattgggtctgcattcaatgcaaaaggagcgatgcaatgccctaactgtcggaagattgagaaaggtcgctggctttatgcaagcggacatcgcgcctctgttgatattgatatgggtggctgggtgaccagtgacaactatgatatcacctccgagcttccttttggatttcaatggtgcccctttagtggattcacccggctagcatccatgtttgaggagcgtgaagctgagcttacttatcacacaactggagatcgctcaagtgctgcaagcagttcacttgtttgcccatatcttgccctgcgtggttttctgcatcctgttcatgtgccttctacatctaatcctggtgctgaaagcacttcatttcgtcggcatgcaactggcttggaaggccatgccactcttgatttgaataatgctcaacttttccatgcgattgagtcaataaatcatgacagtgagcacagacatttgagtaatcttcctgtatcaggaattcctgagtattctatgactccatttggtataggactaccaagatatgacagtggcagccaacagagattcagatcatatgcacatcatcatcccctaatccataggccagcacctcgcagtgggagcaatttggtggcaccaccattggggtcggttccagctgtggtggcggcggcggagaccgcaagaggcagccacatgtaccaacgctcgtccgtgcatggcagcccgttccctcctaccaccactagaagggtgaggccgagagccttgacgatcacatcgttcatcgcagcgacgtcctcagacccattgaccggccgtacaatgcatggggccgggagggcttcgctccgttcccctggatccccgctgaaggcgagtctcactggtggggcaccttcaaccctgtgcagaaccatgcgcatggaggctttagcagaaggcctgctggggagcggatgccgccgcagagccaaagccacccggagaacagctatcaggctgtgccgccgtcacagaggatgccgccgttcttgtgattcgacaaggctgttcctacgtccgatcgctgtgtataaaatgaagtattcggttcggggcctgagagagcacattgagcgaagatcgactgcactgcagtctccagcgttgggacctgtgtgatgtttatgccgctggtatttcagcgcttttctttttccctccggtccagcagcactctggtttcattgagcgctgtagactgtctgtcctaactgatgttgtgttgcgttgaggaggacgatttggaaacgtgagccgaagctgaactgcatctctggtctccgggactaaaaaatgccgtttgctgctatgaaagttgtatcgatttgcgaccgcaggtcgcctgcaaatttgttagaacaggtgaaatttagtgaacacaaatgttggagacctgcggcgtttacattttttttgttggttaccgagattgtatttaaaggtcgtgatgcgccatcaagcgattgtgatggatcaatttatctccctattgtagcaatgggttttttttgaaaccgatggatgtatatgtcactagaagtaaataccagacaaatatagttgtatccatgctaatttgacca

SEQ ID NO: 199600 - DNA, 1214 bp, Zea Mays
cctctgcactttctaatttcattgagtgaaggagctgactgagttgttcacgcctgaagagatgcctctgtttgggtcgaattcagcacttgactgggccaacttcaatgcacaagcattttctgatgaatccctttcttttgatgaggaatgttcaagaacctcttcagtagattgtggcttgcacgagtcaccaatcaccaacactgctagctctatctcaaagattactctaccacagtctgttccacatgttttaggtgtcggtcaattgttggaatcagcactacatgtggctggccaggttgcaggtgcatctgtttcaacctcacctcttccatatggtacaatgactagtcaatgtgaagcccttggattgggcaccaggaagaagctatcgagctggcttgtcaatggacacgaatcaaccccggacaatcctatgccaagccttcccactgcccatcattccatcattcccaaggtgcggagaaggcacatctgaaacatgtctcccagaatgctgttatcattaaagctcccacctgccagccccttcgataacttcctgaaggctgcctatcgcacccagcccgagctgtgatcgatttacctaagaacaaccctcttcacgagtgctaggctgcagtaccaaagcatagggtactagattatctaaaggaacttatctatgacgttgttttagttgtagtagcgtaactatgtgtatctatctactagatgtctgtaacgtttgcatatgtatcatcttacgactgtgcctctgtagttgtaagccgcgagttctgtgtcgcatgttcagactgagttgtatgagaatactgagtatgcttggcactcctgtatacagtatgcttgccaaaacgtttcttccgaggtcatccttttacacactccctacaattcagatgcctgaactttggtttcttcaggcgtctcctctccgtcacggcagtagacatggtggcggggttacggtttcgagattttggagatctccggtttatgactagagataaaagtgtgtttggttctggactataccagaatcgatttggtaatatttcttgtagatgttgcatctggtggctccttaaaactgaaactgaacctggtggcttgtgactagagataaaagtggatatcttaattgtttgaacaaatttaatattttaaaataaatatgtatgaaa

SEQ ID NO: 199601 - DNA, 3346 bp, Zea Mays
gaagactccaaaaagactgagacagtgagacgcctttacgatagagaaaagatatacatgcccctccctctttcttcgcctagagacagccaagtcactcacgctcctctccactccgtccactactttcacctgatcgccaccactacctccacctggaacctggaagagagagagacaatggcgtgtaggccgccatgtccatgtggctgcttctgcttctacatggtgttcttcctcggcttgctgctcgtcgaggccgtccatggcacagggcggagcgaggtggccgcggccgctccgactccgagcctcgttccagctgaagcgagcgtccttcgccggatcgcggccaggcttggtgtgtccagctgggacttcaccgccggcgccggtccctgcgaccacggagactccggggtgcactgtgactgctccttctccaacggcaccgtctgccatgtcacagagatattcctcaaggggcagaacttctccggtgagctcccgcctgacttcgctgacctcccctacctcctccagctagatctaagcaggagcttgttccatggcggagtgcctcaccagtgggccaggatgaagttacaaggactgtcactgatggcgaatagattgtcagggccttttcccatggttctcacaaagatcacaaccctgactaacctgagcattgaaggcaatgagttctatgggccaatccctcctgaaattgggtatttaattagaatggaaaagctaatattatcaaccaatgagttcactggaccccttccagctgctctttcgctattcagtaatttaactgatttgaggatttctagcaccaatttttccggaaggatacctgatttttggggaaacttgaaaaggcttgacaaattgcaaatagaaggatctttcttagaagggccaattccctcgagcctatctgaattgaaaaacctttctgatctgaggattagtgacctgagaggtagtggttcatctttccctgatttaagtggaatgacatacatgaacaaattggtactaaggaactgttccatcagtggaagcatacccccatacattggcacatggacatctcttaagcatctggatctcagctttaataaactgagtggagaaataccaccttcttttgctagcatgggagctgtagattacatatatctatctggaaattcactcaccgggaacatacctggatggttattaagaagaaacaagatcgcggacatatcttttaataacttcacgatggggagttcaggtccgagccaatgccttcaagggagtgtcaatctggtggagagctattcagctgaagtgaaccgtttaaatagtattcatccatgcttaaagaggaacttcccatgtgttgcttcgaatggacaatatcactcttcactgcatatcaattgcggcgacaaagaagcaactattaacggaactaaatatgaagccgacacaacacccaaaggggcatcattgttgtatgtgtccccaggcttgaactgggcattcagcagcaccgggaacttcatggacgacaacataaatgacgacaactacatagcaacaagtgcatcaaaattggccgtgcccaattcagatctgtacaacaaagcccgtctttctcctctttcgctcacatattatgggctttgcatgttaagtgggagctacacagttaatctccactttgctgaaattgttttcacaaatgacagcacatattatagccttggcaaaaggagattcaacgtgtttatacaggggagaatggtgctagaggatttcgatattgaacagtcatccggtgcggctgcaaaaccagttaccaagacttttcaaacatatgttacaaatcacactctagagattcagttctattgggcaggaagagggacaacaggcattccatatagaggttcttatggcccactgatatctgcaatatcagtaactccaaatttccaaattccattggctgttgaccctcccaaagctggaagtagggaaaaaaggagttcaagggcatctattgctttaggaattggaattcctattgtagcaatattcactgctctgattctcggcatttattgtattaagaagcagagaaagagttcgatgcatgaagaactcagagcccttgacctgcaaattggctccttcaccttgcgtcaaatcaaagcagcaactaggaacttcgatgcagctaacaagattggtgaaggaggatttggttcggtttacaagggtttattatccgatggcaccatcatcgctgtcaagcagttatcatcaaggtctaaacaagggaatcgggaatttgtgaacgagataggcatgatatctgcactccagcatccaaaccttgtcaaactctacggctgctgtacagaaggaaaccagctgtcgctagtttatgagtacatggaaaacaattgcctcgcacgagctcttttcgttgaacagtatagactgagaatggattggggaacaaggcataagatttgccttggaatagcgaaaggtctagcatatttgcatgaagagtctgcaataaggatcgtgcacagagatataaaggccagcaatatactgctcgacaaagatttgaatgccaagatctcagattttgggctagcaaagcttaatgaagatgatcacacccacataagcacaaaagtagctggaactatcggttacatggctcctgagtatgctatgcgtggttatttaacagataaagctgatgtatacagttttggtgttgttgttttggaaattgtcagtggaaaaagtaacacaaactacaggccgaaggaagactttgtttatcttttagattgggcttgtgttctacatgagagaggaactctactggaattggttgatccagatctaggatccaattactcgacagaagaagcgctcctcatgctgaatgttgccctgctatgcacaactgcggcgcctacactcagaccaaagatgtcaaaagttgttagcctgcttgaaggcagtgccccactgcagcctttgctgtcagacctcagccttgcagcaaatagcctgagctcaagtggtgtacgcaggaacttctggcaaaacccagttaaggatcaatttcaacttggagatgaaccggtaccgattaggtactcaataactcggctcacctcaatcatcctaccaaatataaaagcaccatcacaaaaatacagatgtcctcttcagcaaatgttctggaacacaacttataaggtagaagagtttgaggatatctcaagtgcctccccatgctaaattgaat

SEQ ID NO: 199602 - DNA, 3504 bp, Zea Mays
ctcctctccactccgtccactactttcacctgatcgccaccactacctccacctggaacctggaagagagagagacaatggcgtgtaggccgccatgtccatgtggctgcttctgcttctacatggtgttcttcctcggcttgctgctcgtcgaggccgtccatggcacagggcggagcgaggtggccgcggccgctccgactccgagcctcgttccagctgaagcgagcgtccttcgccggatcgcggccaggcttggtgtgtccagctgggacttcaccgccggcgccggtccctgcgaccacggagactccggggtgcactgtgactgctccttctccaacggcaccgtctgccatgtcacagagatattcctcaaggggcagaacttctccggtgagctcccgcctgacttcgctgacctcccctacctcctccagctagatctaagcaggagcttgttccatggcggagtgcctcaccagtgggccaggatgaagttacaaggactgtcactgatggcgaatagattgtcagggccttttcccatggttctcacaaagatcacaaccctgactaacctgagcattgaaggcaatgagttctatgggccaatccctcctgaaattgggtatttaattagaatggaaaagctaatattatcaaccaatgagttcactggaccccttccagctgctctttcgctattcagtaatttaactgatttgaggatttctagcaccaatttttccggaaggatacctgatttttggggaaacttgaaaaggcttgacaaattgcaaatagaaggatctttcttagaagggccaattccctcgagcctatctgaattgaaaaacctttctgatctgaggattagtgacctgagaggtagtggttcatctttccctgatttaagtggaatgacatacatgaacaaattggtactaaggaactgttccatcagtggaagcatacccccatacattggcacatggacatctcttaagcatctggatctcagctttaataaactgagtggagaaataccaccttcttttgctagcatgggagctgtagattacatatatctatctggaaattcactcaccgggaacatacctggatggttattaagaagaaacaagatcgcggacatatcttttaataacttcacgatggggagttcaggtccgagccaatgccttcaagggagtgtcaatctggtggagagctattcagctgaagtgaaccgtttaaatagtattcatccatgcttaaagaggaacttcccatgtgttgcttcgaatggacaatatcactcttcactgcatatcaattgcggcgacaaagaagcaactattaacggaactaaatatgaagccgacacaacacccaaaggggcatcattgttgtatgtgtccccaggcttgaactgggcattcagcagcaccgggaacttcatggacgacaacataaatgacgacaactacatagcaacaagtgcatcaaaattggccgtgcccaattcagatctgtacaacaaagcccgtctttctcctctttcgctcacatattatgggctttgcatgttaagtgggagctacacagttaatctccactttgctgaaattgttttcacaaatgacagcacatattatagccttggcaaaaggagattcaacgtgtttatacagatttccaaattccattggctgttgaccctcccaaagctggaagtagggaaaaaaggagttcaagggcatctattgctttaggaattggaattcctattgtagcaatattcactgctctgattctcggcatttattgtattaagaagcagagaaagagttcgatgcatgaagaactcagagcccttgacctgcaaattggctccttcaccttgcgtcaaatcaaagcagcaactaggaacttcgatgcagctaacaagattggtgaaggaggatttggttcggtttacaagggtttattatccgatggcaccatcatcgctgtcaagcagttatcatcaaggtctaaacaagggaatcgggaatttgtgaacgagataggcatgatatctgcactccagcatccaaaccttgtcaaactctacggctgctgtacagaaggaaaccagctgtcgctagtttatgagtacatggaaaacaattgcctcgcacgagctcttttcgttgaacagtatagactgagaatggattggggaacaaggcataagatttgccttggaatagcgaaaggtctagcatatttgcatgaagagtctgcaataaggatcgtgcacagagatataaaggccagcaatatactgctcgacaaagatttgaatgccaagatctcagattttgggctagcaaagcttaatgaagatgatcacacccacataagcacaaaagtagctggaactatcggttacatggctcctgagtatgctatgcgtggttatttaacagataaagctgatgtatacagttttggtgttgttgttttggaaattgtcagtggaaaaagtaacacaaactacaggccgaaggaagactttgtttatcttttagattgggcttgtgttctacatgagagaggaactctactggaattggttgatccagatctaggatccaattactcgacagaagaagcgctcctcatgctgaatgttgccctgctatgcacaactgcggcgcctacactcagaccaaagatgtcaaaagttgttagcctgcttgaaggcagtgccccactgcagcctttgctgtcagacctcagccttgcagcaaatagcctgagctcaagtggtgtacgcaggaacttctggcaaaacccaggtgagagtcagagcctgacagcacaagcttcatgcagcgatactaatgaatcatccaccattgatatagatggtattctactggtaagttagatgtagtttgctgtgcatcatgaactaggtttacatgtaggaactactaagcataggccagcatgtttgtattaagttcaccagtgcaatgtaaatagcaagtagcatactaatgtctagtacaggtagagccctatgcattttacaccagtgcaatgtaaatagcaagtagcatactaatgtctagtacaggtaaagccctattcattttagtagtctctgtttcatattacatgggaatattaagatgtctgtgacagaacactggaagttctctatggactatagtctctgagctcctatccatcttttctttgatttctgaaaagataaaaatttgacattaatattttatctgatagcagttaaggatcaatttcaacttggagatgaaccggtaccgattaggtactcaataactcggctcacctcaatcatcctaccaaatataaaagcaccatcacaaaaatacagatgtcctcttcagcaaatgttctggaacacaacttataaggtagaagagtttgaggatatctcaagtgcctccccatgctaaattgaat

SEQ ID NO: 199603 - DNA, 3669 bp, Zea Mays
ccactacctccacctggaacctggaagagagagagacaatggcgtgtaggccgccatgtccatgtggctgcttctgcttctacatggtgttcttcctcggcttgctgctcgtcgaggccgtccatggcacagggcggagcgaggtggccgcggccgctccgactccgagcctcgttccagctgaagcgagcgtccttcgccggatcgcggccaggcttggtgtgtccagctgggacttcaccgccggcgccggtccctgcgaccacggagactccggggtgcactgtgactgctccttctccaacggcaccgtctgccatgtcacagagatattcctcaaggggcagaacttctccggtgagctcccgcctgacttcgctgacctcccctacctcctccagctagatctaagcaggagcttgttccatggcggagtgcctcaccagtgggccaggatgaagttacaaggactccatgcaggtcactgatggcgaatagattgtcagggccttttcccatggttctcacaaagatcacaaccctgactaacctgagcattgaaggcaatgagttctatgggccaatccctcctgaaattgggtatttaattagaatggaaaagctaatattatcaaccaatgagttcactggaccccttccagctgctctttcgctattcagtaatttaactgatttgaggatttctagcaccaatttttccggaaggatacctgatttttggggaaacttgaaaaggcttgacaaattgcaaatagaaggatctttcttagaagggccaattccctcgagcctatctgaattgaaaaacctttctgatctgaggattagtgacctgagaggtagtggttcatctttccctgatttaagtggaatgacatacatgaacaaattggtactaaggaactgttccatcagtggaagcatacccccatacattggcacatggacatctcttaagcatctggatctcagctttaataaactgagtggagaaataccaccttcttttgctagcatgggagctgtagattacatatatctatctggaaattcactcaccgggaacatacctggatggttattaagaagaaacaagatcgcggacatatcttttaataacttcacgatggggagttcaggtccgagccaatgccttcaagggagtgtcaatctggtggagagctattcagctgaagtgaaccgtttaaatagtattcatccatgcttaaagaggaacttcccatgtgttgcttcgaatggacaatatcactcttcactgcatatcaattgcggcgacaaagaagcaactattaacggaactaaatatgaagccgacacaacacccaaaggggcatcattgttgtatgtgtccccaggcttgaactgggcattcagcagcaccgggaacttcatggacgacaacataaatgacgacaactacatagcaacaagtgcatcaaaattggccgtgcccaattcagatctgtacaacaaagcccgtctttctcctctttcgctcacatattatgggctttgcatgttaagtgggagctacacagttaatctccactttgctgaaattgttttcacaaatgacagcacatattatagccttggcaaaaggagattcaacgtgtttatacaggggagaatggtgctagaggatttcgatattgaacagtcatccggtgcggctgcaaaaccagttaccaagacttttcaaacatatgttacaaatcacactctagagattcagttctattgggcaggaagagggacaacaggcattccatatagaggttcttatggcccactgatatctgcaatatcagtaactccaaatttccaaattccattggctgttgaccctcccaaagctggaagtagggaaaaaaggagttcaagggcatctattgctttaggaattggaattcctattgtagcaatattcactgctctgattctcggcatttattgtattaagaagcagagaaagagttcgatgcatgaagaactcagagcccttgacctgcaaattggctccttcaccttgcgtcaaatcaaagcagcaactaggaacttcgatgcagctaacaagattggtgaaggaggatttggttcggtttacaagggtttattatccgatggcaccatcatcgctgtcaagcagttatcatcaaggtctaaacaagggaatcgggaatttgtgaacgagataggcatgatatctgcactccagcatccaaaccttgtcaaactctacggctgctgtacagaaggaaaccagctgtcgctagtttatgagtacatggaaaacaattgcctcgcacgagctcttttcgttgaacagtatagactgagaatggattggggaacaaggcataagatttgccttggaatagcgaaaggtctagcatatttgcatgaagagtctgcaataaggatcgtgcacagagatataaaggccagcaatatactgctcgacaaagatttgaatgccaagatctcagattttgggctagcaaagcttaatgaagatgatcacacccacataagcacaaaagtagctggaactatcggttacatggctcctgagtatgctatgcgtggttatttaacagataaagctgatgtatacagttttggtgttgttgttttggaaattgtcagtggaaaaagtaacacaaactacaggccgaaggaagactttgtttatcttttagattgggcttgtgttctacatgagagaggaactctactggaattggttgatccagatctaggatccaattactcgacagaagaagcgctcctcatgctgaatgttgccctgctatgcacaactgcggcgcctacactcagaccaaagatgtcaaaagttgttagcctgcttgaaggcagtgccccactgcagcctttgctgtcagacctcagccttgcagcaaatagcctgagctcaagtggtgtacgcaggaacttctggcaaaacccaggtgagagtcagagcctgacagcacaagcttcatgcagcgatactaatgaatcatccaccattgatatagatggtattctactggtaagttagatgtagtttgctgtgcatcatgaactaggtttacatgtaggaactactaagcataggccagcatgtttgtattaagttcaccagtgcaatgtaaatagcaagtagcatactaatgtctagtacaggtagagccctatgcattttacaccagtgcaatgtaaatagcaagtagcatactaatgtctagtacaggtaaagccctattcattttagtagtctctgtttcatattacatgggaatattaagatgtctgtgacagaacactggaagttctctatggactatagtctctgagctcctatccatcttttctttgatttctgaaaagataaaaatttgacattaatattttatctgatagcagttaaggatcaatttcaacttggagatgaaccggtaccgattaggtactcaataactcggctcacctcaatcatcctaccaaatataaaagcaccatcacaaaaatacagatgtcctcttcagcaaatgttctggaacacaacttataaggtagaagagtttgaggatatctcaagtgcctccccatgctaaattgaat

SEQ ID NO: 199604 - DNA, 1916 bp, Zea Mays
ggcccgtcgacagttccccgcaggccgcaaacccaggaaggcgccaggtgccctgtcgcagcagttcgcactccgcagggcaccaccgtccacctccaccgccaccgatcggtagcaacgcgcaccaccgcgtcgtcgtacggcagcacacggaaagagagagagagagagagagagagagagaggaatgggcgaccacgagggtcacggggtcgatttcgagaagaaggccgatcagaagctctccggctggggcctcttcggcaataagtacgaggaagccgccgacctcctcgacagggctggcagcttcttcaaactcgcgaagaactggagcagagcggctgcggtatacaaaaagattgcagattgtcatttgcagggggataacaagcacgatgctgcctctgcttatgttgaggcagcaaactgctacaagaagttctccctgcaagatgctgcacaagcacttaacagtgccgttaatcttttccaggaaatcagtagactgaacatggctgcaagatacagcaaggatatcggtgaaatctatctgcaagaacaagatttagagaatgccgcagtctacctgaatcgcgctgctgatctttttgatagtgagggacaatcctctcaggcaaacagcatgacacagaaaatcgctgaaatatatgctcagctggaaaagtaccagaaagcaaccgagctctttgaagaaattgctcgtaaatcaataaacaataaccttctcaagtacggtgtcagaggcactcttcttaatgcgggcatttgccaactttgtagaggtgatgttgttgctataaataattcattggagcgctatcaggacattgacccaaccttctcagggacacgcgaatacaagcttttggcagtaccatacaatactcacattccttttgttcactgtgttcatcatgatacgtagcccttgattatacattgctagtttttttttgaagaaaaatggcaggagctctgccttgcattatagtagattgaaaagaacataaagttcatctccaaagggcaatgagaaataccacgcacaccagaactaacacagattacaaacgcccatcgccgaaggactaaactgctcccagtacaagtttttaaaagataaacatcgcttgcttgaattccataatttttttaacagtgtagcacagttcaattattgaacatgaactatctaaaataaaacccaaaaaaggctctgtcagtcctagatgttcacgtgttcgagaaaaagaagtcctagatgttttgtttccttagctgacttggctgaactgaaatttgcatggcaggaccttgcagcctctacggatgaaggagacgttggcaagtttactgatgcagtaaaggagtttgacagcatgacacgcctggatccttggaaaacaactctccttctgaaggcaaagaacgagttgaagaaaaaggaggaggatgaggatgatctaacctaggctctgttccacaaaaggtttcatgatttcgttgaggatgccgtgaaatcattacacaagattgtttgatataagtatggatatacaaaacctcctggataccgcatttggaatccagtagctgccatttatatatatggcatcctatatgttgcatttgtggattattgttcatggttatatatgctacccatattactccagtctttctagtataaagaggtttaatattccctccattcctttttagttgtcgcgttttagtcgaaaaataatctaacggacgacaaatatttgagaacggaggtagtatataacagggagcagtatgaattttgtttttatgtgtttgagagtatatatgtaatcgagagaaagaaatgattgaattgcgatttctttcattgattgatcttttat

SEQ ID NO: 199605 - DNA, 2689 bp, Zea Mays
cagggttttcctgatccttgagggctgtgcgggcatacctggtctctccgaattgtccagttttttggtgtctgtccgccgggttcttgagctggcttggggatctgtagctttgagagcttcatcggggaattcctgcggcttgggggggttcttgcggttgtgttgagtggcctttcttgtggaagtgcagagtgattctgcagaagtattcattctactggcgtgctgagcaggtgcaggagctctaataagcctagtgcgcacttcagtcatcagccaagtgattgaaaagggcaagtcagctgaaatattggttccgagggctctgtagttgcttatccacgctcgcctatgcctttgcgctgatcttgacaactcaaagcttggatatggctacttattactcgagccctggcagtgaaagagattcacaaacaatgtactcagcagagtcaggcaatgtatcatatcccgtgccatcagccctagggaactttctttatacgaacaatgcatcttctggaccttatacagaatttagtggaattgtccagcctcagcagaatttcatggaacttactggccatccttcagcaatgtcacatgattcgtcatccaatgaagctaccaacatgggcagttcactcactgaacagcgctcttttggtcctttgaaagatatgagaaatgagatgttgatgcatttgatggatggagcacacagcagtggcagtgatctcatccacaatgatgctcatagcactgtacagctcgaatttggcatgttaaacaaccacaactcaacaagtgttccattagcaccaggccaagggctgtctctgagcctcaatacacatatcttggcgccttcctatccacactggtctgcaaagcaagacttactaacaccaaattcttaccagggtgatgacaacagaatgaagaatatgcagtctgaggcctcacaggcaatccggaactctaagtatctgaaggcagcacaggagttacttgatgagattgtcagtgtttggaagtgtgttaaacagaaaacagataaaggccctgctgaagcaggaaaggctgatggaaaagagactgatggggggattaaaagtgagggggtatcttccaatccgcaagagtctggtgccaatgcagcagctgagctttcaactgctgagaaacaagagctccagaataagatggcaaaacttatgactatgttggacgaggtggataggaagtacaaacactattatcatcagatgcaacttgtaatgtcatcgtttaatatggttgctggtgctggagctgccaagccttatactgcagttgccctccagacaatctcacggcatttccgatgtctaaaggatgctatcaatgatcaaattagtgttatccggaagaaacttggagaggatgacaatacatccggcaaagagggcaaactaacccgccttcgttatattgatcagcaaataaggcaacagcgagctttccaacagtatggtatgctacagcaaaacgcttggaggccacagagaggactacctgaaaattcagtctcgattctccgggcttggctttttgaacatttccttcacccgtatccaaaagattctgaaaagctaatgttatcgagacaaactgggttgacaagaagtcagatttcaaactggttcatcaatgcccgtgtccggctgtggaagccaatgatcgaagacatgtacaaagaagagattggtgaagcggagctagactccaactcttcctccgacaacgggcagcgaaacaaggacaaagcaccatctcccgaagaaaatgaggacctgcagaccccaacaagccaggcttgccaaaccagccagctcggccagtccaaagccatcgttggtggagtgatgggctttagtggagtgctagccggcggcttccacaccgaggccaaccccgacgacagcttcatgagcctgatgctaaaggcccagagacctggtgaaaccgaaggcaccggtctcctccacgatgccgtcgctcaccactcggacgacggcgcccggttcatggcctaccacctggcagagttcgggaggtacgggaacagcagcaacgtctcactgacgctgggcttgcagcacgccgagaacagcctcgcagtcccaccaaacactcagccaggcttccccggcgtcagagaccaagacatgtacaacgccacggctcctcctctcaacgtcgcctccacatcttcagagtatgattcggcgagccaaattgatcagcaacagcaacggcagcggttcgagccgtcacctctgatgcatgatttcgtggcctgaatttcagctcgcccactggaaaacgtgggggaaaactactgccaatttgtagtgtgtgccaggacgaataacttgcctggactgaattttcaggcgtgggactgttagctgtagttaacgattggggatttggggggtacagtacaggaggtatatagcgtaaatgtgatgtaaatttagtgggggtgatagcggtaaagaaatcctgtaaagatggaatgcatttatacgtgtatttaagggccatgctgtaaaaatagatttacctgtaatgagtacttatgatccagtatatatactgtgcacgttgttgaaaccaaaaaaaaaaaaagaagaggggg

SEQ ID NO: 199606 - DNA, 1976 bp, Zea Mays
ctgtcagccgagccaagttccgaatgggggtggcttggcttggctggctacaagtcactcaaattgaaataagactgaaacggacaaaggcaaacacagcaagcaaagcaggaatcggaggtagacgacgaccaccacggggataacaaccaaacctcccaaataccatccacgaacgaaagggaagggaaggtcgtttaggcggcgcgccgaggccgtggctatggaccccaacggcggcggcgacaccatcctcggcgatcccctccttcccctctcgcagtccagcaagcagcagcaggatcctctcgccggcgtctccgactaccttgggcggtccgtgcaccgcggaagctccgggggatggagatccgcgctcttcgtcgtggtccaacgcctccgccgccgcctccgtcaacgcctggtccggcacggcctgcatcatgcccctgctcggcgccttcctcgccgacgcctacctgggccgctaccgatccgtcatcatcgcctgcaccctctacgtcctgggttatggtatgctgacgctgtcggcgacggtgccggcgctgcagccgtcgcacatgccctgcagggaggatggcgtctcgtcgtcgtcatgccaacccgggtggccgcaggtggccttcttctacgtgtccctgtacctgatcgccatcgcgcagggcgccgacaagccgtgcgggctggctttcgcggcggaccagttcgacgcggagcaccagggggagcgcgcctcccgcgggtccctattcaactggtggttcttctgcatggccatcggcatctccgtgtcagtctccgtggtgggctacatccaggagtacgtcgggtgggggctcggcttcggcgtcccctgcgccatcgtgctctgcgccttcctcgtcttcctgttgggcaccccgacgtaccgcctgtacgcacccacgccggaagccaagtccccgttccgccgcctggcacgcggcctggccgccaacgccaacaaaacaggaggcctctccgcctcgcattcggaggaggaggaagcggcagcagacgcgcggtgcgtgctgcgcctgctgcccatctgggcggcgagcctggcgtacggcgtggtgtacgcgcagattatgacgctgttcaacaagcaggggcgcaccctggaccgccacatcggggacggccttgagctgcctccggcggcgctgcagacgctgggccccgcgagcatcctgctgttcgtgcctgtttacgaccgcgcggtggtgccggcgctgcggtgggcgacgggcaacccgtcggggctgagcatgctgcagcgcgtgggcgcgggcatggcggtgtcgctggcgggcgtggcggtggccgcgctggtggaggcgcggcggctggcgatggcgcgggagcacgggttggtggacgacccgtcggcgacggtgcccatgagctgggcgtggatcgtgccgcagtacgccatgatgggggtggcggacgtgctggccgtggtgggcctgcaggagctcttctacgaccagatgcccgacgggctccgcagcctggggctggcgctctacctcagcgtcatgggcatcgggggattcatcagcagtctgctcatctccctcatcgacggcgtcaccggcagcggtggcggggacagctggttcgccgacaacctcaaccgcgcgcacgtcgactacttctactggctgctggcggggctcagcgccgtcgaactcgcgctcttcctctactttgcgcgctcctacgtctacaagcacaagcccaattaatcctgctagtgcagtctgtacagatgaatggaaagcagatgcaggcatgcagcccgtcgtcttcatgttttacttgtccttgtaaaacaaggcaaactcagctcaaagtcaaattcagattctagcccccaataattttcgtcggccgccgcgtggctcgctatccggacatggtggccgctc

SEQ ID NO: 199607 - DNA, 1968 bp, Zea Mays
ctgtcagccgagccaagttccgaatgggggtggcttggcttggctggctacaagtcactcaaattgaaataagactgaaacggacaaaggcaaacacagcaagcaaagcaggaatcggaggtagacgacgaccaccacggggataacaaccaaacctcccaaataccatccacgaacgaaagggaagggaaggtcgtttaggcggcgcgccgaggccgtggctatggaccccaacggcggcggcgacaccatcctcggcgatcccctccttcccctctcgcagtccagcaagcagcagcaggatcctctcgccggcgtctccgactaccttgggcggtccgtgcaccgcggaagctccgggggatggagatccgcgctcttcgtcgtgggcgtcgagatcgccggtagcttcgcctacttcggcatctctgccaacctaatcacgtacctgactggtccgctacgacagtccaacgcctccgccgccgcctccgtcaacgcctggtccggcacggcctgcatcatgcccctgctcggcgccttcctcgccgacgcctacctgggccgctaccgatccgtcatcatcgcctgcaccctctacgtcctgggttatggtatgctgacgctgtcggcgacggtgccggcgctgcagccgtcgcacatgccctgcagggaggatggcgtctcgtcgtcgtcatgccaacccgggtggccgcaggtggccttcttctacgtgtccctgtacctgatcgccatcgcgcagggcgccgacaagccgtgcgggctggctttcgcggcggaccagttcgacgcggagcaccagggggagcgcgcctcccgcgggtccctattcaactggtggttcttctgcatggccatcggcatctccgtgtcagtctccgtggtgggctacatccaggagtacgtcgggtgggggctcggcttcggcgtcccctgcgccatcgtgctctgcgccttcctcgtcttcctgttgggcaccccgacgtaccgcctgtacgcacccacgccggaagccaagtccccgttccgccgcctggcacgcggcctggccgccaacgccaacaaaacaggaggcctctccgcctcgcattcggaggaggaggaagcggcagcagacgcgcggggcgcaccctggaccgccacatcggggacggccttgagctgcctccggcggcgctgcagacgctgggccccgcgagcatcctgctgttcgtgcctgtttacgaccgcgcggtggtgccggcgctgcggtgggcgacgggcaacccgtcggggctgagcatgctgcagcgcgtgggcgcgggcatggcggtgtcgctggcgggcgtggcggtggccgcgctggtggaggcgcggcggctggcgatggcgcgggagcacgggttggtggacgacccgtcggcgacggtgcccatgagctgggcgtggatcgtgccgcagtacgccatgatgggggtggcggacgtgctggccgtggtgggcctgcaggagctcttctacgaccagatgcccgacgggctccgcagcctggggctggcgctctacctcagcgtcatgggcatcgggggattcatcagcagtctgctcatctccctcatcgacggcgtcaccggcagcggtggcggggacagctggttcgccgacaacctcaaccgcgcgcacgtcgactacttctactggctgctggcggggctcagcgccgtcgaactcgcgctcttcctctactttgcgcgctcctacgtctacaagcacaagcccaattaatcctgctagtgcagtctgtacagatgaatggaaagcagatgcaggcatgcagcccgtcgtcttcatgttttacttgtccttgtaaaacaaggcaaactcagctcaaagtcaaattcagattctagcccccaataattttcgtcggccgccgcgtggctcgctatccggacatggtggccgctc

SEQ ID NO: 199608 - DNA, 1939 bp, Zea Mays
tgactctctgtctctcttgcattttctttttgcatgattaattcattcctctcctcctcttgtttactacgtacggtacgtatctctcgcaaaccggccaaacctctcatcagttaatcatcaaccgaccaatcatcaaggcgcattggtctttaattcctatattcctatcgctgctgctactccagtctccagcagatagatagatcccccgtccatcggcaatcaagcacaacacaatgattaaatgagagcctggttaatttgatacccatggtttccaatcaattccaacaataattcattcattcgcccactgccacacagcgagcgcgctctcaggctgggctgtacgtatataggtcgcccacaggcagcccagtgactccactccacccacgcctccaccacagagagccgcagcagactcgcaagggggtagtgttgtgtactctgcgctgtgcggacggcggccggcggccggcgaaggagatggatcgcctgcccgagtcgacccggagcatgaggaagtacgcgtcggaggccggcgggctgcgcgcggcgcggcagggcccccacgggcggtcgctgacggcgcgcacggcgcacagcatgtccacgacggcgctgcgcaccaagtccaagtcggccgcgtcgctgctgcgcagggtgcccttcgcgccgctccgccccgtcctcgccaacctgcaggaggtgttcctcggcaccaagctcgccgtgctattccccgccgtgccgctcgccatcgccgcccagtgcgcgcacttcggccaggtgtgggtgttttcgctcagcctactcggcctcatccccctcgccgagcgtgtcagcttcctcaccgagcagatcgcgatatacaccggccccaccgtgggcggcctcctcaacgcgacgtgcggcaacgccacggagctcatcatcgcgctcttcgcgctcatggagggccagatcgaggtcgtcaagtgctccctcctcggctccgtcctctccaacctgctgctcgtgctcggcacgtccctcttctgcggcggcgtcgtcaacctcggctccgaccagccgtacgacaggacccaagcggacgtcagcacgggcctcctcatcctcggcgtgctgtgccagtcgctgccgctcatgctgcgctacgcggtgggcgccggcgagcactccgtcgccgcggccaccacggtgctcgacctctcccgcgcctgcagcgtcgtcatgctgctcgcctacgtcgcctacctcttcttccagctcaagacgcacgcgcagctgttcgagccgcaggaggtggacgacggctgcgaggcggaagaggacgagcaggccgtcatcggcttcgccagcggactcttctggctcgccttcaacaccgtgctcatcgccatcctgtccgagtacgtggtcggcaccatcgagcctacctccaagtcctggggtttgtccgtcagcttcatcagcatcatacttctacccatcgtggggaacgccgcggagcacgccggagcaatcatttttgctctcaagaacaagctggacattaccctcggagtagcgttggggtcggcgacccagatctccatgtttgtggtgccgctgagtgtcattgtagcttggatcgcgggtattcaaatggatcttgacttcaagctcatagagaccggctctctcttcgtctcagtaatagtgacagcattcaccctccaggatggttcgtcacactacctcaaggggatccttctgctgctgtgctacattgtgatcggtgcatgcttctttgttacgaggcaacctgcaagtaacaacaatggcgctgggctgtcgctgccaactggcactttgagtgcacaagctgcatgatgggaaatgaacaatactataaccacagtaggacgtatatgaatttgggacagagatg

SEQ ID NO: 199609 - DNA, 6988 bp, Zea Mays
ccccaaccgccttcaacttttggcgcgcctttctccccttgccaaaacccaaatctagggttcactcttccccttccccggcgtgcaacggcagtccaaactatccaagcggccactgggccagcgcgtcttccattcccgctcaacggagcgcacctgccagcatgagcgggcggcggggtccagctgccacaggaggcggacggggaggcggaggcggaggcggcgggaactggcggcggagcgggtcggcgaaggcgaaggagcagcggctgcgcctgggcgcggaggagctcctcgagagccggctaggattcgcgccatacactgatggggagcggcgcctcggatggcttctcaccttttcaccgtcatcatgggaagacgaggacaccggaaaaatctacagctgtgttgacttatactttgtatcacaggatgggtctacgtttaaagtgaaatacaagtttcggccttacttttatgctgcgaccaaggacaagatggagttggaagttgaggcatatattaggcgacgttatgaaggggaaatttctgacatagaaataattgagaaagaggatttagatctgaaaaatcatctttctggcttgaagagaaaatacctgaagcttcagtttgacaccgtacaacaattaatgcgtgtaaggaatgaccttttacatgttgttgaaaagaacgaagaaaaaatagatgctgtggaggcatttgaatcaattcatggtgtaaaaagggtagaaaggccacaagattacataaattacatcattgatttgcgtgagtatgatgttccatatcatgttcgttttgctatagataatgatgtcagaagtggacagtggtacaatgttaatgtatctggttctgatgttttgcttcagagaagggaagacctgcttcagcgtgcagaagttcatgtctgtgcatttgatattgagaccacaaaactgcccctgaagtttccagatgctgaatacgacaacgtaatgatgatttcatacatgattgatgggcaaggatacctgataatcaacagagagtgcgttggagaagacattgatgatttggagtacacacctaaacccgaatttgaggggtattttagagttaagaatgttcaaactgaggagattggtttccaatgtgacaataaccagggcgagtgtcgggctaaattttcttgccatcttgactgttttgcttgggtgaagcgagacagttaccttccacaaggaagccaaggtctaaaggctgttacaaaagccaagctaggttacgatcctctggaggttaatccagaagatatggttcgctttgcaatggagcagccacagacaatggcttcgtattctgtatcagatgctgttgcaacatactatctatacatgacttatgtccatcctttcatcttttctcttgcaaccataatacctatgtcacctgatgaggtactgcggaaaggaagtgggacactttgtgaaatgctgctaatggttcaggcattcaaggctagtgtcatttgtcctaacaagcaccaagctgatcttgagaagttctacaataaccgtttattggaaagtgaaacctacattggtggtcacgttgagtgtcttgaaactggcgtctttagatctgatctccctacaaagttccaacttgaaccattagcatatgagcaactcattggaaatcttgatcgtgatctgcattatgtcattgctgtagaaggaaagttggatattgattctgtcacaaattatgatgaagtcaaggatgccatagagcaaaagcttgttgcattgcgtgatcacccaattcgcgaagaacgccctctaatctatcatctggatgttgctgctatgtatccaaatattattttaaccaatagactccagccaccatccatagttacagatgtggactgcacagcatgtgatttcaatcgtcctggaaaaaattgcctcagaaagcttgaatgggtctggcgaggagagacctacatggcaaaaaagaatgactattatcacataaagaggcaaattgaatcagagctgattcaatctggtggcattgcatcgtcaaagccttttcttgacctctcaaaaccagaacatttacttaaattgaaggatcgtttgaagaaatactgccaaaaggcgcacaaaagagttgttgataaaccaattactgaagtcagagaagcgggaatatgcatgcgtgaaaattctttctatgtagacacagtgcgtagctttcgtgatagaagatatgaatacaaaggtcttaacaaaacatggaaaggaaaactcgcagaagcgaaagccagtggaaattctatgaaaattcaggaagcgcaggatatggttgttctatatgattctttgcaacttgctcacaaagctgggaagaagctaactatatcttatccctgtgtcatgcttaatgctgacgttgcaaggaacaacactaatgatcaatatcaaacattgaaagacccagtaaacaagacatatacaacacacagtgagtgttccattgagtttgaggttgatggaccttacaaggccatgatcttacctgcctctaaagaggaagggattctgataaagaagagatatgctgtcttcaatgaagatggcactttggcagaacttaaaggttttgaaatcaagcgtagaggtgagctgaagctcataaaagtttttcaggcggaggtatttgacaaatttcttcatggttcaactttggaggaatgctattctgctgttgcctctgttgctaaccggtggttggacctactggataatcaaggaattgatattgctgacagtgaattgcttgatttcatatcggagtcgagcacaatgagtaaatctttagttgactacggagagcagaagtcttgtgctgtaactacagcaaaaagacttgccgaatttcttggagattcgatggttaaagacaaaggactacattgccaatatattgttgctcgggagccacaaggcactccagtgagcgagcgtgctgttccggtagctatattcgagacagatcctgagatcgcaaagcattatttaaggaaatggtttagattctcctctgatgcaaacattcgatctattgttgattggtcttactacaagcaacgcttaagttcagctattcagaaaatcattacaattcctgcagcaatgcaaaagatctcaaatcctgttcctcgagttcttcatccagattggttacacaaaaaggtcagggagaaagatgatcgatttcggcagcgtaaactgcgtgatatcttcagtcccttggctaaagaagaggggctgcataacttgaataggactggagatatggaagatttattaatttcaaacaaggatttgaggaaaaatccttctcatggtttagacattgacaaagaaaacaatccaaatggagcatcagtgggatctggtttgaatattagtaaaaaacaacaaaactgtatgactgggttaaatgttccttgcacttcacaaatccaaaatgctgcttcttatgaaacagttgataagggtactgactatcaaggatggcttgatgctaagaaaagaaaatggaaatatgtccgtgaacaaaaaaaacgtcgaaggttgggtgctgccgccacttttgacgatcctaacgctttgctctcggccagacatgccaatcagctacctgtcaacagtcggaatagatctacatttttccagaaacaagaattggccctctttagatcacattggcagataatccagcttgcttcaagtacagtgcctggtcacttttttgcgtgggttgttgctgaagggattatgttcaagattcctattaatgtgcctagaactttttacctaaactcaaaggctcctgtcacagaagagtttccaggaaggcgtgtcaaaaagattctcccacatggtagaccttgtttcaaccttattgaggttgtaacaactgaagaacagttcagggctgaaggcaaaaaacttgcagctcatctagcagagccagatgttgagggaatatacgagacaaaaattccaccagagctcaatgctgttctccaaatcggatgtgtctgcaaagtggacaagtctgcaaaaagacgaagtatacaagatggatgggatctagccgagttgcaaatgaaaacaaccgccgagtgctcatatctggaacagacattttcatttttctatttataccacagcttgagtgaaggaagggctgtatatgtattttacttccccacgtctttccgaatacatgcagtgattgtcaatcctttccgtaacaaagaaatatctccgtcatttcttgaaaagcaatttggagatgcttgccaagcccttggttctgtccctgagaatctgtctttccatgtggactaccaaacatcaattgatgctggaagcaaatacgcacaaagaatgttacttgagtacaggcaacaacattctggacctgtcgtaggcatcatagagtgccctaagctccaagctataaaggtagctatacgagcacttgatgatttgccatgtgtaaccattcctagcaatgcacgtgacaacaactatcaggctcttggctggcaagcaacagctggccgaacaagtatgcagcgttgtgctgcatcaacccaatggttcaatgaacggatttcactcgctaaatatgcacatgtgccactgggtaattttgaactagactggcttctttttactgccgatgtattcttttcaagggcattgcgtgatcaacagcaggtactatggatatctgatgatggcattcctgatttaggaggcacttatgaaggagagacatgttttgctgatgaagtcattcagcctgcacttacttatcctggtgcatatagaagagtttctgttgagcttaagatccaccatttggcggttaatgctctcctaaagagtagtcaagtggacgaaatggaaggaggatcaatcggtagctttggaaacgacgtgcctccgggttcaaatgccactgaaactgactttgatgatgctagcttatgtatacctgctttccaggtgctaaagcaacttattcaaagatgcatttcagatgcagtgtcgtctggaaatgtatttgctgatgcaatattgcaacatctctaccgctggctttgcagcccacgatcgaaacttcatgatccagctctccatcgtcttcttcataatgtgatgaagaaagtctttgctctattgttggccgagttacgaaagctgggggctaatgttatttttgcaaacttttctaagataatcatagatactggaaaagtagatttgtcatctgcacatgcatattgtgacagcttattaaggaccttgcagacgagggacctcttcgagtggatagaattggaaccattgcacttttggcattccttactgttcatggatcagtataactatggcggaattcaagctaaaacacaaaacgtagactcttcagatggtgataatgatattgatattgtctcaagctggaacatggcagaagatttgcccaaagatacacaggatcattttgtcttaatcgtatcagaattcctatatattccgtggaaattcatgaaggaacaagtagctgctcaagctaccataagggatgatacctcatgcactccatctgtaacaatcatggctgctgagaatcttgagggccaggtgatagaacacctccgtgacaagattagcaattactttgcagacaagcttctaagaactgtaagtgatatacttcaccatttcaaagggaaaagcaaacatgagtcagatgaacctgcaaaatctgatcctcacacgcataaaggcgatgctgcattggagttcattaagcatatctgtgcagttcttgctcttgatcaaaatgttcagcatgatattttgagaatgaggaagaacctgttaaagttagttcgtgtaaaggagtttgctccagaagcacaattccaagacccatgcgcctcattcactctgccaaatgtgatctgcagctattgcaacgattgccgggacctggatctctgccgcgactcggcactccagggccaggagtggagatgcgcggtgccgcagtgcgggcagccgtaccaccgcgagcagatggagaacgcgcttctgcaggtggtccggcagcgagagaggctgtaccacctgcaggacctggtgtgcgtgcgctgcaggcaggtgaaggccgcccatctgtcggagcagtgttcctgcgggggctccttccggtgcaaggaggagccttcgtatttcctcagcaaaatgcgggtgttcctgaaggtggcggtgagccaaaagttcccgctcctgcaggactgcgtgcagtggattcttgaagccagatgacgcgggctgctacttcaacatagttcattagttcacctgatcgctaggttgtacaacgtgcacaggctgtagctccgaagagtgtataaacgggtgtatagcgctgccacagttcattgtagctctgccctgcttgcaaaaggttgttgttgtattgtagatattcaaaggtggatggcgagaaacgatagtaaccttggtatcgaaacatctggataactagccctctcgtatgtgattgctgggcatagactattctaagttatgatgtgggcatgtggttgcataagcggtttcgatgacgtgaatagaaatacacgcgtcggaccgtatgctgccagcctgccagtacactgaccttggccacgtcatactagttgtctgtttctgttgccaatcctacactgtattatctgcacaaaggaaaatgaaacggaggacgttgtgctttcgaggggccaggactcgttgggtggatgaagcacgcgtgcccggtgacctcagcctttaggcccccggtacgaattattgcatgagtaccatttgat

SEQ ID NO: 199610 - DNA, 1438 bp, Zea Mays
cactggatataagggaccttccttcctgatacaggaaggcagggttcatgagtggcggcacgcctgcagcaagcagtagcctgcggacatcactctcatactacgtgaggcaagtccgcgcctatgactaccaccactacctctgccttctccacctggccccggccgtgcgcaaggccgcgttcaccttccgcaccttcaacatcgagacagcaagggccatggatgtggtgttcgacccccgagccggcctcatgcgcctcctctggtggaaggagggggtcgacaagatctttggcaacaagctagtcgagcacccagttgcccaggcgctctcttcgatcatcgcagaccacaaggttagcaagcactggctgaagcggtccgtggaggcgaggatcaacgacgccaaccgtgaggaaggcaccattcctaggacgagcgcgaagttggagaggtatgtggaggacacccagtccaccatcctttacatgaccttgcaggctggcggaatacagtccaccgtggctgaccacgccgcctctcacatcggcaaggccagcgggcttctgttactgctcaaggcgctgccgcaccatgtaaataatcaagggacggtacattatatcccagctagtgtggccgaggaatgcggcctgctcatcacacgggagggcggcaggtcggaggtcagggcaggcgagaggctgctagacgtagttttcaaggtcgcatctgttgcggaggctcacctgcataaggcgcgagagttggcaccgtccgtgcccaaagaggcgatccctatgctcctcccagccttgccggcccaggtcctcctggataccctgcgaaggtgagttcaacgtgtttgatccttggctgtcgaggggagtccacggggtctctcctctgtggtaccagctgaagcttaactggaacgcgcggcgaagcaggtactaatgaggaggaggaaccttttgccctcagccatgggagctgttgctgttccttgtagcaaaaagctttttattgggggtttttgacatagcagagattgaataactacttgcggcagatttgaagctgttagggtttagggttattcaattgtgccatgggagctgttgctgttccttgtagcaaaaagctttttattggtgttttttgacatagcagagattgaataactacttgcggcagatttgaagctgttgaatatgtgtcgtgcttttcgttgtgtttgtgggctgggctcatttacattgcacaattgcaacactgacagtgactgttttatttttcttttggaacatacaatgcctgtttgtattaatacagcagaaagcagacaatattttttgataaacgcaattagttttctatagtctatactgaaagtcgcctagaggggggtgaatagggcgaaactgaaatttat

SEQ ID NO: 199611 - DNA, 1346 bp, Zea Mays
gcatatatagatatttccacactgcttgagtcatctccgttataactggacatggactccaatgagatggtgtatattgcatagttgctcaaaggattttttgcttttgaaatcattgactatcattcatgcttgttgatcttttgttagcacaaaaaatagttttgctagaatattagttctggtgcacatagttcttcttgaaattgtataatgattttcaagattttatgtgtgcatatattgatgttccacgctgcttgagtcatctccaatgtcacgtggacctggactccaatgagatggtgtacatttattaattactaaatggattttatgcttttagagtcagaactaatcgtcagctctgaaaatggtgccatttcttactcatcaagccgttcagatgctaatgactcagcttcttccctatccgtaaacggcttgtaccagtcttcagttttctgaactttaagcagataccaataccagaaagacatgctactatggcgtgcaagaataaggctttcatctgactgatctcgggagtgatcatgggccctgaaaaagattttactctatgaccttcatgtgattgtccagcagttagggtagactttaccgggaactggatggaattgaggccccgtttcaatctcacgtgataaactttagcttcctgctaaactttagctatatgaattgaagtgctaaagtttagcttcaattaccaccattagctctcctgtttagattacaaatggctaaaagtagctaaaaaatagctgctaaagtttatctcgcgagattggaacagggcctgagtctgtttaaatcataagttgaaatccattcgaatccctctgaatccacatgtatgtttgttgggctgtgtctgtctttgagtttggttcagctaggaagataatagctatacaaccgccttttgccttatttttttcttcacattttgtttgttcgacctatggggttcgtccctcaatttatgtgaaaccttttcttttgaattagaccaacttatgcaaaacctacatgctatgttccggatgaagggtgctgaacacgctcccatacgaatccgcgagaagtgggaaggcgcaggcgcagccgcaacaggcaacagcaagttcttcaggcagcatgaatgaagacaacagtcactatcctatcatctgctagaggtgctacagtgcgacactctaaacacacaaaggacagaagatgcgtcaaagcagatgttttttttgcatccatgcagaggtgaaacatgattttgaatcctctcaactaacgtattgagataaagaaattttagttctacgaca

SEQ ID NO: 199612 - DNA, 1890 bp, Zea Mays
ctcagttgcattgcattgcattgcagtgtagcaggcatctccgtgggcaattgctggctggcctagctagctagaagtatctcatatccgggtataggagtatctctctcgctttctctagccatgacgctggtgaggatgccttgccgcctctgctgcttcctgctcgtcgtcgccgcctccgccgtctccgggcgggggcgggtggtcaccaccctcccgggctacgagggccgcctccccttccacctcgaaacagggtatgtggaggtggacgaggacgccggcgcggagctcttctactacttcgtccgggccgagtccggcgccgacgacagcgacaccccgttcgtcctccggatccccggcggccaacgctgctccgccttcagcggcctcgcctacgagataggtcccatcatgttcgtcgtggagccctacaacggcagcttgccgcgcctgcgctacaacccaaactcgtggacaaaggtggcgcatattctttttgtggattcgccagttggggccgggttttccttctccagagatgccaaaggctacaacgctggagcggtatcaaccacgctgcacttggcgaagttcctcaacaagtggttcaacgaccatcctgagtaccatgcaaatcctttctacatcgatggagaatcatacgctggaaaaattgtaccattccttgcacagatgatttcagaaggtattggagcaggaatgaagtcggcacctcgtctcaagggctatctagtgggcaacccgtccacagaggagcgtattgatgttagcgctagagtgccttgtgctcacgggtttgggattatatcacatcagttgtatgagatgatattggggcattgccatggagaggactactccaatcctgcaaaagagttgtgtggtcaggcactgaagaccttcaatgatctcacctcggaagttgcgcaaggccatgtactgcaggagaaatgcgtcgcggcgtcgtcgtctcctgtgctgaacgcaaacagcagggtggccggcggctcgtcgtcgtgggcctcagatggcaggaagatcctacgggaggaagaaatggtgggacgacgcggagtactgggcaagctatttcatccaccggctcttcctccattcagttgcagagtttaccggtactacctgtcgtatttctgggcaaacgacaggcgcacccgggatgctcttgggatcaaggagggcaccgtggatgagtgggtcagatgccacaacgacgaccaagagttgccttacgagagcgagctgaagagtgtcgtcaagtaccaccggaacctgacgtccagaggctaccgagccatggtatacagcggcgaccatgacctgctggtgccacatctgggcacccaggcctgggtcaggtcgctcaacttccccgtcgtggacgactggagggcgtggcatctcggtggccagtcagctggggcgccgggcatacagcacctgagtacgagccggagaggtgtttcgccatgttcagccgttggatcctcaaccggccactctaatccatcggtgaatgaagagattcgtgtgtaaatctttcttcacgaaactactggctataagatgtacgtggatggaataaaatgctggctatgaacccttgatgctgatgatatatactccatcagtgtggtgaagccagatatgtattgtaggaataaataaaagtacaaaacggatgtacaaaggtacgtacagtgccctctagctacgctacattagcaatatacacgttcatatacataattttcacgcggcatgcattgtagcagatggaaacatacatgtgtgtccaatgttattcgccgtcgtcttaggatgcgtttggttggagagtct

SEQ ID NO: 199613 - DNA, 1272 bp, Zea Mays
aggaggggggaattcgcttcctgtgggtatcttgtacgcgggaaatgacacgcttttcgagtccactggcctctacggcaggtcttcagttcgaaaggttgagcttcagaccggaaaagttttggttaaccaccaaatggacggagatgtgtttggagaaggtttaactcttcttggtgacagattgtttcaggttacctggttgaagaacgacgggtttatatatgaccggcataacttctccaaatgcacgagttttacccataaaatgcgagatggttggggtctggcgactgatggaaaagttctttttggcagtgatggcacctcaatgctgtataagctggattcaaagtcacttgaagtcatgaaagtggtgactgtcaagtatcacggtaatcaagtcccctatcttaatgagctggaatatatagatggtgaagtctgggcaaatgtctggcagacagattgcatagctagagtgtcccctgaagatggcctagtggtgggttggatctttcttcatgagctgaggcggcagttgtggaactcaggcaacacgaatattgacgtcttaaacgggatagcttgggatgaaagaaggcacagattatttgtgacagggaaactgtggccaaagctatatgagatcaagctacgggcagtagatggtccagcagatggatctgtagaaaagctttgtccaaaagccagcttctatcgctgaagagtgtagaaccgcatatacactgggtgtgctaacatgggccttcatttgtttaaacgcacgatgcgaaggatgtggagatgtgagtacgtacatgtttgatctggtaccactgtcatatatatatacacccatgagttagtagatgtagctgtacattgttgtgacctgtatgaattttgatgatggctgtgttgtttgtgttaagagtgaattgcaacagattttgatgcattcaatgcaacttaatagcttgaagaaactggtgctgttgggcatgtattcatccctgggaagggaaagaaagtcgccaacttatttgggtagatctcagtcactttttggaaagaagaatgtctgggccaactctctctcgagaaacagattttgatgcatcaacatgggggatgatgaatacttctatactgcgttgcgagtacttcggaatgacctgtattaactcaactccgcttcaatcatagaccgtataagaaagccaaaaaaagggatgatgaatataaaccgcgtctgctgtgattactgaa

SEQ ID NO: 199614 - DNA, 1028 bp, Zea Mays
tgaggtcgctaggcatctttgatgatcccgcccgccacgccatctccttgctcccgctcgactctcccgcgccctgccatcctttgccctgttatcctcgcgccggcgcgccgctcctgtgcctgtcgtcctcaccatccttgcatgagtgctctggggctccctccctctcgtgtcgccatgtacaccatcgcgtccccgttcagcaccggccgcaactcatccctttttctcagtttgccccaggaaggctggatccggaggcacattgcccggagggacagttggatcaatctggtgttgaatcgatgccccgtagggtggttcctcccacaagctcccatggccgggtgcccgggtgctagaggatctgctcaatgttgagcaagtcgacatggaggcctgcaatgtggattcagctacttttaggaggattactacgtggtgaaagcctgtttcctgatgcccttgcttggggacaaacaattgttggtgcccagtgaggtgtcaacactgatgctacagaagctacggatgccttgatggaagcgggaactgagacatgggaggtggcgtagaggtgtttacgttttctattgtaagcgtgaatctgtgttgggtcggccaaagagacagcctataaaatgtaataatattgggtccaaaaatgagaaggaaaagaaaagaatactgatcacaccaatcaacttgtgtctcacgtttgccacgcttgcttactcggtggcggcctgtggcgtgctagcgacgacacgctgacagccaagggacgtcacaagtacttacccctaggtttggagaactgcagtttcaaagattggtggtgtcatgttttatagatggttccaatttatctcgctagagattcaactccttggttgttttggtggcatgatgaatttgtaaacatgggaatcaggaatggctgtattttttagggattttttcctaatcttgctgccatcttgtgggatattagagatgaggcaatgttatggtgtatggcggga

SEQ ID NO: 199615 - DNA, 2573 bp, Zea Mays
ctaacgtgtccccagctttcccgtaacgtaacgggacaccacacttctataccgtgcacgcgacgaccctgccgtcggaccggacccactgcgcacccaccgcccagcgggacccacgcggtccttgtcccctcactgcctgcgcagaatgtccccggcccccacccgctgaccccgcctccgcctccgccctccggcgaccccgatccccgccggcgaaatggcggcgtggtgctctgccgagtccaccaagccggtcttcgtcgggatctacggggccgtcctcggcggcttcgcggtctccgccctcttcttcctgctctcctccttctcctcgctctccgcgcccacgctccccctccccgccgcggccatcgctggggccaacctctccgcgcctactctcgcccaggctgaaaccatgtacaaccgccccatctggaagcccccgccccggcgggcgcggatgccctctccgcgcgcgttccgcctcacccgcgacatggtcgccgcccgcgcccgcgacggtgtgatcgtcgtcaccttcggcaactacgcctttctcgacttcatcctcacctgggttcgccacctcaccgacctcggcgtagacaacctcctcgtcggtgccatggacaccaagctgctccgggagctctacttccggggcgtgcccgtcttcgacatgggcagcaggatggtcaccgaggacgccgggtggggctccccaaccttccacaagatgggcagggagaaggtgctgctcatcaacgcgctcctgcctttcgggtacgagctgctcatgtgcgacactgacatggtatggctcaagaacccattgccctacctcgcccgataccccgacgcagatctcctcacgtccagcgatcaggtcatacccaccgtcaccgacgacagcctggagaactggagggaagttactggtgcgttcaacattggtatttttcattggcgacccactgaacctgctaaaaggctggcaaaagattggaaagatttagtcatatctgatgataagttgtgggaccagaatgcttttaatgatcttgtacgcaaaaaatttggacagccagttcaaggagatgatcttgtatattcttatgatgggaaactgaagctgggagtgctaccagcaagtatattttgtagcggccatacatattttgtgcagggcatgtataagcagcttcatttggaaccatatgctgttcatactacttttcagtatgcgggcactgaaggaaagcgccatagattgcgagaggaggtttcctgtcatttaaacctaacattccaaaaagtttgctattagatggtgctcatactgttgaatctcattttgagttggttaactaccagctgaagcaaataagaactgcacttgcggttgcgtccttgttaaagcggacactggtaatgcctccattatggtgcaggcttgatagaatgtggtttggacatcctggaattttagagggaacaatgaccagacaaccttttctctgcccactggatcatgtgtttgaggttcatgttatgctgaaggacttgcccaaggaagagtttggtcaacatattgatttcagagaatactcctttcttgagaatccatcattacctaaagaggtgaaagattcgttactcgaggttgaactttgtgacgagcatagctccagatgctctgcaattgatgaaatcgataagcatggaacctttcttttaccaagaaatagtactgaagaaaagctgttggatttgttgtcatcatataaggatgtcaaaatcatacaattctcatctatggttgatgccttcggtggttttgctgatgcagctgtggagaagaagttccgaaatcgtgtgaacaggtatgtgggcctatggtgctgtgtggagttccgtgaaattggtcacatatattatgacatgtactgggacgagaaaccagggtggaagccacaccctccagagactagggaacaggatcatccaccttggtcatgactactgacaagaagatgctagaaagatcgtgatgatgaagatctgagatcttctagggcaccctgctccaatcgattcttcaggccaattttgtgctgttctagttgtgttcttccatgggtcgctgctgttcgcttgtggccccttgttcgcagctcatcggtcgaagcatggggctcaatgatttagttgggacaacatttagatcacgacttagttccattttccatagtttttgcatcatgttcatagttgatacaggcatcagctccaaaggagaaaaggccattattgttaaatgttgtggaaaacttggctgccagctgctgcaataggaagctgtcgtaactgttgtgcaaaactttgcccccgctgctctgttaggaaatatttggagcagctatctttttgacacattgttctcaagtcttaaccatgaagcattgtcttaatatatataagaaggcatttggtcatatttgagcaacctcagtcgtagaatgataaatgattttcatcagcgaaaagtagatcaatatattttgacc

SEQ ID NO: 199616 - DNA, 1302 bp, Zea Mays
ccgacgtcgtccccttccactcgacaagggaccttccttcctgatacaggaaggcagaattcatgagcggcggcacgcctgcagcaagcagtagcctgcggacagcactctcatactgcgtgaggcaagtccgcgcctatgactaccaccactacctctgccttctccacctggccccggccgtgcgcaaggcagcgttcaccttccgcgccttcaacatcgagacagcaagggccatggatgtggtgtccgacccccggaccggcctcatgcgcctcctctggtggaaggaggcggtcgacaaggtctttggcaacaagctggtcgagcacccagttgcccaggcgctctcttcggtcatcgcagaccacaaggttagcaagcactggctgaagcggtccgtggaggcgaggatcaacgacgccaaccgtgaggaaggcaccattcctgggacgagcgcggagttggagaggtatgcggaggacacccagtccaccatcctttacatgaccttgcaggctggcggaatacagtccaccgtggctgaccacgccgcctctcacatcggcaaggccagcgggcttctgttactgctcaaggcgctgccgcaccatgtaaataagcaagggacggtacattatatcccagctagtgtggccgaggaatgcggcctgctcatcacacgggagggcggcaggtcggaggtcagggcaggcgagaggctgccagacgcagttttcaaggttgcatctgttgcggaggctcacttgcacaaggcgcgggagttggcaccgtccgtgcccaaagaggcgatccctgtgctcctcccagccttgccggcccaggtcctcctggataccctgcgaaggtgtgagttcaacgtgtttgatcctcggctgtcgaggggagtccacggggtctctcctctgtggtaccagctgaagcttaactggaacgcgtggcgaagcaggtactaatgaggaggaggaaccttttgccctcagccatgggagctgttgctgttccttgtagcaaaaagctttttattggggttttttgacatagcagagattgaataactacttgcggcagatttgaagctgttgaatatgtgtcgtgcttttcgttgtgtttgtgggctgggctcatttacattgcacaattgcaacactgacagtgcctgttttatttttcttttggaacatacaatgcctgtttgtattaatacagcagaaagcagacaatattttttgataaacgcaattagttttctatagtctatataattcctgttttcggttc

SEQ ID NO: 199617 - DNA, 1383 bp, Zea Mays
ctcacaccgggccgccacacaaaatcccacacctgcgtatcgcgctgcccaccgcacatccccgcctcccgccggccggccggccgcctgacgactcgcggtcaccgcctgcgggccaccgtccgcccccagctcgctcacgatattgtacgttcgtggcgcggagcaccgtggtgttggcctagtacgtcgatttcacggtgacttcactaccattgccgcccagtggctgcagaagctccccgccagcaacaagttcacctacaactgcgacggccacaccttcagttacctcatagagaaaggatttaggaccttccttcctgatacaggaaggcagaattcatgagcggcggcacgcctgcagcaagcagtagcctgcggacagcactctcatactgcgtgaggcaagtccgcgcctatgactaccaccactacctctgccttctccacctggccccggccgtgcgcaaggcagcgttcaccttccgcgccttcaacatcgagacagcaagggccatggatgtggtgtccgacccccggaccggcctcatgcgcctcctctggtggaaggaggcggtcgacaaggtctttggcaacaagctggtcgagcacccagttgcccaggcgctctcttcggtcatcgcagaccacaaggttagcaagcactggctgaagcggtccgtggaggcgaggatcaacgacgccaaccgtgaggaaggcaccattcctgggacgagcgcggagttggagaggccagcgggcttctgttactgctcaaggcgctgccgcaccatgtaaataagcaagggacggtacattatatcccagctagtgtggccgaggaatgcggcctgctcatcacacgggagggcggcaggtcggaggtcagggcaggcgagaggctgccagacgcagttttcaaggttgcatctgttgcggaggctcacttgcacaaggcgcgggagttggcaccgtccgtgcccaaagaggcgatccctgtgctcctcccagccttgccggcccaggtcctcctggataccctgcgaaggtactaatgaggaggaggaaccttttgccctcagccatgggagctgttgctgttccttgtagcaaaaagctttttattggggttttttgacatagcagagattgaataactacttgcggcagatttgaagctgttgaatatgtgtcgtgcttttcgttgtgtttgtgggctgggctcatttacattgcacaattgcaacactgacagtgcctgttttatttttcttttggaacatacaatgcctgtttgtattaatacagcagaaagcagacaatattttttgataaacgcaattagttttctatagtctatataattcctgttttcggttc

SEQ ID NO: 199618 - DNA, 1328 bp, Zea Mays
ctttttttttggatcttgccatatcccttgaggaatcaaatggattgccagcacgatatcgtgattcagtccgggcaattactcctggcctgcctcttttcctctataactacaccactcaccagcttcatggggtatttgaggctgccagttttggtgggtctaatattgatcccactgcatgggaggataagaagtgtaaaggtgaatctagattcccagcgcaggtgaggatccgcgttaggaagctgtgcaagccgttggaagaggattccttcaggccagttttgcaccactatgatggcccaaagtttcgcctcgagctctccatcgcggagaccctgtccctgctagacctatgcgagaaggaaggcatctgagctgttggctgcctcgtgaggttctagtaaatatcaatcatccttgtatgttctgtagatggtggttggcaatgttgtttatttttcaagcgcaagctgctgccggtctcgttttccctgtcctggatggaagcaaagggacctggtactttgaaggccccccctcaaacataagctgtgagcctgtcagtgcacgtgtccgccgttgtcgtcaagaaccaaaccaaatcatgaaatcttgcgccgacggagagttggagcgtgtatgttttgctatctctatctacatgtctcagtagagtggatataccctggggtccccaaaagatgggggcctgtatgtaacactacgtgtaatggttaaggtgaatgtgccgtgaggccccccaaaagttggagtgtgtatttttgttgtcaccttgaaccgactttgcgtatgcttttttttagtgctgctaccttctgcgctgtgtttggcttctggttcatgtttttgtaatataaggtggcttgcgcaacattgtgtctgtctgtccagccgcaggatctggatgggtttcggcaggtgcaccaaccagacagacttggtatggatggtgaatggttgcatctgttcaaccgctgtcggtcagtgacaggccaagtactagcagatttggttcagctgcttgctggtgagagcaaagtactagcagctttgaagtcgactagagggccttctaggtgttcaagcaataatgcattcgtataacccataataatgaaatggtagcagcctgtcaacattcattcttctactcgagaaattggatggttctggtgatgcttggcttggttgtggttgctcattttgcaatcaatcaaatcaactgaagtggtttgctcatttattgtaatgaaccaaatcaagtgaagggaggcattcttcgcaaaatctaatatacagga

SEQ ID NO: 199619 - DNA, 3155 bp, Zea Mays
cagccactcaccctcctgcctccccacttcacttgcagcattggccatgccattgccatctgcccatctccagggttccaaccatattccaaagtgcacaatggaaacgtacacaaattacggtctttcactccgtttcgatgaaagtttcgcgtactgtaatgtatcgctctatcgaatttaaagattatataaaggtctagagttttggctttttaaggccattaattgtggacgaatcacaactagctagaggaccaatgaccatgctagcgacgggggaactgttgggtgccaaggtcttaactctaaaaaaaccaagtgggcccgagcaagtacgtgggacgcaatccaaggtgcgtgtagcaggtattccaggccgacacgacccagtggcccagtccttatcaccgacacgtgtctcgtgacgtggctcaagcctttggcgcgcctctccctctcccctcccctcgtcccattcctcctctgtcctcccccactcgctcccgttctcccctgcctcgccgcctctctccctgtcgtacccacctgccccctcgcggtctctctctccttcctgattggatcaatctggcctcgcggctccgactgatccgtggcgcctcgctcccgagcggaaccaccacctgatttgacgagactagcagatactgtcatggctcaggatgaagctgtggctacccaaaagactggaaatacaacatctccttctaaggattacccaactccttctccatatcctgattggtcaaccatgcaggcatattatggccctggtgtcttgccaccaacatattttactcctgcaatagctccaggtcatccaccgccatatatgtggggtcctcagcctataatgccaccccctttcgggacaccatatgctgcagtatacccacatggtggagcttacccacacccccttgtgcccatggtaatgatgcctatggacattttttgtttaattaagcacactatatatgtccaaacttggctgatcaagtgaccaagccattcaatgtaggaaatggaaagtaaaacttgattatagttggacaacatttctactcttttggtctgtagttcaccattgatgcacagcatgtagaatgttgtccataacctgtaattttgtagcctcatcagaacaaaggatctgcactgtgcatctagctctattttatattagctgcccgaggcttgccctaccagcagaagatgctgcgcacttattaatcatccattgccgctactccattcggatctgggacaagatatatgcctggcttgcggctgttttggagcctcgtggggtatgtgaaaattttatatcggtgacagagtggtggaatgaggttgtacactcaaaactcaaaagggtgtcctagaaaggcattttgttcgatcccaattctgtaacctgggaaatctcgaaggagcgaaatgcaagaatttcaatcggagacactctttggcaatctatcttgtgacaaagataaaggagcaggccacgacttggggcagtgcaggtgcaagacaccttaaggagatcctacagagcacttagctttttgctgtaaattcttgttagtctttccttcctctcgtatttatgcatgtttaacaatgtatacagttgttggcttaagcctcttcccctatttttaaataaatggcagatcctgcctgtctacgttcaaaaaatatatatttacacttcatcatgcccttggacgatctactaatctcctttagttccttctaaagttattatgttcatctttgtcttaatcactaagaataaatcattcgtttttgaagttttccattctaatcaatgttatcaatttgatgttctcatgctgctttcaagatgtcaactccaatgagcgtggagccagccaaatctacaaatagcaaggagaaaaattccaataagaaacttaaggaaatagatcggactgcagtgtctgctggcagtggtaacagtaaaagaacagtgtcatccattgaagattacagtgcagaaggctcaagcgatgtaaacgatcagaatgtgaacgaaacgtccaggaagcggagctcagatggtggacctggcgcagaaaccaccacaggtggaaacacggaatgtgttttagctcctaaccatacgctggggaatgctaccattttgccacaacactgcttttcagctccagtaattaagcccagtgctacaaatgtcgcgaactcgagggcgataggcacagcattatctccaccacctggtgtgatggttccagttcataatgcagtaccatctgacttatcagttaaggatgagagggaattgaagcgcgaaaagaggaagcagtcaaatagggagtctgctagacgatcaaggctgagaaaacaggctgagacagaggagttggctacacaagtggagtctcttgcagcagagaacacgtcccttagatctgaaatcggccagctaacagagagctcagagaagctcagactagagaattcagctctaatggtgaagctgaaggacaccgcagaaccgtctccgattaaagcatccgcatccccgtcctctccccgtgcctccgcggagaacttcctttccatgatcgacagcgccaacgcgccgagcgtcagcaggcacacggagcacggcggtcccaggctccggcagctcctggactccagtccggcgacagacgtcgccgccgtaagctgatgatgaagccggtccggcaaatacgccacagcacatgcatgtgtcctggggattccgcaggctcatgctgctcgagtgctcgtcagcgttacggactcggactctgtactccagtttaggcactgattccagtgaagtaaccgagggtaccggtaattttatctgctctcgcgccagagtgccgggctgccttgcctgcgaccactcctgtcctgtgtacccagagttgtaacgtagtagggtgttgtgctgcatgccgaccttttgaaactttcgagaccgtcatttggaccatttttttcgtcgcagtaacacaatacagatcggagtttgtacaggacggatgctgcctggtgtgcgcaattctctactgcaaaataccgacaaaaattctgtttgttttttg

SEQ ID NO: 199620 - DNA, 1919 bp, Zea Mays
gacacgtgtctcgtgacgtggctcaagcctttggcgcgcctctccctctcccctcccctcgtcccattcctcctctgtcctcccccactcgctcccgttctcccctgcctcgccgcctctctccctgtcgtacccacctgccccctcgcggtctctctctccttcctgattggatcaatctggcctcgcggctccgactgatccgtggcgcctcgctcccgagcggaaccaccacctgatttgacgagagagctaggtgggccgtagaaaaggcttcagttcagatctcatttcagatagcacaggaccaatctggtctgcagtgttcaactggaatataagatttcgctgcataggtcaaagactagcagatactgtcatggctcaggatgaagctgtggctacccaaaagactggaaatacaacatctccttctaaggattacccaactccttctccatatcctgattggtcaaccatgcaggcatattatggccctggtgtcttgccaccaacatattttactcctgcaatagctccaggtcatccaccgccatatatgtggggtcctcagcctataatgccaccccctttcgggacaccatatgctgcagtatacccacatggtggagcttacccacacccccttgtgcccatgatgtcaactccaatgagcgtggagccagccaaatctacaaatagcaaggagaaaaattccaataagaaacttaaggaaatagatcggactgcagtgtctgctggcagtggtaacagtaaaagaacagtgtcatccattgaagattacagtgcagaaggctcaagcgatgtaaacgatcagaatgtgaacgaaacgtccaggaagcggagctcagatggtggacctggcgcagaaaccaccacaggtggaaacacggaatgtgttttagctcctaaccatacgctggggaatgctaccattttgccacaacactgcttttcagctccagtaattaagcccagtgctacaaatgtcgcgaactcgagggcgataggcacagcattatctccaccacctggtgtgatggttccagttcataatgcagtaccatctgacttatcagttaaggatgagagggaattgaagcgcgaaaagaggaagcagtcaaatagggagtctgctagacgatcaaggctgagaaaacaggctgagacagaggagttggctacacaagtggagtctcttgcagcagagaacacgtcccttagatctgaaatcggccagctaacagagagctcagagaagctcagactagagaattcagctctaatggtgaagctgaaggacaccgcagaaccgtctccgattaaagcatccgcatccccgtcctctccccgtgcctccgcggagaacttcctttccatgatcgacagcgccaacgcgccgagcgtcagcaggcacacggagcacggcggtcccaggctccggcagctcctggactccagtccggcgacagacgtcgccgccgtaagctgatgatgaagccggtccggcaaatacgccacagcacatgcatgtgtcctggggattccgcaggctcatgctgctcgagtgctcgtcagcgttacggactcggactctgtactccagtttaggcactgattccagtgaagtaaccgagggtaccggtaattttatctgctctcgcgccagagtgccgggctgccttgcctgcgaccactcctgtcctgtgtacccagagttgtaacgtagtagggtgttgtgctgcatgccgaccttttgaaactttcgagaccgtcatttggaccatttttttcgtcgcagtaacacaatacagatcggagtttgtacaggacggatgctgcctggtgtgcgcaattctctactgcaaaataccgacaaaaattctgtttgttttttg

SEQ ID NO: 199621 - DNA, 2447 bp, Zea Mays
ctcgtgacgtggctcaagcctttggcgcgcctctccctctcccctcccctcgtcccattcctcctctgtcctcccccactcgctcccgttctcccctgcctcgccgcctctctccctgtcgtacccacctgccccctcgcggtctctctctccttcctgattggatcaatctggcctcgcggctccgactgatccgtggcgcctcgctcccgagcggaaccaccacctgatttgacgagactagcagatactgtcatggctcaggatgaagctgtggctacccaaaagactggaaatacaacatctccttctaaggattacccaactccttctccatatcctgattggtcaaccatgcaggcatattatggccctggtgtcttgccaccaacatattttactcctgcaatagctccaggtcatccaccgccatatatgtggggtcctcagcctataatgccaccccctttcgggacaccatatgctgcagtatacccacatggtggagcttacccacacccccttgtgcccatggtaatgatgcctatggacattttttgtttaattaagcacactatatatgtccaaacttggctgatcaagtgaccaagccattcaatgtaggaaatggaaagtaaaacttgattatagttggacaacatttctactcttttggtctgtagttcaccattgatgcacagcatgtagaatgttgtccataacctgtaattttgtagcctcatcagaacaaaggatctgcactgtgcatctagctctattttatattagctgcccgaggcttgccctaccagcagaagatgctgcgcacttattaatcatccattgccgctactccattcggatctgggacaagatatatgcctggcttgcggctgttttggagcctcgtggggtatgtgaaaattttatatcggtgacagagtggtggaatgaggttgtacactcaaaactcaaaagggtgtcctagaaaggcattttgttcgatcccaattctgtaacctgggaaatctcgaaggagcgaaatgcaagaatttcaatcggagacactctttggcaatctatcttgtgacaaagataaaggagcaggccacgacttggggcagtgcaggtgcaagacaccttaaggagatcctacagagcacttagctttttgctgtaaattcttatgtcaactccaatgagcgtggagccagccaaatctacaaatagcaaggagaaaaattccaataagaaacttaaggaaatagatcggactgcagtgtctgctggcagtggtaacagtaaaagaacagtgtcatccattgaagattacagtgcagaaggctcaagcgatgtaaacgatcagaatgtgaacgaaacgtccaggaagcggagctcagatggtggacctggcgcagaaaccaccacaggtggaaacacggaatgtgttttagctcctaaccatacgctggggaatgctaccattttgccacaacactgcttttcagctccagtaattaagcccagtgctacaaatgtcgcgaactcgagggcgataggcacagcattatctccaccacctggtgtgatggttccagttcataatgcagtaccatctgacttatcagttaaggatgagagggaattgaagcgcgaaaagaggaagcagtcaaatagggagtctgctagacgatcaaggctgagaaaacaggctgagacagaggagttggctacacaagtggagtctcttgcagcagagaacacgtcccttagatctgaaatcggccagctaacagagagctcagagaagctcagactagagaattcagctctaatggtgaagctgaaggacaccgcagaaccgtctccgattaaagcatccgcatccccgtcctctccccgtgcctccgcggagaacttcctttccatgatcgacagcgccaacgcgccgagcgtcagcaggcacacggagcacggcggtcccaggctccggcagctcctggactccagtccggcgacagacgtcgccgccgtaagctgatgatgaagccggtccggcaaatacgccacagcacatgcatgtgtcctggggattccgcaggctcatgctgctcgagtgctcgtcagcgttacggactcggactctgtactccagtttaggcactgattccagtgaagtaaccgagggtaccggtaattttatctgctctcgcgccagagtgccgggctgccttgcctgcgaccactcctgtcctgtgtacccagagttgtaacgtagtagggtgttgtgctgcatgccgaccttttgaaactttcgagaccgtcatttggaccatttttttcgtcgcagtaacacaatacagatcggagtttgtacaggacggatgctgcctggtgtgcgcaattctctactgcaaaataccgacaaaaattctgtttgttttttg

SEQ ID NO: 199622 - DNA, 3051 bp, Zea Mays
cgcctctccctctcccctcccctcgtcccattcctcctctgtcctcccccactcgctcccgttctcccctgcctcgccgcctctctccctgtcgtacccacctgccccctcgcggtctctctctccttcctgattggatcaatctggcctcgcggctccgactgatccgtggcgcctcgctcccgagcggaaccaccacctgatttgacgagagagctaggtgggccgtagaaaaggcttcagttcagatctcatttcagatagcacaggaccaatctggtctgcagtgttcaactggaatataagatttcgctgcataggtcaaagactagcagatactgtcatggctcaggatgaagctgtggctacccaaaagactggaaatacaacatctccttctaaggattacccaactccttctccatatcctgattggtcaaccatgcaggcatattatggccctggtgtcttgccaccaacatattttactcctgcaatagctccaggtcatccaccgccatatatgtggggtcctcagcctataatgccaccccctttcgggacaccatatgctgcagtatacccacatggtggagcttacccacacccccttgtgcccatggtaatgatgcctatggacattttttgtttaattaagcacactatatatgtccaaacttggctgatcaagtgaccaagccattcaatgtaggaaatggaaagtaaaacttgattatagttggacaacatttctactcttttggtctgtagttcaccattgatgcacagcatgtagaatgttgtccataacctgtaattttgtagcctcatcagaacaaaggatctgcactgtgcatctagctctattttatattagctgcccgaggcttgccctaccagcagaagatgctgcgcacttattaatcatccattgccgctactccattcggatctgggacaagatatatgcctggcttgcggctgttttggagcctcgtggggtatgtgaaaattttatatcggtgacagagtggtggaatgaggttgtacactcaaaactcaaaagggtgtcctagaaaggcattttgttcgatcccaattctgtaacctgggaaatctcgaaggagcgaaatgcaagaatttcaatcggagacactctttggcaatctatcttgtgacaaagataaaggagcaggccacgacttggggcagtgcaggtgcaagacaccttaaggagatcctacagagcacttagctttttgctgtaaattcttgttagtctttccttcctctcgtatttatgcatgtttaacaatgtatacagttgttggcttaagcctcttcccctatttttaaataaatggcagatcctgcctgtctacgttcaaaaaatatatatttacacttcatcatgcccttggacgatctactaatctcctttagttccttctaaagttattatgttcatctttgtcttaatcactaagaataaatcattcgtttttgaagttttccattctaatcaatgttatcaatttgatgttctcatgctgctttcaagatgtcaactccaatgagcgtggagccagccaaatctacaaatagcaaggagaaaaattccaataagaaacttaaggaaatagatcggactgcagtgtctgctggcagtggtaacagtaaaagaacagtgtcatccatgtatggcatacattttgcttctgtctgtggattcttttactgcccccagccccctcctgttctcttttggtaaactgaagttatattttctgactatttatccagtgaagattacagtgcagaaggctcaagcgatgtaaacgatcagaatgtgaacgaaacgtccaggaagcggagctcagatggtggacctggcgcagaaaccaccacaggtggaaacacggaatgtgttttagctcctaaccatacgctggggaatgctaccattttgccacaacactgcttttcagctccagtaattaagcccagtgctacaaatgtcgcgaactcgagggcgataggcacagcattatctccaccacctggtgtgatggttccagttcataatgcagtaccatctgacttatcagttaaggatgagagggaattgaagcgcgaaaagaggaagcagtcaaatagggagtctgctagacgatcaaggctgagaaaacaggtgtgctgtgtgatacagttgtacaatgaagcagcatcctgaaacatgggagtggagtctggcttggattatttgtcctaacaacatatcttcaatcttatacttatgccctcccttggtgtaggctgagacagaggagttggctacacaagtggagtctcttgcagcagagaacacgtcccttagatctgaaatcggccagctaacagagagctcagagaagctcagactagagaattcagctctaatggtgaagctgaaggacaccgcagaaccgtctccgattaaagcatccgcatccccgtcctctccccgtgcctccgcggagaacttcctttccatgatcgacagcgccaacgcgccgagcgtcagcaggcacacggagcacggcggtcccaggctccggcagctcctggactccagtccggcgacagacgtcgccgccgtaagctgatgatgaagccggtccggcaaatacgccacagcacatgcatgtgtcctggggattccgcaggctcatgctgctcgagtgctcgtcagcgttacggactcggactctgtactccagtttaggcactgattccagtgaagtaaccgagggtaccggtaattttatctgctctcgcgccagagtgccgggctgccttgcctgcgaccactcctgtcctgtgtacccagagttgtaacgtagtagggtgttgtgctgcatgccgaccttttgaaactttcgagaccgtcatttggaccatttttttcgtcgcagtaacacaatacagatcggagtttgtacaggacggatgctgcctggtgtgcgcaattctctactgcaaaataccgacaaaaattctgtttgttttttg

SEQ ID NO: 199623 - DNA, 2999 bp, Zea Mays
cgcctctccctctcccctcccctcgtcccattcctcctctgtcctcccccactcgctcccgttctcccctgcctcgccgcctctctccctgtcgtacccacctgccccctcgcggtctctctctccttcctgattggatcaatctggcctcgcggctccgactgatccgtggcgcctcgctcccgagcggaaccaccacctgatttgacgagactagcagatactgtcatggctcaggatgaagctgtggctacccaaaagactggaaatacaacatctccttctaaggattacccaactccttctccatatcctgattggtcaaccatgcaggcatattatggccctggtgtcttgccaccaacatattttactcctgcaatagctccaggtcatccaccgccatatatgtggggtcctcagcctataatgccaccccctttcgggacaccatatgctgcagtatacccacatggtggagcttacccacacccccttgtgcccatggtaatgatgcctatggacattttttgtttaattaagcacactatatatgtccaaacttggctgatcaagtgaccaagccattcaatgtaggaaatggaaagtaaaacttgattatagttggacaacatttctactcttttggtctgtagttcaccattgatgcacagcatgtagaatgttgtccataacctgtaattttgtagcctcatcagaacaaaggatctgcactgtgcatctagctctattttatattagctgcccgaggcttgccctaccagcagaagatgctgcgcacttattaatcatccattgccgctactccattcggatctgggacaagatatatgcctggcttgcggctgttttggagcctcgtggggtatgtgaaaattttatatcggtgacagagtggtggaatgaggttgtacactcaaaactcaaaagggtgtcctagaaaggcattttgttcgatcccaattctgtaacctgggaaatctcgaaggagcgaaatgcaagaatttcaatcggagacactctttggcaatctatcttgtgacaaagataaaggagcaggccacgacttggggcagtgcaggtgcaagacaccttaaggagatcctacagagcacttagctttttgctgtaaattcttgttagtctttccttcctctcgtatttatgcatgtttaacaatgtatacagttgttggcttaagcctcttcccctatttttaaataaatggcagatcctgcctgtctacgttcaaaaaatatatatttacacttcatcatgcccttggacgatctactaatctcctttagttccttctaaagttattatgttcatctttgtcttaatcactaagaataaatcattcgtttttgaagttttccattctaatcaatgttatcaatttgatgttctcatgctgctttcaagatgtcaactccaatgagcgtggagccagccaaatctacaaatagcaaggagaaaaattccaataagaaacttaaggaaatagatcggactgcagtgtctgctggcagtggtaacagtaaaagaacagtgtcatccattgaagattacagtgcagaaggctcaagcgatgtaaacgatcagaatgtgaacgaaacgtccaggaagcggagctcagatggtggacctggtattttacttctctaacaagtctttcagtgtatatagataccatgctagtcattacttctcgccaatacttgttagaggcagagatgttacctaatataatcagtcattctgccaaattggtcatcttgttctcttctactatgccttcttcagtggtcccgcgtgcatgttttccttttgacaatagttgcacaaaacctttcagttgcttcagggggtagtaactagatcaaaccatgttctgtgcatcagaacatgcaagaaaatggctaatcaaaatatatttgcaggcgcagaaaccaccacaggtggaaacacggaatgtgttttagctcctaaccatacgctggggaatgctaccattttgccacaacactgcttttcagctccagtaattaagcccagtgctacaaatgtcgcgaactcgagggcgataggcacagcattatctccaccacctggtgtgatggttccagttcataatgcagtaccatctgacttatcagttaaggatgagagggaattgaagcgcgaaaagaggaagcagtcaaatagggagtctgctagacgatcaaggctgagaaaacaggctgagacagaggagttggctacacaagtggagtctcttgcagcagagaacacgtcccttagatctgaaatcggccagctaacagagagctcagagaagctcagactagagaattcagctctaatggtgaagctgaaggacaccgcagaaccgtctccgattaaagcatccgcatccccgtcctctccccgtgcctccgcggagaacttcctttccatgatcgacagcgccaacgcgccgagcgtcagcaggcacacggagcacggcggtcccaggctccggcagctcctggactccagtccggcgacagacgtcgccgccgtaagctgatgatgaagccggtccggcaaatacgccacagcacatgcatgtgtcctggggattccgcaggctcatgctgctcgagtgctcgtcagcgttacggactcggactctgtactccagtttaggcactgattccagtgaagtaaccgagggtaccggtaattttatctgctctcgcgccagagtgccgggctgccttgcctgcgaccactcctgtcctgtgtacccagagttgtaacgtagtagggtgttgtgctgcatgccgaccttttgaaactttcgagaccgtcatttggaccatttttttcgtcgcagtaacacaatacagatcggagtttgtacaggacggatgctgcctggtgtgcgcaattctctactgcaaaataccgacaaaaattctgtttgttttttg

SEQ ID NO: 199624 - DNA, 2728 bp, Zea Mays
ctcccctcccctcgtcccattcctcctctgtcctcccccactcgctcccgttctcccctgcctcgccgcctctctccctgtcgtacccacctgccccctcgcggtctctctctccttcctgattggatcaatctggcctcgcggctccgactgatccgtggcgcctcgctcccgagcggaaccaccacctgatttgacgagactagcagatactgtcatggctcaggatgaagctgtggctacccaaaagactggaaatacaacatctccttctaaggtagaatttgagtactttgctgcactcccacctcgttggaacagggtggtctaagcaataagcacgatatttcacaggcatattatggccctggtgtcttgccaccaacatattttactcctgcaatagctccaggtcatccaccgccatatatgtggggtcctcagcctataatgccaccccctttcgggacaccatatgctgcagtatacccacatggtggagcttacccacacccccttgtgcccatggtaatgatgcctatggacattttttgtttaattaagcacactatatatgtccaaacttggctgatcaagtgaccaagccattcaatgtaggaaatggaaagtaaaacttgattatagttggacaacatttctactcttttggtctgtagttcaccattgatgcacagcatgtagaatgttgtccataacctgtaattttgtagcctcatcagaacaaaggatctgcactgtgcatctagctctattttatattagctgcccgaggcttgccctaccagcagaagatgctgcgcacttattaatcatccattgccgctactccattcggatctgggacaagatatatgcctggcttgcggctgttttggagcctcgtggggtatgtgaaaattttatatcggtgacagagtggtggaatgaggttgtacactcaaaactcaaaagggtgtcctagaaaggcattttgttcgatcccaattctgtaacctgggaaatctcgaaggagcgaaatgcaagaatttcaatcggagacactctttggcaatctatcttgtgacaaagataaaggagcaggccacgacttggggcagtgcaggtgcaagacaccttaaggagatcctacagagcacttagctttttgctgtaaattcttgttagtctttccttcctctcgtatttatgcatgtttaacaatgtatacagttgttggcttaagcctcttcccctatttttaaataaatggcagatcctgcctgtctacgttcaaaaaatatatatttacacttcatcatgcccttggacgatctactaatctcctttagttccttctaaagttattatgttcatctttgtcttaatcactaagaataaatcattcgtttttgaagttttccattctaatcaatgttatcaatttgatgttctcatgctgctttcaagatgtcaactccaatgagcgtggagccagccaaatctacaaatagcaaggagaaaaattccaataagaaacttaaggaaatagatcggactgcagtgtctgctggcagtggtaacagtaaaagaacagtgtcatccattgaagattacagtgcagaaggctcaagcgatgtaaacgatcagaatgtgaacgaaacgtccaggaagcggagctcagatggtggacctggcgcagaaaccaccacaggtggaaacacggaatgtgttttagctcctaaccatacgctggggaatgctaccattttgccacaacactgcttttcagctccagtaattaagcccagtgctacaaatgtcgcgaactcgagggcgataggcacagcattatctccaccacctggtgtgatggttccagttcataatgcagtaccatctgacttatcagttaaggatgagagggaattgaagcgcgaaaagaggaagcagtcaaatagggagtctgctagacgatcaaggctgagaaaacaggctgagacagaggagttggctacacaagtggagtctcttgcagcagagaacacgtcccttagatctgaaatcggccagctaacagagagctcagagaagctcagactagagaattcagctctaatggtgaagctgaaggacaccgcagaaccgtctccgattaaagcatccgcatccccgtcctctccccgtgcctccgcggagaacttcctttccatgatcgacagcgccaacgcgccgagcgtcagcaggcacacggagcacggcggtcccaggctccggcagctcctggactccagtccggcgacagacgtcgccgccgtaagctgatgatgaagccggtccggcaaatacgccacagcacatgcatgtgtcctggggattccgcaggctcatgctgctcgagtgctcgtcagcgttacggactcggactctgtactccagtttaggcactgattccagtgaagtaaccgagggtaccggtaattttatctgctctcgcgccagagtgccgggctgccttgcctgcgaccactcctgtcctgtgtacccagagttgtaacgtagtagggtgttgtgctgcatgccgaccttttgaaactttcgagaccgtcatttggaccatttttttcgtcgcagtaacacaatacagatcggagtttgtacaggacggatgctgcctggtgtgcgcaattctctactgcaaaataccgacaaaaattctgtttgttttttg

SEQ ID NO: 199625 - DNA, 3065 bp, Zea Mays
ctcctctgtcctcccccactcgctcccgttctcccctgcctcgccgcctctctccctgtcgtacccacctgccccctcgcggtctctctctccttcctgattggatcaatctggcctcgcggctccgactgatccgtggcgcctcgctcccgagcggaaccaccacctgatttgacgagactagcagatactgtcatggctcaggatgaagctgtggctacccaaaagactggaaatacaacatctccttctaaggattacccaactccttctccatatcctgattggtcaaccatgcaggcatattatggccctggtgtcttgccaccaacatattttactcctgcaatagctccaggtcatccaccgccatatatgtggggtcctcagcctataatgccaccccctttcgggacaccatatgctgcagtatacccacatggtggagcttacccacacccccttgtgcccatggtaatgatgcctatggacattttttgtttaattaagcacactatatatgtccaaacttggctgatcaagtgaccaagccattcaatgtaggaaatggaaagtaaaacttgattatagttggacaacatttctactcttttggtctgtagttcaccattgatgcacagcatgtagaatgttgtccataacctgtaattttgtagcctcatcagaacaaaggatctgcactgtgcatctagctctattttatattagctgcccgaggcttgccctaccagcagaagatgctgcgcacttattaatcatccattgccgctactccattcggatctgggacaagatatatgcctggcttgcggctgttttggagcctcgtggggtatgtgaaaattttatatcggtgacagagtggtggaatgaggttgtacactcaaaactcaaaagggtgtcctagaaaggcattttgttcgatcccaattctgtaacctgggaaatctcgaaggagcgaaatgcaagaatttcaatcggagacactctttggcaatctatcttgtgacaaagataaaggagcaggccacgacttggggcagtgcaggtgcaagacaccttaaggagatcctacagagcacttagctttttgctgtaaattcttgttagtctttccttcctctcgtatttatgcatgtttaacaatgtatacagttgttggcttaagcctcttcccctatttttaaataaatggcagatcctgcctgtctacgttcaaaaaatatatatttacacttcatcatgcccttggacgatctactaatctcctttagttccttctaaagttattatgttcatctttgtcttaatcactaagaataaatcattcgtttttgaagttttccattctaatcaatgttatcaatttgatgttctcatgctgctttcaagatgtcaactccaatgagcgtggagccagccaaatctacaaatagcaaggagaaaaattccaataagaaacttaaggaaatagatcggactgcagtgtctgctggcagtggtaacagtaaaagaacagtgtcatccatgtatggcatacattttgcttctgtctgtggattcttttactgcccccagccccctcctgttctcttttggtaaactgaagttatattttctgactatttatccagtgaagattacagtgcagaaggctcaagcgatgtaaacgatcagaatgtgaacgaaacgtccaggaagcggagctcagatggtggacctggtattttacttctctaacaagtctttcagtgtatatagataccatgctagtcattacttctcgccaatacttgttagaggcagagatgttacctaatataatcagtcattctgccaaattggtcatcttgttctcttctactatgccttcttcagtggtcccgcgtgcatgttttccttttgacaatagttgcacaaaacctttcagttgcttcagggggtagtaactagatcaaaccatgttctgtgcatcagaacatgcaagaaaatggctaatcaaaatatatttgcaggcgcagaaaccaccacaggtggaaacacggaatgtgttttagctcctaaccatacgctggggaatgctaccattttgccacaacactgcttttcagctccagtaattaagcccagtgctacaaatgtcgcgaactcgagggcgataggcacagcattatctccaccacctggtgtgatggttccagttcataatgcagtaccatctgacttatcagatgagagggaattgaagcgcgaaaagaggaagcagtcaaatagggagtctgctagacgatcaaggctgagaaaacaggctgagacagaggagttggctacacaagtggagtctcttgcagcagagaacacgtcccttagatctgaaatcggccagctaacagagagctcagagaagctcagactagagaattcagctctaatggtgaagctgaaggacaccgcagaaccgtctccgattaaagcatccgcatccccgtcctctccccgtgcctccgcggagaacttcctttccatgatcgacagcgccaacgcgccgagcgtcagcaggcacacggagcacggcggtcccaggctccggcagctcctggactccagtccggcgacagacgtcgccgccgtaagctgatgatgaagccggtccggcaaatacgccacagcacatgcatgtgtcctggggattccgcaggctcatgctgctcgagtgctcgtcagcgttacggactcggactctgtactccagtttaggcactgattccagtgaagtaaccgagggtaccggtaattttatctgctctcgcgccagagtgccgggctgccttgcctgcgaccactcctgtcctgtgtacccagagttgtaacgtagtagggtgttgtgctgcatgccgaccttttgaaactttcgagaccgtcatttggaccatttttttcgtcgcagtaacacaatacagatcggagtttgtacaggacggatgctgcctggtgtgcgcaattctctactgcaaaataccgacaaaaattctgtttgttttttg

SEQ ID NO: 199626 - DNA, 2666 bp, Zea Mays
cctctgtcctcccccactcgctcccgttctcccctgcctcgccgcctctctccctgtcgtacccacctgccccctcgcggtctctctctccttcctgattggatcaatctggcctcgcggctccgactgatccgtggcgcctcgctcccgagcggaaccaccacctgatttgacgagactagcagatactgtcatggctcaggatgaagctgtggctacccaaaagactggaaatacaacatctccttctaaggattacccaactccttctccatatcctgattggtcaaccatgcaggcatattatggccctggtgtcttgccaccaacatattttactcctgcaatagctccaggtcatccaccgccatatatgtggggtcctcagcctataatgccaccccctttcgggacaccatatgctgcagtatacccacatggtggagcttacccacacccccttgtgcccatggtaatgatgcctatggacattttttgtttaattaagcacactatatatgtccaaacttggctgatcaagtgaccaagccattcaatgtaggaaatggaaagtaaaacttgattatagttggacaacatttctactcttttggtctgtagttcaccattgatgcacagcatgtagaatgttgtccataacctgtaattttgtagcctcatcagaacaaaggatctgcactgtgcatctagctctattttatattagctgcccgaggcttgccctaccagcagaagatgctgcgcacttattaatcatccattgccgctactccattcggatctgggacaagatatatgcctggcttgcggctgttttggagcctcgtggggtatgtgaaaattttatatcggtgacagagtggtggaatgaggttgtacactcaaaactcaaaagggtgtcctagaaaggcattttgttcgatcccaattctgtaacctgggaaatctcgaaggagcgaaatgcaagaatttcaatcggagacactctttggcaatctatcttgtgacaaagataaaggagcaggccacgacttggggcagtgcaggtgcaagacaccttaaggagatcctacagagcacttagctttttgctgtaaattcttgttagtctttccttcctctcgtatttatgcatgtttaacaatgtatacagttgttggcttaagcctcttcccctatttttaaataaatggcagatcctgcctgtctacgttcaaaaaatatatatttacacttcatcatgcccttggacgatctactaatctcctttagttccttctaaagttattatgttcatctttgtcttaatcactaagaataaatcattcgtttttgaagttttccattctaatcaatgttatcaatttgatgttctcatgctgctttcaagatgtcaactccaatgagcgtggagccagccaaatctacaaatagcaaggagaaaaattccaataagaaacttaaggaaatagatcggactgcagtgtctgctggcagtggtaacagtaaaagaacagtgtcatccattgaagattacagtgcagaaggctcaagcgatgtaaacgatcagaatgtgaacgaaacgtccaggaagcggagctcagatggtggacctgaaaccaccacaggtggaaacacggaatgtgttttagctcctaaccatacgctggggaatgctaccattttgccacaacactgcttttcagctccagtaattaagcccagtgctacaaatgtcgcgaactcgagggcgataggcacagcattatctccaccacctggtgtgatggttccagttcataatgcagtaccatctgacttatcagttaaggatgagagggaattgaagcgcgaaaagaggaagcagtcaaatagggagtctgctagacgatcaaggctgagaaaacaggctgagacagaggagttggctacacaagtggagtctcttgcagcagagaacacgtcccttagatctgaaatcggccagctaacagagagctcagagaagctcagactagagaattcagctctaatggtgaagctgaaggacaccgcagaaccgtctccgattaaagcatccgcatccccgtcctctccccgtgcctccgcggagaacttcctttccatgatcgacagcgccaacgcgccgagcgtcagcaggcacacggagcacggcggtcccaggctccggcagctcctggactccagtccggcgacagacgtcgccgccgtaagctgatgatgaagccggtccggcaaatacgccacagcacatgcatgtgtcctggggattccgcaggctcatgctgctcgagtgctcgtcagcgttacggactcggactctgtactccagtttaggcactgattccagtgaagtaaccgagggtaccggtaattttatctgctctcgcgccagagtgccgggctgccttgcctgcgaccactcctgtcctgtgtacccagagttgtaacgtagtagggtgttgtgctgcatgccgaccttttgaaactttcgagaccgtcatttggaccatttttttcgtcgcagtaacacaatacagatcggagtttgtacaggacggatgctgcctggtgtgcgcaattctctactgcaaaataccgacaaaaattctgtttgttttttg

SEQ ID NO: 199627 - DNA, 1805 bp, Zea Mays
cctctgtcctcccccactcgctcccgttctcccctgcctcgccgcctctctccctgtcgtacccacctgccccctcgcggtctctctctccttcctgattggatcaatctggcctcgcggctccgactgatccgtggcgcctcgctcccgagcggaaccaccacctgatttgacgagactagcagatactgtcatggctcaggatgaagctgtggctacccaaaagactggaaatacaacatctccttctaaggattacccaactccttctccatatcctgattggtcaaccatgcaggtagaatttgagtactttgctgcactcccacctcgttggaacagggtggtctaagcaataagcacgatatttcacaggcatattatggccctggtgtcttgccaccaacatattttactcctgcaatagctccaggtcatccaccgccatatatgtggggtcctcagcctataatgccaccccctttcgggacaccatatgctgcagtatacccacatggtggagcttacccacacccccttgtgcccatgatgtcaactccaatgagcgtggagccagccaaatctacaaatagcaaggagaaaaattccaataagaaacttaaggaaatagatcggactgcagtgtctgctggcagtggtaacagtaaaagaacagtgtcatccatattacagtgcagaaggctcaagcgatgtaaacgatcagaatgtgaacgaaacgtccaggaagcggagctcagatggtggacctggcgcagaaaccaccacaggtggaaacacggaatgtgttttagctcctaaccatacgctggggaatgctaccattttgccacaacactgcttttcagctccagtaattaagcccagtgctacaaatgtcgcgaactcgagggcgataggcacagcattatctccaccacctggtgtgatggttccagttcataatgcagtaccatctgacttatcagttaaggatgagagggaattgaagcgcgaaaagaggaagcagtcaaatagggagtctgctagacgatcaaggctgagaaaacaggctgagacagaggagttggctacacaagtggagtctcttgcagcagagaacacgtcccttagatctgaaatcggccagctaacagagagctcagagaagctcagactagagaattcagctctaatggtgaagctgaaggacaccgcagaaccgtctccgattaaagcatccgcatccccgtcctctccccgtgcctccgcggagaacttcctttccatgatcgacagcgccaacgcgccgagcgtcagcaggcacacggagcacggcggtcccaggctccggcagctcctggactccagtccggcgacagacgtcgccgccgtaagctgatgatgaagccggtccggcaaatacgccacagcacatgcatgtgtcctggggattccgcaggctcatgctgctcgagtgctcgtcagcgttacggactcggactctgtactccagtttaggcactgattccagtgaagtaaccgagggtaccggtaattttatctgctctcgcgccagagtgccgggctgccttgcctgcgaccactcctgtcctgtgtacccagagttgtaacgtagtagggtgttgtgctgcatgccgaccttttgaaactttcgagaccgtcatttggaccatttttttcgtcgcagtaacacaatacagatcggagtttgtacaggacggatgctgcctggtgtgcgcaattctctactgcaaaataccgacaaaaattctgtttgttttttg

SEQ ID NO: 199628 - DNA, 7203 bp, Zea Mays
ccccggttctattgattaccttgcttatcgtttggtgcagtgtgggctagttatctactagacttgccactgtttcaagtcgtttctgtttgtaataactatgcaggtgcagattccgttgatcccacatctgaaaagcaggggagtcgacgaccctcatggttttgaggataatatattgcatctctgcactgttctaagcgtgaggaagtaaagcattatttattggttggagtagtttctgttgctatccggcaccaatggcgactttggttcgtcatgattcaaggcagtactcttggtggtgggttagccatatcagccccaagaactcgaaatggctccaggaaaatctcagcgacatggacacaaaggttaaagcaatgatcaaacttatcaatgaagatgctgattcttttgcaaggagagcagagatgtactacaagaaacgtccagagctaatgaaatttgtggaggaattctatcgagcataccgtgcgctggcagaaagatacgatcaggccactggggcacttcgtcaggctcacagaacaatttctgaagcatttccaaatcaaatgccgtcaatgtcagacgagtcaccctcttctttcagccaagagatggagcctcatactccagatatgtctacttttacacgtgcggcatttgattctgatgatcttcagaaggatggagttggtatgtcaccacagcgtttcacctccaagagaaatggtacacaccctgaggaaacaagtgcattgtcaagtagaaaaggtctaaagctgttcaatgatttgtcatcgagtagtgaaaatgctcctcgtgctggttttgatgggaaagtacggaaaggcctaacctttgaaagcccagaagttaaagggaaagatggtatcagcaatgagatggcaaatttgcagcaagaagttgcaagactattatccgagagccagaatctgaaacagcagatgctgtcagaatccgagcgggcaaacaaagctgaaaatgagatgcaaatgctcaaggcaacagtattgcaattaagtgctgataaagacacatcacttacgcaatataatcattcctctgagcgaatatctacgttggagtccgagctcttgaaggcgcaggctgacctcaagaagttaactgatgaaatggctgcagatgtccagaagctaattaatgctgaaacactcaatattgctatactgtctgaggctgagggtttggatcagaagatgaagatgcaacaacaagaactagaacaaaagcttaaggaattggagagtttccgctcaagcttccaggaggagcatgaaaagcgtatgcaggctgaaagtgctctactttcccaggggaaggaacttgctcaatctcatgaagaagtacagaggttgactatagaaataaagatggcgaatgaaaagttgaatgagctcaagcagaccaaggaggaccttcatgacactgtttgtgagctgaagagggatgttgagcgccttacagaacaaaaccagtcatctgaggtgcttatacgggaacttggtgacgagataaatacactcaaggattcaaaaaatgaactccaaagtgaaataaaaagccttaagagcaccatttcacagctaaacactgagaagaatgcagctgcgcttcaacaccagcagtctgtggagcaggtttcggtaatcgaatctcagctgtcaaagctacagtcagagctagatgagactgagcagaaagtacagttgctgacacaagatcttgaaaagaaaaaagaagaagcggagaatatccatttcaagctgcaagatgaatgccataggcgtatgcaaattgaagcaactcttctcatgacagagggtctacattcccagttgcaagaagaaatgaaaacactgacacaagattttgacggatcaacaaagaagcttagtgagttagaaaataataagttagacctggagagcacactgaaagaactgaataacaccattttaggtttgaactcggagaaggatgcagcactccttcaacaacagcagtctttagacaaagtatctgatttggaattagaactctcaaagatgcagttggaaatggagaagtctgagcaaaaaattctcttactggagcaagaaattgcacggaagactgaaagtgtcgacagcttggagataagttttaaagatgaatgtgagaagaggctacaagcccaaacatcgcttgtgtcattggagaaaatgtattgccagtcacaagaagatgttagaaggttgcagatagagattgagaagcagaatgacaagttgaatgagttggagaacttgtcatctgaacttaacaacaccatcctacttgtaaacactgagaaagatgcaaccctccatgagaaccagcagtccttagcgagaatattggatcttgaatctgaactcatggtcttgaaaactgaactggagaatgttgaaaggaaagttcacatgatagagcaagaactcatatataagaaagaagaagcggataacctccaaattagcctacaagatgaaactcaaaaacgggttgatggtgaaacatctcttcttatgatgaaaaatcttcattcggagtcacaaaatgaagtgagagggttggcactggaactcgagaagctgaatggtaatttaagacaggtggagaacagtaaggttgatcttgaaaacattgtaaccaagcatacggaggaaatccatatccttcgtgaacagaatctttctactgagcttatgataaaggacctccatcttgaattggatgtattgaaggatttgaatgtgaaacttcaagcagaaatggatttacacaaaggtgaaaaagaagtacttcagagagagtttacttctcaaagggaagagaaggaaaatctagaggggatacaccacactctggtggatgagatggataccctaaaaactactacaacaatgaaccagaagttgattgaggaattgcaaatcacaaacttaaaactgaaggaagtgtgtgcaaggagtgaagttgagaaggcacttctctcagaaaaactccaagaggtggagaagctatctgaagaatattcactcttggagaactcactttcagatgcaaatgctgaaatggatgcattgagggagaagataaaagcacttgaagcttcagaaagctctctcaaggatataatttcctgtcatgtttctgagaaggctgttcttgtatcagagctagagatccttggtaaaagattatctgatgctttagagaacaaatctatcttggatatctcattatctgatatgaaactagacctagaagatttgagaacaaagctgaaagattctgaagaatcctgtcagtatctccttgcaaataactcagcactttctggtgaactggatgcattgagggagaagataaaagcactacaggcctcagaaaggtctctgaaggatgaaatttcctgttatgtttctgaaaaggttgttcttgcatcagaggtagagatccttggtaaaagtttatctgaggtttcagagaagaattctatcttggatacctcattatgtgatatgaaaactgagttagatgaattgagaacaaagctgaacgattctgaagaatcctgccagactcaccttacaaataattcagctctttctgctgaaaagaacaatctgttctctcagctggagagcattacattggccatgaaagcactagaaggtatgcacaccaatctggaacagatgcactcctctgtatcaagagagaaggattttgcatatgatcaagtaagggaactgcaggatcagttgagaattaagaatgaggaatttgaagtgttagcaaagtcacatcaattgcaagcaaacagctatgagatacaaatttcttctctgcaagagaaaaaccattatatggaggaggtgcttgaacaggaacagcagaaaaacgtaaatgcttctattagtacagttattttggagaactgtttggtcgatgagcaagacaagaaggctgctcttttcactgaatgccaaaagtatgctgtggaaaatcattcagccaatatgttggtttcacagttgatgggggaagctagatatcatggggaggagagaaaaacattgctaaagcacaatgaaaaactgaggcaagggatttcaaagcaaatgaaggttctgaatatctgcaaagatctagcacctgctgatttagctgaggacgaagttctgttgcagactgttttagatgaaaccattaacactctgagacttaaggatgaaactgaagatgtgaataggctcatgaacactgagttctcagttctctcagtagttttgttgcaattagggatggagctcagagatctgcacttacagaagtgtgccattgagaaagaagtggagagtggagaaacagagttgctttgtttgcaaaacaaaaaccaacagatgttggaacagaatgaacaactaaggaatggattacaggaaagcagtgaaagggaggaggtgctgaaaactgaagtattcatcacacaagagaaactatcttgcttgagagagtcctaccagacatcacaagatgtaattttcaacctgaccgaaaaaaatgagtccttgtctaaggaataccagtccttgagtgagaagtacaattccttggaagatgagaatgatactgttcttgaagaatgcatgatgctcgagaacctgtgcctgttctttaggggacataataatgagattgcatctgcattggcttctcttaccaatgagatggctttgttgagtttggctaagagcgatcttgatcttcaagttgatgagctgagcagaaggtcagtggcgcatgaatcagaaaatagtcacttaaaggagtacatcatatgcttggtagagattctcagaactcgattagtcctttcagagtttgatttggacaccaatcaaagtgtctgccaggagttggttgttaaacttgagaattgcatgacacagctggcgcagaaggatggtgagctaatggaagcagaggaggaagttcaactattgcaagaaaagaaccaggaactctgtggagttgttagatctctacaagttgcaactgaaggtgctaaagtggtggaaggagaactggagaagaaaatcacaagactgattgaacagtgttcttgcaaggatgtcgaaattttacttcttcaccaagacaatgaggcattgcaatcagaagttgagcaatgtgagagggaatttgttgttctgatggatgatgcaattacctcttcagtgaattctgcggtgtatgaagaaacagcattcaagcttatgatgaatggtaaagctacagagaatagagcaatatccctaaaggagttgctaatgaaggaggtctcttcccgagatgctcacattgaggagttgcagaaaaagttggctggcattcaggacgaacatgcagaactaaaagctgagttgaacacacatctagctctcgtagcatcattggctgatcatgtcagtgtgttggaagaagattgccgttctctgtcaaaaccctgtagtacagaagacaaagaggaaaccgcatgtgtacatcatgttcaagagggcaatgatgggctggaatctcattgcttacccaaaggaactccagagttacaagggttgattgcaagaatagaagcacttcaagtagttgtatcaaatgctaaagatcgtcaagatcaggagtcagctgagtctgcagctaaattggcggcagtaagtgcagaaattcaagaccttaaagcaagaggtggctcacgcatggagggaaaagaaatatattctgatcatgagaaacaagatgttgagatctccaaagggaagcaagtccagatcatgaaggatattgagctggaccaaatatccacttgtccaccatatggtgctcgagctgccctctatccgcttggaactggtgcaaatgccgaactcgatgacgatatgcttcagctgtgggaggctgcagagaggagctgcaagaaccaaacggccaagtcctcgtcatctgagcacgacatacaagccgtcgaggatctgaagagtgagcacccttcgtctgagctagcaaggggaagagaccttggaatcaataagctagaagcgtcgaagggagctgcagagcctcatgaggcgtggagcaagaacgtacttgagaggctcacttctgatgctcagaggctgttgagcatccaagcgagcattgaagagctgaagcagaaaatggaggggcagtcaaagggaaaatcccctatgaactctgagtacagcagtgtgagcgctcaggtgcatgagacagagggccatgtcttggaacagatcaatctgaacaacaaattgactaggacggctgagaactaccccacactgtcagataatatgagcaccgagcgagaagggtattccagcaggaggaagatctccgagcaggtgcagaaagggtcggagaatgtggcaaggttggaactggagcttcagaagattcagtatgtcttgctgaagcttgaggaagagcacgagtacagaaggctcaaagtctctgataagcgcactcgcgtgcttttgagggactatctgtatgggaggaaggaccgcggtggcgggcagaagaaaaagaagagggtcccgttctgtggttgtgttcgtccgaaatcaagaacagagccgtagcctttctttttgttcgacctgcacctccaagtggtagccgtagtccgaaatcaagaaataaaacaaaatcgacctgcacctccaagtggttggctaagtgtcgcctgtgcattggaagaggaggtggtgttcctaggatccctttgtaattgagttagcattttagtatcttttttcttttatttttgaaactagcattatagtatcctgatgaagaagcttatgtactaaattttttgttttcctgtctaaatgaggccattctggctagtttaatgcgttaatactgtcgtatatcaaggcgttctctttccatctataatagcttcgtgtttacagcccaagcagtgcattttgcttccaggttcagactgcagaagcaaagcaccgggactagtaagtcatttctttaatattgatgaataatctcataaggtataacgtcatctctttctttaat

SEQ ID NO: 199629 - DNA, 5891 bp, Zea Mays
cttctctctctctctctctcccccccgtgcgtttcccttccccttctctcctctcctgcctgttcggctccccacactgcagcttcccttccctctcacctcggtgaccgcattgggtgctcgcggggcggaagaggaggcgcgggtcgaggtcggctagcctaacccgtccggccgtaccgaggctggtgggatccgctcgccggccggcaccggggaggtcaccaacgcccatgcttctatgaccgagagactccgggcttgaccaggacggatttgagcgaatatcttgaggttcatattgttgctggaggggaatggaaactccatcagaggccttgaagccggcggaggctaaaccggcgaagccacggccagtggcgcccacgggcaggttcgccttggggactgcttcgtccattaaaaagcgagctgatggttcggctccggcggaggtgggtgtgccccggtcttccttgatgaagtctacctcgtcgctgaacgccagttcggcgacgagaagaagcagcacggggactgctgggaagcaacaggacaatgggagctcagctgctgctaagaagtctagtcctacgctgtcggatggcgcgaggaagactaaactggtgtcagctcccgctgctggctcaaaaccagcagtggagaagaaaacatccttggtcgagaggacaggtgccgatttggccaggaagcctgctgttaaggcatccccaacttcaacactgaagaaggtccagtcaaagacagagagctccaatggcagcagtggcagcaccaggagagtgtcctccaatgcttctgtgccatcgccacgttccgtcacaagcaatgcagcaaggaaactgggtactcaagcatcatctgctgcgtctaatcggcggaagagctcaaccgcagatagccgtgattcgagattcatgatgctgccacaggtggatttgaaggctagcgatgaagtgaggctggattcaagaggtcatcgagttcgtagtctcaagcagctgaggttatcacatgctcttgagtttgtgtatctgagggacaaccttttatcaagtttggagggcattgagattctcaagggggtaaaggttcttgatttgagttttaatgattttaagctccctgggtttgagcctcttgggaactgtgttgtcctccagcaactgtatcttgctggaaatcaaataacttcacttgctagccttcctgaacttcctaacttggagttcctttctattgctcaaaacaggctaaagtcagtttgtatggctcgacagcctcgacttcaagtgttagcagctagcagaaacaaaatatcaactttgaagggatttccacattttccttctctagagcatttgcgtgttgaggagaatccactacttgagatgccacacttggaagctgcttctatcctacttataggtcctactttgaagaagttcaatgaccgagatctgaaccccaacgaggctgaggtagctaagcaatatcctgctcatacagctatttgcattcgggatggttgggaattttgctcccctgaacttgctgctgattcaacattttctttcctacttgagcaatggaataataagctgcctcaaggttacatggtgaataaagcttatgttgaccatccgtttgaagaggatccatgccattgccattttagattcacaaatcttggtggtgagggtgagctagtcctcaaataccaatggtttctgggtggcaaaacaccaacagattttgttgctatccctggtgcatcgagcgaggtgtactggccaaaacgtgaggatgttggaagatgtttgaaagttgaatgcactccaatagtaaatggtgcagaattttcgcccgtttttgctgtatctttacctgtttctccaggtactggatgtccaaaggtcatcaatctggcagtcagtggtgaagtagtggaaggaaacatactcagtggagttcctgaaattgcctggtgtggtggaacacctgggaaaggcgttgcaagttggttaaggcggaggtggaacggcaatgctgtagtaattgatggagctgaggggatggaatatcagttgacagtcaatgatatcaattcaagtttggtatttatgtacacccctgttacagacgagggtgtcaagggagagccgcaatgtacaatgacagattttgtgaaggctgcaacaccatcagtcagcaatgtgcatgttctgggagatattgttgaagataacattatcgtagggaaaggaaaatacttcggtggcagagagggactaagtaaaatccggtggtttagagagaaggaaaatggtgaatttcttcttgtgctatcagacagcatggagtatacactaaccaaggaggacgtggggagacacctcaaatttgtatatatccctgttaaccttgaaggtcaggagggtgaatctgcttgtgcgataacagatgtagttaagaaagcccctccaaaagtattcaatctaaagattgttggggaatctatggaaggaagcaagatatctgccagtgctactgttacaggtggaactgaagggtccagcagggttcaatggtacaaggcatcttcctctgaatttaagaatgaacatgagcttgaagcccttactccgtcacgagtttctaagacattccgcattcctcttggtgctgttggatattatatcgttgcaaagtttacacctgtggcacctgatggtgaagtcggtgaaccagcctatgctacatcagatggccttgtggaaacactaccacccagcctgaacttcttaacagtcactggtgaattctctgagggtcagatattaacagcatcatatgggtatatcggaggacatgaaggaaatagtttatacagctggcaccttcatgaggctgaagatgacgaaggcactccactttcagaggcaaccggtttgctacaatactgtgttacaaaggaagctgttggaaagtttgtttctttcaaatgcacccctgtcagagatgatgatattgttggtgaggcaagatcattcataggaaaggacagagttactccagggatgccgacattactttctcttgaagtaactggtgatgcaattgaaggaacaactatgtttgccagtaaaaggtattggggaggagaagaaggggacacaatgttccgctggatactgacaaattctgatggaaccgagaaagaaattgaaggagcaacaagttcatcatacaccttgaaatgcaatgacattggcttctacatatctgtcttgtgcaagcctgttagaaatgatggagttgatggttctttagtgtcgactgaagcgattggtcctattataccagggccaccaacatgtcaatctcttgaactagctggctctatggttgaaggtggccgtttgacctttcatgctgtgtatacaggaggtttgcggggaagttgcatccaagaatggttcagattacatgatgatgggcacaaggacaagttgactgctgatgaatgtctagaccttgatctagctgatatcgattgccggattgaacttatgtatacacctgtacgagaagacggagtgcacgggttaccaaggagtgttacttctgatacaatcttacctggggagcccaagggtgtcaatcttattctacctgagtgttttgaggacaatgaaatttctcccatcaaaacctatttcggtggcaaggaaggcactggcaaatatacatggtttcgaaataaagagaaacttgataacttggaatttgatctggttgctgaatcatcagaagttgttggagaaaccttaaaatataagccttcattgaatgatgttagttcctatctgattctttattgggttcctacacggcgtgatggaaaggttggtgatcctttgatggctatctctgatgatccggtcatggcagcttttccatctgtttcggatgttcacttagagcagaaaagttcagatgtatattgtggactaggcatctattatggtggatatgagggattaagcttgtatagatggtacagggaatctagtgatggaactaggcttcacatagatggtgctgattcagtcacatacgaagtgacagatgctgattacagctgccgtctactgtttggttatactcctgttcgttcagatgggataagtggagaagaaaaactctctgaaccatctgatgtaattttgccagaactactcaaaatcgagacactcaatttcaaggggaatcaggttgaaagagaaacactgactgctgctgaacaaattccgtacagtgagattcaacaacatatatggaaaaattataagaaagagatgaaatatcaatggtttatttccaatgaatcaggaggcgatcagtcttttgaaccattggcaacccagtgttctcgctcatacaaagtgcgctttgaggatattggtcgttgcctgaaatgcgaatgctttgtcactgatgtatttggacgatctagtgaattggtatccgctgtgactgctcctattttgccaggaaggcctaaaattgaaaagctggagattgaaggaagaggtttccacactgacctatatgccgttcagggtacctatagcggaggcaaagaaggcaagagtaaaatacaatggctcagatcgatggttggaagccctgatcttatctccatacctggcgaaactggaagaacgtatgaagctaatgttgatgatgtagggtataggcttgttgcaatttatacacctgtaagagaggatggagttgagggacaacctgtttctgtttcaacagaacagattgcagttgagcctgaactttacagggaagtgaaacagaagctcgatgatggttcagtcaaatttgaggttctgtgtgacaaggaccgaacacccaaaaaggcacaagtaatgggccatttggagcggagggttttggaagtcaaccgaaagaggataaaagtagtaaagcctggatctaagacatcattcccgagtactgaagtacgaggaacctacgctccaccgttccatgtcgagctgtatcgcaatgaccagcaccgcttcaagattgttgtcgacggtgatactgaagttgacttaatggtgcaaacacggcacatgcgagaccgcatcatcctcacgatcagaggcctcgcccagaagttcaacagcacctccctcaacacacttctcaggatcgagtcatgatagacctgacagtgtaaaaaccaactattacgggaagctgtaccccttgttccgattggttagagtgcgtggttttagtaggattcgtgacatgccagccttttgtgtgtatgggtgtgggacgggccgagcgtgttggattacaattttttccctgacacatctctcaaatcagagcagcatcagctggttgctctgactggtgccgtcgtgcgtcatgaaatgtacatagggtggttagagcgagaaagagagtggtgtttcttggtgctgtatttattatgcactggttgggttgggttttttcgactgccattctcatactaagtattggttctttcttttttcggtcgttgggtttgcatatacttgtaccgacaacacagcttggggtgattgggcgagtgctgttcagaatgcctggtccacacttgtgtacgactggaatcctacggtggcgtattcacatgctgttttatggtgcaaatgtaaattcatctgttcataaacgagaatcaaaatcgtcggccacgtgtattcgtcgtattcgtaccgatgtatactaccttataaaccagtactaatctcacggtggcatcaattatcttcctctgtttcacaagg

SEQ ID NO: 199630 - DNA, 5936 bp, Zea Mays
cttctctctctctctctctcccccccgtgcgtttcccttccccttctctcctctcctgcctgttcggctccccacactgcagcttcccttccctctcacctcggtgaccgcattgggtgctcgcggggcggaagaggaggcgcgggtcgaggtcggctagcctaacccgtccggccgtaccgaggctggtgggatccgctcgccggccggcaccggggaggtgagccacccccacgtgctcgccgcgcggttaaactcactggtggtcaccaacgcccatgcttctatgaccgagagactccgggcttgaccaggacggatttgagcgaatatcttgaggttcatattgttgctggaggggaatggaaactccatcagaggccttgaagccggcggaggctaaaccggcgaagccacggccagtggcgcccacgggcaggttcgccttggggactgcttcgtccattaaaaagcgagctgatggttcggctccggcggaggtgggtgtgccccggtcttccttgatgaagtctacctcgtcgctgaacgccagttcggcgacgagaagaagcagcacggggactgctgggaagcaacaggacaatgggagctcagctgctgctaagaagtctagtcctacgctgtcggatggcgcgaggaagactaaactggtgtcagctcccgctgctggctcaaaaccagcagtggagaagaaaacatccttggtcgagaggacaggtgccgatttggccaggaagcctgctgttaaggcatccccaacttcaacactgaagaaggtccagtcaaagacagagagctccaatggcagcagtggcagcaccaggagagtgtcctccaatgcttctgtgccatcgccacgttccgtcacaagcaatgcagcaaggaaactgggtactcaagcatcatctgctgcgtctaatcggcggaagagctcaaccgcagatagccgtgattcgagattcatgatgctgccacaggtggatttgaaggctagcgatgaagtgaggctggattcaagaggtcatcgagttcgtagtctcaagcagctgaggttatcacatgctcttgagtttgtgtatctgagggacaaccttttatcaagtttggagggcattgagattctcaagggggtaaaggttcttgatttgagttttaatgattttaagctccctgggtttgagcctcttgggaactgtgttgtcctccagcaactgtatcttgctggaaatcaaataacttcacttgctagccttcctgaacttcctaacttggagttcctttctattgctcaaaacaggctaaagtcagtttgtatggctcgacagcctcgacttcaagtgttagcagctagcagaaacaaaatatcaactttgaagggatttccacattttccttctctagagcatttgcgtgttgaggagaatccactacttgagatgccacacttggaagctgcttctatcctacttataggtcctactttgaagaagttcaatgaccgagatctgaaccccaacgaggctgaggtagctaagcaatatcctgctcatacagctatttgcattcgggatggttgggaattttgctcccctgaacttgctgctgattcaacattttctttcctacttgagcaatggaataataagctgcctcaaggttacatggtgaataaagcttatgttgaccatccgtttgaagaggatccatgccattgccattttagattcacaaatcttggtggtgagggtgagctagtcctcaaataccaatggtttctgggtggcaaaacaccaacagattttgttgctatccctggtgcatcgagcgaggtgtactggccaaaacgtgaggatgttggaagatgtttgaaagttgaatgcactccaatagtaaatggtgcagaattttcgcccgtttttgctgtatctttacctgtttctccaggtactggatgtccaaaggtcatcaatctggcagtcagtggtgaagtagtggaaggaaacatactcagtggagttcctgaaattgcctggtgtggtggaacacctgggaaaggcgttgcaagttggttaaggcggaggtggaacggcaatgctgtagtaattgatggagctgaggggatggaatatcagttgacagtcaatgatatcaattcaagtttggtatttatgtacacccctgttacagacgagggtgtcaagggagagccgcaatgtacaatgacagattttgtgaaggctgcaacaccatcagtcagcaatgtgcatgttctgggagatattgttgaagataacattatcgtagggaaaggaaaatacttcggtggcagagagggactaagtaaaatccggtggtttagagagaaggaaaatggtgaatttcttcttgtgctatcagacagcatggagtatacactaaccaaggaggacgtggggagacacctcaaatttgtatatatccctgttaaccttgaaggtcaggagggtgaatctgcttgtgcgataacagatgtagttaagaaagcccctccaaaagtattcaatctaaagattgttggggaatctatggaaggaagcaagatatctgccagtgctactgttacaggtggaactgaagggtccagcagggttcaatggtacaaggcatcttcctctgaatttaagaatgaacatgagcttgaagcccttactccgtcacgagtttctaagacattccgcattcctcttggtgctgttggatattatatcgttgcaaagtttacacctgtggcacctgatggtgaagtcggtgaaccagcctatgctacatcagatggccttgtggaaacactaccacccagcctgaacttcttaacagtcactggtgaattctctgagggtcagatattaacagcatcatatgggtatatcggaggacatgaaggaaatagtttatacagctggcaccttcatgaggctgaagatgacgaaggcactccactttcagaggcaaccggtttgctacaatactgtgttacaaaggaagctgttggaaagtttgtttctttcaaatgcacccctgtcagagatgatgatattgttggtgaggcaagatcattcataggaaaggacagagttactccagggatgccgacattactttctcttgaagtaactggtgatgcaattgaaggaacaactatgtttgccagtaaaaggtattggggaggagaagaaggggacacaatgttccgctggatactgacaaattctgatggaaccgagaaagaaattgaaggagcaacaagttcatcatacaccttgaaatgcaatgacattggcttctacatatctgtcttgtgcaagcctgttagaaatgatggagttgatggttctttagtgtcgactgaagcgattggtcctattataccagggccaccaacatgtcaatctcttgaactagctggctctatggttgaaggtggccgtttgacctttcatgctgtgtatacaggaggtttgcggggaagttgcatccaagaatggttcagattacatgatgatgggcacaaggacaagttgactgctgatgaatgtctagaccttgatctagctgatatcgattgccggattgaacttatgtatacacctgtacgagaagacggagtgcacgggttaccaaggagtgttacttctgatacaatcttacctggggagcccaagggtgtcaatcttattctacctgagtgttttgaggacaatgaaatttctcccatcaaaacctatttcggtggcaaggaaggcactggcaaatatacatggtttcgaaataaagagaaacttgataacttggaatttgatctggttgctgaatcatcagaagttgttggagaaaccttaaaatataagccttcattgaatgatgttagttcctatctgattctttattgggttcctacacggcgtgatggaaaggttggtgatcctttgatggctatctctgatgatccggtcatggcagcttttccatctgtttcggatgttcacttagagcagaaaagttcagatgtatattgtggactaggcatctattatggtggatatgagggattaagcttgtatagatggtacagggaatctagtgatggaactaggcttcacatagatggtgctgattcagtcacatacgaagtgacagatgctgattacagctgccgtctactgtttggttatactcctgttcgttcagatgggataagtggagaagaaaaactctctgaaccatctgatgtaattttgccagaactactcaaaatcgagacactcaatttcaaggggaatcaggttgaaagagaaacactgactgctgctgaacaaattccgtacagtgagattcaacaacatatatggaaaaattataagaaagagatgaaatatcaatggtttatttccaatgaatcaggaggcgatcagtcttttgaaccattggcaacccagtgttctcgctcatacaaagtgcgctttgaggatattggtcgttgcctgaaatgcgaatgctttgtcactgatgtatttggacgatctagtgaattggtatccgctgtgactgctcctattttgccaggaaggcctaaaattgaaaagctggagattgaaggaagaggtttccacactgacctatatgccgttcagggtacctatagcggaggcaaagaaggcaagagtaaaatacaatggctcagatcgatggttggaagccctgatcttatctccatacctggcgaaactggaagaacgtatgaagctaatgttgatgatgtagggtataggcttgttgcaatttatacacctgtaagagaggatggagttgagggacaacctgtttctgtttcaacagaacagattgcagttgagcctgaactttacagggaagtgaaacagaagctcgatgatggttcagtcaaatttgaggttctgtgtgacaaggaccgaacacccaaaaaggcacaagtaatgggccatttggagcggagggttttggaagtcaaccgaaagaggataaaagtagtaaagcctggatctaagacatcattcccgagtactgaagtacgaggaacctacgctccaccgttccatgtcgagctgtatcgcaatgaccagcaccgcttcaagattgttgtcgacggtgatactgaagttgacttaatggtgcaaacacggcacatgcgagaccgcatcatcctcacgatcagaggcctcgcccagaagttcaacagcacctccctcaacacacttctcaggatcgagtcatgatagacctgacagtgtaaaaaccaactattacgggaagctgtaccccttgttccgattggttagagtgcgtggttttagtaggattcgtgacatgccagccttttgtgtgtatgggtgtgggacgggccgagcgtgttggattacaattttttccctgacacatctctcaaatcagagcagcatcagctggttgctctgactggtgccgtcgtgcgtcatgaaatgtacatagggtggttagagcgagaaagagagtggtgtttcttggtgctgtatttattatgcactggttgggttgggttttttcgactgccattctcatactaagtattggttctttcttttttcggtcgttgggtttgcatatacttgtaccgacaacacagcttggggtgattgggcgagtgctgttcagaatgcctggtccacacttgtgtacgactggaatcctacggtggcgtattcacatgctgttttatggtgcaaatgtaaattcatctgttcataaacgagaatcaaaatcgtcggccacgtgtattcgtcgtattcgtaccgatgtatactaccttataaaccagtactaatctcacggtggcatcaattatcttcctctgtttcacaagg

SEQ ID NO: 199631 - DNA, 6306 bp, Zea Mays
cccccccgtgcgtttcccttccccttctctcctctcctgcctgttcggctccccacactgcagcttcccttccctctcacctcggtgaccgcattgggtgctcgcggggcggaagaggaggcgcgggtcgaggtcggctagcctaacccgtccggccgtaccgaggctggtgggatccgctcgccggccggcaccggggaggtgagccacccccacgtgctcgccgcgcggttaaactcactggtggtcaccaacgcccatgcttctatgaccgagagactccgggcttgaccaggacggatttgagcgaatatcttgaggttcatattgttgctggaggggaatggaaactccatcagaggccttgaagccggcggaggctaaaccggcgaagccacggccagtggcgcccacgggcaggttcgccttggggactgcttcgtccattaaaaagcgagctgatggttcggctccggcggaggtgggtgtgccccggtcttccttgatgaagtctacctcgtcgctgaacgccagttcggcgacgagaagaagcagcacggggactgctgggaagcaacaggacaatgggagctcagctgctgctaagaagtctagtcctacgctgtcggatggcgcgaggaagactaaactggtgtcagctcccgctgctggctcaaaaccagcagtggagaagaaaacatccttggtcgagaggacaggtgccgatttggccaggaagcctgctgttaaggcatccccaacttcaacactgaagaaggtccagtcaaagacagagagctccaatggcagcagtggcagcaccaggagagtgtcctccaatgcttctgtgccatcgccacgttccgtcacaagcaatgcagcaaggaaactgggtactcaagcatcatctgctgcgtctaatcggcggaagagctcaaccgcagatagccgtgattcgagattcatgatgctgccacaggtggatttgaaggctagcgatgaagtgaggctggattcaagaggtcatcgagttcgtagtctcaagcagctgaggttatcacatgctcttgagtttgtgtatctgagggacaaccttttatcaagtttggagggcattgagattctcaagggggtaaaggttcttgatttgagttttaatgattttaagctccctgggtttgagcctcttgggaactgtgttgtcctccagcaactgtatcttgctggaaatcaaataacttcacttgctagccttcctgaacttcctaacttggagttcctttctattgctcaaaacaggctaaagtcagtttgtatggctcgacagcctcgacttcaagtgttagcagctagcagaaacaaaatatcaactttgaagggatttccacattttccttctctagagcatttgcgtgttgaggagaatccactacttgagatgccacacttggaagctgcttctatcctacttataggtcctactttgaagaagttcaatgaccgagatctgaaccccaacgaggctgaggtagctaagcaatatcctgctcatacagctatttgcattcgggatggttgggaattttgctcccctgaacttgctgctgattcaacattttctttcctacttgagcaatggaataataagctgcctcaaggttacatggtgaataaagcttatgttgaccatccgtttgaagaggatccatgccattgccattttagattcacaaatcttggtggtgagggtgagctagtcctcaaataccaatggtttctgggtggcaaaacaccaacagattttgttgctatccctggtgcatcgagcgaggtgtactggccaaaacgtgaggatgttggaagatgtttgaaagttgaatgcactccaatagtaaatggtgcagaattttcgcccgtttttgctgtatctttacctgtttctccaggtactggatgtccaaaggtcatcaatctggcagtcagtggtgaagtagtggaaggaaacatactcagtggagttcctgaaattgcctggtgtggtggaacacctgggaaaggcgttgcaagttggttaaggcggaggtggaacggcaatgctgtagtaattgatggagctgaggggatggaatatcagttgacagtcaatgatatcaattcaagtttggtatttatgtacacccctgttacagacgagggtgtcaagggagagccgcaatgtacaatgacagattttgtgaaggctgcaacaccatcagtcagcaatgtgcatgttctgggagatattgttgaagataacattatcgtagggaaaggaaaatacttcggtggcagagagggactaagtaaaatccggtggtttagagagaaggaaaatggtgaatttcttcttgtgctatcagacagcatggagtatacactaaccaaggaggacgtggggagacacctcaaatttgtcaggagggtgaatctgcttgtgcgataacagatgtagttaagaaagcccctccaaaagtattcaatctaaagattgttggggaatctatggaaggaagcaagatatctgccagtgctactgttacaggtggaactgaagggtccagcagggttcaatggtacaaggcatcttcctctgaatttaagaatgaacatgagcttgaagcccttactccgtcacgagtttctaagacattccgcattcctcttggtgctgttggatattatatcgttgcaaagtttacacctgtggcacctgatggtgaagtcggtgaaccagcctatgctacatcagatggccttgtggaaacactaccacccagcctgaacttcttaacagtcactggtgaattctctgagggtcagatattaacagcatcatatgggtatatcggaggacatgaaggaaatagtttatacagctggcaccttcatgaggctgaagatgacgaaggcactccactttcagaggcaaccggtttgctacaatactgtgttacaaaggaagctgttggaaagtttgtttctttcaaatgcacccctgtcagagatgatgatattgttggtgaggcaagatcattcataggaaaggacagagttactccaggtgcttctgttttcgttttcttgaaaaaattacgacactgaagatattattctgtcacaaaagagacactcctctttgtgtgcttgtatggatgacaaaaaaacatgtttggaaattaagtgatgcatgagcctggattatgtatggaaatatggatatcacacatacttttgcattatggatatcacacataatatgtgacgaactacaaagatgtgaaacagaaaagaagtacaacaattgtagcacactcctgagggcctgtttgggaactcttcctcaaaaccacagttttataatgccacaatttattgtatgccattgacatagccatggtatattttacatcagtccaatctgatacctatttggagacacaatatttcagttgtagtgtagaagagaagactgcagggatgccgacattactttctcttgaagtaactggtgatgcaattgaaggaacaactatgtttgccagtaaaaggtattggggaggagaagaaggggacacaatgttccgctggatactgacaaattctgatggaaccgagaaagaaattgaaggagcaacaagttcatcatacaccttgaaatgcaatgacattggcttctacatatctgtcttgtgcaagcctgttagaaatgatggagttgatggttctttagtgtcgactgaagcgattggtcctattataccagggccaccaacatgtcaatctcttgaactagctggctctatggttgaaggtggccgtttgacctttcatgctgtgtatacaggaggtttgcggggaagttgcatccaagaatggttcagattacatgatgatgggcacaaggacaagttgactgctgatgaatgtctagaccttgatctagctgatatcgattgccggattgaacttatgtatacacctgtacgagaagacggagtgcacgggttaccaaggagtgttacttctgatacaatcttacctggggagcccaagggtgtcaatcttattctacctgagtgttttgaggacaatgaaatttctcccatcaaaacctatttcggtggcaaggaaggcactggcaaatatacatggtttcgaaataaagagaaacttgataacttggaatttgatctggttgctgaatcatcagaagttgttggagaaaccttaaaatataagccttcattgaatgatgttagttcctatctgattctttattgggttcctacacggcgtgatggaaaggttggtgatcctttgatggctatctctgatgatccggtcatggcagcttttccatctgtttcggatgttcacttagagcagaaaagttcagatgtatattgtggactaggcatctattatggtggatatgagggattaagcttgtatagatggtacagggaatctagtgatggaactaggcttcacatagatggtgctgattcagtcacatacgaagtgacagatgctgattacagctgccgtctactgtttggttatactcctgttcgttcagatgggataagtggagaagaaaaactctctgaaccatctgatgtaattttgccagaactactcaaaatcgagacactcaatttcaaggggaatcaggttgaaagagaaacactgactgctgctgaacaaattccgtacagtgagattcaacaacatatatggaaaaattataagaaagagatgaaatatcaatggtttatttccaatgaatcaggaggcgatcagtcttttgaaccattggcaacccagtgttctcgctcatacaaagtgcgctttgaggatattggtcgttgcctgaaatgcgaatgctttgtcactgatgtatttggacgatctagtgaattggtatccgctgtgactgctcctattttgccaggaaggcctaaaattgaaaagctggagattgaaggaagaggtttccacactgacctatatgccgttcagggtacctatagcggaggcaaagaaggcaagagtaaaatacaatggctcagatcgatggttggaagccctgatcttatctccatacctggcgaaactggaagaacgtatgaagctaatgttgatgatgtagggtataggcttgttgcaatttatacacctgtaagagaggatggagttgagggacaacctgtttctgtttcaacagaacagattgcagttgagcctgaactttacagggaagtgaaacagaagctcgatgatggttcagtcaaatttgaggttctgtgtgacaaggaccgaacacccaaaaaggcacaagtaatgggccatttggagcggagggttttggaagtcaaccgaaagaggataaaagtagtaaagcctggatctaagacatcattcccgagtactgaagtacgaggaacctacgctccaccgttccatgtcgagctgtatcgcaatgaccagcaccgcttcaagattgttgtcgacggtgatactgaagttgacttaatggtgcaaacacggcacatgcgagaccgcatcatcctcacgatcagaggcctcgcccagaagttcaacagcacctccctcaacacacttctcaggatcgagtcatgatagacctgacagtgtaaaaaccaactattacgggaagctgtaccccttgttccgattggttagagtgcgtggttttagtaggattcgtgacatgccagccttttgtgtgtatgggtgtgggacgggccgagcgtgttggattacaattttttccctgacacatctctcaaatcagagcagcatcagctggttgctctgactggtgccgtcgtgcgtcatgaaatgtacatagggtggttagagcgagaaagagagtggtgtttcttggtgctgtatttattatgcactggttgggttgggttttttcgactgccattctcatactaagtattggttctttcttttttcggtcgttgggtttgcatatacttgtaccgacaacacagcttggggtgattgggcgagtgctgttcagaatgcctggtccacacttgtgtacgactggaatcctacggtggcgtattcacatgctgttttatggtgcaaatgtaaattcatctgttcataaacgagaatcaaaatcgtcggccacgtgtattcgtcgtattcgtaccgatgtatactaccttataaaccagtactaatctcacggtggcatcaattatcttcctctgtttcacaagg

SEQ ID NO: 199632 - DNA, 6286 bp, Zea Mays
cccccccgtgcgtttcccttccccttctctcctctcctgcctgttcggctccccacactgcagcttcccttccctctcacctcggtgaccgcattgggtgctcgcggggcggaagaggaggcgcgggtcgaggtcggctagcctaacccgtccggccgtaccgaggctggtgggatccgctcgccggccggcaccggggaggtcaccaacgcccatgcttctatgaccgagagactccgggcttgaccaggacggatttgagcgaatatcttgaggttcatattgttgctggaggggaatggaaactccatcagaggccttgaagccggcggaggctaaaccggcgaagccacggccagtggcgcccacgggcaggttcgccttggggactgcttcgtccattaaaaagcgagctgatggttcggctccggcggaggtgggtgtgccccggtcttccttgatgaagtctacctcgtcgctgaacgccagttcggcgacgagaagaagcagcacggggactgctgggaagcaacaggacaatgggagctcagctgctgctaagaagtctagtcctacgctgtcggatggcgcgaggaagactaaactggtgtcagctcccgctgctggctcaaaaccagcagtggagaagaaaacatccttggtcgagaggacaggtgccgatttggccaggaagcctgctgttaaggcatccccaacttcaacactgaagaaggtccagtcaaagacagagagctccaatggcagcagtggcagcaccaggagagtgtcctccaatgcttctgtgccatcgccacgttccgtcacaagcaatgcagcaaggaaactgggtactcaagcatcatctgctgcgtctaatcggcggaagagctcaaccgcagatagccgtgattcgagattcatgatgctgccacaggtggatttgaaggctagcgatgaagtgaggctggattcaagaggtcatcgagttcgtagtctcaagcagctgaggttatcacatgctcttgagtttgtgtatctgagggacaaccttttatcaagtttggagggcattgagattctcaagggggtaaaggttcttgatttgagttttaatgattttaagctccctgggtttgagcctcttgggaactgtgttgtcctccagcaactgtatcttgctggaaatcaaataacttcacttgctagccttcctgaacttcctaacttggagttcctttctattgctcaaaacaggctaaagtcagtttgtatggctcgacagcctcgacttcaagtgttagcagctagcagaaacaaaatatcaactttgaagggatttccacattttccttctctagagcatttgcgtgttgaggagaatccactacttgagatgccacacttggaagctgcttctatcctacttataggtcctactttgaagaagttcaatgaccgagatctgaaccccaacgaggctgaggtagctaagcaatatcctgctcatacagctatttgcattcgggatggttgggaattttgctcccctgaacttgctgctgattcaacattttctttcctacttgagcaatggaataataagctgcctcaaggttacatggtgaataaagcttatgttgaccatccgtttgaagaggatccatgccattgccattttagattcacaaatcttggtggtgagggtgagctagtcctcaaataccaatggtttctgggtggcaaaacaccaacagattttgttgctatccctggtgcatcgagcgaggtgtactggccaaaacgtgaggatgttggaagatgtttgaaagttgaatgcactccaatagtaaatggtgcagaattttcgcccgtttttgctgtatctttacctgtttctccaggtactggatgtccaaaggtcatcaatctggcagtcagtggtgaagtagtggaaggaaacatactcagtggagttcctgaaattgcctggtgtggtggaacacctgggaaaggcgttgcaagttggttaaggcggaggtggaacggcaatgctgtagtaattgatggagctgaggggatggaatatcagttgacagtcaatgatatcaattcaagtttggtatttatgtacacccctgttacagacgagggtgtcaagggagagccgcaatgtacaatgacagattttgtgaaggctgcaacaccatcagtcagcaatgtgcatgttctgggagatattgttgaagataacattatcgtagggaaaggaaaatacttcggtggcagagagggactaagtaaaatccggtggtttagagagaaggaaaatggtgaatttcttcttgtgctatcagacagcatggagtatacactaaccaaggaggacgtggggagacacctcaaatttgtatatatccctgttaaccttgaaggtcaggagggtgaatctgcttgtgcgataacagatgtagttaagaaagcccctccaaaagtattcaatctaaagattgttggggaatctatggaaggaagcaagatatctgccagtgctactgttacaggtggaactgaagggtccagcagggttcaatggtacaaggcatcttcctctgaatttaagaatgaacatgagcttgaagcccttactccgtcacgagtttctaagacattccgcattcctcttggtgctgttggatattatatcgttgcaaagtttacacctgtggcacctgatggtgaagtcggtgaaccagcctatgctacatcagatggccttgtggaaacactaccacccagcctgaacttcttaacagtcactggtgaattctctgagggtcagatattaacagcatcatatgggtatatcggaggacatgaaggaaatagtttatacagctggcaccttcatgaggctgaagatgacgaaggcactccactttcagaggcaaccggtttgctacaatactgtgttacaaaggaagctgttggaaagtttgtttctttcaaatgcacccctgtcagagatgatgatattgttggtgaggcaagatcattcataggaaaggacagagttactccaggtgcttctgttttcgttttcttgaaaaaattacgacactgaagatattattctgtcacaaaagagacactcctctttgtgtgcttgtatggatgacaaaaaaacatgtttggaaattaagtgatgcatgagcctggattatgtatggaaatatggatatcacacatacttttgcattatggatatcacacataatatgtgacgaactacaaagatgtgaaacagaaaagaagtacaacaattgtagcacactcctgagggcctgtttgggaactcttcctcaaaaccacagttttataatgccacaatttattgtatgccattgacatagccatggtatattttacatcagtccaatctgatacctatttggagacacaatatttcagttgtagtgtagaagagaagactgcagggatgccgacattactttctcttgaagtaactggtgatgcaattgaaggaacaactatgtttgccagtaaaaggtattggggaggagaagaaggggacacaatgttccgctggatactgacaaattctgatggaaccgagaaagaaattgaaggagcaacaagttcatcatacaccttgaaatgcaatgacattggcttctacatatctgtcttgtgcaagcctgttagaaatgatggagttgatggttctttagtgtcgactgaagcgattggtcctattataccagggccaccaacatgtcaatctcttgaactagctggctctatggttgaaggtggccgtttgacctttcatgctgtgtatacaggaggtttgcggggaagttgcatccaagaatggttcagattacatgatgatgggcacaaggacaagttgactgctgatgaatgtctagaccttgatctagctgatatcgattgccggattgaacttatgtatacacctgtacgagaagacggagtgcacgggttaccaaggagtgttacttctgatacaatcttacctggggagcccaagggtgtcaatcttattctacctgagtgttttgaggacaatgaaatttctcccatcaaaacctatttcggtggcaaggaaggcactggcaaatatacatggtttcgaaataaagagaaacttgataacttggaatttgatctggttgctgaatcatcagaagttgttggagaaaccttaaaatataagccttcattgaatgatgttagttcctatctgattctttattgggttcctacacggcgtgatggaaaggttggtgatcctttgatggctatctctgatgatccggtcatggcagcttttccatctgtttcggatgttcacttagagcagaaaagttcagatgtatattgtggactaggcatctattatggtggatatgagggattaagcttgtatagatggtacagggaatctagtgatggaactaggcttcacatagatggtgctgattcagtcacatacgaagtgacagatgctgattacagctgccgtctactgtttggttatactcctgttcgttcagatgggataagtggagaagaaaaactctctgaaccatctgatgtaattttgccagaactactcaaaatcgagacactcaatttcaaggggaatcaggttgaaagagaaacactgactgctgctgaacaaattccgtacagtgagattcaacaacatatatggaaaaattataagaaagagatgaaatatcaatggtttatttccaatgaatcaggaggcgatcagtcttttgaaccattggcaacccagtgttctcgctcatacaaagtgcgctttgaggatattggtcgttgcctgaaatgcgaatgctttgtcactgatgtatttggacgatctagtgaattggtatccgctgtgactgctcctattttgccaggaaggcctaaaattgaaaagctggagattgaaggaagaggtttccacactgacctatatgccgttcagggtacctatagcggaggcaaagaaggcaagagtaaaatacaatggctcagatcgatggttggaagccctgatcttatctccatacctggcgaaactggaagaacgtatgaagctaatgttgatgatgtagggtataggcttgttgcaatttatacacctgtaagagaggatggagttgagggacaacctgtttctgtttcaacagaacagattgcagttgagcctgaactttacagggaagtgaaacagaagctcgatgatggttcagtcaaatttgaggttctgtgtgacaaggaccgaacacccaaaaaggcacaagtaatgggccatttggagcggagggttttggaagtcaaccgaaagaggataaaagtagtaaagcctggatctaagacatcattcccgagtactgaagtacgaggaacctacgctccaccgttccatgtcgagctgtatcgcaatgaccagcaccgcttcaagattgttgtcgacggtgatactgaagttgacttaatggtgcaaacacggcacatgcgagaccgcatcatcctcacgatcagaggcctcgcccagaagttcaacagcacctccctcaacacacttctcaggatcgagtcatgatagacctgacagtgtaaaaaccaactattacgggaagctgtaccccttgttccgattggttagagtgcgtggttttagtaggattcgtgacatgccagccttttgtgtgtatgggtgtgggacgggccgagcgtgttggattacaattttttccctgacacatctctcaaatcagagcagcatcagctggttgctctgactggtgccgtcgtgcgtcatgaaatgtacatagggtggttagagcgagaaagagagtggtgtttcttggtgctgtatttattatgcactggttgggttgggttttttcgactgccattctcatactaagtattggttctttcttttttcggtcgttgggtttgcatatacttgtaccgacaacacagcttggggtgattgggcgagtgctgttcagaatgcctggtccacacttgtgtacgactggaatcctacggtggcgtattcacatgctgttttatggtgcaaatgtaaattcatctgttcataaacgagaatcaaaatcgtcggccacgtgtattcgtcgtattcgtaccgatgtatactaccttataaaccagtactaatctcacggtggcatcaattatcttcctctgtttcacaagg

SEQ ID NO: 199633 - DNA, 4320 bp, Zea Mays
attttcacagcctctttggtgctctaacagattcaacattttctttcctacttgagcaatggaataataagctgcctcaaggttacatggtgaataaagcttatgttgaccatccgtttgaagaggatccatgccattgccattttagattcacaaatcttggtggtgagggtgagctagtcctcaaataccaatggtttctgggtggcaaaacaccaacagattttgttgctatccctggtgcatcgagcgaggtgtactggccaaaacgtgaggatgttggaagatgtttgaaagttgaatgcactccaatagtaaatggtgcagaattttcgcccgtttttgctgtatctttacctgtttctccaggtactggatgtccaaaggtcatcaatctggcagtcagtggtgaagtagtggaaggaaacatactcagtggagttcctgaaattgcctggtgtggtggaacacctgggaaaggcgttgcaagttggttaaggcggaggtggaacggcaatgctgtagtaattgatggagctgaggggatggaatatcagttgacagtcaatgatatcaattcaagtttggtatttatgtacacccctgttacagacgagggtgtcaagggagagccgcaatgtacaatgacagattttgtgaaggctgcaacaccatcagtcagcaatgtgcatgttctgggagatattgttgaagataacattatcgtagggaaaggaaaatacttcggtggcagagagggactaagtaaaatccggtggtttagagagaaggaaaatggtgaatttcttcttgtgctatcagacagcatggagtatacactaaccaaggaggacgtggggagacacctcaaatttgtatatatccctgttaaccttgaaggtcaggagggtgaatctgcttgtgcgataacagatgtagttaagaaagcccctccaaaagtattcaatctaaagattgttggggaatctatggaaggaagcaagatatctgccagtgctactgttacaggtggaactgaagggtccagcagggttcaatggtacaaggcatcttcctctgaatttaagaatgaacatgagcttgaagcccttactccgtcacgagtttctaagacattccgcattcctcttggtgctgttggatattatatcgttgcaaagtttacacctgtggcacctgatggtgaagtcggtgaaccagcctatgctacatcagatggccttgtggaaacactaccacccagcctgaacttcttaacagtcactggtgaattctctgagggtcagatattaacagcatcatatgggtatatcggaggacatgaaggaaatagtttatacagctggcaccttcatgaggctgaagatgacgaaggcactccactttcagaggcaaccggtttgctacaatactgtgttacaaaggaagctgttggaaagtttgtttctttcaaatgcacccctgtcagagatgatgatattgttggtgaggcaagatcattcataggaaaggacagagttactccagggatgccgacattactttctcttgaagtaactggtgatgcaattgaaggaacaactatgtttgccagtaaaaggtattggggaggagaagaaggggacacaatgttccgctggatactgacaaattctgatggaaccgagaaagaaattgaaggagcaacaagttcatcatacaccttgaaatgcaatgacattggcttctacatatctgtcttgtgcaagcctgttagaaatgatggagttgatggttctttagtgtcgactgaagcgattggtcctattataccagggccaccaacatgtcaatctcttgaactagctggctctatggttgaaggtggccgtttgacctttcatgctgtgtatacaggaggtttgcggggaagttgcatccaagaatggttcagattacatgatgatgggcacaaggacaagttgactgctgatgaatgtctagaccttgatctagctgatatcgattgccggattgaacttatgtatacacctgtacgagaagacggagtgcacgggttaccaaggagtgttacttctgatacaatcttacctggggagcccaagggtgtcaatcttattctacctgagtgttttgaggacaatgaaatttctcccatcaaaacctatttcggtggcaaggaaggcactggcaaatatacatggtttcgaaataaagagaaacttgataacttggaatttgatctggttgctgaatcatcagaagttgttggagaaaccttaaaatataagccttcattgaatgatgttagttcctatctgattctttattgggttcctacacggcgtgatggaaaggttggtgatcctttgatggctatctctgatgatccggtcatggcagcttttccatctgtttcggatgttcacttagagcagaaaagttcagatgtatattgtggactaggcatctattatggtggatatgagggattaagcttgtatagatggtacagggaatctagtgatggaactaggcttcacatagatggtgctgattcagtcacatacgaagtgacagatgctgattacagctgccgtctactgtttggatgggataagtggagaagaaaaactctctgaaccatctgatgtaattttgccagaactactcaaaatcgagacactcaatttcaaggggaatcaggttgaaagagaaacactgactgctgctgaacaaattccgtacagtgagattcaacaacatatatggaaaaattataagaaagagatgaaatatcaatggtttatttccaatgaatcaggaggcgatcagtcttttgaaccattggcaacccagtgttctcgctcatacaaagtgcgctttgaggatattggtcgttgcctgaaatgcgaatgctttgtcactgatgtatttggacgatctagtgaattggtatccgctgtgactgctcctattttgccaggaaggcctaaaattgaaaagctggagattgaaggaagaggtttccacactgacctatatgccgttcagggtacctatagcggaggcaaagaaggcaagagtaaaatacaatggctcagatcgatggttggaagccctgatcttatctccatacctggcgaaactggaagaacgtatgaagctaatgttgatgatgtagggtataggcttgttgcaatttatacacctgtaagagaggatggagttgagggacaacctgtttctgtttcaacagaacagattgcagttgagcctgaactttacagggaagtgaaacagaagctcgatgatggttcagtcaaatttgaggttctgtgtgacaaggaccgaacacccaaaaaggcacaagtaatgggccatttggagcggagggttttggaagtcaaccgaaagaggataaaagtagtaaagcctggatctaagacatcattcccgagtactgaagtacgaggaacctacgctccaccgttccatgtcgagctgtatcgcaatgaccagcaccgcttcaagattgttgtcgacggtgatactgaagttgacttaatggtgcaaacacggcacatgcgagaccgcatcatcctcacgatcagaggcctcgcccagaagttcaacagcacctccctcaacacacttctcaggatcgagtcatgatagacctgacagtgtaaaaaccaactattacgggaagctgtaccccttgttccgattggttagagtgcgtggttttagtaggattcgtgacatgccagccttttgtgtgtatgggtgtgggacgggccgagcgtgttggattacaattttttccctgacacatctctcaaatcagagcagcatcagctggttgctctgactggtgccgtcgtgcgtcatgaaatgtacatagggtggttagagcgagaaagagagtggtgtttcttggtgctgtatttattatgcactggttgggttgggttttttcgactgccattctcatactaagtattggttctttcttttttcggtcgttgggtttgcatatacttgtaccgacaacacagcttggggtgattgggcgagtgctgttcagaatgcctggtccacacttgtgtacgactggaatcctacggtggcgtattcacatgctgttttatggtgcaaatgtaaattcatctgttcataaacgagaatcaaaatcgtcggccacgtgtattcgtcgtattcgtaccgatgtatactaccttataaaccagtactaatctcacggtggcatcaattatcttcctctgtttcacaagg

SEQ ID NO: 199634 - DNA, 3871 bp, Zea Mays
ctgataaacagtcagacattaacaatgacataaatttgtcaggagggtgaatctgcttgtgcgataacagatgtagttaagaaagcccctccaaaagtattcaatctaaagattgttggggaatctatggaaggaagcaagatatctgccagtgctactgttacaggtggaactgaagggtccagcagggttcaatggtacaaggcatcttcctctgaatttaagaatgaacatgagcttgaagcccttactccgtcacgagtttctaagacattccgcattcctcttggtgctgttggatattatatcgttgcaaagtttacacctgtggcacctgatggtgaagtcggtgaaccagcctatgctacatcagatggccttgtggaaacactaccacccagcctgaacttcttaacagtcactggtgaattctctgagggtcagatattaacagcatcatatgggtatatcggaggacatgaaggaaatagtttatacagctggcaccttcatgaggctgaagatgacgaaggcactccactttcagaggcaaccggtttgctacaatactgtgttacaaaggaagctgttggaaagtttgtttctttcaaatgcacccctgtcagagatgatgatattgttggtgaggcaagatcattcataggaaaggacagagttactccaggtgcttctgttttcgttttcttgaaaaaattacgacactgaagatattattctgtcacaaaagagacactcctctttgtgtgcttgtatggatgacaaaaaaacatgtttggaaattaagtgatgcatgagcctggattatgtatggaaatatggatatcacacatacttttgcattatggatatcacacataatatgtgacgaactacaaagatgtgaaacagaaaagaagtacaacaattgtagcacactcctgagggcctgtttgggaactcttcctcaaaaccacagttttataatgccacaatttattgtatgccattgacatagccatggtatattttacatcagtccaatctgatacctatttggagacacaatatttcagttgtagtgtagaagagaagactgcagggatgccgacattactttctcttgaagtaactggtgatgcaattgaaggaacaactatgtttgccagtaaaaggtattggggaggagaagaaggggacacaatgttccgctggatactgacaaattctgatggaaccgagaaagaaattgaaggagcaacaagttcatcatacaccttgaaatgcaatgacattggcttctacatatctgtcttgtgcaagcctgttagaaatgatggagttgatggttctttagtgtcgactgaagcgattggtcctattataccagggccaccaacatgtcaatctcttgaactagctggctctatggttgaaggtggccgtttgacctttcatgctgtgtatacaggaggtttgcggggaagttgcatccaagaatggttcagattacatgatgatgggcacaaggacaagttgactgctgatgaatgtctagaccttgatctagctgatatcgattgccggattgaacttatgtatacacctgtacgagaagacggagtgcacgggttaccaaggagtgttacttctgatacaatcttacctggggagcccaagggtgtcaatcttattctacctgagtgttttgaggacaatgaaatttctcccatcaaaacctatttcggtggcaaggaaggcactggcaaatatacatggtttcgaaataaagagaaacttgataacttggaatttgatctggttgctgaatcatcagaagttgttggagaaaccttaaaatataagccttcattgaatgatgttagttcctatctgattctttattgggttcctacacggcgtgatggaaaggttggtgatcctttgatggctatctctgatgatccggtcatggcagcttttccatctgtttcggatgttcacttagagcagaaaagttcagatgtatattgtggactaggcatctattatggtggatatgagggattaagcttgtatagatggtacagggaatctagtgatggaactaggcttcacatagatggtgctgattcagtcacatacgaagtgacagatgctgattacagctgccgtctactgtttggatgggataagtggagaagaaaaactctctgaaccatctgatgtaattttgccagaactactcaaaatcgagacactcaatttcaaggggaatcaggttgaaagagaaacactgactgctgctgaacaaattccgtacagtgagattcaacaacatatatggaaaaattataagaaagagatgaaatatcaatggtttatttccaatgaatcaggaggcgatcagtcttttgaaccattggcaacccagtgttctcgctcatacaaagtgcgctttgaggatattggtcgttgcctgaaatgcgaatgctttgtcactgatgtatttggacgatctagtgaattggtatccgctgtgactgctcctattttgccaggaaggcctaaaattgaaaagctggagattgaaggaagaggtttccacactgacctatatgccgttcagggtacctatagcggaggcaaagaaggcaagagtaaaatacaatggctcagatcgatggttggaagccctgatcttatctccatacctggcgaaactggaagaacgtatgaagctaatgttgatgatgtagggtataggcttgttgcaatttatacacctgtaagagaggatggagttgagggacaacctgtttctgtttcaacagaacagattgcagttgagcctgaactttacagggaagtgaaacagaagctcgatgatggttcagtcaaatttgaggttctgtgtgacaaggaccgaacacccaaaaaggcacaagtaatgggccatttggagcggagggttttggaagtcaaccgaaagaggataaaagtagtaaagcctggatctaagacatcattcccgagtactgaagtacgaggaacctacgctccaccgttccatgtcgagctgtatcgcaatgaccagcaccgcttcaagattgttgtcgacggtgatactgaagttgacttaatggtgcaaacacggcacatgcgagaccgcatcatcctcacgatcagaggcctcgcccagaagttcaacagcacctccctcaacacacttctcaggatcgagtcatgatagacctgacagtgtaaaaaccaactattacgggaagctgtaccccttgttccgattggttagagtgcgtggttttagtaggattcgtgacatgccagccttttgtgtgtatgggtgtgggacgggccgagcgtgttggattacaattttttccctgacacatctctcaaatcagagcagcatcagctggttgctctgactggtgccgtcgtgcgtcatgaaatgtacatagggtggttagagcgagaaagagagtggtgtttcttggtgctgtatttattatgcactggttgggttgggttttttcgactgccattctcatactaagtattggttctttcttttttcggtcgttgggtttgcatatacttgtaccgacaacacagcttggggtgattgggcgagtgctgttcagaatgcctggtccacacttgtgtacgactggaatcctacggtggcgtattcacatgctgttttatggtgcaaatgtaaattcatctgttcataaacgagaatcaaaatcgtcggccacgtgtattcgtcgtattcgtaccgatgtatactaccttataaaccagtactaatctcacggtggcatcaattatcttcctctgtttcacaagg

SEQ ID NO: 199635 - DNA, 3189 bp, Zea Mays
gttttcgttttcttgaaaaaattacgacactgaagatattattctgtcacaaaagagacactcctctttgtgtgcttgtatggatgacaaaaaaacatgtttggaaattaagtgatgcatgagcctggattatgtatggaaatatggatatcacacatacttttgcattatggatatcacacataatatgtgacgaactacaaagatgtgaaacagaaaagaagtacaacaattgtagcacactcctgagggcctgtttgggaactcttcctcaaaaccacagttttataatgccacaatttattgtatgccattgacatagccatggtatattttacatcagtccaatctgatacctatttggagacacaatatttcagttgtagtgtagaagagaagactgcagggatgccgacattactttctcttgaagtaactggtgatgcaattgaaggaacaactatgtttgccagtaaaaggtattggggaggagaagaaggggacacaatgttccgctggatactgacaaattctgatggaaccgagaaagaaattgaaggagcaacaagttcatcatacaccttgaaatgcaatgacattggcttctacatatctgtcttgtgcaagcctgttagaaatgatggagttgatggttctttagtgtcgactgaagcgattggtcctattataccagggccaccaacatgtcaatctcttgaactagctggctctatggttgaaggtggccgtttgacctttcatgctgtgtatacaggaggtttgcggggaagttgcatccaagaatggttcagattacatgatgatgggcacaaggacaagttgactgctgatgaccttgatctagctgatatcgattgccggattgaacttatgtatacacctgtacgagaagacggagtgcacgggttaccaaggagtgttacttctgatacaatcttacctggggagcccaagggtgtcaatcttattctacctgagtgttttgaggacaatgaaatttctcccatcaaaacctatttcggtggcaaggaaggcactggcaaatatacatggtttcgaaataaagagaaacttgataacttggaatttgatctggttgctgaatcatcagaagttgttggagaaaccttaaaatataagccttcattgaatgatgttagttcctatctgattctttattgggttcctacacggcgtgatggaaaggttggtgatcctttgatggctatctctgatgatccggtcatggcagcttttccatctgtttcggatgttcacttagagcagaaaagttcagatgtatattgtggactaggcatctattatggtggatatgagggattaagcttgtatagatggtacagggaatctagtgatggaactaggcttcacatagatggtgctgattcagtcacatacgaagtgacagatgctgattacagctgccgtctactgtttggttatactcctgttcgttcagatgggataagtggagaagaaaaactctctgaaccatctgatgtaattttgccagaactactcaaaatcgagacactcaatttcaaggggaatcaggttgaaagagaaacactgactgctgctgaacaaattccgtacagtgagattcaacaacatatatggaaaaattataagaaagagatgaaatatcaatggtttatttccaatgaatcaggaggcgatcagtcttttgaaccattggcaacccagtgttctcgctcatacaaagtgcgctttgaggatattggtcgttgcctgaaatgcgaatgctttgtcactgatgtatttggacgatctagtgaattggtatccgctgtgactgctcctattttgccaggaaggcctaaaattgaaaagctggagattgaaggaagaggtttccacactgacctatatgccgttcagggtacctatagcggaggcaaagaaggcaagagtaaaatacaatggctcagatcgatggttggaagccctgatcttatctccatacctggcgaaactggaagaacgtatgaagctaatgttgatgatgtagggtataggcttgttgcaatttatacacctgtaagagaggatggagttgagggacaacctgtttctgtttcaacagaacagattgcagttgagcctgaactttacagggaagtgaaacagaagctcgatgatggttcagtcaaatttgaggttctgtgtgacaaggaccgaacacccaaaaaggcacaagtaatgggccatttggagcggagggttttggaagtcaaccgaaagaggataaaagtagtaaagcctggatctaagacatcattcccgagtactgaagtacgaggaacctacgctccaccgttccatgtcgagctgtatcgcaatgaccagcaccgcttcaagattgttgtcgacggtgatactgaagttgacttaatggtgcaaacacggcacatgcgagaccgcatcatcctcacgatcagaggcctcgcccagaagttcaacagcacctccctcaacacacttctcaggatcgagtcatgatagacctgacagtgtaaaaaccaactattacgggaagctgtaccccttgttccgattggttagagtgcgtggttttagtaggattcgtgacatgccagccttttgtgtgtatgggtgtgggacgggccgagcgtgttggattacaattttttccctgacacatctctcaaatcagagcagcatcagctggttgctctgactggtgccgtcgtgcgtcatgaaatgtacatagggtggttagagcgagaaagagagtggtgtttcttggtgctgtatttattatgcactggttgggttgggttttttcgactgccattctcatactaagtattggttctttcttttttcggtcgttgggtttgcatatacttgtaccgacaacacagcttggggtgattgggcgagtgctgttcagaatgcctggtccacacttgtgtacgactggaatcctacggtggcgtattcacatgctgttttatggtgcaaatgtaaattcatctgttcataaacgagaatcaaaatcgtcggccacgtgtattcgtcgtattcgtaccgatgtatactaccttataaaccagtactaatctcacggtggcatcaattatcttcctctgtttcacaagg

SEQ ID NO: 199636 - DNA, 2835 bp, Zea Mays
cataatatgtgacgaactacaaagatgtgaaacagaaaagaagtacaacaattgtagcacactcctgagggcctgtttgggaactcttcctcaaaaccacagttttataatgccacaatttattgtatgccattgacatagccatggtatattttacatcagtccaatctgatacctatttggagacacaatatttcagttgtagtgtagaagagaagactgcagggatgccgacattactttctcttgaagtaactggtgatgcaattgaaggaacaactatgtttgccagtaaaaggtattggggaggagaagaaggggacacaatgttccgctggatactgacaaattctgatggaaccgagaaagaaattgaaggagcaacaagttcatcatacaccttgaaatgcaatgacattggcttctacatatctgtcttgtgcaagcctgttagaaatgatggagttgatggttctttagtgtcgactgaagcgattggtcctattataccagggccaccaacatgtcaatctcttgaactagctggctctatggttgaaggtggccgtttgacctttcatgctgtgtatacaggaggtttgcggggaagttgcatccaagaatggttcagattacatgatgatgggcacaaggacaagttgactgctgatgaatgtctagaccttgatctagctgatatcgattgccggattgaacttatgtatacacctgtacgagaagacggagtgcacgggttaccaaggagtgttacttctgatacaatcttacctggggagcccaagggtgtcaatcttattctacctgagtgttttgaggacaatgaaatttctcccatcaaaacctatttcggtggcaaggaaggcactggcaaatatacatggtttcgaaataaagagaaacttgataacttggaatttgatctggttgctgaatcatcagaagttgttggagaaaccttaaaatataagccttcattgaatgatgttagttcctatctgattctttattgggttcctacacggcgtgatggaaaggttggtgatcctttgatggctatctctgatgatccggtcatggcagcttttccatctgtttcggatgttcacttagagcagaaaagttcagatgtatattgtggactaggcatctattatggtggatatgagggattaagcttgtatagatggtacagggaatctagtgatggaactaggcttcacatagatggtgctgattcagtcacatacgaagtgacagatgctgattacagctgccgtctactgtttggttatactcctgttcgttcagatgggataagtggagaagaaaaactctctgaaccatctgatgtaattttgccagaactactcaaaatcgagacactcaatttcaaggggaatcaggttgaaagagaaacactgactgctgctgaacaaattccgtacagtgagattcaacaacatatatggaaaaattataagaaagagatgaaatatcaatggaaggcctaaaattgaaaagctggagattgaaggaagaggtttccacactgacctatatgccgttcagggtacctatagcggaggcaaagaaggcaagagtaaaatacaatggctcagatcgatggttggaagccctgatcttatctccatacctggcgaaactggaagaacgtatgaagctaatgttgatgatgtagggtataggcttgttgcaatttatacacctgtaagagaggatggagttgagggacaacctgtttctgtttcaacagaacagattgcagttgagcctgaactttacagggaagtgaaacagaagctcgatgatggttcagtcaaatttgaggttctgtgtgacaaggaccgaacacccaaaaaggcacaagtaatgggccatttggagcggagggttttggaagtcaaccgaaagaggataaaagtagtaaagcctggatctaagacatcattcccgagtactgaagtacgaggaacctacgctccaccgttccatgtcgagctgtatcgcaatgaccagcaccgcttcaagattgttgtcgacggtgatactgaagttgacttaatggtgcaaacacggcacatgcgagaccgcatcatcctcacgatcagaggcctcgcccagaagttcaacagcacctccctcaacacacttctcaggatcgagtcatgatagacctgacagtgtaaaaaccaactattacgggaagctgtaccccttgttccgattggttagagtgcgtggttttagtaggattcgtgacatgccagccttttgtgtgtatgggtgtgggacgggccgagcgtgttggattacaattttttccctgacacatctctcaaatcagagcagcatcagctggttgctctgactggtgccgtcgtgcgtcatgaaatgtacatagggtggttagagcgagaaagagagtggtgtttcttggtgctgtatttattatgcactggttgggttgggttttttcgactgccattctcatactaagtattggttctttcttttttcggtcgttgggtttgcatatacttgtaccgacaacacagcttggggtgattgggcgagtgctgttcagaatgcctggtccacacttgtgtacgactggaatcctacggtggcgtattcacatgctgttttatggtgcaaatgtaaattcatctgttcataaacgagaatcaaaatcgtcggccacgtgtattcgtcgtattcgtaccgatgtatactaccttataaaccagtactaatctcacggtggcatcaattatcttcctctgtttcacaagg

SEQ ID NO: 199637 - DNA, 2803 bp, Zea Mays
atgtgacgaactacaaagatgtgaaacagaaaagaagtacaacaattgtagcacactcctgagggcctgtttgggaactcttcctcaaaaccacagttttataatgccacaatttattgtatgccattgacatagccatggtatattttacatcagtccaatctgatacctatttggagacacaatatttcagttgtagtgtagaagagaagactgcagggatgccgacattactttctcttgaagtaactggtgatgcaattgaaggaacaactatgtttgccagtaaaaggtattggggaggagaagaaggggacacaatgttccgctggatactgacaaattctgatggaaccgagaaagaaattgaaggagcaacaagttcatcatacaccttgaaatgcaatgacattggcttctacatatctgtcttgtgcaagcctgttagaaatgatggagttgatggttctttagtgtcgactgaagcgattggtcctattataccagggccaccaacatgtcaatctcttgaactagctggctctatggttgaaggtggccgtttgacctttcatgctgtgtatacaggaggtttgcggggaagttgcatccaagaatggttcagattacatgatgatgggcacaaggacaagttgactgctgatgaatgtctagaccttgatctagctgatatcgattgccggattgaacttatgtatacacctgtacgagaagacggagtgcacgggttaccaaggagtgttacttctgatacaatcttacctggggagcccaagggtgtcaatcttattctacctgagtgttttgaggacaatgaaatttctcccatcaaaacctatttcggtggcaaggaaggcactggcaaatatacatggtttcgaaataaagagaaacttgataacttggaatttgatctggttgctgaatcatcagaagttgttggagaaaccttaaaatataagccttcattgaatgatgttagttcctatctgattctttattgggttcctacacggcgtgatggaaaggttggtgatcctttgatggctatctctgatgatccggtcatggcagttatactcctgttcgttcagatgggataagtggagaagaaaaactctctgaaccatctgatgtaattttgccagaactactcaaaatcgagacactcaatttcaaggggaatcaggttgaaagagaaacactgactgctgctgaacaaattccgtacagtgagattcaacaacatatatggaaaaattataagaaagagatgaaatatcaatggtttatttccaatgaatcaggaggcgatcagtcttttgaaccattggcaacccagtgttctcgctcatacaaagtgcgctttgaggatattggtcgttgcctgaaatgcgaatgctttgtcactgatgtatttggacgatctagtgaattggtatccgctgtgactgctcctattttgccaggaaggcctaaaattgaaaagctggagattgaaggaagaggtttccacactgacctatatgccgttcagggtacctatagcggaggcaaagaaggcaagagtaaaatacaatggctcagatcgatggttggaagccctgatcttatctccatacctggcgaaactggaagaacgtatgaagctaatgttgatgatgtagggtataggcttgttgcaatttatacacctgtaagagaggatggagttgagggacaacctgtttctgtttcaacagaacagattgcagttgagcctgaactttacagggaagtgaaacagaagctcgatgatggttcagtcaaatttgaggttctgtgtgacaaggaccgaacacccaaaaaggcacaagtaatgggccatttggagcggagggttttggaagtcaaccgaaagaggataaaagtagtaaagcctggatctaagacatcattcccgagtactgaagtacgaggaacctacgctccaccgttccatgtcgagctgtatcgcaatgaccagcaccgcttcaagattgttgtcgacggtgatactgaagttgacttaatggtgcaaacacggcacatgcgagaccgcatcatcctcacgatcagaggcctcgcccagaagttcaacagcacctccctcaacacacttctcaggatcgagtcatgatagacctgacagtgtaaaaaccaactattacgggaagctgtaccccttgttccgattggttagagtgcgtggttttagtaggattcgtgacatgccagccttttgtgtgtatgggtgtgggacgggccgagcgtgttggattacaattttttccctgacacatctctcaaatcagagcagcatcagctggttgctctgactggtgccgtcgtgcgtcatgaaatgtacatagggtggttagagcgagaaagagagtggtgtttcttggtgctgtatttattatgcactggttgggttgggttttttcgactgccattctcatactaagtattggttctttcttttttcggtcgttgggtttgcatatacttgtaccgacaacacagcttggggtgattgggcgagtgctgttcagaatgcctggtccacacttgtgtacgactggaatcctacggtggcgtattcacatgctgttttatggtgcaaatgtaaattcatctgttcataaacgagaatcaaaatcgtcggccacgtgtattcgtcgtattcgtaccgatgtatactaccttataaaccagtactaatctcacggtggcatcaattatcttcctctgtttcacaagg

SEQ ID NO: 199638 - DNA, 4531 bp, Zea Mays
agtattggtgagaatatccagaaggaaagccaaatgcccatggatccaagtgcttttcaaataatagaatgtgccgaagctcctaatacaggagttgttagtagtaagtttgctctgaatgtagcatgcgatagtcccatggatttaaatttgacaaatgttgggacttcagataacatcctgtacacttcagagtttgctgtaccaggtcgaaccgaggatagaagcatgcaagttgattttcatgatgcgaaagctgctttacataagccaaatcttcccctggaagtagtggatacagatacccatgatctgcagtcatccagaaatactgagagcacaattctgccatcattcggtgatgatcctatgaaggattcctctggtgctctgaataatggtctagggaggagcacttcatctcaagtaaccgaactgacacatcttcatagatcccacccgcctgctgactacaatccattctccttgcattcccatgattcaccatctgtatctggtaacagtgagcattctgttccgacagctttgacacttggtaataatatctatttcagtagtgcagagagtgagggacagcctgaggaaaaccataacctattggatgtaaacttaggatttgatgtgacaacgacagaatttggtaatgttgtcaaaagaaaaggtgaatctggcaatgacttaatgaatgcaggcagtcagaattggttgactttaccacttactgtcagctgcttggataatgcttctgctgttagtaatgggaggataggtttagagcagattgtggatgaaggtgtccctgttatctgtcaggatcatgatattatgctggatattgaccagcggggcagtattgatgttttgtctggccaggatcacaacctcaaactatgtggtatcagtattcctcaagcagtccttttggcaacagaagagagaaataaggatgttgatgatgagatcgttcgcccaggttcttctattaattctgtaaatgttttagataaatatagttattgcacagtgggtaaacctatagataatcttagtagacccattctcttatcttcacaatctgctgatgtaccaggtcgagacttagcttctcagatatctgttgattctgatcacacttaccatggaagtactgaggatcctgtgggcatgtcaagtacaacacctgattcggtatcctcctggattgaagccattgtaccagaagctaacaaggaacaccaatcatgcaaatcttctctacttcctatctgttcttcagaaaaggtatcagcaccaaaggaggatagcaagaaggcgttgtcagattcagtagtcaactctgtagtaaaatctcctcctcgaattaatattgcaagctccacagtattgaaggtacctactaaacaggtagctttgcctggttcattgctagagccccctcgcttaaaccagaatgcaaggaacaggacatggcgtcgtgacaatgcatcatcttctaattcgtcattgcatgtttcacagacttcaggattaccccctaaactgccattaaaaaagaacagcaaaagtcaaaactcttatatccgcaagggtaatgccctaattagaaatccagccaatggaaatcatcttcattcttcttctagtctagattctcaaaataagttgagtaagcctgttatgaggagaagcatgaactttgtcaggaatgtcgattcaaaagacgcagcacattctcatatttcagttgaaagacccaagaccccacctttgccacttcataccaaatccatcagttgtgctgtgaatgttttggagccattgtctcaaaatttgcagcaacaggtccttgaaactgaaaaggaagattccagtgggcaggttaactcaggtgctgacaatctaagcattattagtttgcacaagtctgaagcccttgatgctggtaaagcaatttatgttaggccaaagttaaatcaactagttgcacaggggcggcatcttggtgagtcgagtaacatttccttggataaagtgacgttgctgcagccttccgcaacatctgatctctatttcaagaaaaggaaaaatcagattattttgggtccctctacttctgatgccccgagttcaaaagatacatttcaggctgaaaatataaagtcaggtgagagtaaagttctaatgtcttcatcttccaacaacaatatcactgtggcaaaggacaggctgcacaaagctcttcagacaacaaatactgtcagaagtttctctcatgtatggacacttaatggacaaaatcctcgaaagaaatcttatgtgggagctagtcatatgaaggtcttacctcgtatacttccatggaaaagaaaaatattctgccagaactttagaggcagttattcttcgttgttgaatacaagctctataggaataatgagaaaattattgcaaacaaggaagagaagtactatttacactgtctctactgatggattctctcttcggaaatctggagtgttaagtataggcgggtcaagtttgaaatggtcaaggtccctcgagaaacattctcgaaaggttaatgaggaagctacacaggcagttgctgaagttgaaagaaagaaaagagaaaagagaaaacggcagtctctccgtagcaagggaaggaatgatcggtactctgcatcagttgctgccaatcaattaacaaacagaagcagagcatcttcagattcaagggtgtcatcaacttgcaatgaatatgtgcgtgttaacaaaggtaaccaactggtcagaaatccgaagaaagtaatccgcatgctagcaagtgagaaagttcgatggagtttgcacactgttagaacacgattggcaaagaagaggcaatattgtcaattcttcacccgcttcggcgagtgtaaaaaatctggtggcaagtgtccctacattcatgaccgagctaaagtggttatttgtactaaatttcttaaaggcttgtgttctagtactagctgcaaactaactcacaaggtcctgccagaaagaatgccagattgttcttactttctgcaaggcatgtgaaagtgaactcgaatgctcctgtctgtgaagattttttaaagggatattgtgctgatggtgatgaggtatttatgatatcactagaattatatagatgtttactttttttctgcaccttgcatcgaagagtaggtaggcacatgaattcttatggagatggcatgaagcttgcttccattgggtttttagcgaacaatattttatatcagaattaatatatttaggttggagtcctttatttgtatatttgttccaacacgaaatgttctatgggacacgtagtgtcaacatatccacaccttctagttccttatatttttggatagtgttgattcttcatctgaaaaagcatgctgtctctgctttaaaacaatggtcgtattatcttttaaatttctgggaccttagatgaacctttacggttctgaatggatatcactaatcttttcatggacttgaaacaatctctgttacgagcagtgtcgtaaaaagcacagctatgtatgcctcgtctttgaggcaacaggagagtgcccacaaggatcaagatgcaagcttcatcacccgaagaagaaaagcaaatccaagagaagcaaagtagacaccgtccaaaacaacagttggggtcggtattttgagacaaacgttggccatggcagtggagcaagaatagtttatttggaggaagatgagagacagaaaccagagcaagtctctggtgaggagtttgctgacttcattgaacttggtgccggtattgaagtccctgaagatgcagacacttcggatgacatacagctgatggaactggacttagggaatctcgaggtgcaggctgacaataatgacgcgataatcaagccacttcggatcatgagaacggcaagagtttgatgagttctttggttggatacagctgcagtgttcctgggtcagggtggtattttacgctatgtttgacgtggcatataggcgctgactggagtttctatttctcgaagactggttctgacgggggcaatcggtttttgcttggttgaaggtttgattttgttcatcttgtacatcttttattaggaaatatattaggaccatatggcagtggtagaggccatgagggttactggctgttaacccgtgttttttcaacattacccagagttgaatgtaacaaacagtgctttacaatatgaaatgaatgaaggtttgcatacaggaaatgaagctttcattttgtgtatattgcacatttgcaccgcacatcttttggttataaattcgttaattccttccgtaagatatatttttatgatgcaagcaaagaaacttgctccctgtggtaaaaaaaacaacataacgtgagtttttggaagccgtcattcaaaagcaaagaaacttttaggtttccaacctgaaaggtggttctgtg

SEQ ID NO: 199639 - DNA, 315 bp, Zea Mays
taaatctccagcctgttgccttcttccaaagctgctctcgcccccataaataaagcagctcctccgggggcggcgaactactcctcgtcgccaaaaccctagccctgcttctttgccatggcgagcagcgctagccaggcgagcctcctgctccagaagcagctcaaggatcttgcgaagaaccccgtggatgggttctccgccgggcttgtagacgacagcaacatcttcgagtggcaggtcaccatcatcggaccgcctgacaccctatagtacatacaaagaaaagaaaccgattgttgcatgagaggttga

SEQ ID NO: 199640 - DNA, 1231 bp, Zea Mays
caccaagagagaagaaccgcagtcccgctccttccctgccggctgccgctgccccgtctctgtctccaactccgaatatgtcgtcctcgcccctccccaccacctccggcggggctcacatcttcccgtctccgcctcgaccgcgccaccgccggtgctcccaagtaatcgtcgccgccgccgctccgccccgttcctacggcgtcggtcgccgcgccgtctccctagccggcgtcgccgcctggcttgccactaccgtcggccgggcagacgcggccagtccatttgacaagtacgtcaagaggaagaagctggagcctttggagacctacgttccggctgtcctgctgaccattgaccaattcgttgatctaggtaatgcacgagtaggatgatcagtatcccacggtatcaacttatctgtcgcctcagcaaccttgagctgatgcaaaataaagtgtataatcttttgcaccatcatcagcaagtatgaattgtgtttatccttaagagtcccaattaccattaattaatacttcaatttggcattcatagcatctgcctgcctctcatggcgtccatagctaactagaagtggaagtacatttgttttaatgtttctgcctttgttgttttttttaatatggctgtcaattttttagcggtccatgagagatccttccatatatggttcattgcagagaaatccttagaatttgagaaaccaaggtatgacgagagcagatcattacttcgctctggaccggcatcatctttaagagtcaacattcgggcagtggcacaatatgcttctagtaatggtcaaggcaaggctgcatcagatgctgtggacgagtgcttacgagcactggaagatctcgactcactactactacatgcatcacggaatgatccgtcagcatccgttgaaaccatgaggagcaagatcagtgttgcccttgcagcattagacaatctcttgcaaacggtgccatctgcagtactggataaaggaaaggcgattgctgatgcataccgaactccagtagatgattatgtagagggctgaaacagttggaggatattctttaaggctgaattttgttaggttctatatcatgtatacctgtttggattactaaattcctcgaactgtacatcccaatttataattcgttttgcttttttttatgaagtttgattggctcatcttatttattttttagaaaaa

SEQ ID NO: 199641 - DNA, 555 bp, Zea Mays
gagacctctgggttgaagcaatatgtatatatttaagggtcccaggaaaaagatactatcagcattggctcacagaaagaacaagtcttcgaagtcattgcctaccagtaccagttgaggcatctttaagcttgtgtggtagctagacaacttgttgatcttggatatgtgcaagtgcatcatcgacctgcagagttaactccactgacgagcaagattcctatccatcaaggctgatgcggtgtataagtagagaactccgtgatgttggtagttgaaggcaaccaactgattgttgatgtccctcctattctgtgatctccggaatatttgttgatcattgggtgttaattcatgatgatgccttggggattgtttccccttgtccggcaaacccaattcttgcttcttgcgtctcaccgtctgcatatccatccaaaaagaattgagttcacagagaaatgcttgagtttaactaagttcacagaaaaataacaggcaacatttatgtctccaaacaggtttaatatgaaaatatagtatatgattattttc

SEQ ID NO: 199642 - DNA, 2640 bp, Zea Mays
ctgaaaacgaagagatggcaactcaggtgaggagtttagcaaagattctattgagcgtgatgatagacggcttatagagctaggctggaagacattggagctttttgccttgactcatatatttagccgaatagaagtggcacatcaagaggctgtggctttgaagcgccaagaggaactcattcgtgaagaggaagcagctgggctagctgaaattgaacttaaggcaaagcgtagtgctgctgaaaaggaaaaacgtgccaagaaaaaacaggcaaaacagaagaaaaatagtcgaagaagtaataaagggaagagtggcaagtctgacatcaataaggaaatacttatgtacagcagtccttcaggtgatagaatcctggatgatttttctggacaaacggaagaaatgtcctcaaatgctgacaaccctgaagaagtttctgatatatctgacagcagagacgataattcagatgcgcttcatgttgatattgaagaccgtgaaagtagccctgttaattgggagacagatgcttcagaaactcaagctactgtgcctggaagtagtgaggtgcaaaatgaccatgcagggaagaggacctctactgtagatgatagctcatcgacttgttcatcagactcagtcccttcagttatcgtgaatggatcatatacaggaggtgcctggacaagcgtcagatccttatccaataggggaaacaaccggaggaataaggatactgaagcacgggcagcacttgcacaaggtggatcaagttcagcgcataatggttttataggatctggcggcagtgcctctggccactcaaaggaaagatacgaacctgaggatgataaagttgtcatgcagaggaagcaacatgcacggcacattgatgtcattagcccctctaagtcaagaatggcagtgtcttcattttcttctgtgagccctgttaagaagcaacctaacttgtctcatcagccaaaatttttgctagaaagcaccaatagttcaaatcaccgtgcaagcgaagtttcaggcgccgtgactgccactacaacagcaggtgcctcttcaaccctggcagctcagttagtttcaaataaaggacctgtatccagtgctgcaacccggaatgagaagccagttctagttacaaataaacccctgcaggttcttgtaccatcaaaatctgaagcgcagaaacaggcttccctaactggcagcgcaagcactcaggtcgtttcggtatcaaggcccttgagtgccccgcaagtccctgcagcaaaacaaagtgtgccagccacaacagctcagaacgcacctcttctttctcgctcagtgagtgctgttgggcggttaggaaatgagccctccgccaatgctcctagcttcattccccggtcacgaacctatcgcaatgccatgatggagaaaagttctggtggcgtaagcagtctcacacatcagcaaggttcatctgagcaggccgtcgcaccatcccaatcgatgtttacatcgcagccttccattctgtcatcggagaccttgtctatgaaagaggaaacgtcgttgagacctgggtttacatttggaaccgtaaagcccgagtcactgaacccttaccagggcagagaagagaactcactgcaagcgagcagcagcagcagcagtgactgtacgccatcgagttcgaacatcagaagtgagatcgcgaagctcagtttgaacggaagatcacggagcaagcaactcctgtctgaaatctctaccagatttactccctaccagccacaaggcttggtagctgacgagttcccacacctggacatcatcaacgacctgctggatgaggagcagagtgacaggagaagggttcttcagcctggtttcgtccagcaattctctgtgcataacggcgtcagcgcgcctgattatggcttgttcagtgagccgtacctgttcgaccggtccgagcagtactttgacgaggagcctccaaggttctacagtccattgagcagcgctcctcggaggatgagggaccggagctactcgcacttcgatctcccttcatactccaggagcagccagcttgatggtctattgatgagccagtggccgccatacagccgcgccgacctcgccatgcctggttttgggtcagacacaggtggctactcctatcagccgcagggtttcccgagtccagcgagtgcagcaagcagatacccgtcgtatcgccctgccaatgggcattgagagttttagcgattgcaattggtaataatgtgtggtggagtccatgctgctcgcttctgagctgagtgtaattgtaatagtccccccatagcagtgatataaagaatggttcctctgttttattcaatccatagttatatcatttgcctctctttttctatagttcagttttgctcagtggcaataaatctcggctaaaatgatctggacaatctaggctcagttttccctagttttgctgagtggccatagaatttgaggattcttttgggacgcaggaatttcacaaaaatggtatatgaattttatagtaattagtgtaaaaacataggaacaatgtaggatttagaaaattttcctttggaacaaag

SEQ ID NO: 199643 - DNA, 804 bp, Zea Mays
gtaatcacgtatcaccacccaagagaatgctcttctggggttcgagaagcttgtgaaggccaagacacaagtggttgctggcacgatgtactatctcactattgaagtgaaggatggcgaagtgaagaagctctacgaagctaaggtctgggagaagccatgggagaacttcaaggagctgcaggaattcaagcctgttgaagagggtgctagcgcctaaggatctctccttctccatgtgcgagcctgaagctcaaagcaaagttgcagaataaggagccacctcccaacatgctagaccatgctcccttgtgtaatttcataagactacaacccttttagggcttgttcgtttgtgtctgtgtctaagggaattgaaggtgattaaatttccttctatacaaatagaggggctttaatccactccaatacttttcaatccacgcctaaccgaacaagcccttaatatgatatcttagattgccgtacctgtgtaatatcatgaataaaatttgctattatggattctaaggtttatgaactaccatacatggcagaatcctcatgttactttgctgaaatctttgttggaagttggaacgtacatggcagaattctcacattacttggctcaagtcttcggcttggaagtttacatgcagattttttggtcacatgacgatcccatccaatctcagcttggtcaattcagattataccttgtaaaccaagcaagcgcctgagtgcatagtcagctcaccagatgaccagagagaatatgtttgcgatcacttcgaagctgtt

SEQ ID NO: 199644 - DNA, 3966 bp, Zea Mays
catttggcgtgtacgacgtccaccccacaagctcccacggcgctccccatggaccccatcccctcccccatggccgatgagctcgttcgtcgccccatatatggagtgaggttcggctcaccctatccggccatttccatgaggaagatcctccacatccagggcgggcagtgcggcaaccagattggggcgatctgcgacgagcacggggtcggcgccacgggccgctacgtggggaattcggacctccagtttgagcgcatcaacgtctactacaacgaagccagcagcggccatttcgtccctcgtgccgacctcatggatctcgagtccgagaccatggactctgtgcgctccagccccttcggccagatcttccaccccgacaacttcgtcttcggacagtccggcgccggcatcaactgtgccaaggggcacgacaccgagggcgcggagctcatcgactctgtcctcgacgtcgtctgcaatgaggccgtgaactgcgactgcctcagggcttttgacattacagctccaggaggtgacgtgatctctggtggttttgacgactctgctagttggaacaacaacatggtttgggttgttgacaacagcgacgatggccatggttgccacaactgcgttccagttctgattgaaagtatggactctctggtgttcaacgaaatgccgctggagagtgtgatttgggatgaggaagccaagcatggagatgtggtgaacctggaagggaagggtgaccagacgcacaacaattgcgagcagggtgttgttcctaatgctccatggaagttgggtgatccgttgttcagtaaagtgggtctaaaagtggcatgggatggggagatgcaatttgaatctcatacgcatgaagggttattgctcaaggtggagaagtcttagatgaatcggctgagaaggagggtgaggtggtagatgagaccagcaggtctgatgtactgagtgaggcagctgctatggttatgcatggtggaagcatggaggagcttcttcctgctagtgctggcagtgtgatagaggatagcctggagaaggagcagaatgataccagtgaagaagaggggaaatatcttgcagtatctaaagaaggggctgagaatgaggtgttgcagtttcagttagcagacgatgaaataagggaggataaagataaccaaactgaagcgagaaaagggaatactgctaataccttgcagtgtgacctgttagacagtgcgctcggcctggaggaaaagcatggcgatgaagatgcatcaaaatcacagacatccaactctgatagaataggattcttcattcctgtcatgtcttttatgggacacaatggtgaggaaggaattaatagcacaccaactaagggacatatatctgaggtagatccttcggaagtatcaggaacaacatctccaaaattgccttcaaattcggaagaagtccatgtagcagaagaaaagcttgatagctctaccgagacacctgcatctaaggttggtgatgctgaatcatcagaagtatcacaatctacaggacatccttcaacagtagaagacatccaggtccatcaagttagcaaacatcctggtcctagtgatgaagtagagccaaatcagcttagagggtctgttggagacttacctgagggtagtgcctcgtcggcgactaccaaaatacatcaatcaggtgacaccgagacaagggaatctattcatacaagaatgggattggaagatacatctgataggaatattttgcaggcacaactagcagagtctgcattagaacctgctgaacctgaagaatctttagcaatagaagaggttcttgtaactacaagcaatgaggcggataaagaatcagctgctgtcattgaggctgtaccagccttgtgtgagacaactggtcccaaggaggctgctgctactgaaaaagcagtgaaagaggttgacaacattgtgaaatctttggatgaattcaccttcgaggagggagaatcaaaggagatgcaaaagaagcagccgcaagattatgtttctgttgatattgttgataatagattactgcctcatttgccacacgggttttcacaaaacagtgagcaatataaggtggagcagtccccacagattatatgtgaacaaggttctacgcatccgggccagtatgatgaggatacatctttatctttaacagatattcacatgggtgtatccttccagaacttactgattcaaaggcaccacttggatttctattcaccaatcaacgtaatttttgaagcctatgcagcaaagttcgattcatctagcggttcttttgcacaaaggaattccaaattgctgaaggaaactgtgaacatgcaacctgagcaggctgactattatgtcgttcgcaatcacattgtagtgctctggtgttctagtccttgcactaatgctgatgagtatcacgccattgttgttgctgctgattttggagacatcgttttcaaccagtttttggacaaagtttgtcggttgagacaggtggttgtagatgttgcaccacatggtgttgaagtgacgttaggcatggcacttgcagcattccgggcagcacgtggtgttgcagctaagcatgaagcgaaattgtttctggactggcatttggaaaatctcgtgtatgctattgctgcctcccttactgatctctccatggccttatggggatctgtatgatccatacgaagtgagcagagaccactgctatgttcctggtggcagttctcattttgttcgtgcatttactaatggaatcttgatagtctacgggcagaacgtaccaaggaaacaatatggaggtgatgagttgtgggtgcacggtgataagatggcattccatggtgatatggtcctacggtccctcttggcatgcttcttctttggataactagaccttgggatccaggcattttgtctgcattgcatgtcagtgttgcttggggacaagcaacgctttgacggggcggtaatgtaacatccggccaatgttagagattgcacatacaagtactagtgagtacgtatttgaatttgtaatggtggtgggccgtaccgggccgtagtgggctatacccatgacattagtataagtatgttgtaagacttgaggaaggggcatccaagaaataccagaaaccaaaacgaatcaaccttccggttgttatcgtattcatcgatcacctgagattgctcatctgctcacgtcggtgacgccgcgccggccaagggccatgagcccgtgatagaggacggtggtggccacggtcctggagcgactcggtgacgggatctggaagttggcacagaggagcgaggaaaggccgagcccgagaagcatcgtcgaggacacaaccggcatgtggtggtctttttggtcggcggcgtcgtgggcagctggttgttgccgtcgaagctcgaaagaagcctcgattcgtcgaaaggttgcaaagtggacatcccctatttctatagtttcatgtttcatgcatatgatggtcagacttgtgtccaatatattttgcaaacctgaaatgtcaactacattttggagacatccgtcaagaatagtagagcatcctgttaggtgtcttcagaaactggaatgacacactgcccatagttgtaggatacttggggcttgtggtagtaatggcaacttttagatgacttattttttttcatacgatgtctaaatacttgcagacacactgtccattgtttgaggttttagagatgttagcaaaacagttttttcctcaatgagttgggctctgtttcggactcctactgttctgttacctcaagtctgttatgtgctagttgtttaagtgcctttactgaatgtcgagtttaactgcctgaaatcctgcagtttctaaagaaatta

SEQ ID NO: 199645 - DNA, 1773 bp, Zea Mays
ctcacatagtgctaacagaacccgacgggattcaggttgacgacgtgacggcggaacccccttcgacccctgctccacggggagacgtggagatgatgaccgaggacgagaaggagaaggccagattgtttctgcctgatttgaggcgaagccccacttctagttcgcggggtccggctgtggaggagatgacttcgaatgaatctgttagcagtaatagcatctcaaactttaaatggggtgcaaccaataggcggtctcggacgcagtttagaggacaaggagacactgagatttcggctccagccttaattggaagctcagacaaagggatttctggcctctctgctggcacctcaaaggagaagaaaggcactgaagaaactcgtagtgcacagaacacaggagatttagggcttattagttcttcatcaagtccagtaacaagcgcacaacggccactcccaagctccagcgtaggctcaaactcaagagaatcaaaaaagagggataccgctttgcatccactgattttcaaggaagctggccttccagataatactttgttgacttacaagttgaagaacggagaggcactactgcaagggtataagcagggagcaggtattgtctgcaattgttgcaatcaagaggtttccccttcggaatttgaaaaacacgctggcatggggaaaagacgacaaccgtatcaaaacatttatacatcacaaggattaacactccatgatgttgctctgcaactgcatcatttgaatttgaattcaaatggatttagcaatgctagtgtttccagcttcagtgactacccaaaccttacttcttcaggttgtggcaaagaaccttctgtcagtggacctattgtccccctgaaacggactttacaagaaagagtggtccaaacagagagttgctatttctgtgggtatggccacacagagcttggaaaaattgatccaaacatgattgtcttctgtaaccagtgtgagagaccatgccacgtgaaatgttacaatagtagagttgtaaaaaagaaggtgcctctggaaattttgaaagactacttgtgttttcacttcttgtgctgccaagaatgtcagtcacttcgtgtccgtctagaaggaatggagaagtgtgaagagattgccttccttggacggataagatccaatatttgttggcggcttttaagtagcgctgacgcaagtagggatgttaaactctacttgtctcaggtcatcgacatcttcaaatacgcatgttgtgtctgctgcgattctgaaagtgcgcgtggaacatgctgcagaactggtccttattgctactcgtagcgagtgcagaaaaaagggctacttcagacttctcctagagtcaatcgagacaaatttgagagcctgtaatgtaagccttcttatggcacctgttgaccctgaaatggcacaaatctggtcagataaactcgggttcaccattttatcagccgatgagaagaagtccatgctggagtcgcaccctttggtgatgttcaagaacctagtcttggtgcagaaaccacttgcttgagccaatttaattaatgtttgattatactactcttttcatcctgaaatataattcgttttaggctaaacatacattcattatttaaattatgagtgtagtttgtatgcatgtctatatttcatggttattttttcttaaacacgaaggagagctgtgcatcattaaattaagagaagaaaacagtctaaaatg

SEQ ID NO: 199646 - DNA, 1358 bp, Zea Mays
gcagactttccgcttactgcgctatcttagaggaagaatttctgcagaaggccaagtgaattatggattgcagatggcacttaaaagcattcgagtttgtgggcctagatattggcctcaggtgataaaacttgcacctgaagacaagccatggtggagatctggagacaagacaaatccattcaatgggggagtactctacataaagcgaaaagttggatcttgctcctactctgacgatccaattggatgtcaatcgttaatttcacgggcaatgcatgaggtctgtgatgcaccatctgctagttgcagtaatcaaccaaacagcactaatggtagctacttcagagttgatcagctagtaagcactttctcggccaatccaagcttgattgcttttgcaaaactctgctccgtgtcatggaagagcagatgcaatagcaattttcaggagttctgttctcaagtgctatatgaatgtatgagcaaagatagaccatcactgttacaggcctatatcagtttttacacaacaatagagttaatgtgggagcatttgaagactgggaattttcctttttataattcccttttccttcccaacttgaaggtcgctttggcctacaacgaagcattagttgattctagaatcacaaatggaggaattattcattcgacattcttggagtcacttatgaagcgagtgggagacatctttgcggagctgccaaacctcaaggacaacctccaccgatacttgagcacgggcacatggcctgacacacaaaacgacgtggtggttctctcgtggtacctccaatggtacaatataccacctgcccatgttgtggcttctgcagttgagaaggtcagaccgagagtccctgccggtgtatctatgctcccactgcttcgcctcctgctgccaaccacacaccttgtgggactgatggagatcgagaaggtacagattgtcatggaatgctaaaggatgagcgtggaaaattcaatcaaccttctctgcatgcgggttacttgtgatgaacggtagcaagtattgcttagtgcacttgtgatgaaatctgccagggactaagctgttctgaattaagtttgagacaaaagaatcccataatttttattgtgctttgctttagattcatattttctgcatgaattgtttcgattctacccatgagaagtactccctctgtccttatcagaggtcaaaccctctaagtttgacaagtttatagaaaagagcaaccatataaaaatgtaagtcttatatatatatttcataatatacctaataaattttatgcggtattataaatataattgtggtcaaacattag

SEQ ID NO: 199647 - DNA, 1720 bp, Zea Mays
gatttcttattttcctttgttaaggtaatggcaggatctggaaatttgcagactttccgcttactgcgctatcttagaggaagaatttctgcagaaggccaagtgaattatggattgcagatggcagtaagcttggcaataggattcttattccttggaggtggaacacacacattttcaactcagaatagtgcaattgctgcattactaatctcactttacccacgtttacccactggaccaaatgacaatcgctgccatctccaggcattcaggcacctatatgtaatagctacagagcctcgatggattcagacagtggacattgacacagaacttccagtgtattgtccattggaagtgacagttgctgaaacggattattatgatgagaccaactattgtgaggtgacaccttgtcttctgccagaacgctcagtgcttaaaagcattcgagtttgtgggcctagatattggcctcaggtgataaaacttgcacctgaagacaagccatggtggagatctggagacaagacaaatccattcaatgggggagtactctacataaagcgaaaagttggatcttgctcctactctgacgatccaattggatgtcaatcgttaatttcacgggcaatgcatgaggtctgtgatgcaccatctgctagttgcagtaatcaaccaaacagcactaatggtagctacttcagagttgatcagctagtaagcactttctcggccaatccaagcttgattgcttttgcaaaactctgctccgtgtcatggaagagcagatgcaatagcaattttcaggagttctgttctcaagtgctatatgaatgtatgagcaaagatagaccatcactgttacaggcctatatcagtttttacacaacaatagagttaatgtgggagcatttgaagactgggaattttcctttttataattcccttttccttcccaacttgaaggtcgctttggcctacaacgaagcattagttgattctagaatcacaaatggaggaattattcattcgacattcttggagtcacttatgaagcgagtgggagacatctttgcggagctgccaaacctcaaggacaacctccaccgatacttgagcacgggcacatggcctgacacacaaaacgacgtggtggttctctcgtggtacctccaatggtacaatataccacctgcccatgttgtggcttctgcagttgagaaggtcagaccgagagtccctgccggtgtatctatgctcccactgcttcgcctcctgctgccaaccacacaccttgtgggactgatggagatcgagaaggtacagattgtcatggaatgctaaaggatgagcgtggaaaattcaatcaaccttctctgcatgcgggttacttgtgatgaacggtagcaagtattgcttagtgcacttgtgatgaaatctgccagggactaagctgttctgaattaagtttgagacaaaagaatcccataatttttattgtgctttgctttagattcatattttctgcatgaattgtttcgattctacccatgagaagtactccctctgtccttatcagaggtcaaaccctctaagtttgacaagtttatagaaaagagcaaccatataaaaatgtaagtcttatatatatatttcataatatacctaataaattttatgcggtattataaatataattgtggtcaaacattag

SEQ ID NO: 199648 - DNA, 2180 bp, Zea Mays
ctccctttgacctttgtcatcgtccaaaaaccatagtatatgaacaagggggtgatttgtaaatatcgaaacgaagggggggtctccagtgaacattcctcgtccgtttttgttaaagccttaataaaggcaggtgcagctcccggggaagaagccaagggggaagcgaaaccgaaagagaggcagagcttggcaatggagctcccgtggggaatgctgctgccgctgctgctggtcctctccgtctcgtccccgtcctcgtcgtcggctgctgccacgctcgccgtcaccgctccgcccccactgcctgttcctcctcctcgtcatgctcaagacgccgaaggtaacactgctggctgctgtgcttgcctctcattgatttcaccatcaccgcgctgttttttttctgtgccaatcttccatccactatcccattcctggtgctcggggtcatttcgtctggattctttttagatctgcatgctgttctgtcaagcgcagcgcagtgcgtttagagtagtagtccatgcttgatcgatctccgtggaggaaaacgaagaaacagcggcctcatttttattacccctacagatgtctgtcatccgtgcaggacagtgaatctggtctagtgctattcttttcatcactctgttacttttcaccgtccataatcagttcacatttgcggtttcctgtccaagaacgctgttgattatcttgttccagcaatgtcccgtcaaatgcgctgtaatagaatagtatacgcgtcggacagacatcaaaagctcagatttttgctgacgcacccgtggtggtggcacacgcgcaggcatgctcatcaacggcaacttcgagacggcgccgcggaggctgaacaagaccctcatcgtggggcgccactcgctgccggggtggacggtgcaggggcacgtggagtacgtctcgggcggtccccagcccgggggcatgttcttcgcggtgccgcacggcgtgcacgcgctgcgcctcggcagccgcgcgtcggcgtcgcagaacgtgacggtgcggccgggggcgctgtacgcgctcacgttcgcggcgacgcggacgtgcgcgcaggacgaggccctgcgcgtggcggtggcgccgtcgctctcggcgcccgccgacgtcgccgtgcgcacgctctacagcggcgcgtccgccgacacctgggcctggggcttccgcgcctcctcccccgtcgcgcaggtcacgttcgccaaccccggcgtgcaggaggaccccgcgtgcggcccgctgctggacgccgtcgccatcaaggagctgcccgcgccgtacccgaccaaagacaacctgatcaagaacgacggcttcgagatcggtccccaggtgctcaggaactcgacggtcggcgtgctgctgccccccaagcagaaggacgcgacgtcgccgctgcccggctggatcatcgagtcgctcaaggcggtgcggttcatcgacgcggctcacttctctgtccccgcggggcagtatgcggtggagctggtggccgggcgggagagcgccatcgcgcaggtcatccgcaccgttcccaaccgcgcctacaacctgtcgttcgccgtcggcgacgcccggaacggctgccacggctccatgctggtggaggcgttcgcgggcaacgtcacgcagaaggtgccgttcgattccgccgggaaaggcgggttcaagacggcggcgttcaggttcgtggccggcggcgtccgcacccgcctcaccttctacagctcctactaccacaccaaggtcaccgacggcgtctcgctctgcggccccgtgctggaccaggtcaaggttgtgcctgtcaaggcgtagtgaaatgaatcgtgagagcgccgagtgacggtctgctctgctcgtcgtctgtagctgtgctcgtcgtgatttggcgtggtgggttgtgaaagtgtggtcgaattctggacccttcggaatctgatcgtggtgtgctgtgcggtgcgatgtgctgtagcgaaatttggttgctatctcttgttcactccacgtttggaatttgcgttttcaatccggtattgaaggtataataattaactgctagtacggtgactgaaacctaactagtctttaagatgttaaaatttatacgaaacatatatacaaaatgataaataatatgtaac

SEQ ID NO: 199649 - DNA, 1535 bp, Zea Mays
gccgtcatggcgcgtctcttcctcctcctcctattctccctcctccactcctccgtcactgggctcaggcgcagcgacttcccgccgtccttcctcttcggcgccggctcgtcgtcttaccagattgaaggcgcttacctagaagacaacaagggcctgagcaattgggatgtcttcacccatattaaaggaaatattgatgatggaagcaatggcgacatggccactgaccattatcatcgatacaaggacgacattgaaatgatgcattcgattggcctcacctcctacaaattctcattgtcctggtcgagaattcttccaaagggtcgctttggaggtattaatcaggcaggcattaaattctacaataacctcatcaatggactgctggaaaaagggatacaaccattggtgacgatcaaccactatgacatacccgaggaactccaagaaagatacaactcatggttgaacccagagattcaggaggacttcacctactttgctgagctttgcttcaagatgtttggtgaccgagtaaagcactgggtcacattcaatgagccaaatcttttggcaaagctcgaatacttcatcgggggatttccccccaaccgctgttctgagccaaatgggaaatgtgattatgggaattcatcaactgagccctacattgcagcgcataacatgatattagctcatgcaaagacgaacaacatctacagaaagaattacaagtccaagcaaggtggctcagttggaattacaatacatatgagatggtatgaaccactgaggaatatcacagaggaccacttggcagtaagccgagctctgtctttcgaagctccatggttcttggatcccttgttctttggtgactatcctcatcaaatgcgccaaatcttaggcccaaacttgccgaaattcacagcaggagaggagaaactattgaagaaccaaattgacttcatcggagtaaatcactaccaaacattctatgtcaaggattgcatatattctctatgtgatattgacccctacacatctgaagctttagtttctgaatcaacagaacgaaatgggatacccattggaaaactgacacaggatgcaaacacctatgtcgttccaagctctatggagaaattggtcatgtatttaaaggagagatataataacatacctttgtacatcacagagaatggttatgctcaaatacccaatatcagcactacagtagaagaaataattaatgacactgaaaggataaattacattcgtgactacctcacttacttgagttttgcaataaggagcagatgtgagaggttattttgtgtggtctttgatggataactttgaatggatctctggttacaccgtaaagtatggtctttgtcatgtgaatttcaagtcactaaagcgaacaccaaaactgtctgctaaatggtatagcaagtttatcaaaggctatgaacagatagagatggcctctgaagatttacctaagtatatggtttcctagtaca

SEQ ID NO: 199650 - DNA, 1540 bp, Zea Mays
gccgtcatggcgcgtctcttcctcctcctcctattctccctcctccactcctccgtcactgggctcaggcgcagcgacttcccgccgtccttcctcttcggcgccggctcgtcgtcttaccagattgaaggcgcttacctagaagacaacaagggcctgagcaattgggatgtcttcacccatattaaaggaaatattgatgatggaagcaatggcgacatggccactgaccattatcatcgatacaaggacgacattgaaatgatgcattcgattggcctcacctcctacaaattctcattgtcctggtcgagaattcttccaaagggtcgctttggaggtattaatcaggcaggcattaaattctacaataacctcatcaatggactgctggaaaaagggatacaaccattggtgacgatcaaccactatgacatacccgaggaactccaagaaagatacaactcatggttgaacccagagattcaggaggacttcacctactttgctgagctttgcttcaagatgtttggtgaccgagtaaagcactgggtcacattcaatgagccaaatcttttggcaaagctcgaatacttcatcgggggatttccccccaaccgctgttctgagccaaatgggaaatgtgattatgggaattcatcaactgagccctacattgcagcgcataacatgatattagctcatgcaaagacgaacaacatctacagaaagaattacaagtccaagcaaggtggctcagttggaattacaatacatatgagatggtatgaaccactgaggaatatcacagaggaccacttggcagtaagccgagctctgtctttcgaagctccatggatcttggatcccttgttctttggtgactatcctcaccagatgcgccaaatcttaggtccaaacttgccaaaattcacagaaggagagaagaaactactaaagaaccaaattgacttcatcggggtaaatcattaccaaacattctatgttaaggattgcatatattctccatgtgatatggacgcctacccttctgaagctttagtttctatatcaacagaacgaaatgggatacccattggaaaaccgacacctgttgcaaacacatatgccgttccaagctccatggagaagttggtcatgtatttaaaccagagatataaaaacatacctttgtacatcacagagaatggttatgcccaaatagccaatattagcactacaacagaagaaataattaatgatactgaaagatcaacttacattcgtgactacctcacttacttgagctttgcaataaggaaaggagcagatgtgagaggttattttgtgtggtctttgatggataactttgaatggatctctggttacaccgtaaagtatggtctttgtcatgtgaatttcaagtcactaaagcgaacaccaaaactgtctgctaaatggtatagcaagtttatcaaaggctatgaacagatagagatggcctctgaagatttacctaagtatatggtttcctagtaca

SEQ ID NO: 199651 - DNA, 740 bp, Zea Mays
cttttgagcatgttggtcagcaacagcaagccatagtagacactagtcccatgataaggatataactccaaaaactgttaatgacttgaagcttatcaatgctggaaggatattggagaataatcggacacttgcagagtcccgtgttccagtaggagaggtcccaggaggtgtaattacaatgcatgtggtagtgcgacctccacaagctgacaaaaacaagaagcagcttgcgaattccgtcaagcagaacagatgcgggtgcaccattctctgataagacgcctgcttgatgttgtacaatctgtgtagtcttaggattttgtatctgctttgctgtgttcacacaagcgtgaattcattttgatatccagtccttgaagccattcgagtccagaaacatacacactaaaaatccatcgaatatgaaggtttctggatggtagatttggatcgtcttgttccagagttgaggattggatgcttcctgctgtataaatggtgttgtcgaaactagaaaaaaaaactcttttatttcttttttcttttctgccatgttgacgttatatatatatcgattctttttagatcggttgctttgtctcgtctaacagaaatattgtactcagatataagttgcaaaaggagtaatgtatggtgttatggtaaaggggaaacaaagaggtgaaaagagcgcatggctagttttacatttgattctttggttaacctgacctgac

SEQ ID NO: 199652 - DNA, 1044 bp, Zea Mays
caatgtaatgccgatatcagcactgacttgatgagggacaagttttccgccctatctgcaggattttgcatgcaagaactgccggagacctgggcacttcgctaaggagtgtccatctgcacctatgtgcaataactgtaaccttccaggccactttgcagcagaatgcaccttacaaactgtttgctggaactgcaaagagtctgggcacattgccagtgagtgcaagaacgaggccctatgccacgcctgcaacaagacaggtcacttggcacgtgactgccctacttcaggtgctaacgtcaagctatgcaacaaatgctttaaatcaggccacatcgccgttgactgcaccaacgaacgggcctgcaacaactgccgtcagccagggcacatagctcgggagtgcaagaacgacccggtctgcaacctgtgcaatgtctccggccacgtcgcgcgcgtctgcccaaagacgactctggcttcagtgatacagggcggcccgttccgagatatcctgtgccgcatctgcggtcagccggggcacatcagccgcaactgcatggcgaccatcatctgcgacacatgcggtgggagggggcacatgtcttatgagtgcccatcggcaagaatattcgggctccgcaggctctgaagatcttttcgccaagggctccgctttgttctgatggctgagtttcgccaggatgtttcatttgtttctgacagtattggaacagttttccttctgccgttgtagttgaggaatgattctgtaggatgtgttgcgggtgaaaactccttttttcccccttttaatcaggatagccctttgtgggctcaaacattgctgtaacggctcgtgtgaaaattgccaggtcatgatttaactcttgtgctcgtgctctgctgtgtcttttgaacgcttgttttgtgtacttatactgtattgtaacgtcacgtagaactgtgaaatttgtacggtgacgttggtgatttgatcttgacaaagagatgcctgagagttgggcactcggcactttg

SEQ ID NO: 199653 - DNA, 1474 bp, Zea Mays
cggagttatacggaccaggttcggccgttctgccaatatgctgcaacccaacggtttcttccaacattaacccccagcgggcagcggccgcgcactccctcagtccctccccgctcaccaccagtcaccaacgcccaccgggcctcgtccctcgtggcggcaactgggcggccgtcgctgccgccctacgccaggtgccgaggcgaccttcaggcccttggctggcgacgagcaccagtgcaccaccaatactctgagcctggctgccgaaagtgccttttggggttcttgtaatcttgttacattaggattcatttttgatgacttcatcaagaagcaagagcaagagcagaagtaggagccgcagtcgcagcaggagcaggagccgcagtcctcggcgaagagataggttgcgcagtgaacgtgcaccccaccgcagtcgtagccggagccgcagcccataccgtcgcagagaacgacgtggtcacagggattttgcatgcaagaactgccggagacctgggcacttcgctaaggagtgtccatctgcacctatgtgcaataactgtaaccttccaggccactttgcagcagaatgcaccttacaaactgtttgctggaactgcaaagagtctgggcacattgccagtgagtgcaagaacgaggccctatgccacgcctgcaacaagacaggtcacttggcacgtgactgccctacttcaggtgctaacgtcaagctatgcaacaaatgctttaaatcaggccacatcgccgttgactgcaccaacgaacgggcctgcaacaactgccgtcagccagggcacatagctcgggagtgcaagaacgacccggtctgcaacctgtgcaatgtctccggccacgtcgcgcgcgtctgcccaaagacgactctggcttcagtgatacagggcggcccgttccgagatatcctgtgccgcatctgcggtcagccggggcacatcagccgcaactgcatggcgaccatcatctgcgacacatgcggtgggagggggcacatgtcttatgagtgcccatcggcaagaatattcgggctccgcaggctctgaagatcttttcgccaagggctccgctttgttctgatggctgagtttcgccaggatgtttcatttgtttctgacagtattggaacagttttccttctgccgttgtagttgaggaatgattctgtaggatgtgttgcgggtgaaaactccttttttcccccttttaatcaggatagccctttgtgggctcaaacattgctgtaacggctcgtgtgaaaattgccaggtcatgatttaactcttgtgctcgtgctctgctgtgtcttttgaacgcttgttttgtgtacttatactgtattgtaacgtcacgtagaactgtgaaatttgtacggtgacgttggtgatttgatcttgacaaagagatgcctgagagttgggcactcggcactttg

SEQ ID NO: 199654 - DNA, 613 bp, Zea Mays
gttcccagcaatggcagcaaggtgtagcctttcctcgtcatccctgtcggtccatggacccctccgccacaataaacccagcaagagactcgctccatgcctgccatcggcgccaagaccaggagccgctgctctgagagcgcgtgctgcgaaacttcctccaggggttgaagcgcccagggtgcagccgaagctgagcgagcccttcttggggttcacccagaccgcggagatttggaactccagggcctgcatgatcggcctcatcggcaccttcattgtggagctggtgctgaacaaggggattcttcagatgattggggtggaggtgggcaagggtctggaccttcctctttgaagggtgaccaaatagtaacattatcgtttgatggcgtattatgctggccgaaaaacatgagggtttcacttgcttttgacttggtggctacatatgcatgttcatcaagcatgtccttggatatccggatgttacaacatcaactatgttaatgacttggtggctggccgtttgacagggttaattggtgaacaaaaacgtgtgccttgtgaaacagaggaagataattgatgccaccgtgagattaaaaaagaa

SEQ ID NO: 199655 - DNA, 2394 bp, Zea Mays
caggatatacgggaatctcgagtagagcactatcgttgcagacagctacagccgtatgtccgtgtgacattctgctcagtcggccaatcctcaccaaattctccatcaaatccaaccaacccctcaccgcctatgccgccgcgggccgcctagggttccggcggccgccgctccctcgccggcgcgatggggaacacctgcatcggtcccagcgccccctcggaccgccacagcttcttcaacaccgtctccctggccgtgctctggcgacccccggccgccgctgaccgcgccgagccttccccgaccgctgaacccagctcatccactccctgctctcccccctccagggcccctaaccctgtcaccatctccgactccgagcacccgccacactccacctccaccgccttaggccccgccgcgccgcccaatcctaacggcaagcccaagcccaagcccaaggtgaagcgcgtgcagagcgccggcctcctcgccggctccgtgctgaagcgcgactccgagcggctcaaggacgtctacaccctgggcaagaagctcgggcaggggcagttcggcaccacctaccagtgcgtcgagaaggcaaccgggaagcacttcgcctgcaagtcaatcgccaagcggaagctcgtcaccgatgaggacgtcgaggacgtgcgccgcgagatccagatcatgcaccacctggccggccaccccaacgtcgtatccatcgtgggagcctacgaggacgctgtagccgtgcacctcgtcatggagctgtgcgctggaggggagctgttcgataggatcatacagcgggggcactactctgagaaagccgccgcacagttggcccgggaggatgcacccttaaaggctattgatttcgggctctccatcttcttcaaaccaggtgaaatattttctgatgtcgttggaagtccttactatgttgcccctgaggttctgaaaaaacgctatggctgtgaggttgatgtgtggagtgccggtgtaataatttatatcttattgagtggggttcctccgttttgggctgaatctgaacaagggatatttaaacaagttctaaaaggtggtcttgatttttcatccgatccctggcccagcatttcggagagtgcaaaggatttggttaggaagatgctaaatcgtgatcccagaaagagattgactgcacatgatgctctatgtcatccttgggtttgtgtagatggagttgctcctgacaaacctctggattctgctgtcttaaccagattgaaacagttttctgcaatgaataaactaaagaagatggcccttagggtcattgctgaaaatttgtctgaagatgaaattgcaggattgaaagagatgttcaaaatgctggacactgacaatagtgggcagatcacgttggaggaactaaaaattggtttgaagagagttggtgctaacttaaaggactcagaaattacaacactaatggaagcggcagatattgataacagtggttccatcgactatggagagttcctagctgcaactttacatctgaacaaagtcgagcgagaagacaacctcttcgcagcattctcatactttgataaagacggcagcggttatattactcatgatgagctacaaaaagcatgtgaggaattcggtatagaagatgcacacctagaagatatcatccatgacgttgatcaggacaatgatggtcggatcgactacaacgagtttgtaacaatgatgcagaagggaaataacccactagggaaaaaggggcactgccagatgagctttggtcttagagaagcattgaagcttggctaagtggcatgatcaatcctgtgtgaagtgccattcggcttcatatgccaactttagctgatgaaactaagtccgtgaatttgggacgccggtaccaaaggtggagcaagtgcgcgatacgattagctttgggataccaactaagcagtgagcatgcaggaacacattggtgatctttcgtcgttaaccccccatgtacatggcttttttgaggtgggataggaatggcggttgtgtttcccatggccattctttgcacgttatgaagctcagctgcaggatgctcttatatagagagaaatgttagtcacatcacatcgcgtgtccatactgtatagcgaaacttaacatgttgtaatatcggtcggacaatgtgtgcgtgttgtatgttatctttcttagatagaggcacaggcttagcgttgtcatatatgtattgcaagaatatgcaggctgtatattaaccaaatgatttttttgtgtacatttcagtgcatctagaccagcttaaagtattttatttctgtatgataaatgaagtgtctttaaaaaata

SEQ ID NO: 199656 - DNA, 2424 bp, Zea Mays
cgagtagagcactatcgttgcagacagctacagccgtatgtccgtgtgacattctgctcagtcggccaatcctcaccaaattctccatcaaatccaaccaacccctcaccgcctatgccgccgcgggccgcctagggttccggcggccgccgctccctcgccggcgcgatggggaacacctgcatcggtcccagcgccccctcggaccgccacagcttcttcaacaccgtctccctggccgtgctctggcgacccccggccgccgctgaccgcgccgagccttccccgaccgctgaacccagctcatccactccctgctctcccccctccagggcccctaaccctgtcaccatctccgactccgagcacccgccacactccacctccaccgccttaggccccgccgcgccgcccaatcctaacggcaagcccaagcccaagcccaaggtgaagcgcgtgcagagcgccggcctcctcgccggctccgtgctgaagcgcgactccgagcggctcaaggacgtctacaccctgggcaagaagctcgggcaggggcagttcggcaccacctaccagtgcgtcgagaaggcaaccgggaagcacttcgcctgcaagtcaatcgccaagcggaagctcgtcaccgatgaggacgtcgaggacgtgcgccgcgagatccagatcatgcaccacctggccggccaccccaacgtcgtatccatcgtgggagcctacgaggacgctgtagccgtgcacctcgtcatggagctgtgcgctggaggggagctgttcgataggatcatacagcgggggcactactctgagaaagccgccgcacagttggcccgggtgatcatcggggttgtcgaagcatgccattcacttggggtgatgcacagagacctcaagcctgagaatttcttgtttgtgaaccaaaaggaggatgcacccttaaaggctattgatttcgggctctccatcttcttcaaaccaggtgaaatattttctgatgtcgttggaagtccttactatgttgcccctgaggttctgaaaaaacgctatggctgtgaggttgatgtgtggagtgccggtgtaataatttatatcttattgagtggggttcctccgttttgggctgaatctgaacaagggatatttaaacaagttctaaaaggtggtcttgatttttcatccgatccctggcccagcatttcggagagtgcaaaggatttggttaggaagatgctaaatcgtgatcccagaaagagattgactgcacatgatgctctatgtcatccttgggtttgtgtagatggagttgctcctgacaaacctctggattctgctgtcttaaccagattgaaacagttttctgcaatgaataaactaaagaagatggcccttagggtcattgctgaaaatttgtctgaagatgaaattgcaggattgaaagagatgttcaaaatgctggacactgacaatagtgggcagatcacgttggaggaactaaaaattggtttgaagagagttggtgctaacttaaaggactcagaaattacaacactaatggaagcggcagatattgataacagtggttccatcgactatggagagttcctagctgcaactttacatctgaacaaagtcgagcgagaagacaacctcttcgcagcattctcatactttgataaagacggcagcggttatattactcatgatgagctacaaaaagcatgtgaggaattcggtatagaagatgcacacctagaagatatcatccatgacgttgatcaggacaataagggaaataacccactagggaaaaaggggcactgccagatgagctttggtcttagagaagcattgaagcttggctaagtggcatgatcaatcctgtgtgaagtgccattcggcttcatatgccaactttagctgatgaaactaagtccgtgaatttgggacgccggtaccaaaggtggagcaagtgcgcgatacgattagctttgggataccaactaagcagtgagcatgcaggaacacattggtgatctttcgtcgttaaccccccatgtacatggcttttttgaggtgggataggaatggcggttgtgtttcccatggccattctttgcacgttatgaagctcagctgcaggatgctcttatatagagagaaatgttagtcacatcacatcgcgtgtccatactgtatagcgaaacttaacatgttgtaatatcggtcggacaatgtgtgcgtgttgtatgttatctttcttagatagaggcacaggcttagcgttgtcatatatgtattgcaagaatatgcaggctgtatattaaccaaatgatttttttgtgtacatttcagtgcatctagaccagcttaaagtattttatttctgtatgataaatgaagtgtctttaaaaaata

SEQ ID NO: 199657 - DNA, 2498 bp, Zea Mays
gttgcagacagctacagccgtatgtccgtgtgacattctgctcagtcggccaatcctcaccaaattctccatcaaatccaaccaacccctcaccgcctatgccgccgcgggccgcctagggttccggcggccgccgctccctcgccggcgcgatggggaacacctgcatcggtcccagcgccccctcggaccgccacagcttcttcaacaccgtctccctggccgtgctctggcgacccccggccgccgctgaccgcgccgagccttccccgaccgctgaacccagctcatccactccctgctctcccccctccagggcccctaaccctgtcaccatctccgactccgagcacccgccacactccacctccaccgccttaggccccgccgcgccgcccaatcctaacggcaagcccaagcccaagcccaaggtgaagcgcgtgcagagcgccggcctcctcgccggctccgtgctgaagcgcgactccgagcggctcaaggacgtctacaccctgggcaagaagctcgggcaggggcagttcggcaccacctaccagtgcgtcgagaaggcaaccgggaagcacttcgcctgcaagtcaatcgccaagcggaagctcgtcaccgatgaggacgtcgaggacgtgcgccgcgagatccagatcatgcaccacctggccggccaccccaacgtcgtatccatcgtgggagcctacgaggacgctgtagccgtgcacctcgtcatggagctgtgcgctggaggggagctgttcgataggatcatacagcgggggcactactctgagaaagccgccgcacagttggcccgggtgatcatcggggttgtcgaagcatgccattcacttggggtgatgcacagagacctcaagcctgagaatttcttgtttgtgaaccaaaaggaggatgcacccttaaaggctattgatttcgggctctccatcttcttcaaaccagccttgatctgttttgctgggagaggcgaagatctcctgggtcaatcatgtgaaatattttctgatgtcgttggaagtccttactatgttgcccctgaggttctgaaaaaacgctatggctgtgaggttgatgtgtggagtgccggtgtaataatttatatcttattgagtggggttcctccgttttgggctgaatctgaacaagggatatttaaacaagttctaaaaggtggtcttgatttttcatccgatccctggcccagcatttcggagagtgcaaaggatttggttaggaagatgctaaatcgtgatcccagaaagagattgactgcacatgatgctctatgtcatccttgggtttgtgtagatggagttgctcctgacaaacctctggattctgctgtcttaaccagattgaaacagttttctgcaatgaataaactaaagaagatggcccttagggtcattgctgaaaatttgtctgaagatgaaattgcaggattgaaagagatgttcaaaatgctggacactgacaatagtgggcagatcacgttggaggaactaaaaattggtttgaagagagttggtgctaacttaaaggactcagaaattacaacactaatggaagcggcagatattgataacagtggttccatcgactatggagagttcctagctgcaactttacatctgaacaaagtcgagcgagaagacaacctcttcgcagcattctcatactttgataaagacggcagcggttatattactcatgatgagctacaaaaagcatgtgaggaattcggtatagaagatgcacacctagaagatatcatccatgacgttgatcaggacaatgatggtcggatcgactacaacgagtttgtaacaatgatgcagaagggaaataacccactagggaaaaaggggcactgccagatgagctttggtcttagagaagcattgaagcttggctaagtggcatgatcaatcctgtgtgaagtgccattcggcttcatatgccaactttagctgatgaaactaagtccgtgaatttgggacgccggtaccaaaggtggagcaagtgcgcgatacgattagctttgggataccaactaagcagtgagcatgcaggaacacattggtgatctttcgtcgttaaccccccatgtacatggcttttttgaggtgggataggaatggcggttgtgtttcccatggccattctttgcacgttatgaagctcagctgcaggatgctcttatatagagagaaatgttagtcacatcacatcgcgtgtccatactgtatagcgaaacttaacatgttgtaatatcggtcggacaatgtgtgcgtgttgtatgttatctttcttagatagaggcacaggcttagcgttgtcatatatgtattgcaagaatatgcaggctgtatattaaccaaatgatttttttgtgtacatttcagtgcatctagaccagcttaaagtattttatttctgtatgataaatgaagtgtctttaaaaaata

SEQ ID NO: 199658 - DNA, 2236 bp, Zea Mays
gttgcagacagctacagccgtatgtccgtgtgacattctgctcagtcggccaatcctcaccaaattctccatcaaatccaaccaacccctcaccgcctatgccgccgcgggccgcctagggttccggcggccgccgctccctcgccggcgcgatggggaacacctgcatcggtcccagcgccccctcggaccgccacagcttcttcaacaccgtctccctggccgtgctctggcgacccccggccgccgctgaccgcgccgagccttccccgaccgctgaacccagctcatccactccctgctctcccccctccagggcccctaaccctgtcaccatctccgactccgagcacccgccacactccacctccaccgccttaggccccgccgcgccgcccaatcctaacggcaagcccaagcccaagcccaaggtgaagcgcgtgcagagcgccggcctcctcgccggctccgtgctgaagcgcgactccgagcggctcaaggacgtctacaccctgggcaagaagctcgggcaggggcagttcggcaccacctaccagtgcgtcgagaaggcaaccgggaagcacttcgcctgcaagtcaatcgccaagcggaagctcgtcaccgatgaggacgtcgaggacgtgcgccgcgagatccagatcatgcaccacctggccggccaccccaacgtcgtatccatcgtgggagcctacgaggacgctgtagccgtgcacctcgtcatggagctgtgcgctggaggggagctgttcgataggatcatacagcgggggcactactctgagaaagccgccgcacagttggcccgggtgatcatcggggttgtcgaagcatgccattcacttggggtgatgcacagagacctcaagcctgagaatttcttgtttgtgaaccaaaaggaggatgcacccttaaaggctattgatttcgggctctccatcttcttcaaaccagcatttcggagagtgcaaaggatttggttaggaagatgctaaatcgtgatcccagaaagagattgactgcacatgatgctctatgtcatccttgggtttgtgtagatggagttgctcctgacaaacctctggattctgctgtcttaaccagattgaaacagttttctgcaatgaataaactaaagaagatggcccttagggtcattgctgaaaatttgtctgaagatgaaattgcaggattgaaagagatgttcaaaatgctggacactgacaatagtgggcagatcacgttggaggaactaaaaattggtttgaagagagttggtgctaacttaaaggactcagaaattacaacactaatggaagcggcagatattgataacagtggttccatcgactatggagagttcctagctgcaactttacatctgaacaaagtcgagcgagaagacaacctcttcgcagcattctcatactttgataaagacggcagcggttatattactcatgatgagctacaaaaagcatgtgaggaattcggtatagaagatgcacacctagaagatatcatccatgacgttgatcaggacaatgatggtcggatcgactacaacgagtttgtaacaatgatgcagaagggaaataacccactagggaaaaaggggcactgccagatgagctttggtcttagagaagcattgaagcttggctaagtggcatgatcaatcctgtgtgaagtgccattcggcttcatatgccaactttagctgatgaaactaagtccgtgaatttgggacgccggtaccaaaggtggagcaagtgcgcgatacgattagctttgggataccaactaagcagtgagcatgcaggaacacattggtgatctttcgtcgttaaccccccatgtacatggcttttttgaggtgggataggaatggcggttgtgtttcccatggccattctttgcacgttatgaagctcagctgcaggatgctcttatatagagagaaatgttagtcacatcacatcgcgtgtccatactgtatagcgaaacttaacatgttgtaatatcggtcggacaatgtgtgcgtgttgtatgttatctttcttagatagaggcacaggcttagcgttgtcatatatgtattgcaagaatatgcaggctgtatattaaccaaatgatttttttgtgtacatttcagtgcatctagaccagcttaaagtattttatttctgtatgataaatgaagtgtctttaaaaaata

SEQ ID NO: 199659 - DNA, 2494 bp, Zea Mays
gttgcagacagctacagccgtatgtccgtgtgacattctgctcagtcggccaatcctcaccaaattctccatcaaatccaaccaacccctcaccgcctatgccgccgcgggccgcctagggttccggcggccgccgctccctcgccggcgcgatggggaacacctgcatcggtcccagcgccccctcggaccgccacagcttcttcaacaccgtctccctggccgtgctctggcgacccccggccgccgctgaccgcgccgagccttccccgaccgctgaacccagctcatccactccctgctctcccccctccagggcccctaaccctgtcaccatctccgactccgagcacccgccacactccacctccaccgccttaggccccgccgcgccgcccaatcctaacggcaagcccaagcccaagcccaaggtgaagcgcgtgcagagcgccggcctcctcgccggctccgtgctgaagcgcgactccgagcggctcaaggacgtctacaccctgggcaagaagctcgggcaggggcagttcggcaccacctaccagtgcgtcgagaaggcaaccgggaagcacttcgcctgcaagtcaatcgccaagcggaagctcgtcaccgatgaggacgtcgaggacgtgcgccgcgagatccagatcatgcaccacctggccggccaccccaacgtcgtatccatcgtgggagcctacgaggacgctgtagccgtgcacctcgtcatggagctgtgcgctggaggggagctgttcgataggatcatacagcgggggcactactctgagaaagccgccgcacagttggcccgggtgatcatcggggttgtcgaagcatgccattcacttggggtgatgcacagagacctcaagcctgagaatttcttgtttgtgaaccaaaaggaggatgcacccttaaaggctattgatttcgggctctccatcttcttcaaaccaggtgaaatattttctgatgtcgttggaagtccttactatgttgcccctgaggttctgaaaaaacgctatggctgtgaggttgatgtgtggagtgccggtgtaataatttatatcttattgagtggggttcctccgttttgggctgaatctgaacaagggatatttaaacaagttctaaaaggtggtcttgatttttcatccgatccctggcccagcatttcggagagtgcaaaggatttggttaggaagatgctaaatcgtgatcccagaaagagattgactgcacatgatgctctatgtcatccttgggtttgtgtagatggagttgctcctgacaaacctctggattctgctgtcttaaccagattgaaacagttttctgcaatgaataaactaaagaagatggcccttagggtcattgctgaaaatttgtctgaagatgaaattgcaggattgaaagagatgttcaaaatgctggacactgacaatagtgggcagatcacgttggaggaactaaaaattggtttgaagagagttggtgctaacttaaaggactcagaaattacaacactaatggaagcgtttcaggccttgcttgaatgaagattatgctctgcaactttcaggcagatattgataacagtggttccatcgactatggagagttcctagctgcaactttacatctgaacaaagtcgagcgagaagacaacctcttcgcagcattctcatactttgataaagacggcagcggttatattactcatgatgagctacaaaaagcatgtgaggaattcggtatagaagatgcacacctagaagatatcatccatgacgttgatcaggacaatgatggtcggatcgactacaacgagtttgtaacaatgatgcagaagggaaataacccactagggaaaaaggggcactgccagatgagctttggtcttagagaagcattgaagcttggctaagtggcatgatcaatcctgtgtgaagtgccattcggcttcatatgccaactttagctgatgaaactaagtccgtgaatttgggacgccggtaccaaaggtggagcaagtgcgcgatacgattagctttgggataccaactaagcagtgagcatgcaggaacacattggtgatctttcgtcgttaaccccccatgtacatggcttttttgaggtgggataggaatggcggttgtgtttcccatggccattctttgcacgttatgaagctcagctgcaggatgctcttatatagagagaaatgttagtcacatcacatcgcgtgtccatactgtatagcgaaacttaacatgttgtaatatcggtcggacaatgtgtgcgtgttgtatgttatctttcttagatagaggcacaggcttagcgttgtcatatatgtattgcaagaatatgcaggctgtatattaaccaaatgatttttttgtgtacatttcagtgcatctagaccagcttaaagtattttatttctgtatgataaatgaagtgtctttaaaaaata

SEQ ID NO: 199660 - DNA, 1060 bp, Zea Mays
tgggagaggcgaagatctcctgggtcaatcatgattgaaagagatgttcaaaatgctggacactgacaatagtgggcagatcacgttggaggaactaaaaattggtttgaagagagttggtgctaacttaaaggactcagaaattacaacactaatggaagcggcagatattgataacagtggttccatcgactatggagagttcctagctgcaactttacatctgaacaaagtcgagcgagaagacaacctcttcgcagcattctcatactttgataaagacggcagcggttatattactcatgatgagctacaaaaagcatgtgaggaattcggtatagaagatgcacacctagaagatatcatccatgacgttgatcaggacaatgatggtcggatcgactacaacgagtttgtaacaatgatgcagaagggaaataacccactagggaaaaaggggcactgccagatgagctttggtcttagagaagcattgaagcttggctaagtggcatgatcaatcctgtgtgaagtgccattcggcttcatatgccaactttagctgatgaaactaagtccgtgaatttgggacgccggtaccaaaggtggagcaagtgcgcgatacgattagctttgggataccaactaagcagtgagcatgcaggaacacattggtgatctttcgtcgttaaccccccatgtacatggcttttttgaggtgggataggaatggcggttgtgtttcccatggccattctttgcacgttatgaagctcagctgcaggatgctcttatatagagagaaatgttagtcacatcacatcgcgtgtccatactgtatagcgaaacttaacatgttgtaatatcggtcggacaatgtgtgcgtgttgtatgttatctttcttagatagaggcacaggcttagcgttgtcatatatgtattgcaagaatatgcaggctgtatattaaccaaatgatttttttgtgtacatttcagtgcatctagaccagcttaaagtattttatttctgtatgataaatgaagtgtctttaaaaaata

SEQ ID NO: 199661 - DNA, 1496 bp, Zea Mays
cagctttggaggcatcaagtgaaatattttctgatgtcgttggaagtccttactatgttgcccctgaggttctgaaaaaacgctatggctgtgaggttgatgtgtggagtgccggtgtaataatttatatcttattgagtggggttcctccgttttgggctgaatctgaacaagggatatttaaacaagttctaaaaggtggtcttgatttttcatccgatccctggcccagcatttcggagagtgcaaaggatttggttaggaagatgctaaatcgtgatcccagaaagagattgactgcacatgatgctctatgtcatccttgggtttgtgtagatggagttgctcctgacaaacctctggattctgctgtcttaaccagattgaaacagttttctgcaatgaataaactaaagaagatggcccttagggtcattgctgaaaatttgtctgaagatgaaattgcaggattgaaagagatgttcaaaatgctggacactgacaatagtgggcagatcacgttggaggaactaaaaattggtttgaagagagttggtgctaacttaaaggactcagaaattacaacactaatggaagcggcagatattgataacagtggttccatcgactatggagagttcctagctgcaactttacatctgaacaaagtcgagcgagaagacaacctcttcgcagcattctcatactttgataaagacggcagcggttatattactcatgatgagctacaaaaagcatgtgaggaattcggtatagaagatgcacacctagaagatatcatccatgacgttgatcaggacaatgatggtcggatcgactacaacgagtttgtaacaatgatgcagaagggaaataacccactagggaaaaaggggcactgccagatgagctttggtcttagagaagcattgaagcttggctaagtggcatgatcaatcctgtgtgaagtgccattcggcttcatatgccaactttagctgatgaaactaagtccgtgaatttgggacgccggtaccaaaggtggagcaagtgcgcgatacgattagctttgggataccaactaagcagtgagcatgcaggaacacattggtgatctttcgtcgttaaccccccatgtacatggcttttttgaggtgggataggaatggcggttgtgtttcccatggccattctttgcacgttatgaagctcagctgcaggatgctcttatatagagagaaatgttagtcacatcacatcgcgtgtccatactgtatagcgaaacttaacatgttgtaatatcggtcggacaatgtgtgcgtgttgtatgttatctttcttagatagaggcacaggcttagcgttgtcatatatgtattgcaagaatatgcaggctgtatattaaccaaatgatttttttgtgtacatttcagtgcatctagaccagcttaaagtattttatttctgtatgataaatgaagtgtctttaaaaaata

SEQ ID NO: 199662 - DNA, 1566 bp, Zea Mays
ttgacacctagaagggtataatattggacttcatataaggagaaaccatgtgaaatatcaataagagcatatggccactaatccaaaggtgaaatattttctgatgtcgttggaagtccttactatgttgcccctgaggttctgaaaaaacgctatggctgtgaggttgatgtgtggagtgccggtgtaataatttatatcttattgagtggggttcctccgttttgggctgaatctgaacaagggatatttaaacaagttctaaaaggtggtcttgatttttcatccgatccctggcccagcatttcggagagtgcaaaggatttggttaggaagatgctaaatcgtgatcccagaaagagattgactgcacatgatgctctatgtcatccttgggtttgtgtagatggagttgctcctgacaaacctctggattctgctgtcttaaccagattgaaacagttttctgcaatgaataaactaaagaagatggcccttagggtcattgctgaaaatttgtctgaagatgaaattgcaggattgaaagagatgttcaaaatgctggacactgacaatagtgggcagatcacgttggaggaactaaaaattggtttgaagagagttggtgctaacttaaaggactcagaaattacaacactaatggaagcggcagatattgataacagtggttccatcgactatggagagttcctagctgcaactttacatctgaacaaagtcgagcgagaagacaacctcttcgcagcattctcatactttgataaagacggcagcggttatattactcatgatgagctacaaaaagcatgtgaggaattcggtatagaagatgcacacctagaagatatcatccatgacgttgatcaggacaatgatggtcggatcgactacaacgagtttgtaacaatgatgcagaagggaaataacccactagggaaaaaggggcactgccagatgagctttggtcttagagaagcattgaagcttggctaagtggcatgatcaatcctgtgtgaagtgccattcggcttcatatgccaactttagctgatgaaactaagtccgtgaatttgggacgccggtaccaaaggtggagcaagtgcgcgatacgattagctttgggataccaactaagcagtgagcatgcaggaacacattggtgatctttcgtcgttaaccccccatgtacatggcttttttgaggtgggataggaatggcggttgtgtttcccatggccattctttgcacgttatgaagctcagctgcaggatgctcttatatagagagaaatgttagtcacatcacatcgcgtgtccatactgtatagcgaaacttaacatgttgtaatatcggtcggacaatgtgtgcgtgttgtatgttatctttcttagatagaggcacaggcttagcgttgtcatatatgtattgcaagaatatgcaggctgtatattaaccaaatgatttttttgtgtacatttcagtgcatctagaccagcttaaagtattttatttctgtatgataaatgaagtgtctttaaaaaata

SEQ ID NO: 199663 - DNA, 985 bp, Zea Mays
ctaagatccttatgccccttgacctaaaggaaactctttcctgaatttgagttattgaaatatcgaactcatatgtagatgttttgaggcagatattgataacagtggttccatcgactatggagagttcctagctgcaactttacatctgaacaaagtcgagcgagaagacaacctcttcgcagcattctcatactttgataaagacggcagcggttatattactcatgatgagctacaaaaagcatgtgaggaattcggtatagaagatgcacacctagaagatatcatccatgacgttgatcaggacaatgatggtcggatcgactacaacgagtttgtaacaatgatgcagaagggaaataacccactagggaaaaaggggcactgccagatgagctttggtcttagagaagcattgaagcttggctaagtggcatgatcaatcctgtgtgaagtgccattcggcttcatatgccaactttagctgatgaaactaagtccgtgaatttgggacgccggtaccaaaggtggagcaagtgcgcgatacgattagctttgggataccaactaagcagtgagcatgcaggaacacattggtgatctttcgtcgttaaccccccatgtacatggcttttttgaggtgggataggaatggcggttgtgtttcccatggccattctttgcacgttatgaagctcagctgcaggatgctcttatatagagagaaatgttagtcacatcacatcgcgtgtccatactgtatagcgaaacttaacatgttgtaatatcggtcggacaatgtgtgcgtgttgtatgttatctttcttagatagaggcacaggcttagcgttgtcatatatgtattgcaagaatatgcaggctgtatattaaccaaatgatttttttgtgtacatttcagtgcatctagaccagcttaaagtattttatttctgtatgataaatgaagtgtctttaaaaaata

SEQ ID NO: 199664 - DNA, 1030 bp, Zea Mays
aggcagagaaaaaaaaagaagagaagctaagagcttgggagttcagctccaagccgttcgacgagagagacgaccgaacccggccggaaggggaggagcgggaggaccgcctgcgccgtcggtgagattattgatgccctagactatgggatggcaaaaattgcagattcgatgatgaagcatattctggttccagcaatcagtaacatacatgtgtcagtgcttgtggaatgtggtccagaacacactgtatcagtcttgagtgtagtccattccgaggaaaacaaagacaatagagatggttcaaatctgtactcaagaatagttgatgtcatcaagtttgtgtgcaaattcatctgcatggaaaatagcaagtgggttcaattttttgcgaagttaacctggccaagaatttctgatctagttatcacacactttctctccaaggctgtaccaaatgaggcatccaagctaattgagttccaagatgtcgtgcaaagtacaactgaattcgagaacaaacttaggagcatgatgtttcttttgcctgatagaaaggatggcaagctgacccaatttgttgatgatgttgaagttcattttgctgtacggaagagaagtgaaatcttggtgaaagcaaggaacattcttgtacaatatgattatgatagtcctctggaatctggtgaccaaggtgattctgttgttgatctactttttcagccagagaagtgttttacatctaaatcagcacttctagtaatgaaattggttcatggagccctcaagtaccgtgcagattttcctagtgatctacagaaacaggttgtttttgtggatttagccccaatcttctcccagatggcggatgctatattgagaagacaaatacaactcactgttgatactataagtgaggctatagatggtgctgaaggttttcagaacacacaccaacctcagcattatgaatccgcaaaatttagtattgagcaggtctgttccactgttaaagagtatgagctttttg

SEQ ID NO: 199665 - DNA, 1115 bp, Zea Mays
cagagaaaaaaaaagaagagaagctaagagcttgggagttcagctccaagccgttcgacgagagagacgaccgaacccggccggaaggggaggagcgggaggaccgcctgcgccgtcggtgagctgcaagttaggctttcaaagaatgtggaggagtgtgtggactttgcgccagagggaggtaaggtggtggtgagtgctactccaaaaggccactccgatggaagtcatggtgttgagcttcctgttgctctgcaggcattggagattattgatgccctagactatgggatggcaaaaattgcagattcgatgatgaagcatattctggttccagcaatcagtaacatacatgtgtcagtgcttgtggaatgtggtccagaacacactgtatcagtcttgagtgtagtccattccgaggaaaacaaagacaatagagatggttcaaatctgtactcaagaatagttgatgtcatcaagtttgtgtgcaaattcatctgcatggaaaatagcaagtgggttcaattttttgcgaagttaacctggccaagaatttctgatctagttatcacacactttctctccaaggctgtaccaaatgaggcatccaagctaattgagttccaagatgtcgtgcaaagtacaactgaattcgagaacaaacttaggagcatgatgtttcttttgcctgatagaaaggatggcaagctgacccaatttgttgatgatgttgaagttcattttgctgtacggaagagaagtgaaatcttggtgaaagcaaggaacattcttgtacaatatgattatgatagtcctctggaatctggtgaccaaggtgattctgttgttgatctactttttcagccagagaagtgttttacatctaaatcagcacttctagtaatgaaattggttcatggagccctcaaggatgcatctttgtcatcagcaagagtagctaaggagttctgctttgctgctagggatgttttgctcctttatagggctattgtgccggttcagagaagcaatttgatagcttaagtcaagtggctgctattgttcacaatgacttttaccatttgtcccaagaaattctgggccttgcatttcag

SEQ ID NO: 199666 - DNA, 1858 bp, Zea Mays
ctaagagcttgggagttcagctccaagccgttcgacgagagagacgaccgaacccggccggaaggggaggagcgggaggaccgcctgcgccgtcggtgagcgcagttgctcaagtcagcaaactgaacccgtccggattcgtgcgccgccgagcacccctcgacgccagcggcgatggcagccgacgacgtgcgcgagctcctcctctccaccacagccgacgcctctgacccgtccacgcccctctcagcgcccgacctccgcctcctcatcgaccgcctacgcttttgctccgaccgcctgaacgcctcggccctctccttcgctgcctctaaccgcggggtcctcgctaatgctctcctccgcgcagcctccgccgccgattcctccgcctccctcgagtcttccctcgactccgcgcttgccccgctcgcctcctggcccgacctctccgacctcagggcccttgccgaccgcctcctcgctgcccgccgcgagctcgctgagcgccaggagcacctagccgctgcctccatgattgcctcgctttcctcccgcctccgcgaggcccgtgccgcagcgagcccccttgacgcggccgctgccatcgctgaactcaagaccctcctgatcgatctcgagcgatctggatctggtcaagacgacccggtcgtatttaggctcctcaggagcgactgggagcaacttgtcgatgagctgcaagttaggctttcaaagaatgtggaggagtgtgtggactttgcgccagagggaggtaaggtggtggtgagtgctactccaaaaggccactccgatggaagtcatggtgttgagcttcctgttgctctgcaggcattggagattattgatgccctagactatgggatggcaaaaattgcagattcgatgatgaagcatattctggttccagcaatcagtaacatacatgtgtcagtgcttgtggaatgtggtccagaacacactgtatcagtcttgagtgtagtccattccgaggaaaacaaagacaatagagatggttcaaatctgtactcaagaatagttgatgtcatcaagtttgtgtgcaaattcatctgcatggaaaatagcaagtgggttcaattttttgcgaagttaacctggccaagaatttctgatctagttatcacacactttctctccaaggctgtaccaaatgaggcatccaagctaattgagttccaagatgtcgtgcaaagtacaactgaattcgagaacaaacttaggagcatgatgtttcttttgcctgatagaaaggatggcaagctgacccaatttgttgatgatgttgaagttcattttgctgtacggaagagaagtgaaatcttggtgaaagcaaggaacattcttgtacaatatgattatgatagtcctctggaatctggtgaccaaggtgattctgttgttgatctactttttcagccagagaagtgttttacatctaaatcagcacttctagtaatgaaattggttcatggagccctcaaggatgcatctttgtcatcagcaagagtagctaaggagttctgctttgctgctagggatgttttgctcctttatagggctattgtgccggttcagtaccgtgcagattttcctagtgatctacagaaacaggttgtttttgtggatttagccccaatcttctcccagatggcggatgctatattgagaagacaaatacaactcactgttgatactataagtgaggctatagatggtgctgaaggttttcagaacacacaccaacctcagcattatgaatccgcaaaatttagtattgagcaggtctgttccactgttaaagagtatgagctttttg

SEQ ID NO: 199667 - DNA, 852 bp, Zea Mays
cttgggagttcagctccaagccgttcgacgagagagacgaccgaacccggccggaaggggaggagcgggaggaccgcctgcgccgtcggtgagattattgatgccctagactatgggatggcaaaaattgcagattcgatgatgaagcatattctggttccagcaatcagtaacatacatgtgtcagtgcttgtggaatgtggtccagaacacactgtatcagtcttgagtgtagtccattccgaggaaaacaaagacaatagagatggttcaaatctgtactcaagaatagttgatgtcatcaagtttgtgtgcaaattcatctgcatggaaaatagcaagtgggttcaattttttgcgaagttaacctggccaagaatttctgatctagttatcacacactttctctccaaggctgtaccaaatgaggcatccaagctaattgagttccaagatgtcgtgcaaagtacaactgaattcgagaacaaacttaggagcatgatgtttcttttgcctgatagaaaggatggcaagctgacccaatttgttgatgatgttgaagttcattttgctgtacggaagagaagtgaaatcttggtgaaagcaaggaacattcttgtacaatatgattatgatagtcctctggaatctggtgaccaaggtgattctgttgttgatctactttttcagccagagaagtgttttacatctaaatcagcacttctagtaatgaaattggttcatggagccctcaagctagagaagcaatttgatagcttaagtcaagtggctgctattgttcacaatgacttttaccatttgtcccaagaaattctgggccttgcatttcag

SEQ ID NO: 199668 - DNA, 734 bp, Zea Mays
caagatactgtttttttttcttatcaaatgttcatttgttcttcatacaattattcttggttcaggtgtgaagggttctctacttatccaaggacatatgaccttatacattctaatggcatcttcagcttgtaccaaaacaaatgtcagtttgaagatatactcctggaaatggacagaatcttacggccggagggtgcagtcataattcgtgacaaggttgatgttcttgtaaaagtggagaaaatagccaatgccatgaggtggaagacaagattggctgatcatgagggtggccctcttgtacctgagaagatactcttcgcggtcaagcaatactggaccgttgcaaaaacaagcagctaacattattcgtattttatttttttctccagtcacaggtaacttggtccctggatgtgtttattggggggaaaatctgccggtttgaaaatcatcatcccatagatgcagaagacatgccaaaaggatcaattggccttgcactagtgactcatatagtcatatctgatcggacagatgcagctgcttataattggaaccctgcagcagtccaggaagttatgaactagcagtggacttacagttttgtataggatactcatttacctctacacgcacctcttttttgttgttgtatctcagaatcccatcaaatggattgcatgtggacctataaggtctttttcggtgttaaatattgcataattcac

SEQ ID NO: 199669 - DNA, 566 bp, Zea Mays
caagatactgtttttttttcttatcaaatgttcatttgttcttcatacaattattcttggttcaggtgtgaagggttctctacttatccaaggacatatgaccttatacattctaatggcatcttcagcttgtaccaaaacaaatgtcagtttgaagatatactcctggaaatggacagaatcttacggccggagggtgcagtcataattcgtgacaaggttgatgttcttgtaaaagtggagaaaatagccaatgccatgaggtggaagacaagattggctgatcatgaggtcacagagatgcagaagacatgccaaaaggatcaattggccttgcactagtgactcatatagtcatatctgatcggacagatgcagctgcttataattggaaccctgcagcagtccaggaagttatgaactagcagtggacttacagttttgtataggatactcatttacctctacacgcacctcttttttgttgttgtatctcagaatcccatcaaatggattgcatgtggacctataaggtctttttcggtgttaaatattgcataattcac

SEQ ID NO: 199670 - DNA, 2209 bp, Zea Mays
aagttgggaaccacgttgaatcgcacccacacgtttctttgccctaacagcgaaggcacactgcccgacagccgccgccgtttcttcctcttcatcttcctcgcagcgccggccttccatcttccgctccctccccgactcgcccttggcacgcaggcgacagcggcggcgctcaggttcgggctctcagcgacggcggggcaaccccagactcgctgccgtcgtcagcggctcttcctcccgcctctcgccaatcgactcgcaccctcgcctccggtcctcgtcccccccgcataccggccggcgaccctgcatgcgcgcctcccgctccccttccgcctccggtggaccgtcgacagcgcccggccccggcggctgcactgcgcgccgcgtgcggccggcgggcagtgggagccagcagccgctgctccagcaaggcggccgtgccgctttggtagcgcttgcccgaaacgaagcgttacctgtccgcttacgtttcagcgcgagcttagtgcctccttttggaaccctggtcttgcatgatactaatattttcgaggataacagcaagaagcattcataaagccatacacatttctcattcatattcttcaagctttcgaaataaagaattctctagttataagccaacgtttcagcatcttagcactaacaacccgatgaggccaaatgattcgttggaggctcaagacatggttcctgctgagggaaaccacagttgcttctcaagtgttcagtccactccagaaattgagaagaagtatgtgcatcgtgtctatgatgccatagctccccatttcagtgcaacaagatttgctaaatggcccaaggttgcaggattcttgaattccttgaggccagggtcggttgtactggatgctggctgtggtaatggcaagtatttgggtttcaaccctgattgtttattcataggatgtgatataagcccaccgcttattgagatatgtgctgggagagggcatgaggtgttggttgctgatgctgtcaacctcccatacaggaatgattttggcgatgcagcaatttcaattgctgtgttgcatcatttgagtactgatgataggcggaggagggccatagaagagctaatccgtgttgttcgaagaggtggtctggtgcttataacagtctgggctagggagcaggaagacaagtctttgctcaacaagtggactcccctctgcgagaaatatactgaagagtgggttgaacagagcagtcctccagtacgcagtaaatctggaactcttctggaaagcattgcagaaactgatgaagatgctggtttcacgaagcaaacagatgaccgattgaaaagctgtcatggtgaggtggaggacaagaccattgactgtagtaattcaaagactgatgaaaatgagaaaaaccagcaggagtactttgttccatggcatctaccatttcaccgagctgaaattggtggtgcatctgctgctctggaaaatggatttgcaaagaaagatgagaagaagggtacagtggtctacaatcgttattatcatgtttttgttgaaggagaacttcagagattggtttctggcataaagaatgctgctattgttgaccagttctatgacaaatccaactggtgcattgttctcgagaagctttgagctgcagaaaaaggaatggcacaagaagccatcagaatatgatatttgtggggattcagtggtaggcgagccaaatgtgtttatcccgaagtgtatgatgcattgtttaagggatcctgaaatttatggtgcattgttaagacttatgtcagattgcccaatattttgagggccatctggacttgaagaaatatttgctgtcaatctggtcaacaccgtgaattagcatgattgctagtactgtttttgatataagtatgagctttcattgttctacggcatcactgttcattagctggtggagggatgcttatagttcatttgcacctctagcctactattcaaccacgtattagccgttcgatggatcaaaacagactctggctaataattagctagctgatagttagcaactatcagttagctaactaatggattcaaacatgttcttatgcttcttgcattttacaaaagcgatcattttctgaaacaacgtgctgcatgccactccggttcacagttttatgtatcgg

SEQ ID NO: 199671 - DNA, 1915 bp, Zea Mays
cgggccccaccaccacaccggcacacctcactcctcagtgccgtctcctccctcggattcccacttgcggacatctggggcccacaggagcgctcaacgcaggccgcgcacggcgcaccacccagtctctctctgccacctagggtcgttgcctcgtcgaggagcatctctgcagtgcagcggcagctgtgtccaactaccaagtcaaggtgaccgttgggctgggcggcacgagacgcggagacgagacgcaacaaaacccttgtcagtcgcccgagccccaaggctcgcacccacgccagcggcaccgcacccccacccacctcggcggcgagtccgagccccaggaacgaagggcgatggcggcgatgatgatggccacgtccgagtcaaagtcccccgcccgcgcgctgaggcggctggctggcgccgcggtcgccgccgtgctgctccgccgcaccttcagcgcctccaagtgcaagacggaggcgcggatggcgacggcgcggatgaagctgctgcggaaccggagggaggcgcaggtgcgccagatgcgccgcgacattgccgcgctcctccgcgacaaacaggaggataccgcacgcatcagggttgaacatgtaattagggaacagaactttatggcagccaacgagatcattgagctcttctgcgagctgattgttacacgccttcctatcatcgcaaaacagaaggaatgtccagcagacttgaaagaaggtatctgcagtttgatatttgcagctccaaggtgctctgagctccctgaacttggtcgcatacgtgacatttttgaaaagaagtatggcaaagattttgtttctgctgcagttgacttgcgcccagatgctgctgttaacaaccttctgattgagaagctgtcgattaagaagccttccgggcaaattaagctgaaagttctaaaggatatagcaaaagagcatcagattgattgggataccgctgagagtgagcaggagcttctgaaacctcctgaagagttgattctataggtgttcggatgacgaatatgatgacaggggcactatgcaattcaaagatgcagcttcagctgctcgagcagctgcagagtctgctgagagagcaacatctgctgcaaaggctgcagctgattttgtcaataataacaataacaaccatccatttgatgaagatgaagattgcaaagcttcaactcatgaattcactcatacactcaagagacagtcaatgagcaactcgagtagatcctccttgaaagaagatgcaaatgcctttgatgaacaaaaacctcatgaagggaaaacatacagtgcaagaaggttcagtggaaagaaccatgtagaatatgacaaagacggctaccctgcagatttggacttgaagacacggagaaggaactgccgtgctgctcggaaggtgcactcagagataaagtttgatgattctgagggactgtgttcagaatccgaaggtgaaaatgatgtggagattcagtctgtggaaaggccattgcctcctaagagtgagctgttttcagaaaaccgtcactcagaagacgaagagcatgatcaagatttccctgaattgccgaagacaaaccttcattctcgtgttcatccaaatatgcctcttgactatgaaactctcactgcacgctttgaggctctcaaatctggcaagcttccgtagtgcaacaaaaagaacagcatcactggatgttacaattccttcttgctgtttttgtataatatgacatgttatagtagggtatagtgtctaatgattttgattttggctgagcctacggatttgtcgtttcaaactattgctgcatttgaactgttcgggtatataaaggttggttgaaatgataatttgaactgtttctgcg

SEQ ID NO: 199672 - DNA, 1349 bp, Zea Mays
ctcgtaaccagaatcgccgcaagccaatctgtctccgccaggcgccaagccaaccctcaccaccacccgtccaccgtgcatcaccgcccacagcctttattcgccaccgcagcaccccctgctcggccgcccgcccccgagttcccactcggccacttcccacatctctctctctctggctctctgctcgccacgcgccgtaccagcgccgcgcgccacatggctccctcgttcactagcctcctctcggccgcgaactccgccgccgccgcgaccgcctcgcggctcccctcggccgccgccggacgggcatccacttttgtgcgcttcccgcatcacccgacgggctgggctggggcctccgtcgcggcgccgcgtacggcgcgcaagcgggcacccggcgtcgcctacgccaccgcagctaccgagaagagcatctacgactacaccgttaaggacattgatggaaaagatgttcctcttaaaaagttcaagaataaggtgttgctgattgttaacgttgcttctcaatgtgggttgacaacagcaaattacactgaactatctcatatctatgagaagtacaagactcaagggtttgagatccttgcatttccttgcaatcaatttggtgcacaagaacctggatcaaatactcagattaagcagtttgcatgtacaagattcaaagctgaatttccgatttttgacaaggttgatgtcaatggacctaatacagctcccatctataaatttctgaagtccagtgcaggaggatttttgggtgatctcgtgaaatggaattttgagaagttcttagtggataagaatggcaaagtcattgagagatatccaccaacaacttcacctttccagattgagaaggacatccagaaactgctcgcggcataagtacttccaagtctttcagccagcaggagactctgagtttgtgtggaggtcctcccgaagactttaatctcttgatttgagaaaggaaactcaagcttgatctaggtgatcgcttgagagagggaaagagttgaaagagacacatcctaagtggactccttaatagagaggtaggtttcctttagaaaccaaactctggtaaataaatcatttgtatcttgtgttgcctttccttgtgatttatttctcccttccctcttctaagtttgcttgctcgtgtttgattgaaaatcatttgtgttgctactgaagtaattctgtaaccattaagagcaacactagcaagaagaacacctctccctcactccgattgatctgcttctcgttctaacacctaaccgggatttgagttttttgtattaagtggtaaattttag

SEQ ID NO: 199673 - DNA, 1701 bp, Zea Mays
ccccccacctccattccggccgctctgcagggccggcccatgcaggtgaggcgacgacgcggcggcgcgcgtttaccggaccggcggcggcctaccggagacgatgaaggggagaccgctgttcaagagccctctcccccgcagctacctctccgaaacctccagcgtcgcgtccgccgccgtcgccacgcaccgcgtctaccaagtctggagaggaaagaatagattcctctgcggcggtcggctcatcttcggcccggacgcaagctccatcgtgctcacggtggcgctcatcatgacgccgctcgcgctcttcgtcgccttcgtctcgttccggctcgccgagctcatcgggaagccgctcggcaccgccgtcccggcgacggccatggccgtcggcatattcgacgtggtggtgctgattctcacgtcggggcgagaccccgggatcatcccccggaacgcgcggccgccggagcctgacgcagccgcgacggagagcttctcaggctcccccgcggcgatgggcgcgtcggcgtcgtggtcgctgccccccacgcgcgacgtgtacgtgaacggcgtggtggtgaaggtgaagtactgccacacgtgcatgctgtaccggccgccgcgctgctcgcactgctccgtctgcaacaactgcgtggagcgcttcgaccaccactgcccctgggtcggccagtgcatcggccggcggaattaccgcttcttcttcatgttcatctcatccaccacgttcctgtgcctctacgtgttcggcttctgctgggtgaacctgctgctcatctcccggcgctacggcgtcagcttcggcagcgccgtcgcggagtcccccgtgtcgggctgcctcatcgtctacaccttcgtcacggcgtggttcgtcggcgggctcacggcgttccactcctacctcgtgtgcaccaaccagaccacgtacgagaacttccggtaccggaacgacttccgggccaaggtctcgcccgccgacccggacgccgccgcgctctactacctcggcccgctgtcgtccgagtcccgcatcagcttctacaccagggccagcctcagcttcgacatggccaaggccagcttcgacctcaactactccgccaagcgcaccagcgtcgcgtcctccgacttcagcgacatctacggcggcggccacggggcgctcgaccgagtctctactgctcatcagcagcctcggcactccatcttcggcgggcctggcagggagagcaagaaggcggaggacgaagcggacgccgtgacggcggagctcggggccaccatgcacatgcgctacggcgccgccgcaggacggacgcgcgggagggagttcgaggcggtgtgatcgagcgcgcgcatgggaacgagggggtcgatcgatcgagaagaagcaaattaaatgcccttctcagctcgattcgtgattcgtgaatgtgatttgcgcgtgtgctgtaggtacgtacgtgtaagtagcctcagtttcgtcctcctcatcctccttttatatgtttggaaacaggatgcctcatatcatagcattctacttcctgcatggtacactgtagttcaaggcttcatgtatatatagttgtattatacatacatgtaacatgtatataggctgcctacgcacatacatgcgcacatgagttgtgtcacgatcacaggtag

SEQ ID NO: 199674 - DNA, 424 bp, Zea Mays
attgacagcaagtccggagagagtagctgggtggagatatcgccacgtctcaagtctcgggggcgaattcaggagctttggtcgcgttgaagggtctcgcgcgaggtgttgccgtgtatggtgggtgctcggctggtcgggaactcgccgccgtcgtgggatctccgtgtccggccactgcgggtcgtgccggctcacccaccatctcctcggtcgtcgacgagccagtgaccaaggatctaggtgtttagcaggtttgctgagcaggagctcattgaaggaccgagagatgatgattgagccagtgatgtggtgccaaccacaagatgcagatggtggaaccaaggaaggatgaacttaactagtggatgctcgccgagcgagtatctcccccagcaaacactatctaagtgtcaaattaaag

SEQ ID NO: 199675 - DNA, 1381 bp, Zea Mays
cgggcatgcaagcaaatgtctactggcaaggagggcactacgagcactgcgaggccttgttcgattgaagtcattggttgagggtaattcagtaaagcgtcaatctgcaagcactctgcgctgcatgcaaactctatcacgggtgcagtcacagatatcttccaggagagcaaagatgtccgaggagaaccaggctctccaacgccagctcctacttaaacaggaactggagaatttcagaatgggtgagaactgggatgacagcacccaatccaaggagcaaatcgaggcaagcctgataagcaggcaagaggcggcgataagaagagaaagagcgcttgcatatgcattttcacaccagtggaagagtacatcgagatctgtcaacccaatgtttgtagacccaaacaacctgcagtggggctggagctggctggagcgctggatggcagcaaaaccatgggaaggccgcaatggggctgacaaggagagcaacattgaccggggatccgttaagagcatgagcttgaaccttggagagggtgagatcacaaaagctttcaaccgccgggactcaaagctagaaaagccatcgccgccaactccaagaccggcccgtccaacttccaggcattcccctttgacgccctctgctagagtggcaccgatacctgcgaggagaaaatttgtcacgcccaagaacgggctttcacaggtggacgatgacgcgaggagcgtgctcagtgtgcagtctgagcggccaagaaggcacagtatagccacctcgactgtgcgggacgacgagagcctcacgagctccccgtcgctcccaagctacatggttcccacagaatctgcaagggccaaatctcgcctccagggttcagcaacggccaatggcgcagagacacctgagaaaggaggctcgactggaccagccaagaagaggttatccttccagggtggaactgtgtctgcctcgccaatgcgacgacattctggtcctcccaaggtggagatcgcgccaccacaaccagaggccttggtagtcaatggtggaagcaagtgacacatatgtgatgagtaccaggatgagaaacggattatgaagatattagtttcattttcatccatgaatagaagttaaaagtggtatcatatctatgaatggtttcaattgtttttctgttacaaccacattatttgctatatacgattcacagtacctgccagttgattccattggttgtttctgtaaaacaaatatcaatttgtcactagaatctgtgatgtttgtatgtaaacaggtcctctatttatgtgagacatatatttcttttctttcagaagatccccttgaagtgtgttacccttgcaagct

SEQ ID NO: 199676 - DNA, 439 bp, Zea Mays
agctgtgtccgctcctcctagtgatcccgcaccgtgctgtgtccgctccatcttccttcgccgccacgctcatcgccggtgcgagggcatgtctacctacccgaggacctacgatctcatccatgcggactcggtgttcaccctgtacaggaacagggagaagatcctcctggttgtcaagacgtattggactacccatgaggccatgaccaagatcagtagcaggactgtcaatacttgctcggataggaaatttaacatgtgggggaaggaaggatctattaatgatatgaaagaacactgcttctggtcccaaattatggagagaaagggtccaacagtcgagatggctgaatggtgccaggaatgaattggtaatgtacaaacacatttgacaggacagtaggccatgtaaacaggtctctggtctctattaaaa

SEQ ID NO: 199677 - DNA, 2070 bp, Zea Mays
aaaaattaaaacaaaccacattctctattctctcatcgaaagaccgccctctcgctctcgctctccaccgccgctagggtttccaccgcccccggcgatgggcgccctcactgacagccggaagcgtctctcggcggaccgctgcctctcggccgaccatcgcctcccctatccctcgttccccccaccgccccttacccctccctccaagcggaccaagctcgccacattccctgaactcgatccctccacctccgccgtcccgcctatccgtccttctccccaaatcatccactccgccgccgcggcatccgcctccttcacgccgggcccttcctcctcttccaccatcgcttccaccccgcttccgcacaggcgccgactcccgccgccgccgccattgccgcgcccgatccacggcccacagcggatcctccgcgtcttccggcttggtggggctgcacggacccacgctgccggccgctcgttgttctccccgtcatcacccctgccttgttctctcggattccagcagtacgtagagctcgtcaacagcgtctcccacccggcgccatccactcccgccgccacaaccgatgctacgaggcaggcggtgcccctcgaggtggtggccatcgaggaggaggaggagggggaggaggaggaggaggacgaggacgagaggaagcagcaggacgaggaggaggtgaggggcagcgtggtagtgagaagggtgccacagtacaaggagctgtacgagaagtcacggaagcgggatgccaagctcaagacgctcgagtttgaggtgcggctcgcccaggtgggccgtcttagccttgagcggcttgctgaggccctcccgcgaattacgccaaagaaggaggaggtgcctgaaccttttgttcctcttactgatgaggatgaagaaatggttcgtcgggctcttcatggcaagaacagtcgtgagaggttagcagtacatgaaccttcaaatattgtgataacaagggagatcttgcaatgcttgaataaccaggaatggctaaatgatgaggttatcaatttgtatcttgatctgcttaaagagagggaactaagagaacctcgcaagttcttaaaatgccatttcttcaacacctttttctacaagaagctgatttccagtgggtatgattataaagctgttagaagatggacaacaaaaaggaggttagggtacagtctaattgactgtgacaagatatttgttcccatacacaaggaagtccattggtgtttagcagtcatcaacataagggacaaaaagtttcagtatctggattcacttggtggcatggacacgagggtcttgaggatcttggctaagtatattgtggatgaggtcaaagacaaaagtgaccaacagattgatgctctctcatggaagcaggaaagtgtcgaaaatcttcctttgcaggagaatggatgggactgtggcatgttcatgctcaaatacattgacttctacagcagagatatggacctcatttttggacagcaaatgcactacttccgcaggaggacggcaaaggaaatactgagtttgagggctgaataaaccttggaggacatcataggtcattttggttaggttcagatatttgttggaatatgtacttaacaaatggctgcaacggcttaaaggtatagcattgagtggaatgattttgaaaatgttccggatgcacaacggtcaagcaacaggttgaagggaattttgcatgagcacagcagcgcctagttttgacagtgagcctttgcatggtcaagcattagattgcaatgagattcatcaaagatagggaggtatagattaacttggaactatatatatatataccagtgttcttgagcatcctgtgagctgtgaccaagtgagcaatcactgggttaagctgtatgaccggcttcggtgcatagttgtgtgaaatgctcaaatcccttttgtttttatcatgttttatttttttaatcgttctactttcctgagcctgttatgtatacctgtaatggctgatccgctaccagttg

SEQ ID NO: 199678 - DNA, 2690 bp, Zea Mays
ccgctgcaaggcagacgcattcggctcctcgtttctctctcctctcttcgttcccgcgcggagagggagagggagaaacaggggagcggcggccccctcctcttccctgccacggtttcttgcggattatttctaccctattttattcaggatttccggttggatcctcctatggggaaattttaacttctgctgcaaccggtggtgcaattaatcagccattcacgcattgtgctgttcattgaggcattatcggtgtggttcattgagaaagcgcctgtatgcgaattttcatgtaaaaagagctgatcagacatggctgcgaaggacggctcagggtcacaggaccaggggcacaggttgtggcccatgctgtcctacgcttgcggcgagctatgtgtgatcatgctgctctacgtggctgcctttgcatcccatgcagccacaaggctggcgcgcatctgcgggctcaggccaccatgcatcctgtgcacgaggctggaccgcgccctccatggaaacttgccatggttctccgcggacctggtctgttccgtgcatcggtccgaggtctcgtctctggctcactgcaagagccatggccggcttgcacggtccggcgatctctgcaaatcatgcctcctttcatgcacggcggtaggtgcccgtgaggaggtggtgaactctcggcctacgacatccagcagcaggttgtgttcttgctgttctgatccgttcaagaataatactggcgacacgcagaggcattctggagcagccaatgctgtggtgtcttgggatagtgtacctgcagaccatccaaatgagaagacttctgtggtgggcattgaggaagtccaagaatctgacggtcctacaaaggacagcgccgccccttctgcgaatggtggggcagcgaagagcaaccacagatcggccgcgccgacacgcattgctgtggacagcaacggcagtgtaaaaaatgcctccgtcgttgcaagggccaacttgacgtcgcctcggccgtcagaaattatctctgccagggacagcagttcaacgacgcagcaagaggtgaaggcgctcctttctcagatgtcctatgcgcggggcggcctcgacagttcttcgattgaaggatctcctgacgctccgaacgaagaaagcaacgctacgagcaacaagagcccgtatctcgagaggaactattgtgtgctggaaccttcagacgggagcctcgctgacgatgtcgaagggggaagctctctcgagaacgtaaagagacagcttgagctcaacaggaaggccatggctgctctacacaaagagcttgaggaagaacggagcgcgtcggcagttgcggctagccagacgatggccatgatcaataggttgcaggaggagaaggccgcgatgcagatggaagcactgcagcacctgaggatgatggaacagcaggctgaccacgaccacctagcgatacaggatctgcatgatttgctcacagagagggagaaagaattgctcgacttggacgctgaacttgcacactgcaggaggctcctgcagaacgacgatccgttcaatggcgacagatttgatggcactgattatacaacgaacaacaacacggattttgtggggagcgccatgtcccattttgaagacgacaaggcatacattttggaatccttgagcagactggaggaaaatcttggcatttccacaatcagacttgcttctggtgacgccagaaattgtcaagaagacatactgtttgaagatcaggcaagagctgatgcatcgccttccagctgtgacgagtcgagtggtgtagcaagccttaaaattcagatttctctgttgaatataagactgagggcacttgaagaggatcaggagttcctcaatcaggtattgagttcgctccaatgtggtagtgatgggctgcagtgtatacaggagataagcaggcacttagcagagttgcgaagagttgtggctcactaaaatgaaaatggttttgccccgagttcacactttttggccgtcatgaggttctcctttgtaacggcaaacctatttgcagtcatctagatagcaggctgctttcagacgaagaagaacaggagctgcagatccttcctgtgccttctgacatacacgtctgcatacatggatatgatcaccgtcatcttcgtagcaatgctcttctctggggacttcgtatcagtctgctgtgcagttgggttcttcaccctatggactttgtgctgcctgcaatggcacttatcaagacaaacgatgactgataacctagggttgcagtgtgctgtgaagatgctccgctctgctgtcgcaatcttcttcttggtcatagcaccaagttaccttgtgcgacatagcaacaaagtgtaccgatgcaacctcttgcaactgcaggttctcatcagacaatgcgcccttaagctcatcagcgtcaactaggacacaccacgaagctcatcaacaccaaggatgaaatcctcatgtctagtttgaaaacataaggggttgctcggccaccccattaaccaccgcctaagtccaggatgactccaattcaagtgggggatgatgaggacatcactcgcatacaaacaatgcatgaaccgataacacgagcacgtgcttaaaagctgaatctccag

SEQ ID NO: 199679 - DNA, 1415 bp, Zea Mays
ctattcatataggagccttggaactgacctgagctgcaatgcatttcttgtttaatgcgtggcctcatttagtaccaaattctcaaggagctcagtctgagaatgatcctaacaataccactatatttgttggtgggcttgaccccaatgtcactgaagataccctaaaacaagttttttctccttacggtgaagtcgtccatgttaagatccctgttgggaagagatgtggttttgttcagttcgttaccagaccttctgctgaacaagcgctgctaatgctgcaaggggccttgattggtgcacagaatgttcgactttcatggggtagaagcctgtcgaacaagcaggctcagcctcagcaggaatccaatcaatggggtgcggctgctggtgctggtggctactatgggggctatggacaaggttatgaggcttatggcagtgggtatgcacaaccccaggatcctaacatgtatggttatggcgcttatggcggttatcccaattaccaacagcaaccagctgcacagcagcaacagcaacaacagtgatgcctgtttgctcgggtaggtcattgggttgtcgcgacggaattaattaaatattatttcaggacactctcatattgcattcttgtcaattgaggtggttttgaaaggctcctgattttgatggccccatggcacggtttcatctatttattagtatatgacatatatgcgctgtgaacaagtggcgctctactgtgattgctgtgttgagacatgctttcttagtttctttccatgtttctcggatctgttgtgttacctttattactgtgtatttgcatatctactgtgatgctatatatgcactgtgccgtttgtttcctattccatttttttctcgttactttattatagcgttggattctttcttctatcacaacgaacagccgtgggcacatgggcatgcacgatgtcatgacagaatgtgtcgatggcaacatgggctccatcttttatctgtttcgagtccttgacatcaggataatgtaatgtgggttttgttgccgctgtgactgatatggaagcatgagctgccatcgttttcatggccgtccgagtctgaaaaatacatttacagtacgatgaatccttttcattcggtctattattcggtctattaggttaattcggtttggtttatttgggtttgtgaaattttgggttttgaaaaatgagaatcgaaattttcaaaattattttagaaaccgaatctgaatagactcacaattttagtttggtctatttagtccaccgaatagacccaaatagtagagagactaatatcttttgttaaaatatataataaataattaattgaaagtactattattaaaaaaattataaaaatatcatacaaagata

SEQ ID NO: 199680 - DNA, 1011 bp, Zea Mays
aagacatactaaacgttagtcgtagtcagataaccaaacaccccaaactgcctgttcaccattttcgccccaaatctgccgaggggattagccgatcgaagcgtcatcggcggctgcgacaatggcggggctgtcgctgcggtgcggcgactgcggcgcgcagctgcggagtgtggaggaggcgcaggcgcacgctgagtccaccaaccacgccaacttcgtcgagtccactgaggccgtcctcaaccttgtctgctccaactgcggcaagccatgccgctcccataccgaggtggacctgcacacgaagcgcacgggccatacggagttcgcggacaagaccgcggaggcggccaaacccatcgacctcgaggcgccgcttaagccggcctccgatgatgccacggacgtcgatgcgtcggcctcggcgactgaggagacacaagagacggttgtgccagaggtgaacaaggaggtgctcacggaccttgagggcatgggtttctcgacagcacgtgccactagggcgcttcacttctctggtaatagcaccattgaatgtgctattaactggctttctgagcaccaagaggacgcagatattgatgagatgcctctggtaccagctaactcaaaaacggaggttaacaagccaagcctgactcctgaagaaatgaagattaaagcacaggagctaagggagcgtgctcgtaagaagaaagaggaagaagagagaagaatggaaagagaaagggagaaggaaagagtacgaatcggaaaagaacttcttgaagccaaaagaattgaggaacaaaatgaaaggaaacgcatgatagaattgcgaagacttgagaaagaggaggagaaaagagctagagaaaaaatccgccagaaattagaagaagataaggctgaaaggagaaggaaactaggattgccaccagaagacccagcagctgccaaaccaagtgcaccacctcctgttgaagagaagaaggtcaagaccaggta

SEQ ID NO: 199681 - DNA, 1015 bp, Zea Mays
aagacatactaaacgttagtcgtagtcagataaccaaacaccccaaactgcctgttcaccattttcgccccaaatctgccgaggggattagccgatcgaagcgtcatcggcggctgcgacaatggcggggctgtcgctgcggtgcggcgactgcggcgcgcagctgcggagtgtggaggaggcgcaggcgcacgctgagtccaccaaccacgccaacttcgtcgagtccactgaggccgtcctcaaccttgtctgctccaactgcggcaagccatgccgctcccataccgaggtggacctgcacacgaagcgcacgggccatacggagttcgcggacaagaccgcggaggcggccaaacccatcgacctcgaggcgccgcttaagccggcctccgatgatgccacggacgtcgatgcgtcggcctcggcgactgaggagacacaagagacggttgtgccagaggtgaacaaggaggtgctcacggaccttgagggcatgggtttctcgacagcacgtgccactagggcgcttcacttctctggtaatagcaccattgaatgtgctattaactggctttctgagcaccaagaggacgcagatattgatgagatgcctctggtaccagctaactcaaaaacggaggttaacaagccaagcctgactcctgaagaaatgaagattaaagcacaggagctaagggagcgtgctcgtaagaagaaagaggaagaagagagaagaatggaaagagaaagggagaaggaaagagtacgaatcggaaaagaacttcttgaagccaaaagaattgaggaacaaaatgaaaggaaacgcatgatagaattgcgaagacttgagaaagaggaggagaaaagagctagagaaaaaatccgccagaaattagaagaagataaggctgaaaggagaaggaaactaggattgccaccagaagacccagcagctgccaaaccaagtgcaccacctcctgttgaagagaagaagtgcgaggtcacgagtcac

SEQ ID NO: 199682 - DNA, 3085 bp, Zea Mays
cctacgccgtacgtacagtatactattctactactcgatccgccacgcccggcagcagcgctcacatcacatgggaattcaaggctgaccgtgccgccgtcactcctcccgttcaggtccagcagcgttcgtttcgttgctccactcatcagatccatccacgccagagacggaggcagccatgccgctgccgccgctcctgctctgcgtctgcctctacctcacccacctcccccgcctcgcctcctccgagcccgacgccgacaaggcggcgctgctggcgttcctcgccggcgtgggccgcggcgccaccgcccgcgcgcgcatcaactggcccaccaccccgctcgcctgcgccagccccggccacggccccggctggacgggggtcacctgcagccccgacggcgcgcgcgtcgtggcgctgcacctcccggggctgggcctctcgggcgccgtccagtccggcacgccgttcctggtcgcgtcgcatcaccacaggaatggcggatctcgccgctcaaccaccgtaacaagaaatcgttgccgacgacgatttcagaattcgaataaattcctacgcccaggtccagcagcgttcgtttcgttgctccacctccactcatcagatccatccacgcgagagaccgaggcaggcagccatgccgctgccgctgccgctgccgccgctcctgctctgcgtctgcgtctgcgtctgcctctgcctctacctcacccacctcccccgcctcgcctcctccgagcccgacgccgacaaggcggcgctgctggcgttcctcgccggcgtgggccgcggcgccaccgcgcgcgcgcgcatcaactggcccaccaccccgctcgcctgcgccggccccggaccgggctggacgggagtcacctgcagccccgacggcgcgcgcgtcgtggcgttgcacctcccggggctgggcctctcgggcgccgtgcaacccggcacgctcggccgcctcacggcgctgcagctgctcagcctgcgctccaacaacctgtcgggcccgctccccgccgacctcctgcgcctgcccgcgctcgcggggctccacctccaccgcaacgccttctccggcgcgctcccgcccgggctcgcggggctcgccgcgctccaggcgctcgacctctcctccaacggcttcggcggcggcatccccggcgcgctcaccagcctcacccgccttgtcgcgctcgacctctccaacaactcgctctccggccgcgtcccggacctcggcctccccgcgctccagttcctcaacctctccaacaaccgcctcgacgggcccgtgccaccgtccctcctccgcttcgccgacgccgcattcgcgggcaacgacctgacgcgcccgcccgcagcagctcctcccgccgccgccgcccccgccgcgcggacgcggcgggtcaggctcagcgaggcggccatcctcgccgtcgccgtcggcggctgcgtcctcgcgttcgccgtcgccgcggtgctgctcctcgcattctgcaacagggagggccgcgacgacgacgacgacgacacgggaggggccggcgggaagggcggggagaagaaggggagggagtcgccggagtccaaggccgtcatcggcaaggccggggagggcaaccggatggtcttcttcgagggcccggcgctggcgttcgacctggaggatctgctccgcgcctccgccgaggtcctcggcaagggcgcgttcgggacggcgtaccgggccgtgctggaggacgccaccacggtcgtcgtcaagcggctcagcaaggaggtgagcgccgggcgccgcgacttcgagcagcagatggagctggttggccggattcgccatcgcaacgtcgtcgagctccgcgcctactactactccaaggacgagaagctgcttgtgtacgattactacgccagcggaagtgtatccaacatgcttcatgggaagaggggagaggagcgaacgccattggactgggaaaccaggtggaagatcgctctgggtgcagcaagaggagtggcacacgtccacgccgagaacaacggcagatttgtccacggcaacatcaaggcctccaacgtgttcgtcaacagggacggatacggctgcatctcggacctcggcctggcacagctggcgaacccgatcgcggcgaggtcccgctccctcgggtactgcgcgccggaggtcgccgacacgaggaaggcgtcgcaggcttcagacgtgtacagcctcggcgtcctcgtgctggagctgctcacggggaggtcgcccgtccaggtatccggcgggcgcggcagcgaggtcgtccacctcgtgaggtgggtgcagtcggtcgtccgcgaggagtggaccgccgaggtgttcgacggcgcgctgctgcgggtccctgacatcgaggaggagatggtggagatgctccagatcgcgatggcgtgcgtgtccaggacccccgaccggcggcccaaggtggcggacgtggtcaggacggtcgaggaggtgcgccggagcggcaccggcacacggccgccctccccgccggccaccgccgcggatgcagaccagagtgagatggagagctcctcctcggcggcggcggcggcggcgcagtgacggcgggagttgatgcttcgcagccgcatctggtgatccgttcgtcgccctttgtgttgtgctcttccaaatccacggccattccattcttttggcgggtgctgtaccattccattctttttttctctctctcttgtgttaagaagattccgtgttacgaaattgtaacacagtgtcacgtggagacggtggtccgtccgatgctcatggcagcagttgctcactccttgccgatgagatgagagtgtcagcgcatgaagacaagcaattaacattcggtgctgctttgctctgttgcttcttcagcttcggatcagatgcccttgagggcatggcaatggtttgcatcgtttgagtactcaacttgggcttgttcggttagctcttaatctacgtgtattgagtgagattagatgagtttgaatcccaaataagttaaaattattctt

SEQ ID NO: 199683 - DNA, 2267 bp, Zea Mays
ttcgttttgaagggcgtgggccaagtcttcatttgtatgcatcaaccattgacggtgtcatagtacagtgtcacacatacatcaagtcatcaataattgcaccggcggattgtacggcgctctgtgctgctgcagggattttgcagtatcttgttggaagccttgtagtggccgcggtggaaagaacaagacgatcaaacgcatggcgccaaacgagctgcttaggatggaaattttcttccatttgttgagcaccgaaggaagccccgatgttaattaatcgttataagtgcctcgcccacactcaccaaagtccaaggatcggtgcattcagaatttcagattcagttcttggttagccattgacagcatctgaggccatatcatggatgcgctcacgtactacctgtacctcttcttggccttccttcccctcttgctcctgaagctcaagaggcgagacaacaacgatggcctgaggctgccgccgagcccatggagtctgccggtgatcggcagcctccaccacctgctcgtcggcagcccgctcccgcaccgtgccatggctcacatctcgcacaggctcaaggcgcccctcatctacctcaagctcggtgaggtccccgtcgtggtcgcgtcgtcgcccgacgctgctcgggagatcctgaagacgcacgacgccaacttcgccacgcggccgtggagcccgacgatgaaggtgatgatggcggatggggagggcctggcgttcgcgcgctacggcgccctgtggcggcagctccgcaagatcagcatcctggagctgctcagcgcccgccgcgtgcagtcgttccgcggcgtccgggaggaggaggtcggccgcctcgtggctgccatcgcggagtactccccgcggggcgaggccgtgaacctcagccagaggatcgccgagctcatgaacgacacggccgtgcgcgccatgatcggcgaccggttcgagaggcgggacgagttcctggagaacgtcgcggagggagtgaagatcagcaccgggttcagcctcggcgatctgttcccgtcgtcgaggctggcgagcctcgtcggcggcacggctcgccgggcggcggtaaaccaccgcaagatgttcaagctgatggactacgccatcgagaagcacgaggagcggagggcagccatgaccacagatgcagagggcgtcgtgaaggaggatctggtggatgtgcttcttaggatacagaaggaaggaggcctggaggaccttttcggtgccggcagcgagacgtctgcaagtacactccaatgggccatgtcggagctcgtaagcaacccaagagtgatggaaagggcacaggccgaggtacgtgagaagctccaagggaagccaacggtgaccgaagatgacttggtcgacatgaggtacatgaagctcatcatcaaagagaccctaaggatgcatccggtggtgccattgcttctcccaagggagtgccgagagccatgcagggtgatggggtacgacgtgcccaagggaactaccgtgttcgtgaatgtctgggcgatcagcagggatcccaagcactgggaggacgctgcgacgtttagaccggaacgattcgaggccgcgggtacggttgattttaagggcacggactttgaatacacgccgtttggggcgggccggaggatgtgccccggcatggcgtttgcgcaggcaagcatggagctcgtgcttgcagcgctcctgtaccatttcgactggaagctgcctggtgggatgctgccgagtgaattggacatggcggaggagatgggcatcactgcccgaaggaagcgcgacctttacctgcatccagtcgttgtcagtgtgccaccacatgtctcataaaccatagctgttctacttgctattttaccgtagctatatgctttattgatgcagcaaagttcactagtacacacagcctctatagtgacggttctatagacgttttcactgacgcttttcagtgccgccagtgctaggggccgtcattttcattggcggttattctagaaccgtcagtggaaatgctattttcactggcggttttataaagaaaaccgccagtgaaaatagcatttccactggcgggcggtttgttttatttagccgccagtggaaagttttctcgtctttttttaaattttcaatcagtactgaaatttatatatatttacacacacaaaacatatatatatatatatattgatattaaaagcaacatgga

SEQ ID NO: 199684 - DNA, 3408 bp, Zea Mays
taaagatttaccgtccagggtccagcggctgacagatcggttccggctggttgctggcagatcgtttcatcgcttgtcacgacgctggcagcagagccttcaaatcctgtgtctgcatgtgcagctgctcctgcgcgcaagtcgcaacggtggtggctgcagctgcggcgtgctccttcgctggaaagtggggcagtatcttttcgcatctcctcgactccgcctctctcggatctcgccgaaggacgagcaaagtctgtttctttccccctctcttcgcctttttctgtttcttcccccttctttatactcgctggcagcggcgggcgacggtcgtggtgcactgctgccgcggccgcgcggagggagggcccctgatcgcccgcttctactacaactatattctgtcgccagcgcacaagcggcgggggcacggggtagattcggagcggctcttggcttgcagtccagacgcccttcacccctgatctggaccggagggagcggctccttccgtcagttgttcttgctttgcctgggcctcttccgcctgcttcgtgttcttcacaggagccggtgacctcggacgatatcttggaggacaagatgtcgggggctgttcttgtcgccatagtcgcctccatcggcaatctattgcaggggtgggacaatgccaccatcgcagctgctgttctgtatataaagaaggaatttcaattgcaaaatgagcccactgtggagggactaattgtgtcaatgtcacttatcggcgccaccatcgttactacattctccgggccattatcagactcgattggccgacgccctatgcttattctctcttcaattctgtacttcttcagcggcctcatcatgctatggtctcctaatgtctatgtcctgctgttggcacgcttcgtagatggatttggtattggcttggctgtcacgcttgtgcctttgtacatttcagaaatagccccttcggagattagaggtttgctgaatacactaccacaattcagtggatcaggaggaatgttcttgtcatactgcatggtgtttgggatgtccctgtcgccatcacccgattggagaattatgcttggtgtgctcgcgataccttcattgttcttctttggtttgacaatattttatcttcctgaatctccaagatggctcgttagcaaaggtcggatggcagaggcaaaaaaggtgttgcaaaagttacgggggaaagacgatgtctcaggtgaattgtcccttcttctcgaagggttggaggttggaggagacacttccattgaagagtacatcattggacctgccaccgaggcagccgatgatcttgttactgacggtgataaggaacaaatcacactttatgggcctgaagaaggccagtcatggattgctcgaccttccaagggacccagcatgcttggaagtgtgctttctcttgcatctcgtcatgggagcatggtgaaccagagtgtaccccttatggatccgattgtgacactttttggtagtgtccatgagaatatgcctcaagctggaggaagtatgaggagcacattgtttccaaactttggaagtatgttcagtgtcacagatcagcatgccaaaaatgagcagtgggatgaagagaatcttcatagggatgacgaggagtacgcatctgatggtgcaggaggtgactatgaggacaatctccatagcccattgctgtccaggcaggcaacaggtgcggaagggaaggacattgtgcaccatggtcaccgtggaagtgctttgagcatgagaaggcaaagcctcttaggggagggtggagatggtgtgagcagcactgatatcggtgggggatggcagcttgcttggaaatggtcagagaaggaaggtgagaatggtagaaaggaaggtggtttcaaaagagtctacttgcaccaagagggagttcctggctcaagaaggggctcaattgtttcacttcccggtggtggcgatgttcttgagggtagtgagtttgtacatgctgctgctttagtaagtcagtcagcacttttctcaaagggtcttgctgaaccacgcatgtcagatgctgccatggttcacccatctgaggtagctgccaaaggttcacgttggaaagatttgtttgaacctggagtgaggcgtgccctgttagtcggtgttggaattcagatccttcaacagtttgctggaataaacggtgttctgtactataccccacaaattcttgagcaagctggtgtggcagttattctttccaaatttggtctcagctcggcatcagcatccatcttgatcagttctctcactaccttactaatgcttccttgcattggctttgccatgctgcttatggatctttccggaagaaggtttttgctgctaggcacaattccaatcttgatagcatctctagttatcctggttgtgtccaatctaattgatttgggtacactagcccatgctttgctctccaccgtcagtgttatcgtctacttctgctgcttcgttatgggatttggtcccatccccaacattttatgtgcagagatctttccaaccagggttcgtggcctctgtattgccatttgtgcctttacattctggatcggagatatcatcgtcacctacagccttcctgtgatgctgaatgctattggactggcgggtgttttcagcatatatgcagtcgtatgcttgatttcctttgtgttcgtcttccttaaggtccctgagacaaaggggatgccccttgaggttattaccgaattctttgcagttggtgcgaagcaagcggctgcaaaagcctaatttctttggtacctttgtgtgcaactattgcactgtaagttagaaacttgaaggggtttcaccaagaagctcggagaattactttggatttgtgtaaatgttaagggaacgaacatctgctcatgctcctcaaacggtaaaaaagagtccctcaatggcaaataggagtcgttaagttgtcaatgtcatttaccatatgttttacctatttgtactgtattataagtcaagctattcaacgctggttgttgctagaaatctttagaacaaagatgataatgatctgatctgatgttataatattcaaatctcaaataaagaaaatatcgtttctcatgttgtctttgcaagcttttgcactgttcaatatgatattaccacgctcggttcacagagaatcaattgcaagctcatattgtaaactttcttcatttggacgagttaccttgaacgcatttgatagaaggtgaattcctatcatatgaaatattatgcttaacttattgtattatagcttatatctccaaaataacaaaatgccactacaaaagcacttgccagacc

SEQ ID NO: 199685 - DNA, 2015 bp, Zea Mays
caattcggaggcatgagtgccttttagccgagggaaccacccgtcgctgcgttgtttggtggcttcgttcactgcaccgcccacagcttcgccccgtcgtcgccgtccgccttccctccccggccaccgccaccgccaccaccacccaccgaagaaaaaaagagataaatagaacaaagaaaggggaaagattgacgaggagcgcggcatcgtcgccagcgccttccggcgtaggactcgcgcgtgcccgtccctcgcgcgtagccgccggagctcgcgggcgttggcggccgccgccgtgggcgtatcactccggtgtggccggctcggcatcgatttcttcccgtttcccctggaccatgaaacaatctaggaagcaaccccctgcagatgaattgacaacaaaccaagaacatgtgagtagaagtgaagtttccagtagctcaaatttgaaaaccatgcttccgaaccatctagataagaagcacaatgatgcggacaagggtattggaactggatctcccttgaaacatcttcacattcgaaggcagaaaatgcaggagggacatctgggctgcaggaacatgccggtcaaattctaggcatgccccatgccttctcagatcctttactaaagaatcttaatgacttgcctgcatcgaatttgtcattacctgctggttcttacataacccaatcattttcccagaaaatatgccatactaatgagttggagagaacaataagtaggactgggccagcttttgaatgtgtcaaaccccctgacattgcccgtgcagatgaatcaaattatcttgtttctaatcatattgaccaaaggtacaatcaaggaattattggcccagccagttcacagccaccagtatattaccaagatgaaagtttgtcaagtaatgtgacacaaaaatgccatgatggttatcatgtagttcaacagcaggataagttttttcatcaggataaaagcgcaggtccaattattgctccctggaacaattttgttcaaacagggttaatttacaacgcacatggtgcaaagttgccctcagataatttagatgctctagaaagttcagttccaaagccgatgcatgctactgatcattccctttcatatctccttaatgtatcccaaggagacaattcagaaagtggatcacatgtagagaaactgaattcagggcctgttactaaagattatggaactactggctatgtgcatggaactgataaggttgctccaaatcctcaggatctgttgcatataaagtcttctgaagcttttatcacgcaaagatcaatgggcaatggagaatctggtgtatatcagaatgataatttgcacaagtcatcagtgctacatactgggctgattgatactgatccaagtgtgaacttgcacgacaatggtggcctctctgtgtcttcgtctcaaaatccagttgtggactgtgtttctaggagagaggatccccttcgtgattggggcaatatcgcctgcagtgaaggaataattggatgtgaccataccaccaccgataatgaacacataaagctagcacacaggctgcacgataatgttcaaatgaatgtacctgtcatagttgaggacgtgactgataatgtgccttcaggcattccatcatcgagaccagttgttcctcaggttgtaatggcagctgaagaacaccaagaggtgattctttcatcacagaaggatgacgatagtaggaccaacaggccagagttagctaatgaggatcatgatggagttgccgatggatccattagcgatgctgtagttgctgaacttgaagccagcatgtatggattacagatcattaaaaatggtgacctcgaggaactacgtgaactgggatccggaacatttggaactgtatactaatggaaagtggcgaggaactgatgttgctatcaagcgcatcaagaaaagctgttttgctggaagatcatcgaacaagagaaacttgtga

SEQ ID NO: 199686 - DNA, 1992 bp, Zea Mays
ctttgagagagtgatgtgtagtgctctttgcttcatggactagcctgccatatggactaatatctgcttggctcttttttacacttctacataacacaatgcacaaggaatttcctcgtgtgcactatcgtgtagccaggacaatcgatgcatctactctgacgacactacgagatttggtcccaacaaagcttgctgcttccctgtggaattcccttgtcagatttaagtcaacgatacctgaatttccacaaacagaaacatgtgaactacttattgttgaccggtcaatagatcagattgcaccaattattcatgagtggacgtatgatgctatgtgccatgatctattgtgtatggatggcaacaagtacgtgcaagaggttccaagtaagaatggttcagcaaatgagaaaaaggaggttttgttggaggatcatgatccagtatggcttgagctgcggcatgcacatatagctcatgttaatgaaacgctacatgaaaagatgaccagttttgtatcaaagaacaaagcagctcaactacagcagatctggtggagagttatctaccaagcagttgcagaaaatggttcaagctcttccacaatacagtgatcaaattgacaagctcacccttcatgttgagattgcaggaaaactcaataacataatcaaagaacaccaccttaaagatgttggacagctagagcaagatcttgtgtttggtgatgctgggacaaaagaactaatcagtttcttacgaacccgcatggatgtaagtcgtgaacataagctgcgtttgctgatgatttatgcttccataaacccagagaaatttttcgaaagtgagaaaggtgcaaagctgatgcagcttgcaggattatctgctgatgatatgattgtagtaaataatatgcgctgcttacgtggagctgattctaagaagtcttcagttggggcttttactttgaaatttgatcttcagaagaaaaagcctggtatcaggaaggagcggactggagaagagtcaacatggatgctatctcgattttatcccatcctggaggacttgattgagaaacttagtaagggtgagctaccaaaagatgagtaccactgcatgaatgatcctagtcctagtttccgtggaattccagggagcacatctgctcgaacgagcccagctcatcagccagcccaatccatgagatctagacgaataggtggcacatgggctagacctcggaactccgatgatggttattcgagtgactctgtactgaagcatgcatcaagtgacttcagaaagttgggccagcgcctatttatctttgtaattggaggtgctactcggtctgagttgcgtgttgcccataagctgtcaggcaaactgaagagagaaattatccttggctcctctagtcttgatgacccaccgcagttcatcactaaactgaagatgttatcaaccgaggaactgtcgcttgatgatttgcaaatataacaattccaaggacgattgtccgtggcattctacactgtaattatttatttatttgcatctctacaacgggtttagttttactcccttaaccgaaccacaggtgctcttacacaggctagaggggcatgatattcattcggtagccaatgtcagttacaatcgagtgtacacacatggcagcgaccagagactgtaatataggtggcgtctttattagattggtggatcagtgaagttcaatgttccgaggacttctatttgtcctcagattgctgctattttgtggggaaagtgtatattttttcctcaaaccggtgagattaattcgtgtaataataacaacaaaaagaagagctagagtaagaacaaaaatagtaataataccagtagcaataatgataataatataagagcaatgaatttacaacaagagtatgtctgagacatataggggtttttagtttgagtcaatgtttacaagtcggg

SEQ ID NO: 199687 - DNA, 2723 bp, Zea Mays
gaaacctaataccgcgtcgcggtcccatctgccatagacctactcaaaaccccacaccacaccgtctggtcgtccatggagaaaactcgttgagcagattccttgttcctgcagtaaccctgtccaacccccgcagcggcggcaaccacagaaacactgcctgtaaattccattcctccgcgttcggcctccctcatcgcgcgaccgttccctctgctcgaatcggcaagcccgcatttcgagccccggaggtggccgcgaaccctaaccctacagcgaggcgtcgccggagttgtgggggctccgttggccatgtcgatggactcggacagctcgtcgcacagcggcgccgactacaggagtttccgccagatcacccgagaccgtttgttagttgaaatgctgagatcgactcgaaagagctcaaaatcatcatggaaggttctaatcatggacaaacttactgtcaagataatgtcattttcatgcaagatggcagatatcacagaagaaggggtttcattgttgacatattcatgtcggacatgtcaggaaaaaattcattgtacaagaaagcttatgtatttttcagttctcctgtacagagggagttggtagctcatataaaaaaggattcgactgtgctaacacgcatcagtgcacttagtgagatgaacttagaatactttgctattgacagtcagggcttcataactgaccatgacaaggccttggaggagttgtttagtgaagatgcagaaggctcacacaagtacaatgcatgccttaacacaatggctacaagaattgctacagtgtttgcatcattgagggaatttcctcgtgtgcactatcgtgtagccaggacaatcgatgcatctactctgacgacactacgagatttggtcccaacaaagcttgctgcttccctgtggaattcccttgtcagatttaagtcaacgatacctgaatttccacaaacagaaacatgtgaactacttattgttgaccggtcaatagatcagattgcaccaattattcatgagtggacgtatgatgctatgtgccatgatctattgtgtatggatggcaacaagtacgtgcaagaggttccaagtaagaatggttcagcaaatgagaaaaaggaggttttgttggaggatcatgatccagtatggcttgagctgcggcatgcacatatagctcatgttaatgaaacgctacatgaaaagatgaccagttttgtatcaaagaacaaagcagctcaactacagcaggcaagatctggtggagagttatctaccaagcagttgcagaaaatggttcaagctcttccacaatacagtgatcaaattgacaagctcacccttcatgttgagattgcaggaaaactcaataacataatcaaagaacaccaccttaaagatgttggacagctagagcaagatcttgtgtttggtgatgctgggacaaaagaactaatcagtttcttacgaacccgcatggatgtaagtcgtgaacataagctgcgtttgctgatgatttatgcttccataaacccagagaaatttttcgaaagtgagaaaggtgcaaagctgatgcagcttgcaggattatctgctgatgatatgattgtagtaaataatatgcgctgcttacgtggagctgattctaagaagtcttcagttggggcttttactttgaaatttgatcttcagaagaaaaagcctggtatcaggaaggagcggactggagaagagtcaacatggatgctatctcgattttatcccatcctggaggacttgattgagaaacttagtaagggtgagctaccaaaagatgagtaccactgcatgaatgatcctagtcctagtttccgtggaattccagggagcacatctgctcgaacgagcccagctcatcagccagcccaatccatgagatctagacgaataggtggcacatgggctagacctcggaactccgatgatggttattcgagtgactctgtactgaagcatgcatcaagtgacttcagaaagttgggccagcgcctatttatctttgtaattggaggtgctactcggtctgagttgcgtgttgcccataagctgtcaggcaaactgaagagagaaattatccttggctcctctagtcttgatgacccaccgcagttcatcactaaactgaagatgttatcaaccgaggaactgtcgcttgatgatttgcaaatataacaattccaaggacgattgtccgtggcattctacactgtaattatttatttatttgcatctctacaacgggtttagttttactcccttaaccgaaccacaggtgctcttacacaggctagaggggcatgatattcattcggtagccaatgtcagttacaatcgagtgtacacacatggcagcgaccagagactgtaatataggtggcgtctttattagattggtggatcagtgaagttcaatgttccgaggacttctatttgtcctcagattgctgctattttgtggggaaagtgtatattttttcctcaaaccggtgagattaattcgtgtaataataacaacaaaaagaagagctagagtaagaacaaaaatagtaataataccagtagcaataatgataataatataagagcaatgaatttacaacaagagtatgtctgagacatataggggtttttagtttgagtcaatgtttacaagtcggg

SEQ ID NO: 199688 - DNA, 3711 bp, Zea Mays
agcaagaaatagctttgccatctctcaaactatccctctggaacagcgatggctgtgccgtgagaacaacaaaacaaaaccctagaggacccaaagcccccgggcagatcgggcccgtccgtcccgaaatccaacggcgcacctcgctccggccgctgtacttaatcgagccgcaaccgggcctctctgactgatttcttcttctccagtctctctctactcccccactcttcccccactcccccagcacgccactgctcacacagaccaccccccactcggaggcggagtggagctcctccaatccgtcccgaatccggacgccgctcgcaccgcccgcaccgcccgcagatggacgcccgccccccgatccgcccgctctgaccagacgaacccggtccccgcccccgccgccgccgctggagcgcggtaatggcgggcttctagcgcgtcggacttaaagatctagcctttctattttgtttcctctctgcctcttttctttcgctggcaccgatggtcaccgagatggcggcgcgcggcggcgaggcggcggcgttcggcgcggaggccgaccgcggcgacttcgaggtcttccgcagcggctccgcgccgcccaccgtcgagggcgccctgggcgccgccgcggccgctgccgacctgctcgtggatgacgacctccgcgccgacccggcgtaccagagctactactactccaatgcgcacctcaacccccgcctcccgccgccgctcctgtccaaggaggactggcgctcctcgcaccaccgcctccgctccgcggccttcggcgggatcggggacggcaggaggcagcagcagccggctgcccaagggacggtcggcctgcccgggatcgatcttgcccgccagaggagcttctccaccgtctttcaggaggattcgtatcagcgtgatatggataggcagactgccagccacaatagtagtgaatcattatgttcttctggaatacagtatggtctaaatcgtggacctggaactattggaggcctgcactctagcaatagtttacgaagcttggatgaaattccgaacaatgatctgccatcaaatacatttgcttctcttttagggtcatctctttctaggagtgcatctccagatcctgagcttgtgaggagggcccctagtccatcccttcctccaatcggtgtgaaagttggcaacactgataagatgaatggtggttcctcttctttccgtcgtagttcatccgcaatcggtggatctgatgatctggtggctgccttatctgggatgaacttatcatctagggcaatgagtgggcaaactatggaccagtctcagctctatcaggatgttgataacgtccagaagtttctttttgatcgacagggtgaccaaccaaatggcaatcagcagcactacatgaggcgtcctgagcatggacaatctaagttatctgatggatattctgccaatttggccaattcatccacgatgagaaaccagattaattctggcagtttcacatcttttgacagtttgtctcttggatctggctttccttcccctaggattggttctagatcccctggagggactgtatcttctcgacaaaatttagctggtatgtctaacatgctaaactataatggaattggaagtccaactgcgtcaccttctcttcagacttctattgatccagcgtatatccagtaccttgctcaaattgcagctacctgggatgatcctctaatggacaggagccatctgggaagttcttacatggacttacttggcagtccacttaggcatggtgaccgcaacatgcgctttccaccaggcatgagaaacttcggtaattcctttggttcatggaattcaggcatgagtggaaagatggatgctaatttgatgccctctctcctggaggaattcaagagcaacaaaagtaaatcatatgagctctccgaaatagctggccatgttgttgagtttagtgctgatcaatatggaagccggttcatacaacagaagctagaaacagccagtactgaagaaaaggacatggttttttcagaaattatgcctcaagctctcacattaatgactgatgtatttggaaattatgttgtccaaaagttttttgagcatggaagcactgcccagataaaggaattggctggtcagcttattggacgtgtccttgctcttagtcttcagatgtatgggtgccgggttatacagaaggctatagaagttgttgatttggatctgcagactaaaatggttgcggagctggagggtcatgtcatgcgctgtgtacgtgatcaaaatgggaaccatgttatacagaaatgcatagagtgcattcctcagcatgctatcgagttcattgtctcgacattctatggccaagttgtaatgttatccactcatccatatggttgccgagttattcagagggttctagagcattgtgatgatcctaagacacagcaaataatgatggatgagattctccagtctgtttgcttgctagctcaggaccagtatggcaactatgtggttcagcatgttctggaacatggcaagccccatgagagatcagccattattgagaagctaattggccaagttgtgcaaatgagccagcaaaagtttgcctctaatgtcattgagaagtgcttagcctttggaaatcctgtagaacgtcaggttctgatcggtgagatgcttggatccactagcgaaagcgaacctcttgaggtaatgatgaaagaccagttcgcaaactatgtggtgcagaaggtgctagaaacttgtgacgatcagcagagggagatgatcttaacaaggataaagacacacttgaacacactcaagaagtacacatacgggaagcacatagtagcgcgtgtagagaagcttgttgctgctggagagaagcgccttgggcttcaaccagcatgcaccgccgcctgaagggcaaactctctaagttgtacagctaacagttgctaggtttgcctcatgtttttttctctactaaaaaccttatatgaaggccccttttggcctcgccaggaaaaaaaataaatactgtatgtttgcggggaagagtgtacattaattctgtagcagaaagaccccctacccatgtggcggaatcaagggaggagtgatgcgtgtgagtccgatcgatctgaaggctgctgtaaagaggaagatggaaggggaaggagtgagaagcatgtcagttactctgctgctgtacaaattaaacttagctcttagagtgaggagaaagtaagctgttagctgtctgcctaaaggaaagaaaggaaaaaaaaaagaagctggaggccattggcaccctgtttcatgtgttggtatagctgctgtggctctcctgttgtctgtctggcctttgttgtaacataaagctgaggcgcactagcctgccttcgttttcacagttaagctgaagttattagtatcagctttcctgaactgcttggtatgtaatgtgactctgtttcttccttgtactaatgcttgtctcatgtaatccaggcccctaatgtctgaatgttttaatctcatttttcacctctgataaacgttgtttttttgtttggttttgttgctgctgaggtgatctgtttttttttgctgcttttgttttggtatacatactccttg

SEQ ID NO: 199689 - DNA, 3663 bp, Zea Mays
tctctctctactcccccactcttcccccactcccccagcacgccactgctcacacagaccaccccccactcggaggcggagtggagctcctccaatccgtcccgaatccggacgccgctcgcaccgcccgcaccgcccgcagatggacgcccgccccccgatccgcccgctctgaccagacgaacccggtccccgcccccgccgccgccgctggagcgcggtaatggcgggcttctagcgcgtcggacttaaagatctagcctttctattttgtttcctctctgcctcttttctttcgctggcaccgatggtcaccgagatggcggcgcgcggcggcgaggcggcggcgttcggcgcggaggccgaccgcggcgacttcgaggtcttccgcagcggctccgcgccgcccaccgtcgagggcgccctgggcgccgccgcggccgctgccgacctgctcgtggatgacgacctccgcgccgacccggcgtaccagagctactactactccaatgcgcacctcaacccccgcctcccgccgccgctcctgtccaaggaggactggcgctcctcgcaccaccgcctccgctccgcggccttcggcgggatcggggacggcaggaggcagcagcagccggctgcccaagggacggtcggcctgcccgggatcgatcttgcccgccagaggagcttctccaccgtctttcaggaggattcgtatcagcgtgatatggataggcagactgccagccacaatagtagtgaatcattatgttcttctggaatacagtatggtctaaatcgtggacctggaactattggaggcctgcactctagcaatagtttacgaagcttggatgaaattccgaacaatgatctgccatcaaatacatttgcttctcttttagggtcatctctttctaggagtgcatctccagatcctgagcttgtgaggagggcccctagtccatcccttcctccaatcggtgtgaaagttggcaacactgataagatgaatggtggttcctcttctttccgtcgtagttcatccgcaatcggtggatctgatgatctggtggctgccttatctgggatgaacttatcatctagggcaatgagtgggcaaactatggaccagtctcagctctatcaggatgttgataacgtccagaagtttctttttgatcgacagggtgaccaaccaaatggcaatcagcagcactacatgaggcgtcctgagcatggacaatctaagttatctgatggatattctgccaatttggccaattcatccacgatgagaaaccagattaattctggcagtttcacatcttttgacagtttgtctcttggatctggctttccttcccctaggattggttctagatcccctggagggactgtatcttctcgacaaaatttagctggtatgtctaacatgctaaactataatggaattggaagtccaactgcgtcaccttctcttcagacttctattgatccagcgtatatccagtaccttgctcaaattgcagctacctgggatgatcctctaatggacaggagccatctgggaagttcttacatggacttacttggtacacagaaagctaaccttggccctttacttcagtcacaaaagcaatatggttactgtggcaatcttggatttaaccttggtggttatgctggaagtccattgacaagtcctgttcttccctcttcacctattgcaccaggcagtccacttaggcatggtgaccgcaacatgcgctttccaccaggcatgagaaacttcggtaattcctttggttcatggaattcaggcatgagtggaaagatggatgctaatttgatgccctctctcctggaggaattcaagagcaacaaaagtaaatcatatgagctctccgaaatagctggccatgttgttgagtttagtgctgatcaatatggaagccggttcatacaacagaagctagaaacagccagtactgaagaaaaggacatggttttttcagaaattatgcctcaagctctcacattaatgactgatgtatttggaaattatgttgtccaaaagttttttgagcatggaagcactgcccagataaaggaattggctggtcagcttattggacgtgtccttgctcttagtcttcagatgtatgggtgccgggttatacagaaggctatagaagttgttgatttggatctgcagactaaaatggttgcggagctggagggtcatgtcatgcgctgtgtacgtgatcaaaatgggaaccatgttatacagaaatgcatagagtgcattcctcagcatgctatcgagttcattgtctcgacattctatggccaagttgtaatgttatccactcatccatatggttgccgagttattcagagggttctagagcattgtgatgatcctaagacacagcaaataatgatggatgagattctccagtctgtttgcttgctagctcaggaccagtatggcaactatgtggttcagtgacttgctgaactctacagcatgttctggaacatggcaagccccatgagagatcagccattattgagaagctaattggccaagttgtgcaaatgagccagcaaaagtttgcctctaatgtcattgagaagtgcttagcctttggaaatcctgtagaacgtcaggttctgatcggtgagatgcttggatccactagcgaaagcgaacctcttgaggtaatgatgaaagaccagttcgcaaactatgtggtgcagaaggtgctagaaacttgtgacgatcagcagagggagatgatcttaacaaggataaagacacacttgaacacactcaagaagtacacatacgggaagcacatagtagcgcgtgtagagaagcttgttgctgctggagagaagcgccttgggcttcaaccagcatgcaccgccgcctgaagggcaaactctctaagttgtacagctaacagttgctaggtttgcctcatgtttttttctctactaaaaaccttatatgaaggccccttttggcctcgccaggaaaaaaaataaatactgtatgtttgcggggaagagtgtacattaattctgtagcagaaagaccccctacccatgtggcggaatcaagggaggagtgatgcgtgtgagtccgatcgatctgaaggctgctgtaaagaggaagatggaaggggaaggagtgagaagcatgtcagttactctgctgctgtacaaattaaacttagctcttagagtgaggagaaagtaagctgttagctgtctgcctaaaggaaagaaaggaaaaaaaaaagaagctggaggccattggcaccctgtttcatgtgttggtatagctgctgtggctctcctgttgtctgtctggcctttgttgtaacataaagctgaggcgcactagcctgccttcgttttcacagttaagctgaagttattagtatcagctttcctgaactgcttggtatgtaatgtgactctgtttcttccttgtactaatgcttgtctcatgtaatccaggcccctaatgtctgaatgttttaatctcatttttcacctctgataaacgttgtttttttgtttggttttgttgctgctgaggtgatctgtttttttttgctgcttttgttttggtatacatactccttg

SEQ ID NO: 199690 - DNA, 1429 bp, Zea Mays
gtgccaatccaaaaccgccacgtgccatatccggtgatacgcctccccggcctctcgtgtctcgtcgtctccctctccctccacaacggcatagctgcagcagccaagtcctctccgctctcttcgccgccaccgccgacaaataaccgccgcaattcgaagcaagagagccgcaccaggagaagatatagtgagagtgagagcccgaggagggggtggcgcgatggggctctcgggcgcgacgatctcggcgccgctcggctgctgcgtgctgcggtgcggggcagttggcggaggtaaggccctgaaggcggacgcggagaggtggcggcgggcgggatggagccgacgcgttggcggaccgaaggtgaggtgcgtggcgaccgagaagcacgacgagacggcggcggtcggggcggcagtgggcgtggatttcgcggacgaggaggactaccgcaagggcggcggcggcgagctgctttacgtgcaaatgcagtcaaccaagcccatggaaagccagtccaagatcgcttccaagctatcgcccatatctgatgaaaatacagtgcttgatttggttatcattggttgtggtccagctggtctttctctagcttcagagtcagctaagaaaggtctcactgtaggtctcattgggcctgaccttccattcacaaataactatggtgtgtgggaggatgaatttaaagatctcggtctagagagctgtatcgagcacgtctggaaggatactattgtctacctagacaataacaagccgatactgattggccgttcttatggcagggtgcaccgtgacttgctccatgaggaactgctgaaaagatgctatgaagctggcgtgacatacctgaactccaaagtggacaagatcatagaatctccagatggacacagagtagtctgttgtgacaagggtcgcgagataatttgcaggcttgccattgttgcttcgggggcagcatctggtaggcttctagagtatgaggttgggggtccccgtgtttgcgtgcagactgcatacggagtagaagttgaggtggaaaataacccatatgatcctagcttaatggttttcatggactacagagattgtttcaaagaggaattctcacacactgaacaagaaaatcccactttcctgtatgctatgcccatgtcacccacacgagttttctttgaggaaacatgcttagcttctaaagatgctatgtcttttgatctacttaagaagaggctgatgtatcggttgaacgcgatgggaattcgtatcctgaaagtttatgaggaggaatggtcctacattcctgttggagggtccttaccaaacacagatcagaaaaaccttgcattcggtgctgcagcaagtatggtgcatcctgcaacagtggtcagatctttgtctgag

SEQ ID NO: 199691 - DNA, 1428 bp, Zea Mays
caaaaacaaaaaaaatagcggcggcgcaggccgcacagcctctccgcaatcgacgcccactttcctccgtagtcttcctcccacaaaaactgcgccacatcttcatcctcctcctcgtaacctcctccaatcgtgccggcggcgcagcaaggtagatcatctgagcctattcatcgcaacctcaagatcccccggggaagaaggggccatgagtcccacggcgtcgtgcagaagatatagaacctactcctacaggctattagaagctgaaggcaattacaatcatcaagaacaatcaaatgatgcaacggctaggactttctcaattacgatcaatgatggccagtattccaagtggaaggatgaacgatgatgctcctcaggaatttggatcgttgtatggtggtgatgatattgagggatctgtggatgagatgatcagtaagggaaatgaagaccagaggcacctacccaagctgtcaaatttgcatcagaaggtgggattgtacttaggcagcacatgccgatagttccacacaggacggagtacaagaaggaagagaacaccggtaaaatagaaaactacactggaaagattgttggacaattcaccatggacgccgataatgcagcagtaagagcagcatgcattgatatgctaaagggtgggcaacgctagatgaggtataagctaaaaaagaaatacttcaatggggttccagcgaatcaagtgaggactacatcgcctatttcgttcatgatcgacgaccaatggaaacttctaatggaaatgtggtctacctcaaagcacaaggacacatgtatgaagaacaaagttagttgtgaacaagtaaagtttccacagggcacaggctctcaatcctacattgcaaaggcatattcaatggttgatatggaatcaatggcggcagcaccagttgaagatggacaccaccaaaggtgcagcaacttgagtctcaattacaaattgagaggcaagaaaaagatggactacgagatgaagtccaaagcttgaaggctaagacacaggcatctgatgagaccattgctaagtgaagaagtccatagcagaaaatagtagcctccttcgtcagattttaagcataaattgtagccaagtgcctccttaaatatgcctaccaacttgatggtgtcaagatacatcacataccagatggaggattaaagttatatgagcctaagctacatgattattaggatttatgttattggagtccaaatttgttttttgttgaaatacttgtgctagatttttttggatggatgatatactttgaaattagataatttcggcattacaatttattttgtttaatgacatattgtatgcatgaagaatcaatcatgatcgcaaattgtatggatttataatatttcatgaaaaaa

SEQ ID NO: 199692 - DNA, 1323 bp, Zea Mays
cacgtgttataaagttaattaaatgtttgggtacggaggtgaagccaaactagaggcatatattgtgcatgaataaggttgacctggtggaagacaaggacctcctgatagttgcaaaagaaatcgaagatcttcttgtaagatatagaacctactcctacaggctattagaagctgaaggcaattacaatcatcaagaacaatcaaatgatgcaacggctaggactttctcaattacgatcaatgatggccagtattccaagtggaaggatgaacgatgatgctcctcaggaatttggatcgttgtatggtggtgatgatattgagggatctgtggatgagatgatcagtaagggaaatgaagaccagaggcacctacccaagctgtcaaatttgcatcagaaggtgggattgtacttaggcagcacatgccgatagttccacacaggacggagtacaagaaggaagagaacaccggtaaaatagaaaactacactggaaagattgttcagtaagagcagcatgcattgatatgctaaagggtgggcaacgctagatgaggtataagctaaaaaagaaatacttcaatggggttccagcgaatcaagtgaggactacatcgcctatttcgttcatgatcgacgaccaatggaaacttctaatggaaatgtggtctacctcaaagcacaaggacacatgtatgaagaacaaagttagttgtgaacaagtaaagtttccacagggcacaggctctcaatcctacattgcaaaggcatattcaatggttgatatggaatcaatggcggcagcaccagttgaagatggacaccacgtaaagtcttcaatagaacaaaggtgcagcaacttgagtctcaattacaaattgagaggcaagaaaaagatggactacgagatgaagtccaaagcttgaaggctaagacacaggcatctgatgagaccattgctaagtgaagaagtccatagcagaaaatagtagcctccttcgtcagattttaagcataaattgtagccaagtgcctccttaaatatgcctaccaacttgatggtgtcaagatacatcacataccagatggaggattaaagttatatgagcctaagctacatgattattaggatttatgttattggagtccaaatttgttttttgttgaaatacttgtgctagatttttttggatggatgatatactttgaaattagataatttcggcattacaatttattttgtttaatgacatattgtatgcatgaagaatcaatcatgatcgcaaattgtatggatttataatatttcatgaaaaaa

SEQ ID NO: 199693 - DNA, 1301 bp, Zea Mays
aaaaacaaaaaaaatagcggcggcgcaggccgcacagcctctccgcaatcgacgcccactttcctccgtagtcttcctcccacaaaaactgcgccacatcttcatcctcctcctcgtaacctcctccaatcgtgccggcggcgcagcaaggtagatcatctgagcctattcatcgcaacctcaagatcccccggggaagaaggggccatgagtcccacggcgtcgtgcagaacctactcctacaggctattagaagctgaaggcaattacaatcatcaagaacaatcaaatgatgcaacggctaggactttctcaattacgatcaatgatggccagtattccaagtggaaggatgaacgatgatgctcctcaggaatttggatcgttgtatggtggtgatgatattgagggatctgtggatgagatgatcagtaagggaaatgaagaccagaggcacctacccaagctgtcaaatttgcatcagaaggtgggattgtacttaggcagcacatgccgatagttccacacaggacggagtacaagaaggaagagaacaccggtaaaatagaaaactacactggaaagattgttcagtaagagcagcatgcattgatatgctaaagggtgggcaacgctagatgaggtataagctaaaaaagaaatacttcaatggggttccagcgaatcaagtgaggactacatcgcctatttcgttcatgatcgacgaccaatggaaacttctaatggaaatgtggtctacctcaaagcacaaggacacatgtatgaagaacaaagttagttgtgaacaagtaaagtttccacagggcacaggctctcaatcctacattgcaaaggcatattcaatggtaagaaaattaccatgtcatatataaacttctttcgtatctgcacacttgttgaagtcaataagataaaaatgttacttacaattaaagatcatagttgtttattttcagaatgggcacttcttctaatacacactatccattcaaatatttttaatgctcctgctaactgttcatgtctaggcttgcaaataagtattgtgttgttacaaaaaaaatgtactatgctaatatccatgtactagctacaacatgaattcttttgaatgcttctgctacctgatatgtatttataagtactgctcttgattaaatatgttatagctacaccatatacttgattactcttataatggtaatgattataatacatacaattttacatctcagatattgtgtatgcttctacaagcagatcttcttgcatacatgtaa

SEQ ID NO: 199694 - DNA, 2154 bp, Zea Mays
gcacgaaccaaaggccttgatagacttcgtaggtgcggacaggttttcgctctaccccgacacaaacccgacccgttacgccgcaccactcttcttcctctgctccgcctcttcacccagcgtcttccgattgctgacggatccctcttcgccgcggccgccgccgcggaccgaccgtgggagagaaggcgaggcgggagcgatggaggccgccgactacggcaagcttttcgtcggcggcatctcatgggagacgagcgaggaccgcctccgcgagtacttcggccgctttggcgaggtcaccgaggccgtcatcatgcgggatcgcagcacggggcgtgcccgcgggtttgggttcgtggtcttcgccgacgccgcggtcgccgagcgcgtcactatggacaaacacactatcgacggacgaatggtggaagcaaagaaggctgttcccagggacgaccacagtattgtgagcaagagcaacggcagcagcacagggtcacctggaccaggacgcaccaggaagatctttgttggaggcctgccctcgagcgtcacagaggctgacttcagaaggtatttcgagcagtttggcatcatcaccgatgtggtcgtgatgtacgaccacaacacacagaggccgaggggctttgggttcatcacttacgattcagaagacgccgtggacaaagccttgcacaagagcttccatgagctcaatggtaaaatggttgaggtcaagagggcagttccaaaggagcagtctcctggacccgtcgtacgttcacctgtgggagtggggcagaactatgctacgaacagggttcatagcttcctcaatggcttcaaccagggttacaatccaaaccccataggaggttacggcatgagggtggatggaaggtatggcttgctttcaggtgcacggaatgggttctcttcttttggcccagggtatgggatgggcatgaatgttgaaggtgggatgagcggaacatttggtgcaagctctggtttcatcagcaactccaatggtaggcaaatgggttcgtacttcaatgcaagttcgaacagactgggtagccctattgggtaccttggtcttaatgatgttccgggatcaatgttgagttccatgtctaggaatgtttggggtaatggaagtctaaactacccgagtaatcctacaaacatgagtgcttttgcttcacctggaaatgggagccaagtcagtcttactggtgacaattggggaggtcttccttctgctcatgggatgggcaacatttcaagccttgggtcagggaaccttgctcgtggagctggagataataacttcggtttgccttctggcagctatggaaggagcaactcaactggtacaattggcgagcctttttctgcagcaggcaatacatatgatgtaaacaatccagatacatatgggggcagctctatttatggtggcacagcctggaggttcacatcatctgaggttgacatgccttttggtcatgatattggaaattttgatccgacaatcaaatgagacatgtcggcaagtcacatgtgcaactatcctgttaacaacaatcagccaagcagaggtaccacttcctagggtgagtattactatatccacatatgacttggtgtagatgaaacacccattcagtcaggcatccgggtgcgcggccgtgaatcggtgattgtcagattaatatacaggttagttttgtctagctaaccagcgggtgtggtttgcgaacaccaacatgctagagatggagctgctagaggagaagcggatacagaaacactttgtggaggtttttttttggggtcatgttttagttttgattcttacgcgtgcgtggtgaggccttttggtttttgaatgagatgtaattattgcggcacatatttagaagccatgttccaactggggattacattttcgttttgtaatcccaaaaactgttttgttgaccaaagtttgactttatatttttaaattctaaactgaaatacaaaaaataaaaatccggaccggaccgaaaacggtaaattttaccgccacttgaagtttaaccctggttccaacatgagctggaaatatctctgtatacggatgcacatgtataccaaccaaag

SEQ ID NO: 199695 - DNA, 1273 bp, Zea Mays
ttcgtccatgttgatacaccgaacaattgctacatctgacagtatactggacaaagctatagattcagaggacgctcagcatcatgactttcttaggctggaccatgttgagggataccatgaactctcagctaagacaaaaatattcttctctactgctcttggcatctgggatgctgacttctacgtcaaggttgatgatgatgtgcatgtaaacttaggaatgcttgccactacccttgctcggcataaattgaaaccaagaacttatattggctgcatgaagtcaggcccagttctcgctgacaagaatgttaagtaccatgaacctgagtactggaaatttggggaggaaggaaataaatacttccgtcatgccacggggcagatatatgccatttcgaaagatctcgctacttatatttcaatcaaccagcctatcttgcacaaatatgcaaatgaagacgtgtcgcttggatcatggttcattggtttggaagttaatcacattgatgaaaggaacatgtgctgtggaactccaccagattgtgagtggaaagggcaagctggtaatgtctgtgtagcgtccttcgattggagctgcagtggcatatgcaagtctgttgagaggatcaaagatgtacatgctcgctgtggtgagggggattcagcagtttggagtgctcttttctagcgcataccttctttgcccgtaaatatgtagcatacttgctaagctctcgcggcggacacctgcataggcaactcaagtaaacttgacaaaaaccaaagatcgtggagtatgatctgaaactgcagaaacagtatgttgcttggaaatattctgcaacaacataattttgctccgtcactgttcgtggcttttggcggtgttagggactccaaagtagggttgcaactgatcttacatgtaggggggagagtttcccagctgatgacgcgtatggaagtaagagatcatgtagaggggcattgttttatgcaaattttgacattcttttgcgagtttcacacattcagtcgttcatgagggtgtaccatgatgtaacatatgagaagccgtggacggatgttggtttagcaaatcttgttccaaaagcagtgattagtgctacaaagcaaagggtactaacgtgccaagatcatgggttttgtaccgaatcactatattgagggcgcgtttggattggagggaaaacggaggaaaattacaggaatagcagttctttggcaagtctttcgcacagtacag

SEQ ID NO: 199696 - DNA, 4367 bp, Zea Mays
attggatctaacagttaattgactaaatatttgctagtagaattagctagctaactgttagctaatttgaaaatgtagctaatagctagagtgtttgtcttaaactaattttaacaactagtaactaacagtacctataccgaattgggccaataacagactgcgttgaccaatccggcggcaaaagttgactccaaattcccctctccgcttccgtctcactcgtaatcgtcctcctcttcccatttctgcttcctcctcacgggcgtgcgacgacgtcagcaaccccgccgagtacccctccttcccctcgcagtcgccgagggagcaattccgcccccaatcggccgcctgaacccttcttccttcccttcccgcggcatccgatgtgcgttgccgccgccgccgcgctcagatagcccagcctagctggcgacgacgaggagggggaccgtagccctaacgatccggtccccacatggcggggagctttcgcgagggcgcggggccgggggacacccacgctcccccgcccccgcccaccccacccttcttgcagttcctcgcgctcgacgcgctcgcctcctggggctccgaccccaagcagccgcactggcgccaccccgagctccgccgggcgctcgcctccaacgaccagaccgacgagctcaggcggatccgcgccagcgtccaggactccgcggtcaaggccaaggagaaggtcaggtcgctgcacgaggccatccagaagctcgacaagtacaagaacattgtcacacgcaagcgccagcgcgccaccgaggcgtcgtcctcgcccgacaagctcggggctgccggtgcctgctcctcgtccacaggcgcgctcaggatgggggcgcagaacaactctgctgtcttgagcaagcgcgtgcgctcctctctcgctgatgcccgggtggaaggacgtggtagtgttcctacaaggcaaggccctttggttagtaatgagaaaaattcacctgtggagaaggaaaagaacagtacaagaatatctgctatcgtctcaggactttctgatgaaaaattgcggggtttatctactggcagtgaagggtgggaaaaaaagatgaagcgtagacgctctgttggaacaatgctcagcagaggcagtgatgctgatcgagatgtcaaatccatgggtcagcatagaccagccaatgaagcacgcccacgatctagtgatggccttggatatagacatggagtttctgctggagcactagcaggtaacaagttggatggcacttctcagcagaacaacattgtatcctgcattctgcccaagtcagatgtcgattatgtggctcagccaaatgaaagaagagaacgccatgctggagttgaaaaggaaaggactacagtaaaaggaaacaaggtaaatacttctgatgatatgcaaaacggaagcttaagtcccctgcccaaggctaaagcatgcagggcaccaagaaccagttcacttgctataaactcatgttctaatttccaacgttcaactggaggaaatgatgaatgggaagaagcaccgtacccaaataaagtgtcacctttggcgggcatgacgaatcgcaaacgttccacacattcaaatgcttcctcacctcctattgcctgggtagggcaacgcccacagaagatgtcacggacaagaagagcaaatgttgtttctccagtgtcaaattttgatgaagtgttatctgaaggatcaccacttgacactgccactagatcagcacctatagagtctggcagtgtcttgctgacaaagaacacatcaacaaccaaaatggatagcatcccatctcctgctgggttgtcagaaagtgagggatcggctgtggctgaaagcaagtccaaggagaaaaccatgcatagtggtgaagtggggaacgagggtgcaaatacagcccataatgcaatgggattaatatttttgtcaaataaaaataggattcctttgaaagaagagctcgaagatggtggtgttcgtcgtcaagggaggagtggaaggggtgctatgcatgtcaaggggtgttctctaatgccaaaagaaaaactggtcactgcagaaacaagaaagccaataaaaggtggaagacctggatctgaaaagaacgagagtaagttggggcggccaccaatgaaaaaaggctctgaccgcaaagcttcatcctggcattcacaggctctaaatagtgatcttacagacataacaggtgaaccagaagatgaccaagaggagcttttagctgctgttaatgctgctcgcagtgctattgttagtgcctattctggccctttttggaagaaagtggaacccatgctaacttttatgagctcagaaaatttttctttcttaaaaaatcagatcaaccttgttgaagagcttgagatgagcatgtcctgcatgtatgacagtgaacatgatattatagcatcagttgatcacagaataatgtcaaagatggaggagcattcatctcagggacttgctctgtctaatttccccccctcatcccagcaaagtaaaactaatggagttggagcaaaaggattaatcggctgtttttctcatggtgacaaaatccatactggaccacaaaagctggaagctgataaatggtttaatgaaatggctccaatggcacacagactcctttcggctttaattatggaagatgacttgcctgataccaatggggtgcaaagcgatatacttgttgaatttccaaatagccacaacccttacactgtcaacggatacatggaaaatgaacttcaagctagtaccataacatctaattttgggctgagtgtggatttcgtgcactcaaacagtacttctgtggtacatcagagcatgtgcaatggttttacaagcaatttcaacaattcaaacagtgaaaattctgttcatagtgaggatttatcagatggactcaattttacagtatacacagaaagtggccctttgcatgacttgataccaccgattccacagcaatgtcaaaatccagggaaaaatttccctttatctccatatgagtatcaatatgggcagatgtctgtggaagataagattttaattgagctgcaaagtattggcatttgtccagagacagtgccaaagctagatgacggagaagatgacaacattaataaaatgatttcggagttgaggaaaaggctgcacgatcaggtgaaccaaaagaaatgtagattacataagctagataaatcaattcaagacacaaagaatattgaggagaggagcttggagcaacatgctatgaacaaactggttgaaagggcatacagaaaactcaagggtgggcgcattggctctagtcacaaggccggtgtcagtaaatctgccaataaagctgcgaaacagcttgccttggcttttgccaagcgtactcttgttcgatgccacaaatttgacgaaacagggaaaagctgcttcagtgagccttctctttggagtgtgctgtctgcacccttgccaagcagtgacgcgagattcacggagggtgtagagaggctgaagcatcagaagctcgacagaactccattttgatcaaggtggtgcgaaatggaaaaagggcgacagggaacgggatcacagcagggatgcgtctgcaaagggctctggactgaaatcagggcgccattcctcaggcggcagcggcaggagcggcggcggcgagcgcaagaacaagacgaagccaaagcaaaagctggctcagctatcgacttccggaaacgtgctgggtagagtggttgagccattctcatctccagcggcgcaagcgcaagagccccctgaacctgcaagcgagaagaagactcagcatccctctaggaacgtggccccgcggctgaccgtggatgctggactgccagcattgcctggattagatgacatattggacgtccctggagggctggatgggcagggcaacgacatcagctcgtggttcacggatggccttgacgactcgttgcaagacattgatctttcaggcgccctggagatcccggacgatgacctcacccagctgggttttatatgagaaggaagcacttgttgcttgctctgtgcatatatgttctttttttgggtgcttacctaatgtatggtagtagatataattaaccggtttaatctccctgccacaaccctgtaatcgaacctgcatggcatggaatggttagttgcagatgagttattcgattctcgtagcagcaagaacatgttgagatttgctaatggtatcatgtggttctgcctcctggattgtcctgtcggaatcctacagttcgtg

SEQ ID NO: 199697 - DNA, 4150 bp, Zea Mays
gtcctcctcttcccatttctgcttcctcctcacgggcgtgcgacgacgtcagcaaccccgccgagtacccctccttcccctcgcagtcgccgagggagcaattccgcccccaatcggccgcctgaacccttcttccttcccttcccgcggcatccgatgtgcgttgccgccgccgccgcgctcagatagcccagcctagctggcgacgacgaggagggggaccgtagccctaacgatccggtccccacatggcggggagctttcgcgagggcgcggggccgggggacacccacgctcccccgcccccgcccaccccacccttcttgcagttcctcgcgctcgacgcgctcgcctcctggggctccgaccccaagcagccgcactggcgccaccccgagctccgccgggcgctcgcctccaacgaccagaccgacgagctcaggcggatccgcgccagcgtccaggactccgcggtcaaggccaaggagaaggtcaggtcgctgcacgaggccatccagaagctcgacaagtacaagaacattgtcacacgcaagcgccagcgcgccaccgaggcgtcgtcctcgcccgacaagctcggggctgccggtgcctgctcctcgtccacaggcgcgctcaggatgggggcgcagaacaactctgctgtcttgagcaagcgcgtgcgctcctctctcgctgatgcccgggtggaaggacgtggtagtgttcctacaaggcaaggccctttggttagtaatgagaaaaattcacctgtggagaaggaaaagaacagtacaagaatatctgctatcgtctcaggactttctgatgaaaaattgcggggtttatctactggcagtgaagggtgggaaaaaaagatgaagcgtagacgctctgttggaacaatgctcagcagaggcagtgatgctgatcgagatgtcaaatccatgggtcagcatagaccagccaatgaagcacgcccacgatctagtgatggccttggatatagacatggagtttctgctggagcactagcaggtaacaagttggatggcacttctcagcagaacaacattgtatcctgcattctgcccaagtcagatgtcgattatgtggctcagccaaatgaaagaagagaacgccatgctggagttgaaaaggaaaggactacagtaaaaggaaacaaggtaaatacttctgatgatatgcaaaacggaagcttaagtcccctgcccaaggctaaagcatgcagggcaccaagaaccagttcacttgctataaactcatgttctaatttccaacgttcaactggaggaaatgatgaatgggaagaagcaccgtacccaaataaagtgtcacctttggcgggcatgacgaatcgcaaacgttccacacattcaaatgcttcctcacctcctattgcctgggtagggcaacgcccacagaagatgtcacggacaagaagagcaaatgttgtttctccagtgtcaaattttgatgaagtgttatctgaaggatcaccacttgacactgccactagatcagcacctatagagtctggcagtgtcttgctgacaaagaacacatcaacaaccaaaatggatagcatcccatctcctgctgggttgtcagaaagtgagggatcggctgtggctgaaagcaagtccaaggagaaaaccatgcatagtggtgaagtggggaacgagggtgcaaatacagcccataatgcaatgggattaatatttttgtcaaataaaaataggattcctttgaaagaagagctcgaagatggtggtgttcgtcgtcaagggaggagtggaaggggtgctatgcatgtcaaggggtgttctctaatgccaaaagaaaaactggtcactgcagaaacaagaaagccaataaaaggtggaagacctggatctgaaaagaacgagagtaagttggggcggccaccaatgaaaaaaggctctgaccgcaaagcttcatcctggcattcacaggctctaaatagtgatcttacagacataacaggtgaaccagaagatgaccaagaggagcttttagctgctgttaatgctgctcgcagtgctattgttagtgcctattctggccctttttggaagaaagtggaacccatgctaacttttatgagctcagaaaatttttctttcttaaaaaatcagatcaaccttgttgaagagcttgagatgagcatgtcctgcatgtatgacagtgaacatgatattatagcatcagttgatcacagaataatgtcaaagatggaggagcattcatctcagggacttgctctgtctaatttccccccctcatcccagcaaagtaaaactaatggagttggagcaaaaggattaatcggctgtttttctcatggtgacaaaatccatactggaccacaaaagctggaagctgataaatggtttaatgaaatggctccaatggcacacagactcctttcggctttaattatggaagatgacttgcctgataccaatggggtgcaaagcgatatacttgttgaatttccaaatagccacaacccttacactgtcaacggatacatggaaaatgaacttcaagctagtaccataacatctaattttgggctgagtgtggatttcgtgcactcaaacagtacttctgtggtacatcagagcatgtgcaatggttttacaagcaatttcaacaattcaaacagtgaaaattctgttcatagtgaggatttatcagatggactcaattttacagtatacacagaaagtggccctttgcatgacttgataccaccgattccacagcaatgtcaaaatccagggaaaaatttccctttatctccatatgagtatcaatatgggcagatgtctgtggaagataagattttaattgagctgcaaagtattggcatttgtccagagacagtgccaaagctagatgacggagaagatgacaacattaataaaatgatttcggagttgaggaaaaggctgcacgatcaggtgaaccaaaagaaatgtagattacataagctagataaatcaattcaagacacaaagaatattgaggagaggattacctgacaggagcttggagcaacatgctatgaacaaactggttgaaagggcatacagaaaactcaagggtgggcgcattggctctagtcacaaggccggtgtcagtaaatctgccaataaagctgcgaaacagcttgccttggcttttgccaagcgtactcttgttcgatgccacaaatttgacgaaacagggaaaagctgcttcagtgagccttctctttggagtgtgctgtctgcacccttgccaagcagtgacgcgagattcacggagggtgtagagaggctgaagcatcagaagctcgacagaactccattttgatcaaggtggtgcgaaatggaaaaagggcgacagggaacgggatcacagcagggatgcgtctgcaaagggctctggactgaaatcagggcgccattcctcaggcggcagcggcaggagcggcggcggcgagcgcaagaacaagacgaagccaaagcaaaagctggctcagctatcgacttccggaaacgtgctgggtagagtggttgagccattctcatctccagcggcgcaagcgcaagagccccctgaacctgcaagcgagaagaagactcagcatccctctaggaacgtggccccgcggctgaccgtggatgctggactgccagcattgcctggattagatgacatattggacgtccctggagggctggatgggcagggcaacgacatcagctcgtggttcacggatggccttgacgactcgttgcaagacattgatctttcaggcgccctggagatcccggacgatgacctcacccagctgggttttatatgagaaggaagcacttgttgcttgctctgtgcatatatgttctttttttgggtgcttacctaatgtatggtagtagatataattaaccggtttaatctccctgccacaaccctgtaatcgaacctgcatggcatggaatggttagttgcagatgagttattcgattctcgtagcagcaagaacatgttgagatttgctaatggtatcatgtggttctgcctcctggattgtcctgtcggaatcctacagttcgtg

SEQ ID NO: 199698 - DNA, 2450 bp, Zea Mays
ctaacacgagatccggcgacactggcccgcaatcaatctgtggctgagaccacgttcgggaggatgtctgatctcattggatcctttatggcatatcctaagaaggatgggcctatagaaaaatcgctgcgtcgccagacaagcagcacggatttaaggacaagaggctctgacggttctagcagtacgccttcgctgaagaaaaacgcctcggtatcatccgacatgagcgaccttgcctcacaaggttcgggaaatccagtgaggcgaactggtagctggtgtttcgacgagaaagttctgattcagtcactctacaaggttatggtttctgtatctgaaaacggtccgattattctttacataagggatgtggaccatttcctctggaaatcgcaaagaattcactcgatgttccagaaaatgttggccaagctatccggtcaagttttgatacttggttctcgactactcaatcctgacgctgataacagggatgccgatgagaggattagtaccctgtttccttaccatgttgacatcaaagctcccgaggaggagacccatctagactgctggaaaagccagattgaggaagacaagagaaaaatccagatgcaagataacagaaaccacatcatagaggtactctcggcaaatgatctagactgtgacgatctgagctcaatctgtgaagcagacactatggttctcagcaattacatagaggagatcatcgtatcagctgtctcctaccacttgattcacaacaaggaccctgaatacaggaatggaaagctcatgctatcatctaaaagtttgtcccatggtctaagcattttccaaggtagccatggtgggaaagacactctgaagttggaagaaacgaaggatggtttgaaaggagctcttgggtctaagaaaactgagacacttccggttggcgaaggtccagtaccgctgccaaaaccagaagttccagacaatgagtttgaaaagcgtatcagaccagaggtcattccggcaagtgagataggagtgacattcgatgacatcggagccctggcagatatcaaagagtctctccaggagctggtcatgcttcctcttcgacggcccgatctcttcaaaggagggctcctgaagccgtgcagagggattctgctgtttgggccacctggaaccgggaagaccatgcttgccaaggctatagcgaacgacgccggcgccagcttcatcaacgtatccatgtccaccatcacatcgaaatggttcggggaggacgagaaaaatgtccgggcgctgttcagtttggccgccaaggtagctcccaccattatttttgtggacgaggtagacagcatgctggggcagcgcgctcgctacggcgagcatgaggcgatgcggaagatcaagaacgagttcatgagccactgggacggtctcttgtcaaaaacaggcgaaaaaatcctcgttctcgccgcgacgaataggcctttcgaccttgatgaagccatcatcaggagattcgagcgcaggatcatggttgggcttccaactacggagagcagagagctgatcttgaggacgctgctttcaaaggagaaagttgatgaagatattgatttcaaggaacttgcggccatgacggaaggatacagcggcagtgatctcaagaatctctgtgtgactgctgcttaccgccctgttagggagctcctgaagatagaaagagagagggaactggagcgaagggaaaaggagtcaaaagacaaggcggcggcggcggagaattcagaagccccggagagtgagaagaaggagagctcagaaaccaaagaagctcggaagagcacgcagagtccagaaggcggcggcaaaggcgacgagggtccagacagcaaggcggagggcgagaaggaagcggccgttgttgaccttaggccactgacgatggaagacctgaggcaggcaaagaaccaggttgcagcgagcttcgccgccgagggtgccgtgatgaacgagctcaggcagtggaacgacctgtacggcgaaggggggtccaggaagaaacagcagctgacctacttcttgtagaggtgaagcatttggcaggtggtggagaggaacagagctgggcagacggtggacccatacttgatgaaccgagcatggtttcttcaagacgtgacgtgggcatgacgcatagtactagtctttgaggttccaggatccatgagatgagatgaggtcgatggtcaatttgtaggatcatgaactattattcttttacatgcatttgtacatgagcgctagactggttatgtatatctggattgattgaacagctcttgtgtttgagggtcattttagcttctcgtagactgctgtaattatatcatatatagtgagtatatatattcatagcgcaatgagcacaatatttgagt

SEQ ID NO: 199699 - DNA, 2274 bp, Zea Mays
gcagagtttagtgtagacagctcctacctagatcacacttactagcctccacccgtttcagactgctcggccatccgcattttctgtgaggcgaactggtagctggtgtttcgacgagaaagttctgattcagtcactctacaaggttatggtttctgtatctgaaaacggtccgattattctttacataagggatgtggaccatttcctctggaaatcgcaaagaattcactcgatgttccagaaaatgttggccaagctatccggtcaagttttgatacttggttctcgactactcaatcctgacgctgataacagggatgccgatgagaggattagtaccctgtttccttaccatgttgacatcaaagctcccgaggaggagacccatctagactgctggaaaagccagattgaggaagacaagagaaaaatccagatgcaagataacagaaaccacatcatagaggtactctcggcaaatgatctagactgtgacgatctgagctcaatctgtgaagcagacactatggttctcagcaattacatagaggagatcatcgtatcagctgtctcctaccacttgattcacaacaaggaccctgaatacaggaatggaaagctcatgctatcatctaaaagtttgtcccatggtctaagcattttccaaggtagccatggtgggaaagacactctgaagttggaagaaacgaaggatggtttgaaaggagctcttgggtctaagaaaactgagacacttccggttggcgaaggtccagtaccgctgccaaaaccagaagttccagacaatgagtttgaaaagcgtatcagaccagaggtcattccggcaagtgagataggagtgacattcgatgacatcggagccctggcagatatcaaagagtctctccaggagctggtcatgcttcctcttcgacggcccgatctcttcaaaggagggctcctgaagccgtgcagagggattctgctgtttgggccacctggaaccgggaagaccatgcttgccaaggctatagcgaacgacgccggcgccagcttcatcaacgtatccatgtccaccatcacatcgaaatggttcggggaggacgagaaaaatgtccgggcgctgttcagtttggccgccaaggtagctcccaccattatttttgtggacgaggtagacagcatgctggggcagcgcgctcgctacggcgagcatgaggcgatgcggaagatcaagaacgagttcatgagccactgggacggtctcttgtcaaaaacaggcgaaaaaatcctcgttctcgccgcgacgaataggcctttcgaccttgatgaagccatcatcaggagattcgagcgcaggatcatggttgggcttccaactacggagagcagagagctgatcttgaggacgctgctttcaaaggagaaagttgatgaagatattgatttcaaggaacttgcggccatgacggaaggatacagcggcagtgatctcaagaatctctgtgtgactgctgcttaccgccctgttagggagctcctgaagatagaaagagagagggaactggagcgaagggaaaaggagtcaaaagacaaggcggcggcggcggagaattcagaagccccggagagtgagaagaaggagagctcagaaaccaaagaagctcggaagagcacgcagagtccagaaggcggcggcaaaggcgacgagggtccagacagcaaggcggagggcgagaaggaagcggccgttgttgaccttaggccactgacgatggaagacctgaggcaggcaaagaaccaggttgcagcgagcttcgccgccgagggtgccgtgatgaacgagctcaggcagtggaacgacctgtacggcgaaggggggtccaggaagaaacagcagctgacctacttcttgtagaggtgaagcatttggcaggtggtggagaggaacagagctgggcagacggtggacccatacttgatgaaccgagcatggtttcttcaagacgtgacgtgggcatgacgcatagtactagtctttgaggttccaggatccatgagatgagatgaggtcgatggtcaatttgtaggatcatgaactattattcttttacatgcatttgtacatgagcgctagactggttatgtatatctggattgattgaacagctcttgtgtttgagggtcattttagcttctcgtagactgctgtaattatatcatatatagtgagtatatatattcatagcgcaatgagcacaatatttgagt

SEQ ID NO: 199700 - DNA, 4798 bp, Zea Mays
atgtcgatacatatttgcaagaacggttatatgccaggctatgaggtgtgggtgcaccatggttgggtcacccgcagatcaaggagtactggtgttggccttctgatggccgtgcgagggtccacatacatgatcaggcaatatataaaggagccaggattcaatgtagcgaatgagatggcatccatcaaccaggagataagacagattggtagaatgatggtcatatcaggcaatatattggagccgccggaatggattctgcaagcccaagacctggcctgtgatgtgcaggatttcacggatatctacacatggctgcaaagcaaatcgcggaggcgtgcccttgcacatataggctacatagcgcagctgaaggatcggatcagcagccttcgagagtggcaacagagaggaggcagcagcagcagcagcagccagcaggagcgtgctgctgccttgtccttctcgcggcgatcatgcgggccttgcgcccctgaggatgtgctagttggcattgatcagcccagaaaagaactttcggacctcattttcgaaagggaggatgttgtgcatatcgtgcaacagaagcccagggtggtctctgtcgttgggtatagtggcattggcaagacagccctggcaagagcagtctactacgaccgtagtgtccgttctgcctttgacgacgttgcttgggttgtggcatctgagtgcagccatgggtgcgaccttgtaagtaagatctgccagcaggtcaaggacgaacaagcagggaacggtgctgtcgtcgtccctgattgttataggttaaaagagattatgcgggataaaaggtttcttatcgttattgacgaccttcacggagctggcatgtggaacgatataaaaggtgtcttcagtgaaactcacagtggcagtcgaataatcgttaccacgagtattcagtcggtcgccgctgcctgcactcctgagccgcgatacatttacaggatgccaagtcttggtaatttggactctgaaaagctactgtggatgagggtcggcaggcatgcaagccgtacgcctgctctggagcatgctttaggcaacgacaccttgaaaaaatgcggcggtctacctctggcactgatcagtgttgccaatcatttgtgtcttgggaaagcattatttgaggagatggacagggttcttgccaaatgctatgacagcttgcctgacaatgctcacaggatgtgcttgctgtccctgagcacattccctcagggtcatgtgatgaagaggaagaggctaattagaagatggatagctgaaggattggctgtcgtcggagactgtgagctcagtgctgaacaagttgccggtaacatatttgatgtgttgattgacaggaacgttactgagcctgtgctgactgctggccacggttctcgtagtaaggtcaaggcatgcttagttcttggtgtgatcaaggacttcatcaacaaaacggcagtctcaaatgagactgtagctataatccagaacgatgagcttctccttcccaacaggatgctggtcgcccatcgccctgttcgtcgactgcttgttcatggaggcacaacaaagaaaagtgaagctgttgcaaaggcgatcggactggatcaggtcaggtcgctgacaatctgcaatgctgtgccctttgacttccagggctgctggttgctgcgggtcttggacctggaggcttgccaggggatcgacaagagcatccttggcagcatatgcaagctggtgtttctcaagtacctgagccttaggggcaccgatgtttacggaatacccaagaaagtaaaaaagctccagtgtttggagacgctggacctcagggacacacgggttgaagaactgcccatccaagtcttgatgctcccacggttggcccatctgtttggcaagtttgagctacctccacagctcaagcatggtcatcgaaccgcaaggaggaggaggagtaggctgcaggcatttttctcccagagaagcaggctgcagactctttcaggattcgtcatggtggatgatagcaacagcttcgagcacatgatgataaccataaagtcactgaggaaggttaaggtatggtgcaagaattcaatctcctcccaccaagaacgccatctcgcttcttcccttcagcaacggctagtagcaggaaacagtaatcccctagaatctctgtcaattgattttggcaatgaatccatcaatttcctcaatgatgttggagctatcagtgcacttattggctctatgaagctacagggaaggctaacctcgctccctagcttcatgacttcgtacgatactacactctcccagctgcagctgtcctcaactggtttgggcatagaagccttgtccctgctgcagatcttacgtcggctggtttctctgaagctcgctcaggatggtgatggattttggggtgactgcttcgctgttaagaaggatggatttccaagccttttacgcctgtgcattcaggccagggagcttccccagttgcacatccatgaaggaggcatgagctctctcacctccctcgaactactctgtcccatgttcgctagtcgcggtcaatctgactctgactctgactctgactctgacaatctgtccccagttgcatttcggtacgcgtacgcggaaacctattcagagaagagatccaaacaagttctttcggtagagaagcccaaagcagttgatcccgggatcagcttcaaggaaccaagttctgagacaagatcagaaggaactgaaattcaggagattgattcccctaaaacgtccaaggaggctggtcccagcataggcttcaaggaaccaagttctgagacaagatcagaaggaactgaaattcaggagattgattcccctaaaacgtccaaggaggctggtcccagcataggcttcaaggatattattcttccggagaacacattcagaagaaacttttcgaagcaagtcaaaagtagatttgatctgaaacaacacttcaagggaatggagtacctccaatgtctcaatgagctggtactacatcgttctgttagcgacgaggtattggatgcctggacaaaacgagcaagcagtcacatcaataggccaaaggtgacaaggcaatgcacaagagcagcgctgtcgattggtagaggcccgggaacagcgaagcacgagaaagaagggcagcacagaagccagctcatgaaaaatagaggttcagaaacagcaatccatgaggaggtagcagagcaacacagctcagtagaaacgagccgtgaggaagcaggattattccaagaacagacctcagatacaagtcacaaagaagaagaagaagaagaaggagaaggagaagaagaagaagaagaagaagaagaagaagaagaagaagaatgtactagtgaagtaggagcgggtaaacacagctcagtaggaacgagccgtgaggaagcaggattattccaagaacagacctcaggtcacaaagaagaagaagaagaatatatgagtgaagactgggcattaagtcaaccatgcgacatgctcattggcaacaggatgaccgtacgatgtctaggatggccagattcttggcgactacgaagtggcatgatatcttcccccatgctgatctgcaggccattgggtccgtgacctcagatcattgtcccttacttatgcaaggtttatctacctttagtttctatagggggtttagatttgaagttttttggacaaaaattgatgggttcaatgaggtggttcagcaagcttggacatctagtgttcgttcttccgatgccattcttaggctgcatgtgaagatgatccgcacggctaaagctctattgatctggagacgaaagacagtaggcaattttaaagatcaattagcaatcattcagaccgtccttactcttcttgagaaagcacaggaatccaggcaactttccggggacgagctagagttcagaagaagtctaaaaatgaaaatccttgggctagtgacagtccaaaaggcaagagctagacaacattccagacttgtctggatgcgtctgagagatgcaaacacaaaaaaaattcatctgatggcaaataatagaagaaggaaaattttcatcagatcgctggttcgtgatgacaggttgctcaccagtcaggaagacaaactgcatgaggcccaccatcatttcactgaagctattggtagaaggggtgagagacagagggccgttcggtggggtaacctaggctatagtccatttgacttatcagatctggatttcttgttcaacgaggatgagattaaaaatgtggttatagggatgcactctgaaaaggcgccgggtcgagatggttttatagggatcttctataagagttgttttgagctgattaaggatgatctatcaagtgcaattcatgatttctatcaccatagatgcaaaaacctaaacctcgttaatgaggcaaatatcgcgcttttacaaaaaaagggagggtgctgacaggattgacatgtttaggccgatcagtctcatcaatagcttcataaaaatattgaccaagattttagcaaacagacttgcgccaagaatgaatgagattgtctccactgcccaaaacgcgttcattcaaaaacgttcaattcatgataattttctctatgtccaaaaagttattcagaaacttcataggaacaatcagccaaccctttttgtcaaacttgacatatcaaaagctttcg

SEQ ID NO: 199701 - DNA, 4630 bp, Zea Mays
atgtcgatacatatttgcaagaacggttatatgccaggctatgaggtgtgggtgcaccatggttgggtcacccgcagatcaaggagtactggtgttggccttctgatggccgtgcgagggtccacatacatgatcaggcaatatataaaggagccaggattcaatgtagcgaatgagatggcatccatcaaccaggagataagacagattggtagaatgatggtcatatcaggcaatatattggagccgccggaatggattctgcaagcccaagacctggcctgtgatgtgcaggatttcacggatatctacacatggctgcaaagcaaatcgcggaggcgtgcccttgcacatataggctacatagcgcagctgaaggatcggatcagcagccttcgagagtggcaacagagaggaggcagcagcagcagcagcagccagcaggagcgtgctgctgccttgtccttctcgcggcgatcatgcgggccttgcgcccctgaggatgtgctagttggcattgatcagcccagaaaagaactttcggacctcattttcgaaagggaggatgttgtgcatatcgtgcaacagaagcccagggtggtctctgtcgttgggtatagtggcattggcaagacagccctggcaagagcagtctactacgaccgtagtgtccgttctgcctttgacgacgttgcttgggttgtggcatctgagtgcagccatgggtgcgaccttgtaagtaagatctgccagcaggtcaaggacgaacaagcagggaacggtgctgtcgtcgtccctgattgttataggttaaaagagattatgcgggataaaaggtttcttatcgttattgacgaccttcacggagctggcatgtggaacgatataaaaggtgtcttcagtgaaactcacagtggcagtcgaataatcgttaccacgagtattcagtcggtcgccgctgcctgcactcctgagccgcgatacatttacaggatgccaagtcttggtaatttggactctgaaaagctactgtggatgagggtcggcaggcatgcaagccgtacgcctgctctggagcatgctttaggcaacgacaccttgaaaaaatgcggcggtctacctctggcactgatcagtgttgccaatcatttgtgtcttgggaaagcattatttgaggagatggacagggttcttgccaaatgctatgacagcttgcctgacaatgctcacaggatgtgcttgctgtccctgagcacattccctcagggtcatgtgatgaagaggaagaggctaattagaagatggatagctgaaggattggctgtcgtcggagactgtgagctcagtgctgaacaagttgccggtaacatatttgatgtgttgattgacaggaacgttactgagcctgtgctgactgctggccacggttctcgtagtaaggtcaaggcatgcttagttcttggtgtgatcaaggacttcatcaacaaaacggcagtctcaaatgagactgtagctataatccagaacgatgagcttctccttcccaacaggatgctggtcgcccatcgccctgttcgtcgactgcttgttcatggaggcacaacaaagaaaagtgaagctgttgcaaaggcgatcggactggatcaggtcaggtcgctgacaatctgcaatgctgtgccctttgacttccagggctgctggttgctgcgggtcttggacctggaggcttgccaggggatcgacaagagcatccttggcagcatatgcaagctggtgtttctcaagtacctgagccttaggggcaccgatgtttacggaatacccaagaaagtaaaaaagctccagtgtttggagacgctggacctcagggacacacgggttgaagaactgcccatccaagtcttgatgctcccacggttggcccatctgtttggcaagtttgagctacctccacagctcaagcatggtcatcgaaccgcaaggaggaggaggagtaggctgcaggcatttttctcccagagaagcaggctgcagactctttcaggattcgtcatggtggatgatagcaacagcttcgagcacatgatgataaccataaagtcactgaggaaggttaaggtatggtgcaagaattcaatctcctcccaccaagaacgccatctcgcttcttcccttcagcaacggctagtagcaggaaacagtaatcccctagaatctctgtcaattgattttggcaatgaatccatcaatttcctcaatgatgttggagctatcagtgcacttattggctctatgaagctacagggaaggctaacctcgctccctagcttcatgacttcgtacgatactacactctcccagctgcagctgtcctcaactggtttgggcatagaagccttgtccctgctgcagatcttacgtcggctggtttctctgaagctcgctcaggatggtgatggattttggggtgactgcttcgctgttaagaaggatggatttccaagccttttacgcctgtgcattcaggccagggagcttccccagttgcacatccatgaaggaggcatgagctctctcacctccctcgaactactctgtcccatgttcgctagtcgcggtcaatctgactctgactctgactctgactctgacaatctgtccccagttgcatttcggtacgcgtacgcggaaacctattcagagaagagatccaaacaagttctttcggtagagaagcccaaagcagttgatcccgggatcagcttcaaggaaccaagttctgagacaagatcagaaggaactgaaattcaggagattgattcccctaaaacgtccaaggaggctggtcccagcataggcttcaaggaaccaagttctgagacaagatcagaaggaactgaaattcaggagattgattcccctaaaacgtccaaggaggctggtcccagcataggcttcaaggatattattcttccggagaacacattcagaagaaacttttcgaagcaagtcaaaagtagatttgatctgaaacaacacttcaagggaatggagtacctccaatgtctcaatgagctggtactacatcgttctgttagcgacgaggtattggatgcctggacaaaacgagcaagcagtcacatcaataggccaaaggtgacaaggcaatgcacaagagcagcgctgtcgattggtagaggcccgggaacagcgaagcacgagaaagaagggcagcacagaagccagctcatgaaaaatagaggttcagaaacagcaatccatgaggaggtagcagagcaacacagctcagtagaaacgagccgtgaggaagcaggattattccaagaacagacctcaggtcacaaagaagaagaagaagaatatatgagtgaagactgggcattaagtcaaccatgcgacatgctcattggcaacaggatgaccgtacgatgtctaggatggccagattcttggcgactacgaagtggcatgatatcttcccccatgctgatctgcaggccattgggtccgtgacctcagatcattgtcccttacttatgcaaggtttatctacctttagtttctatagggggtttagatttgaagttttttggacaaaaattgatgggttcaatgaggtggttcagcaagcttggacatctagtgttcgttcttccgatgccattcttaggctgcatgtgaagatgatccgcacggctaaagctctattgatctggagacgaaagacagtaggcaattttaaagatcaattagcaatcattcagaccgtccttactcttcttgagaaagcacaggaatccaggcaactttccggggacgagctagagttcagaagaagtctaaaaatgaaaatccttgggctagtgacagtccaaaaggcaagagctagacaacattccagacttgtctggatgcgtctgagagatgcaaacacaaaaaaaattcatctgatggcaaataatagaagaaggaaaattttcatcagatcgctggttcgtgatgacaggttgctcaccagtcaggaagacaaactgcatgaggcccaccatcatttcactgaagctattggtagaaggggtgagagacagagggccgttcggtggggtaacctaggctatagtccatttgacttatcagatctggatttcttgttcaacgaggatgagattaaaaatgtggttatagggatgcactctgaaaaggcgccgggtcgagatggttttatagggatcttctataagagttgttttgagctgattaaggatgatctatcaagtgcaattcatgatttctatcaccatagatgcaaaaacctaaacctcgttaatgaggcaaatatcgcgcttttacaaaaaaagggagggtgctgacaggattgacatgtttaggccgatcagtctcatcaatagcttcataaaaatattgaccaagattttagcaaacagacttgcgccaagaatgaatgagattgtctccactgcccaaaacgcgttcattcaaaaacgttcaattcatgataattttctctatgtccaaaaagttattcagaaacttcataggaacaatcagccaaccctttttgtcaaacttgacatatcaaaagctttcg

SEQ ID NO: 199702 - DNA, 4759 bp, Zea Mays
atgtcgatacatatttgcaagaacggttatatgccaggctatgaggtgtgggtgcaccatggttgggtcacccgcagatcaaggagtactggtgttggccttctgatggccgtgcgagggtccacatacatgatcaggcaatatataaaggagccaggattcaatgtagcgaatgagatggcatccatcaaccaggagataagacagattggtagaatgatggtcatatcaggcaatatattggagccgccggaatggattctgcaagcccaagacctggcctgtgatgtgcaggatttcacggatatctacacatggctgcaaagcaaatcgcggaggcgtgcccttgcacatataggctacatagcgcagctgaaggatcggatcagcagccttcgagagtggcaacagagaggaggcagcagcagcagcagcagccagcaggagcgtgctgctgccttgtccttctcgcggcgatcatgcgggccttgcgcccctgaggatgtgctagttggcattgatcagcccagaaaagaactttcggacctcattttcgaaagggaggatgttgtgcatatcgtgcaacagaagcccagggtggtctctgtcgttgggtatagtggcattggcaagacagccctggcaagagcagtctactacgaccgtagtgtccgttctgcctttgacgacgttgcttgggttgtggcatctgagtgcagccatgggtgcgaccttgtaagtaagatctgccagcaggtcaaggacgaacaagcagggaacggtgctgtcgtcgtccctgattgttataggttaaaagagattatgcgggataaaaggtttcttatcgttattgacgaccttcacggagctggcatgtggaacgatataaaaggtgtcttcagtgaaactcacagtggcagtcgaataatcgttaccacgagtattcagtcggtcgccgctgcctgcactcctgagccgcgatacatttacaggatgccaagtcttggtaatttggactctgaaaagctactgtggatgagggtcggcaggcatgcaagccgtacgcctgctctggagcatgctttaggcaacgacaccttgaaaaaatgcggcggtctacctctggcactgatcagtgttgccaatcatttgtgtcttgggaaagcattatttgaggagatggacagggttcttgccaaatgctatgacagcttgcctgacaatgctcacaggatgtgcttgctgtccctgagcacattccctcagggtcatgtgatgaagaggaagaggctaattagaagatggatagctgaaggattggctgtcgtcggagactgtgagctcagtgctgaacaagttgccggtaacatatttgatgtgttgattgacaggaacgttactgagcctgtgctgactgctggccacggttctcgtagtaaggtcaaggcatgcttagttcttggtgtgatcaaggacttcatcaacaaaacggcagtctcaaatgagactgtagctataatccagaacgatgagcttctccttcccaacaggatgctggtcgcccatcgccctgttcgtcgactgcttgttcatggaggcacaacaaagaaaagtgaagctgttgcaaaggcgatcggactggatcagggctgctggttgctgcgggtcttggacctggaggcttgccaggggatcgacaagagcatccttggcagcatatgcaagctggtgtttctcaagtacctgagccttaggggcaccgatgtttacggaatacccaagaaagtaaaaaagctccagtgtttggagacgctggacctcagggacacacgggttgaagaactgcccatccaagtcttgatgctcccacggttggcccatctgtttggcaagtttgagctacctccacagctcaagcatggtcatcgaaccgcaaggaggaggaggagtaggctgcaggcatttttctcccagagaagcaggctgcagactctttcaggattcgtcatggtggatgatagcaacagcttcgagcacatgatgataaccataaagtcactgaggaaggttaaggtatggtgcaagaattcaatctcctcccaccaagaacgccatctcgcttcttcccttcagcaacggctagtagcaggaaacagtaatcccctagaatctctgtcaattgattttggcaatgaatccatcaatttcctcaatgatgttggagctatcagtgcacttattggctctatgaagctacagggaaggctaacctcgctccctagcttcatgacttcgtacgatactacactctcccagctgcagctgtcctcaactggtttgggcatagaagccttgtccctgctgcagatcttacgtcggctggtttctctgaagctcgctcaggatggtgatggattttggggtgactgcttcgctgttaagaaggatggatttccaagccttttacgcctgtgcattcaggccagggagcttccccagttgcacatccatgaaggaggcatgagctctctcacctccctcgaactactctgtcccatgttcgctagtcgcggtcaatctgactctgactctgactctgactctgacaatctgtccccagttgcatttcggtacgcgtacgcggaaacctattcagagaagagatccaaacaagttctttcggtagagaagcccaaagcagttgatcccgggatcagcttcaaggaaccaagttctgagacaagatcagaaggaactgaaattcaggagattgattcccctaaaacgtccaaggaggctggtcccagcataggcttcaaggaaccaagttctgagacaagatcagaaggaactgaaattcaggagattgattcccctaaaacgtccaaggaggctggtcccagcataggcttcaaggatattattcttccggagaacacattcagaagaaacttttcgaagcaagtcaaaagtagatttgatctgaaacaacacttcaagggaatggagtacctccaatgtctcaatgagctggtactacatcgttctgttagcgacgaggtattggatgcctggacaaaacgagcaagcagtcacatcaataggccaaaggtgacaaggcaatgcacaagagcagcgctgtcgattggtagaggcccgggaacagcgaagcacgagaaagaagggcagcacagaagccagctcatgaaaaatagaggttcagaaacagcaatccatgaggaggtagcagagcaacacagctcagtagaaacgagccgtgaggaagcaggattattccaagaacagacctcagatacaagtcacaaagaagaagaagaagaagaaggagaaggagaagaagaagaagaagaagaagaagaagaagaagaagaagaatgtactagtgaagtaggagcgggtaaacacagctcagtaggaacgagccgtgaggaagcaggattattccaagaacagacctcagatacaggtcacaaagaagaagaagaagaatatatgagtgaagactgggcattaagtcaaccatgcgacatgctcattggcaacaggatgaccgtacgatgtctaggatggccagattcttggcgactacgaagtggcatgatatcttcccccatgctgatctgcaggccattgggtccgtgacctcagatcattgtcccttacttatgcaaggtttatctacctttagtttctatagggggtttagatttgaagttttttggacaaaaattgatgggttcaatgaggtggttcagcaagcttggacatctagtgttcgttcttccgatgccattcttaggctgcatgtgaagatgatccgcacggctaaagctctattgatctggagacgaaagacagtaggcaattttaaagatcaattagcaatcattcagaccgtccttactcttcttgagaaagcacaggaatccaggcaactttccggggacgagctagagttcagaagaagtctaaaaatgaaaatccttgggctagtgacagtccaaaaggcaagagctagacaacattccagacttgtctggatgcgtctgagagatgcaaacacaaaaaaaattcatctgatggcaaataatagaagaaggaaaattttcatcagatcgctggttcgtgatgacaggttgctcaccagtcaggaagacaaactgcatgaggcccaccatcatttcactgaagctattggtagaaggggtgagagacagagggccgttcggtggggtaacctaggctatagtccatttgacttatcagatctggatttcttgttcaacgaggatgagattaaaaatgtggttatagggatgcactctgaaaaggcgccgggtcgagatggttttatagggatcttctataagagttgttttgagctgattaaggatgatctatcaagtgcaattcatgatttctatcaccatagatgcaaaaacctaaacctcgttaatgaggcaaatatcgcgcttttacaaaaaaagggagggtgctgacaggattgacatgtttaggccgatcagtctcatcaatagcttcataaaaatattgaccaagattttagcaaacagacttgcgccaagaatgaatgagattgtctccactgcccaaaacgcgttcattcaaaaacgttcaattcatgataattttctctatgtccaaaaagttattcagaaacttcataggaacaatcagccaaccctttttgtcaaacttgacatatcaaaagctttcg

SEQ ID NO: 199703 - DNA, 4636 bp, Zea Mays
atgtcgatacatatttgcaagaacggttatatgccaggctatgaggtgtgggtgcaccatggttgggtcacccgcagatcaaggagtactggtgttggccttctgatggccgtgcgagggtccacatacatgatcaggcaatatataaaggagccaggattcaatgtagcgaatgagatggcatccatcaaccaggagataagacagattggtagaatgatggtcatatcaggcaatatattggagccgccggaatggattctgcaagcccaagacctggcctgtgatgtgcaggatttcacggatatctacacatggctgcaaagcaaatcgcggaggcgtgcccttgcacatataggctacatagcgcagctgaaggatcggatcagcagccttcgagagtggcaacagagaggaggcagcagcagcagcagcagccagcaggagcgtgctgctgccttgtccttctcgcggcgatcatgcgggccttgcgcccctgaggatgtgctagttggcattgatcagcccagaaaagaactttcggacctcattttcgaaagggaggatgttgtgcatatcgtgcaacagaagcccagggtggtctctgtcgttgggtatagtggcattggcaagacagccctggcaagagcagtctactacgaccgtagtgtccgttctgcctttgacgacgttgcttgggttgtggcatctgagtgcagccatgggtgcgaccttgtaagtaagatctgccagcaggtcaaggacgaacaagcagggaacggtgctgtcgtcgtccctgattgttataggttaaaagagattatgcgggataaaaggtttcttatcgttattgacgaccttcacggagctggcatgtggaacgatataaaaggtgtcttcagtgaaactcacagtggcagtcgaataatcgttaccacgagtattcagtcggtcgccgctgcctgcactcctgagccgcgatacatttacaggatgccaagtcttggtaatttggactctgaaaagctactgtggatgagggtcggcaggcatgcaagccgtacgcctgctctggagcatgctttaggcaacgacaccttgaaaaaatgcggcggtctacctctggcactgatcagtgttgccaatcatttgtgtcttgggaaagcattatttgaggagatggacagggttcttgccaaatgctatgacagcttgcctgacaatgctcacaggatgtgcttgctgtccctgagcacattccctcagggtcatgtgatgaagaggaagaggctaattagaagatggatagctgaaggattggctgtcgtcggagactgtgagctcagtgctgaacaagttgccggtaacatatttgatgtgttgattgacaggaacgttactgagcctgtgctgactgctggccacggttctcgtagtaaggtcaaggcatgcttagttcttggtgtgatcaaggacttcatcaacaaaacggcagtctcaaatgagactgtagctataatccagaacgatgagcttctccttcccaacaggatgctggtcgcccatcgccctgttcgtcgactgcttgttcatggaggcacaacaaagaaaagtgaagctgttgcaaaggcgatcggactggatcaggtcaggtcgctgacaatctgcaatgctgtgccctttgacttccagggctgctggttgctgcgggtcttggacctggaggcttgccaggggatcgacaagagcatccttggcagcatatgcaagctggtgtttctcaagtacctgagccttaggggcaccgatgtttacggaatacccaagaaagtaaaaaagctccagtgtttggagacgctggacctcagggacacacgggttgaagaactgcccatccaagtcttgatgctcccacggttggcccatctgtttggcaagtttgagctacctccacagctcaagcatggtcatcgaaccgcaaggaggaggaggagtaggctgcaggcatttttctcccagagaagcaggctgcagactctttcaggattcgtcatggtggatgatagcaacagcttcgagcacatgatgataaccataaagtcactgaggaaggttaaggtatggtgcaagaattcaatctcctcccaccaagaacgccatctcgcttcttcccttcagcaacggctagtagcaggaaacagtaatcccctagaatctctgtcaattgattttggcaatgaatccatcaatttcctcaatgatgttggagctatcagtgcacttattggctctatgaagctacagggaaggctaacctcgctccctagcttcatgacttcgtacgatactacactctcccagctgcagctgtcctcaactggtttgggcatagaagccttgtccctgctgcagatcttacgtcggctggtttctctgaagctcgctcaggatggtgatggattttggggtgactgcttcgctgttaagaaggatggatttccaagccttttacgcctgtgcattcaggccagggagcttccccagttgcacatccatgaaggaggcatgagctctctcacctccctcgaactactctgtcccatgttcgctagtcgcggtcaatctgactctgactctgactctgactctgacaatctgtccccagttgcatttcggtacgcgtacgcggaaacctattcagagaagagatccaaacaagttctttcggtagagaagcccaaagcagttgatcccgggatcagcttcaaggaaccaagttctgagacaagatcagaaggaactgaaattcaggagattgattcccctaaaacgtccaaggaggctggtcccagcataggcttcaaggaaccaagttctgagacaagatcagaaggaactgaaattcaggagattgattcccctaaaacgtccaaggaggctggtcccagcataggcttcaaggatattattcttccggagaacacattcagaagaaacttttcgaagcaagtcaaaagtagatttgatctgaaacaacacttcaagggaatggagtacctccaatgtctcaatgagctggtactacatcgttctgttagcgacgaggtattggatgcctggacaaaacgagcaagcagtcacatcaataggccaaaggtgacaaggcaatgcacaagagcagcgctgtcgattggtagaggcccgggaacagcgaagcacgagaaagaagggcagcacagaagccagctcatgaaaaatagaggttcagaaacagcaatccatgaggaggtagcagagcaacacagctcagtagaaacgagccgtgaggaagcaggattattccaagaacagacctcagatacaggtcacaaagaagaagaagaagaatatatgagtgaagactgggcattaagtcaaccatgcgacatgctcattggcaacaggatgaccgtacgatgtctaggatggccagattcttggcgactacgaagtggcatgatatcttcccccatgctgatctgcaggccattgggtccgtgacctcagatcattgtcccttacttatgcaaggtttatctacctttagtttctatagggggtttagatttgaagttttttggacaaaaattgatgggttcaatgaggtggttcagcaagcttggacatctagtgttcgttcttccgatgccattcttaggctgcatgtgaagatgatccgcacggctaaagctctattgatctggagacgaaagacagtaggcaattttaaagatcaattagcaatcattcagaccgtccttactcttcttgagaaagcacaggaatccaggcaactttccggggacgagctagagttcagaagaagtctaaaaatgaaaatccttgggctagtgacagtccaaaaggcaagagctagacaacattccagacttgtctggatgcgtctgagagatgcaaacacaaaaaaaattcatctgatggcaaataatagaagaaggaaaattttcatcagatcgctggttcgtgatgacaggttgctcaccagtcaggaagacaaactgcatgaggcccaccatcatttcactgaagctattggtagaaggggtgagagacagagggccgttcggtggggtaacctaggctatagtccatttgacttatcagatctggatttcttgttcaacgaggatgagattaaaaatgtggttatagggatgcactctgaaaaggcgccgggtcgagatggttttatagggatcttctataagagttgttttgagctgattaaggatgatctatcaagtgcaattcatgatttctatcaccatagatgcaaaaacctaaacctcgttaatgaggcaaatatcgcgcttttacaaaaaaagggagggtgctgacaggattgacatgtttaggccgatcagtctcatcaatagcttcataaaaatattgaccaagattttagcaaacagacttgcgccaagaatgaatgagattgtctccactgcccaaaacgcgttcattcaaaaacgttcaattcatgataattttctctatgtccaaaaagttattcagaaacttcataggaacaatcagccaaccctttttgtcaaacttgacatatcaaaagctttcg

SEQ ID NO: 199704 - DNA, 5260 bp, Zea Mays
atcgcgcggtgcacgttctgccgctccgctcacgcccgcggccgaacgctcccccgcaccttccatcctccgcgcagccacagctgcgattccctgctccccgcaccttccatcctctgcgcagccacagccgcgattcccgccgccccgccgcgctcaccttccctcccgcggcagagtgctccctcgacggggccgccccaaccatcgccctcctcatccgccatcgcgatccactcctcgacgcaatccatctaccccacagaactgctgccggcgtggcagatctcctcctcggcacctagatctcctcggcgcgatcaacggctgagcccgctgcccccaccacacaaccgatatgctctccatggaaggtcagggacctgctcgcccatgatctccatggaaggtggtctactgtcgacggcctctccctcgtgctccttcgtcaaccccgtccgccgcgccgccgagccccgagatcgcgccgatccgccattctcgcgccctcgccccgacacgcgctcaccaccggccctcaccaacctccactcgcgttccccacaccaccctccaccccatccgcgtccgccccatccgtagcacgcgggctgcagccgccccatccctaaaatgtgggcgctggcgctaccacggctccgcaccatgcctccgcgctgccagacagcgccgggcgataccatgcccccaccccggcttcttcctgccagtgtaatcggccactacttctccactgctgctcgccgtctcctcaaccaccgctgcgccacacaatcctcccgcgacgtgtctgattcaagccaggatgtctcacaggaggagcagcggaagcccgaaccgaatccaaccgagtcatctcaacgactccgccagtttccaatcgccccttttttaggcgttcaagttccttcgagatgatgacaagcagaggagagagatagcgtctccttcaatccctctggcgacaccaacaacgcatccccgtggccatcctcgattctccttgccaaggaggcgacagccaagtcgtcgcggtcacggccggcgatccactcgagggtgttcctggtgagtagcaccactgcggtggggatcggggatgggggaggcggcaatggcgatggcggggtgcagctcgccgacaaccttaagatcttcaaggctgacaacttcgatctcgacgtctagattccttccaaggctctgtgcagctgttcatccatttctcccttcgatgtcggtgtttgtccctgctatgtgtgttggatcaccattgacatatatgtggaactgcctaaggaccacttcaaatgtgtatgtagcagcttcagcacagcaaccagcaatggccccatagagagaatgcagataagccatcttcagtatgccatacactccatagaatacaacgccagaggatgccatactgataagagaaggcaccaatcccttatacagcgagaagaatccttcagtttggatcatgtggcgggcaacaccaatgaccccacctaaagcttcaccaccaggagcatccatctttgtcctgatctgaaaccaacagctcaaatcaggttgattagcccttgacatttatcaccaagggacaaagcacactaactgctttatactctgggacataaatactaggatcttacatcgtttctggacaacactacagggatcttgtgaagacataggatggttgcaaagaactcgggcatcacttcgttcagttgatgggacaggtcacttcaaggagattttgcatgagataaggtggaacaatcacttctcatcacaggttttggatatgaacatgatgatgctaggatgaccaatataaatttgtttaaggaatttactgccctaagcagggtaagtgtttcctgaactacaattgttttttttggctttttgcagatctgcacatctgaatttcctattatcctgttgggctgcctcttttttggagtgactgtagcaaccacttctaattcattttcaattgtattgaactggatgttgaccttcctagcataattagctctattttttaaaaaaatagttcattatgtatgtttctattttttatggtaccgcctatgtttatataaatttagcctagcactgcttgaataacaagtgattgaatgaggctcatatgcaaccattaaatcaatatttatgaaccaatgtttgttaaagtaataaaacatttacaaggaccatcgatgacctcaagaagctggtggtggcgtagatgggaacgcaccccgagaagatttgcatctagaggtggtgaccccacctctgtcctcaaccgccacctcgtacctcgtcttcggcgccgccggctcctgccccccttggcacgccttcggggtcctcgctggcggcaagcacctccgtcccggaggcatctgccgctgcagcatagaccaccgcgtcctcgctcagcagcaccgatgtcgatgatggcaacaaggaggacggctccgcgagcacccccgagatctgctgctgccactcccacgcagctcttgcttgtgagatctgtgtgcaggttgatgtcctcgtggcgccacgccgacctcaccgccaccaagcgcgccacccatgtcctcaccgacctcgccaaaaactataagaataggtgtagtcactgtcggggtgtacatccaattgagttttgagttggtgtttagctttcccttaccagggacggatcaaagcaccgtaataagtgtcgatatagctctttcaattgcgcctattgttttgtgcgggctatatggatcaaggaaccctctttgcagcagaggtttgttttgtgttctgctgctagtagtcgcatgtcagtttaatcttttgagttctggaagctgttggtcccttaggtgtttgggagatccttttgaatcgaagcacacacactcaggtgctatgacctttggcatttcatagttgcatatttaactggtgtgcgaagagcaccaggatagcacccttgcagcaggaacttacttttggttgcttttctgttgcctgtcatatcccgatatttgtttcctgcaaatttactttgtttaattgtattctattgattttacagcttttgtacttgtacagttacattgtcatctggtttctattgcacgtgtagctgattagttgtagtcactatcttgcaagcatagatattagggaggtattatgtccagtcaagttttgtgttggctatgtgtagcgaattaggattgcttttcctgggatggatcagagcacatgtactgtggcgatatagttgtttcaatagtatagttgccaaattttatgtgtgtgctatatagaccagggaacccacttagaagcagaaaattttctgtgtgcgcgcgaaattttctgtgtgtgctaacaaattgcaggcaaccatcttaacaacaaaagaggctcgtacaatagcagagatgatgctaaaccacttgtgcatgcaaagtatcaaaaaggagaccagacacatgttgatgaaacatctaaaaaggtgttggcaaatcttcattggtgcatctcttactgaaagattctgcagtggctcgaccagcccaaacaattgggtgtgcagttggtgttaaacatattacttacagtagcccagggagttcatctaatagcgtcaagggtgatgctgaaaggaacttctttgttgagctttgggatgtttctggacatgagcgctacaaagagtgccgttcacttttttattcacaaattaatggtgtcatatttgtttatgacctctcccagaggaaaacaaagacaaatttgaacaagtgggcagtggaggtttctgaatctgggaccttttcagctcctcttgggtctggtggtcccggtggccttccagttccttacctagttattgccaacaaagtggatattgctccaagagatggtagaagagtgagcagtggtaatcttgttgatgttgctcgtcaatgggttgaaaaacaaggtctgcttccatccagtgaagtgcttccacttgcagataactttcctggcaattctggtttgctcacggctgccaaagaggcaagatatgataaagaagctctaatcaagttcttccgcatgttgataaggagaaggtatttttcgaatgagcttcctgcccctagcccatggtcactcactcccagggaagataccattcttcccgtagaaactgtgaacgatgatgacatgttccaaagaaaaagctacggcggacagagctacaaatacaatggggttaccccactgcctgcacagcggaacctaactccgccccccacactctatccacagcagccaatgtcctcttcatcagaaaactacagataccacagattttcctcttcgtcaatacctgattcaagtggtggttcaaaaagccgagcgaaccttaatatatgatgggatatgtaagtccttatccattatcacctggagtgtgggaaaaaaacatgacacctgggttttttggttctcaggtttttgatctttttgagttgttcatctgtctttgatttgattgtaatatgtgcatgttgacagggcgccagagcattatgtttgtgggatcactagtgataattctttggttcttctctgtatatctcctaattttgtgtatgaattcaatatagttatttaggaaaacacattacatggtcagatggtctacactgtgcaacggcaatctgaatcaatcttttttcctgagtcccttcaagtcacctgggagaaatcaagtctcgtggtgttatggggcacagcaactttatataaatcagcattcagtctgatgggttttcactctatctggttccttatagacagattaaaggcatgtttggttcattacctcaattgccacattttgcctaacttttctacctaaggttagttattcaattcgaacgattaaccttaggcaaagtgtggcacatttagccacaaaccaaacatgccctatgattgtcaagcacatattttgttggcttgagaaatgtgtttggtataggcgaaccctactggcagggattttcgacaaatttgaattttagtttgaaaaaagtagcacgtggagtccacatttgtcattaattgctactttctccgttttcaagttgtaagacatttcggattttatagatatattgtttttataaacatactatggcgttgtttgaaa

SEQ ID NO: 199705 - DNA, 2300 bp, Zea Mays
atactctgggacataaatactagggatcttgtgaagacataggatggttgcaaagaactcgggcatcacttcgttcagttgatgggacaggtcacttcaaggagattttgcatgagataaggttttggatatgaacatgatgatgctaggatgaccaatataaatttgtttaaggaatttactgccctaagcagggtaagtgtttcctgaactacaattgttttttttggctttttgcagatctgcacatctgaatttcctattatcctgttgggctgcctcttttttggagtgactgtagcaaccacttctaattcattttcaattgtattgaactggatgttgaccttcctagcataattagctctattttttaaaaaaatagttcattatgtatgtttctattttttatggtaccgcctatgtttatataaatttagcctagcactgcttgaataacaagtgattgaatgaggctcatatgcaaccattaaatcaatatttatgaaccaatgtttgttaaagtaataaaacatttacaaggaccatcgatgacctcaagaagctggtggtggcgtagatgggaacgcaccccgagaagatttgcatctagaggtggtgaccccacctctgtcctcaaccgccacctcgtacctcgtcttcggcgccgccggctcctgccccccttggcacgccttcggggtcctcgctggcggcaagcacctccgtcccggaggcatctgccgctgcagcatagaccaccgcgtcctcgctcagcagcaccgatgtcgatgatggcaacaaggaggacggctccgcgagcacccccgagatctgctgctgccactcccacgcagctcttgcttgtgagatctgtgtgcaggttgatgtcctcgtggcgccacgccgacctcaccgccaccaagcgcgccacccatgtcctcaccgacctcgccaaaaactataagaataggtgtagtcactgtcggggtgtacatccaattgagttttgagttggtgtttagctttcccttaccagggacggatcaaagcaccgtaataagtgtcgatatagctctttcaattgcgcctattgttttgtgcgggctatatggatcaaggaaccctctttgcagcagaggtttgttttgtgttctgctgctagtagtcgcatgtcagtttaatcttttgagttctggaagctgttggtcccttaggtgtttgggagatccttttgaatcgaagcacacacactcaggtgctatgacctttggcatttcatagttgcatatttaactggtgtgcgaagagcaccaggatagcacccttgcagcaggaacttacttttggttgcttttctgttgcctgtcatatcccgatatttgtttcctgcaaatttactttgtttaattgtattctattgattttacagcttttgtacttgtacagttacattgtcatctggtttctattgcacgtgtagctgattagttgtagtcactatcttgcaagcatagatattagggaggtattatgtccagtcaagttttgtgttggctatgtgtagcgaattaggattgcttttcctgggatggatcagagcacatgtactgtggcgatatagttgtttcaatagtatagttgccaaattttatgtgtgtgctatatagaccagggaacccacttagaagcagaaaattttctgtgtgcgcgcgaaattttctgtgtgtgctaacaaattgcaggcaaccatcttaacaacaaaagaggctcgtacaatagcagagatgatgctaaaccacttgtgcatgcaaagtatcaaaaaggagaccagacacatgttgatgaaacatctaaaaaggtcctggaatctgaatgcacaaatgtggagaccttatagaaaagggcacaagcacacatgcatcttgctgatcttgatttggcggaggcagacatcaagaaagctctagataaactacagatccagacatgttaatcatatgtactactgaagttggcttaatgaaatcttttgagaataacttgcctatttaacttgtgtcctttttgatggtggcgttgtttgttagctacaaaatcatcaatcaaagattgtaattatatcatatcactgttttctattaatttttaagctgccgtagcaaggcacgggcatcctactagttcccgtatatggtacaaaatgcaacattcgtctcaggatttatgtttctcgactatggtgacaggcctgttttcatccttctttcttcgttgtcttgtattctttttgtcaagtt

SEQ ID NO: 199706 - DNA, 2025 bp, Zea Mays
cttgacatttatcaccaagggacaaagcacactaactgctttatactctgggacataaatactaggatcttacatcgtttctggacaacactacagggatcttgtgaagacataggatggttgcaaagaactcgggcatcacttcgttcagttgatgggacaggtcacttcaaggagattttgcatgagataaggttttggatatgaacatgatgatgctaggatgaccaatataaatttgtttaaggaatttactgccctaagcagggaccatcgatgacctcaagaagctggtggtggcgtagatgggaacgcaccccgagaagatttgcatctagaggtggtgaccccacctctgtcctcaaccgccacctcgtacctcgtcttcggcgccgccggctcctgccccccttggcacgccttcggggtcctcgctggcggcaagcacctccgtcccggaggcatctgccgctgcagcatagaccaccgcgtcctcgctcagcagcaccgatgtcgatgatggcaacaaggaggacggctccgcgagcacccccgagatctgctgctgccactcccacgcagctcttgcttgtgagatctgtgtgcaggttgatgtcctcgtggcgccacgccgacctcaccgccaccaagcgcgccacccatgtcctcaccgacctcgccaaaaactataagaataggtgtagtcactgtcggggtgtacatccaattgagttttgagttggtgtttagctttcccttaccagggacggatcaaagcaccgtaataagtgtcgatatagctctttcaattgcgcctattgttttgtgcgggctatatggatcaaggaaccctctttgcagcagaggtttgttttgtgttctgctgctagtagtcgcatgtcagtttaatcttttgagttctggaagctgttggtcccttaggtgtttgggagatccttttgaatcgaagcacacacactcaggtgctatgacctttggcatttcatagttgcatatttaactggtgtgcgaagagcaccaggatagcacccttgcagcaggaacttacttttggttgcttttctgttgcctgtcatatcccgatatttgtttcctgcaaatttactttgtttaattgtattctattgattttacagcttttgtacttgtacagttacattgtcatctggtttctattgcacgtgtagctgattagttgtagtcactatcttgcaagcatagatattagggaggtattatgtccagtcaagttttgtgttggctatgtgtagcgaattaggattgcttttcctgggatggatcagagcacatgtactgtggcgatatagttgtttcaatagtatagttgccaaattttatgtgtgtgctatatagaccagggaacccacttagaagcagaaaattttctgtgtgcgcgcgaaattttctgtgtgtgctaacaaattgcaggcaaccatcttaacaacaaaagaggctcgtacaatagcagagatgatgctaaaccacttgtgcatgcaaagtatcaaaaaggagaccagacacatgttgatgaaacatctaaaaaggtcctggaatctgaatgcacaaatgtggagaccttatagaaaagggcacaagcacacatgcatcttgctgatcttgatttggcggaggcagacatcaagaaagctctagataaactacagatccagacatgttaatcatatgtactactgaagttggcttaatgaaatcttttgagaataacttgcctatttaacttgtgtcctttttgatggtggcgttgtttgttagctacaaaatcatcaatcaaagattgtaattatatcatatcactgttttctattaatttttaagctgccgtagcaaggcacgggcatcctactagttcccgtatatggtacaaaatgcaacattcgtctcaggatttatgtttctcgactatggtgacaggcctgttttcatccttctttcttcgttgtcttgtattctttttgtcaagtt

SEQ ID NO: 199707 - DNA, 2756 bp, Zea Mays
gaataattcatgggatcaatgatccatataatttatgattccttccaaggctctgtgcagctgttcatccatttctcccttcgatgtcggtgtttgtccctgctatgtgtgttggatcaccattgacatatatgtggaactgcctaaggaccacttcaaatgtgtatgtagcagcttcagcacagcaaccagcaatggccccatagagagaatgcagataagccatcttcagtatgccatacactccatagaatacaacgccagaggatgccatactgataagagaaggcaccaatcccttatacagcgagaagaatccttcagtttggatcatgtggcgggcaacaccaatgaccccacctaaagcttcaccaccaggagcatccatctttgtcctgatctgaaaccaacagctcaaatcaggatcttacatcgtttctggacaacactacagggatcttgtgaagacataggatggttgcaaagaactcgggcatcacttcgttcagttgatgggacaggtcacttcaaggagattttgcatgagataaggtggaacaatcacttctcatcacaggttttggatatgaacatgatgatgctaggatgaccaatataaatttgtttaaggaatttactgccctaagcagggtaagtgtttcctgaactacaattgttttttttggctttttgcagatctgcacatctgaatttcctattatcctgttgggctgcctcttttttggagtgactgtagcaaccacttctaattcattttcaattgtattgaactggatgttgaccttcctagcataattagctctattttttaaaaaaatagttcattatgtatgtttctattttttatggtaccgcctatgtttatataaatttagcctagcactgcttgaataacaagtgattgaatgaggctcatatgcaaccattaaatcaatatttatgaaccaatgtttgttaaagtaataaaacatttacaaggaccatcgatgacctcaagaagctggtggtggcgtagatgggaacgcaccccgagaagatttgcatctagaggtggtgaccccacctctgtcctcaaccgccacctcgtacctcgtcttcggcgccgccggctcctgccccccttggcacgccttcggggtcctcgctggcggcaagcacctccgtcccggaggcatctgccgctgcagcatagaccaccgcgtcctcgctcagcagcaccgatgtcgatgatggcaacaaggaggacggctccgcgagcacccccgagatctgctgctgccactcccacgcagctcttgcttgtgagatctgtgtgcaggttgatgtcctcgtggcgccacgccgacctcaccgccaccaagcgcgccacccatgtcctcaccgacctcgccaaaaactataagaataggtgtagtcactgtcggggtgtacatccaattgagttttgagttggtgtttagctttcccttaccagggacggatcaaagcaccgtaataagtgtcgatatagctctttcaattgcgcctattgttttgtgcgggctatatggatcaaggaaccctctttgcagcagaggtttgttttgtgttctgctgctagtagtcgcatgtcagtttaatcttttgagttctggaagctgttggtcccttaggtgtttgggagatccttttgaatcgaagcacacacactcaggtgctatgacctttggcatttcatagttgcatatttaactggtgtgcgaagagcaccaggatagcacccttgcagcaggaacttacttttggttgcttttctgttgcctgtcatatcccgatatttgtttcctgcaaatttactttgtttaattgtattctattgattttacagcttttgtacttgtacagttacattgtcatctggtttctattgcacgtgtagctgattagttgtagtcactatcttgcaagcatagatattagggaggtattatgtccagtcaagttttgtgttggctatgtgtagcgaattaggattgcttttcctgggatggatcagagcacatgtactgtggcgatatagttgtttcaatagtatagttgccaaattttatgtgtgtgctatatagaccagggaacccacttagaagcagaaaattttctgtgtgcgcgcgaaattttctgtgtgtgctaacaaattgcaggcaaccatcttaacaacaaaagaggctcgtacaatagcagagatgatgctaaaccacttgtgcatgcaaagtatcaaaaaggagaccagacacatgttgatgaaacatctaaaaaggtcctggaatctgaatgcacaaatgtggagaccttatagaaaagggcacaagcacacatgcatcttgctgatcttgatttggcggaggcagacatcaagaaagctctagataaactacagatccagacatgttaatcatatgtactactgaagttggcttaatgaaatcttttgagaataacttgcctatttaacttgtgtcctttttgatggtggcgttgtttgttagctacaaaatcatcaatcaaagattgtaattatatcatatcactgttttctattaatttttaagctgccgtagcaaggcacgggcatcctactagttcccgtatatggtacaaaatgcaacattcgtctcaggatttatgtttctcgactatggtgacaggcctgttttcatccttctttcttcgttgtcttgtattctttttgtcaagtt

SEQ ID NO: 199708 - DNA, 3962 bp, Zea Mays
atcgcgcggtgcacgttctgccgctccgctcacgcccgcggccgaacgctcccccgcaccttccatcctccgcgcagccacagctgcgattccctgctccccgcaccttccatcctctgcgcagccacagccgcgattcccgccgccccgccgcgctcaccttccctcccgcggcagagtgctccctcgacggggccgccccaaccatcgccctcctcatccgccatcgcgatccactcctcgacgcaatccatctaccccacagaactgctgccggcgtggcagatctcctcctcggcacctagatctcctcggcgcgatcaacggctgagcccgctgcccccaccacacaaccgatatgctctccatggaaggtcagggacctgctcgcccatgatctccatggaaggtggtctactgtcgacggcctctccctcgtgctccttcgtcaaccccgtccgccgcgccgccgagccccgagatcgcgccgatccgccattctcgcgccctcgccccgacacgcgctcaccaccggccctcaccaacctccactcgcgttccccacaccaccctccaccccatccgcgtccgccccatccgtagcacgcgggctgcagccgccccatccctaaaatgtgggcgctggcgctaccacggctccgcaccatgcctccgcgctgccagacagcgccgggcgataccatgcccccaccccggcttcttcctgccagtgtaatcggccactacttctccactgctgctcgccgtctcctcaaccaccgctgcgccacacaatcctcccgcgacgtgtctgattcaagccaggatgtctcacaggaggagcagcggaagcccgaaccgaatccaaccgagtcatctcaacgactccgccagtttccaatcgccccttttttaggcgttcaagttccttcgagatgatgacaagcagaggagagagatagcgtctccttcaatccctctggcgacaccaacaacgcatccccgtggccatcctcgattctccttgccaaggaggcgacagccaagtcgtcgcggtcacggccggcgatccactcgagggtgttcctggtgagtagcaccactgcggtggggatcggggatgggggaggcggcaatggcgatggcggggtgcagctcgccgacaaccttaagatcttcaaggctgacaacttcgatctcgacgtctagattccttccaaggctctgtgcagctgttcatccatttctcccttcgatgtcggtgtttgtccctgctatgtgtgttggatcaccattgacatatatgtggaagtaggttctctgctgaaagaatacatacctgtaacaaactggggattagaccggcatacagtgctggtaccccaccttggtcgacaatcttaagcttcagcacagcaaccagcaatggccccatagagagaatgcagataagccatcttcagtatgccatacactccatagaatacaacgccagaggatgccatactgataagagaaggcaccaatcccttatacagcgagaagaatccttcagtttggatcatgtggcgggcaacaccaatgaccccacctaaagcttcaccaccaggagcatccatctttgtcctgatctgaaaccaacagctcaaatcaggatcttacatcgtttctggacaacactacagggatcttgtgaagacataggatggttgcaaagaactcgggcatcacttcgttcagttgatgggacaggtcacttcaaggagattttgcatgagataaggttttggatatgaacatgatgatgctaggatgaccaatataaatttgtttaaggaatttactgccctaagcagggtaagtgtttcctgaactacaattgttttttttggctttttgcagatctgcacatctgaatttcctattatcctgttgggctgcctcttttttggagtgactgtagcaaccacttctaattcattttcaattgtattgaactggatgttgaccttcctagcataattagctctattttttaaaaaaatagttcattatgtatgtttctattttttatggtaccgcctatgtttatataaatttagcctagcactgcttgaataacaagtgattgaatgaggctcatatgcaaccattaaatcaatatttatgaaccaatgtttgttaaagtaataaaacatttacaaggaccatcgatgacctcaagaagctggtggtggcgtagatgggaacgcaccccgagaagatttgcatctagaggtggtgaccccacctctgtcctcaaccgccacctcgtacctcgtcttcggcgccgccggctcctgccccccttggcacgccttcggggtcctcgctggcggcaagcacctccgtcccggaggcatctgccgctgcagcatagaccaccgcgtcctcgctcagcagcaccgatgtcgatgatggcaacaaggaggacggctccgcgagcacccccgagatctgctgctgccactcccacgcagctcttgcttgtgagatctgtgtgcaggttgatgtcctcgtggcgccacgccgacctcaccgccaccaagcgcgccacccatgtcctcaccgacctcgccaaaaactataagaataggtgtagtcactgtcggggtgtacatccaattgagttttgagttggtgtttagctttcccttaccagggacggatcaaagcaccgtaataagtgtcgatatagctctttcaattgcgcctattgttttgtgcgggctatatggatcaaggaaccctctttgcagcagaggtttgttttgtgttctgctgctagtagtcgcatgtcagtttaatcttttgagttctggaagctgttggtcccttaggtgtttgggagatccttttgaatcgaagcacacacactcaggtgctatgacctttggcatttcatagttgcatatttaactggtgtgcgaagagcaccaggatagcacccttgcagcaggaacttacttttggttgcttttctgttgcctgtcatatcccgatatttgtttcctgcaaatttactttgtttaattgtattctattgattttacagcttttgtacttgtacagttacattgtcatctggtttctattgcacgtgtagctgattagttgtagtcactatcttgcaagcatagatattagggaggtattatgtccagtcaagttttgtgttggctatgtgtagcgaattaggattgcttttcctgggatggatcagagcacatgtactgtggcgatatagttgtttcaatagtatagttgccaaattttatgtgtgtgctatatagaccagggaacccacttagaagcagaaaattttctgtgtgcgcgcgaaattttctgtgtgtgctaacaaattgcaggcaaccatcttaacaacaaaagaggctcgtacaatagcagagatgatgctaaaccacttgtgcatgcaaagtatcaaaaaggagaccagacacatgttgatgaaacatctaaaaaggtcctggaatctgaatgcacaaatgtggagaccttatagaaaagggcacaagcacacatgcatcttgctgatcttgatttggcggaggcagacatcaagaaagctctagataaactacagatccagacatgttaatcatatgtactactgaagttggcttaatgaaatcttttgagaataacttgcctatttaacttgtgtcctttttgatggtggcgttgtttgttagctacaaaatcatcaatcaaagattgtaattatatcatatcactgttttctattaatttttaagctgccgtagcaaggcacgggcatcctactagttcccgtatatggtacaaaatgcaacattcgtctcaggatttatgtttctcgactatggtgacaggcctgttttcatccttctttcttcgttgtcttgtattctttttgtcaagtt

SEQ ID NO: 199709 - DNA, 3549 bp, Zea Mays
atcgcgcggtgcacgttctgccgctccgctcacgcccgcggccgaacgctcccccgcaccttccatcctccgcgcagccacagctgcgattccctgctccccgcaccttccatcctctgcgcagccacagccgcgattcccgccgccccgccgcgctcaccttccctcccgcggcagagtgctccctcgacggggccgccccaaccatcgccctcctcatccgccatcgcgatccactcctcgacgcaatccatctaccccacagaactgctgccggcgtggcagatctcctcctcggcacctagatctcctcggcgcgatcaacggctgagcccgctgcccccaccacacaaccgatatgctctccatggaaggtcagggacctgctcgcccatgatctccatggaaggtggtctactgtcgacggcctctccctcgtgctccttcgtcaaccccgtccgccgcgccgccgagccccgagatcgcgccgatccgccattctcgcgccctcgccccgacacgcgctcaccaccggccctcaccaacctccactcgcgttccccacaccaccctccaccccatccgcgtccgccccatccgtagcacgcgggctgcagccgccccatccctaaaatgtgggcgctggcgctaccacggctccgcaccatgcctccgcgctgccagacagcgccgggcgataccatgcccccaccccggcttcttcctgccagtgtaatcggccactacttctccactgctgctcgccgtctcctcaaccaccgctgcgccacacaatcctcccgcgacgtgtctgattcaagccaggatgtctcacaggaggagcagcggaagcccgaaccgaatccaaccgagtcatctcaacgactccgccagtttccaatcgccccttttttaggcgttcaagttccttcgagatgatgacaagcagaggagagagatagcgtctccttcaatccctctggcgacaccaacaacgcatccccgtggccatcctcgattctccttgccaaggaggcgacagccaagtcgtcgcggtcacggccggcgatccactcgagggtgttcctggtgagtagcaccactgcggtggggatcggggatgggggaggcggcaatggcgatggcggggtgcagctcgccgacaaccttaagatcttcaaggctgacaacttcgatctcgacgtctagattccttccaaggctctgtgcagctgttcatccatttctcccttcgatgtcggtgtttgtccctgctatgtgtgttggatcaccattgacatatatgtggaactgcctaaggaccacttcaaatgtgtatgtagcagcttcagcacagcaaccagcaatggccccatagagagaatgcagataagccatcttcagtatgccatacactccatagaatacaacgccagaggatgccatactgataagagaaggcaccaatcccttatacagcgagaagaatccttcagtttggatcatgtggcgggcaacaccaatgaccccacctaaagcttcaccaccaggagcatccatctttgtcctgatctgaaaccaacagctcaaatcagggatcttgtgaagacataggatggttgcaaagaactcgggcatcacttcgttcagttgatgggacaggtcacttcaaggagattttgcatgagataaggtggaacaatcacttctcatcacaggttttggatatgaacatgatgatgctaggatgaccaatataaatttgtttaaggaatttactgccctaagcagggaccatcgatgacctcaagaagctggtggtggcgtagatgggaacgcaccccgagaagatttgcatctagaggtggtgaccccacctctgtcctcaaccgccacctcgtacctcgtcttcggcgccgccggctcctgccccccttggcacgccttcggggtcctcgctggcggcaagcacctccgtcccggaggcatctgccgctgcagcatagaccaccgcgtcctcgctcagcagcaccgatgtcgatgatggcaacaaggaggacggctccgcgagcacccccgagatctgctgctgccactcccacgcagctcttgcttgtgagatctgtgtgcaggttgatgtcctcgtggcgccacgccgacctcaccgccaccaagcgcgccacccatgtcctcaccgacctcgccaaaaactataagaataggtgtagtcactgtcggggtgtacatccaattgagttttgagttggtgtttagctttcccttaccagggacggatcaaagcaccgtaataagtgtcgatatagctctttcaattgcgcctattgttttgtgcgggctatatggatcaaggaaccctctttgcagcagaggtttgttttgtgttctgctgctagtagtcgcatgtcagtttaatcttttgagttctggaagctgttggtcccttaggtgtttgggagatccttttgaatcgaagcacacacactcaggtgctatgacctttggcatttcatagttgcatatttaactggtgtgcgaagagcaccaggatagcacccttgcagcaggaacttacttttggttgcttttctgttgcctgtcatatcccgatatttgtttcctgcaaatttactttgtttaattgtattctattgattttacagcttttgtacttgtacagttacattgtcatctggtttctattgcacgtgtagctgattagttgtagtcactatcttgcaagcatagatattagggaggtattatgtccagtcaagttttgtgttggctatgtgtagcgaattaggattgcttttcctgggatggatcagagcacatgtactgtggcgatatagttgtttcaatagtatagttgccaaattttatgtgtgtgctatatagaccagggaacccacttagaagcagaaaattttctgtgtgcgcgcgaaattttctgtgtgtgctaacaaattgcaggcaaccatcttaacaacaaaagaggctcgtacaatagcagagatgatgctaaaccacttgtgcatgcaaagtatcaaaaaggagaccagacacatgttgatgaaacatctaaaaaggtcctggaatctgaatgcacaaatgtggagaccttatagaaaagggcacaagcacacatgcatcttgctgatcttgatttggcggaggcagacatcaagaaagctctagataaactacagatccagacatgttaatcatatgtactactgaagttggcttaatgaaatcttttgagaataacttgcctatttaacttgtgtcctttttgatggtggcgttgtttgttagctacaaaatcatcaatcaaagattgtaattatatcatatcactgttttctattaatttttaagctgccgtagcaaggcacgggcatcctactagttcccgtatatggtacaaaatgcaacattcgtctcaggatttatgtttctcgactatggtgacaggcctgttttcatccttctttcttcgttgtcttgtattctttttgtcaagtt

SEQ ID NO: 199710 - DNA, 3485 bp, Zea Mays
ggcgtccactatcgcgcggtgcacgttctgccgctccgctcacgcccgcggccgaacgctcccccgcaccttccatcctccgcgcagccacagctgcgattccctgctccccgcaccttccatcctctgcgcagccacagccgcgattcccgccgccccgccgcgctcaccttccctcccgcggcagagtgctccctcgacggggccgccccaaccatcgccctcctcatccgccatcgcgatccactcctcgacgcaatccatctaccccacagaactgctgccggcgtggcagatctcctcctcggcacctagatctcctcggcgcgatcaacggctgagcccgctgcccccaccacacaaccgatatgctctccatggaaggtcagggacctgctcgcccatgatctccatggaaggtggtctactgtcgacggcctctccctcgtgctccttcgtcaaccccgtccgccgcgccgccgagccccgagatcgcgccgatccgccattctcgcgccctcgccccgacacgcgctcaccaccggccctcaccaacctccactcgcgttccccacaccaccctccaccccatccgcgtccgccccatccgtagcacgcgggctgcagccgccccatccctaaaatgtgggcgctggcgctaccacggctccgcaccatgcctccgcgctgccagacagcgccgggcgataccatgcccccaccccggcttcttcctgccagtgaggagcagcggaagcccgaaccgaatccaaccgagtcatctcaacgactccgccagtttccaatcgccccttttttaggcgttcaagttccttcgagatgatgacaagcagaggagagagatagcgtctccttcaatccctctggcgacaccaacaacgcatccccgtggccatcctcgattctccttgccaaggaggcgacagccaagtcgtcgcggtcacggccggcgatccactcgagggtgttcctggtgagtagcaccactgcggtggggatcggggatgggggaggcggcaatggcgatggcggggtgcagctcgccgacaaccttaagatcttcaaggctgacaacttcgatctcgacgtctagattccttccaaggctctgtgcagctgttcatccatttctcccttcgatgtcggtgtttgtccctgctatgtgtgttggatcaccattgacatatatgtggaactgcctaaggaccacttcaaatgtgtatgtagcagcttcagcacagcaaccagcaatggccccatagagagaatgcagataagccatcttcagtatgccatacactccatagaatacaacgccagaggatgccatactgataagagaaggcaccaatcccttatacagcgagaagaatccttcagtttggatcatgtggcgggcaacaccaatgaccccacctaaagcttcaccaccaggagcatccatctttgtcctgatctgaaaccaacagctcaaatcaggatcttacatcgtttctggacaacactacagggatcttgtgaagacataggatggttgcaaagaactcgggcatcacttcgttcagttgatgggacaggtcacttcaaggagattttgcatgagataaggtggaacaatcacttctcatcacaggttttggatatgaacatgatgatgctaggatgaccaatataaatttgtttaaggaatttactgccctaagcagggaccatcgatgacctcaagaagctggtggtggcgtagatgggaacgcaccccgagaagatttgcatctagaggtggtgaccccacctctgtcctcaaccgccacctcgtacctcgtcttcggcgccgccggctcctgccccccttggcacgccttcggggtcctcgctggcggcaagcacctccgtcccggaggcatctgccgctgcagcatagaccaccgcgtcctcgctcagcagcaccgatgtcgatgatggcaacaaggaggacggctccgcgagcacccccgagatctgctgctgccactcccacgcagctcttgcttgtgagatctgtgtgcaggttgatgtcctcgtggcgccacgccgacctcaccgccaccaagcgcgccacccatgtcctcaccgacctcgccaaaaactataagaataggtgtagtcactgtcggggtgtacatccaattgagttttgagttggtgtttagctttcccttaccagggacggatcaaagcaccgtaataagtgtcgatatagctctttcaattgcgcctattgttttgtgcgggctatatggatcaaggaaccctctttgcagcagaggtttgttttgtgttctgctgctagtagtcgcatgtcagtttaatcttttgagttctggaagctgttggtcccttaggtgtttgggagatccttttgaatcgaagcacacacactcaggtgctatgacctttggcatttcatagttgcatatttaactggtgtgcgaagagcaccaggatagcacccttgcagcaggaacttacttttggttgcttttctgttgcctgtcatatcccgatatttgtttcctgcaaatttactttgtttaattgtattctattgattttacagcttttgtacttgtacagttacattgtcatctggtttctattgcacgtgtagctgattagttgtagtcactatcttgcaagcatagatattagggaggtattatgtccagtcaagttttgtgttggctatgtgtagcgaattaggattgcttttcctgggatggatcagagcacatgtactgtggcgatatagttgtttcaatagtatagttgccaaattttatgtgtgtgctatatagaccagggaacccacttagaagcagaaaattttctgtgtgcgcgcgaaattttctgtgtgtgctaacaaattgcaggcaaccatcttaacaacaaaagaggctcgtacaatagcagagatgatgctaaaccacttgtgcatgcaaagtatcaaaaaggagaccagacacatgttgatgaaacatctaaaaaggtcctggaatctgaatgcacaaatgtggagaccttatagaaaagggcacaagcacacatgcatcttgctgatcttgatttggcggaggcagacatcaagaaagctctagataaactacagatccagacatgttaatcatatgtactactgaagttggcttaatgaaatcttttgagaataacttgcctatttaacttgtgtcctttttgatggtggcgttgtttgttagctacaaaatcatcaatcaaagattgtaattatatcatatcactgttttctattaatttttaagctgccgtagcaaggcacgggcatcctactagttcccgtatatggtacaaaatgcaacattcgtctcaggatttatgtttctcgactatggtgacaggcctgttttcatccttctttcttcgttgtcttgtattctttttgtcaagtt

SEQ ID NO: 199711 - DNA, 1195 bp, Zea Mays
gctaaccccaaaaacacacacacacacacactgcctgtttattttgtggacctatagcatattcccgtggtctccccccttttgctttgcttgccgagacggcgaccatggcgaagcagcagaatcctatccccatcccgatgccgctgtcgctgtcgctgcccctcgtcctcgtcgcgctgctcctgccggccgcccgcggcgccgcggagacgccgcagtacacgacggtgcacgcggagtcggacttcgaggtgcggctgtacggcgacaccgtctggatgtccgcccccaccccggacatcccttccttccacgtcgccaccaagctcggcttccacagattgttccagtacctgatgggcgcaaacctcaactcttcgaggatcaggatgaccacccctgtgctcacgagtgtggttccaggtgcagggcctctgcgctcctcggcctactccgtccggctgtacctgccggcgaagttccaggcttcccctccggttcctctcccagagctgaacctgcatccagatcggtggccaggccactgcgtcgcagcgaggagcttctcgggtcgtgcacgggacaagaacgtggtcgaggaagccgagaagctcgccatgagcctgagccggtcaccatgggctaactccacagactactccagcaagagcgcttactcggttgcacagtacagcagtccattccgcatcattggccgtgtcaatgaggttgtatggcattctcaaaggttgcaagctgtgttctaatatcagaaattacatcttgcatctgcttcaaggactccttccgcgcgcacagctcatcggtcactctgctcccgggacatcgaattcgaaagccttgccaactgactcggaagaaatggaacgagggtcccacatgagaggctcgatatcagaggctcggcgagcgatctccatgaccagcatgtctagattgagcagcttctcagatccaaacgcggtgtcacgggaatctatacgtgagcccttcttctcgctctagctgctccttccgttcacgcccaaccaaaacgagttctcaaccgaaccctagccgccgcaccttgccgccgcaccacagcctccgcaccacagccgccacactcaaaacaccatggatcgaactgctcccgtcgtcgctgttgcagaggctgttgatgccgctcgtg

SEQ ID NO: 199712 - DNA, 5892 bp, Zea Mays
cttactcttttagccgcgaaccgaacaaccaaaacccagcagttccgccgtcgcggaattccgaaagcccgccgtcgccggagacgatcgcgcacacttcgcacgggcacgactgtggccaaatggcgccgaagaagaagcagccggactcgaagcagaggcagaagcccaagtcctcgtcctcctcatccgcagccaccgccgcgccgcgcctccagatctcgtcggagaacgagcgccgcctccgccgcctcctccttaactcctccgcaccatccccgtcacctgccaacgtctcggaagtccgcggcgagtcgagggagcagaaggcgcggcggctgcgtggcgtgtacgacaagctcgctctcgagggcttctcttccgcgcaaatcgagcaggcgctctccgcgatacccgattcggcgacgtttgaatcggcgttggactggctatgttttaatctgcctggcgatgagctccccctcaagttctccagcgctggcgacagcaccatgtcgtctctcacaggagctgaaggttctgttaaagtactgtccacagccaaggacaattgggtgccacagagtcgtgaacctgaggaggtgaaggtgagcaccgaggggttggaagttagaattggtgggcggagagatgagaatgtgtcactggatgatgggcgattgtcacaagctgcatggattcgtcaatacatggaacaacaagaggaggaagaggatgcaaattccaatgattcctctacatgggaggatcactgcttacaaagttttgaagttgtcgaagcaaagccaagtaggcggaagagcaaggctgcaaaaaagaattccaagcatggaaacttgaaggaacagataagctatcctaccaattctgtatcttcaaattctgaaactgcaaatgttgagggtgttcagaatgatttagaggcaagtgaggaaagatctgagagtctaggcaatattgatgaaggatctgatttgaaaaaggaaattcctaaggatattgataaaacttgtgcaaaggaggtagacgaagaggtgatagagcttgataacatgttctttgaagactcatctgcttgggaagcagtggctccagaaatcttgaaacagcaacaaatagagaaattatcacatgatggttatggccatcttattggaaacatagatgatatatggaagaagggagattctggtaaaatgccgaaagctgttctacaaaagttttgtcaaaaacttggttgggaagcaccaaagtataataaaatatctgagagagatggcaaatttgtatattctgttaatgtgttgcggggagctactggccgtggtaagagtcggaaggctggaggcttgacgataatccagttacctaaactacatgaagaatatggatctgttcaggaagcacaaagtcgagttgcagcttttgctctatatcaattttttgctgaccttccactacgtcaactgcttactgagccatactcatcacttattttaagatggcaagaaggtgaattgtcatctacatcaagggtgctggttacggaggataggcgaagatctggctttgtagatatgttattgaatatagatgcagatacaattccttcatctgaaatagaaaattctgatactgatgtcatatctatggattctgggaatactgaaggcagcaaatctgtgaatgagaagagacagactaccatgacgagttgtatgggattgaaatcagcagagcgtgcagagagtgcaattttgaaaaagcagttggaagataaaaggaagctaccaaattacttgaaaatgctggaagcaagagcttctctaccaatagctagacagaggcaacacttcctacagttgctgaaagagaacgatgtagttgttgttagtggagaaactggatgtgggaaaacaactcaggtgccacagtttattttggatgacatgattgaatctgaacttggaggttcttgcaatatagtttgcacacagccccggcggatagcggctatttctgtggccgaaagagtatctgatgaaaggtgtgaaccatcacctggatcgaatgattcactggtcggataccaagttcgtctcgacagtgcacggaatgagaggacaaagcttttgttctgtactactggtatccttctcagaaagttatctggaaacagagacttaagtgatgttacccatgttgttgtggatgaagtacatgaacgtacaattttgagtgacttcctgcttattgttcttaagaatcttgttgagaaacgctccaatcaacaaggaaggaagttgaaagtgattctcatgtctgcaacggttgattcaagcctatttgcacgatattttggagaatgccccgtgatcagtgttgaaggaagaacacatccagtgtcaactcattttcttgaggatgtttatgagaaaatggagtactgtcttgcattggattctcctgcatcaggagcttactttgcgcagcatggggaaaagtggaagcatgctagcagctcagtgaacaaccgacgaggaaaaaagaaccttgtcttatcctcatggggtgatgagtcaacgctttccgaaggctatgttaaccctcactatatttctgattactataggtcatataatgagagaaccaaccaaaatctaaaacgcttgaatgaagatgtcatcgattttgatctattggaagacttgatatgctatattgatgagaactgtcctcagggtgctattcttgtttttcttcctggagttgcagagattgacttgttgattgatagattatctgctttagttagatttggaggggcatcatctgattggatccttcctttacattcactgcttggaccctctgatcaaaggaaagtgttccagtctccaccagataacttccgcaaggttattattgccacagacatagcagagaccagcattacaattgatgatgtagtatatgtagttgatactggaaagcacaaggagaaccgttataatccacacaagaaaatgtcaagcatagtagaagattggatttctcgtgcaaatgcaaaacagagacggggtagggctggtcgtgtgaagcctggtttatgtttctgtctgtatacaaggcatcggtttgaaaacgtcatgcgtccatttcaggtgcctgagatgttacggatgcctttgactgagctgtgcctgcaaataaaatcacttcatcttgatgacatcaaatccttcctgctaaaggcagtagagccccctaatgaagaagctatttcctctgcagttgacttgttatacaaggttggagcttttgaaggacatgaagagttgtcacctcttgggtatcatctggcgaaactgcctgttgatgttttgattggaaagatgatgctttatggtgctatctttggttgtttatcaccaattctgtccgttgctgctttcctgagttataaatctccatttctctctccaaaagatgagaagcaaaatgtggagaaagcaaaagccacattattgaatgagaaccttgatggatctagttctgtaacagataataaacaatccgatcacctgctaatggtaattgcatacgacaaatggtcccgcatactgctacagaatggtgataaatctgctcgtcagttttgccattcattctacttgaatagtactgtgatgcacatgatcagggacatgcgtcttcagtttggtaccttgttagcagacattggacttatagatcttcctaaagatactctgaggcacaaggtgggcagtagaaaaaataatctcgagagctggttttctaatatgtctcttccattcaatgcctatgctcgctgcacctcggttattaagtcggtgatgtgtgcaggtctataccctaatgtggcagcatctctagagggtgttgatcctggagctctaggtggaagaaagccatctgatgttctgttcagtaaggaccgtcctcgatggtatgatggaaggcgagaagttcatatacatccatcatctgttaatcacagcttgaaagctgttcaatatccatttttggtgtttcttgaaaaggttgagacaaccaaggtgttcttacgtgatactagcgtcgtttccccctactcacttcttttgtttggtggttccatggtaatccaacatcagacaggagtggttgttatagatggatggttgaggctgtctgctgctgcacagactgctgttttattcaagcaacttcggatgactcttgatgctgttctaaaagaactgacaagaaaaccagagatggcaacttttgttgacaacgaagtggtcaggtccatcattcatttattgttagaagaagacaaggctcgataagcatgaattcatggcaatcctatcgatactaattttttagtaaaaacactatcggtccctaaaattttttagtaaaaacactgtcggtccctaaacttttaagtgtatcatccggttcctacactcctaaaatgcacatcgagctttctttggtagggaaacttgtatgattgctcgtttgaatcattctactgcatatcactaataaaatatattttttctagccccttttttccgtccacgtttgaagaatgataatgaatagacatacatacaaactacattcacatgttaatcaatgaatttatattaaatctaaaacgaattatattttggtaaatgataatgaatagacatacatacaaactacattcacatgttaatcaatgaatttatattaaatctaaaacgaattatattttggtacggagggagtaataattcttgagttgagtagtagtatcatctgtttggtaatttcattatgatatgataattttaactggccaatgaggatcaatattttgtaaatgtgtccatgtgattatgatttcttgcacgattcgaaaatgtaggagaaattacgggttggcatcttatccattttatttgttgtattgggtgtcttaatggggccaccagagacaggacacagccacctgatgttgagagactggaaacattctaattgtgtttctatcgaaacaaaatttgaaagtaggggactgcaaaataagggtctgttacagatccgtcatcccctactctcgaccaagtaggggactgcaaaattcactctaccaaaaaccactcaaaataccactaacaaaagaaggacctgaccaaccttccgctagaactacttagccaaccccttgaacgaaacctgtcaaataatggtagaaaacatggtgtctagtatgtaagtttgaagatacgcttttcagctactgttcttgttgctaatgtacgcttaatatccagatgatagccttttttaggatataattatgctattcagttgcatggacagatggttttagaacttggccattttgatattttctgttccgtcattctttgtaggcttttgatcagtatcggtttctgccgatgtgcacgttagtctgcacaggattcttattgcacaatgtggctgattgctaatgtggaagctgcaaagcggaaaaggagtttaatatattattcggctggctggttgttttatatggaacaagtttgtgtcggtctagtattagtgtaatacccttgtcctaattttggagcttacgtgcatcaacgtacagagcagataaaactcaaaagcctgaattgccgtcaattttccatctgacactttggacagaaaaaatgaaaaaaaatgaagagggaaaaaccatatacatatatgaaactgtagcaaatactattatagatggcagttagtgatgatgagagttgcattaggattcctgatatttagcgttgcacacct

SEQ ID NO: 199713 - DNA, 4571 bp, Zea Mays
ccaaaacccagcagttccgccgtcgcggaattccgaaagcccgccgtcgccggagacgatcgcgcacacttcgcacgggcacgactgtggccaaatggcgccgaagaagaagcagccggactcgaagcagaggcagaagcccaagtcctcgtcctcctcatccgcagccaccgccgcgccgcgcctccagatctcgtcggagaacgagcgccgcctccgccgcctcctccttaactcctccgcaccatccccgtcacctgccaacgtctcggaagtccgcggcgagtcgagggagcagaaggcgcggcggctgcgtggcgtgtacgacaagctcgctctcgagggcttctcttccgcgcaaatcgagcaggcgctctccgcgatacccgattcggcgacgtttgaatcggcgttggactggctatgttttaatctgcctggcgatgagctccccctcaagttctccagcgctggcgacagcaccatgtcgtctctcacaggagctgaaggttctgttaaagtactgtccacagccaaggacaattgggtgccacagagtcgtgaacctgaggaggtgaaggtgagcaccgaggggttggaagttagaattggtgggcggagagatgagaatgtgtcactggatgatgggcgattgtcacaagctgcatggattcgtcaatacatggaacaacaagaggaggaagaggatgcaaattccaatgattcctctacatgggaggatcactgcttacaaagttttgaagttgtcgaagcaaagccaagtaggcggaagagcaaggctgcaaaaaagaattccaagcatggaaacttgaaggaacagataagctatcctaccaattctgtatcttcaaattctgaaactgcaaatgttgagggtgttcagaatgatttagaggcaagtgaggaaagatctgagagtctaggcaatattgatgaaggatctgatttgaaaaaggaaattcctaaggatattgataaaacttgtgcaaaggaggtagacgaagaggtgatagagcttgataacatgttctttgaagactcatctgcttgggaagcagtggctccagaaatcttgaaacagcaacaaatagagaaattatcacatgatggttatggccatcttattggaaacatagatgatatatggaagaagggagattctggtaaaatgccgaaagctgttctacaaaagttttgtcaaaaacttggttgggaagcaccaaagtataataaaatatctgagagagatggcaaatttgtatattctgttaatgtgttgcggggagctactggccgtggtaagagtcggaaggctggaggcttgacgataatccagttacctaaactacatgaagaatatggatctgttcaggaagcacaaagtcgagttgcagcttttgctctatatcaattttttgctgaccttccactacgtcaactgcttactgagccatactcatcacttattttaagatggcaagaaggtgaattgtcatctacatcaagggtgctggttacggaggataggcgaagatctggctttgtagatatgttattgaatatagatgcagatacaattccttcatctgaaatagaaaattctgatactgatgtcatatctatggattctgggaatactgaaggcagcaaatctgtgaatgagaagagacagactaccatgacgagttgtatggcagagcgtgcagagagtgcaattttgaaaaagcagttggaagataaaaggaagctaccaaattacttgaaaatgctggaagcaagagcttctctaccaatagctagacagaggcaacacttcctacagttgctgaaagagaacgatgtagttgttgttagtggagaaactggatgtgggaaaacaactcaggtgccacagtttattttggatgacatgattgaatctgaacttggaggttcttgcaatatagtttgcacacagccccggcggatagcggctatttctgtggccgaaagagtatctgatgaaaggtgtgaaccatcacctggatcgaatgattcactggtcggataccaagttcgtctcgacagtgcacggaatgagaggacaaagcttttgttctgtactactggtatccttctcagaaagttatctggaaacagagacttaagtgatgttacccatgttgttgtggatgaagtacatgaacgtacaattttgagtgacttcctgcttattgttcttaagaatcttgttgagaaacgctccaatcaacaaggaaggaagttgaaagtgattctcatgtctgcaacggttgattcaagcctatttgcacgatattttggagaatgccccgtgatcagtgttgaaggaagaacacatccagtgtcaactcattttcttgaggatgtttatgagaaaatggagtactgtcttgcattggattctcctgcatcaggagcttactttgcgcagcatggggaaaagtggaagcatgctagcagctcagtgaacaaccgacgaggaaaaaagaaccttgtcttatcctcatggggtgatgagtcaacgctttccgaaggctatgttaaccctcactatatttctgattactataggtcatataatgagagaaccaaccaaaatctaaaacgcttgaatgaagatgtcatcgattttgatctattggaagacttgatatgctatattgatgagaactgtcctcagggtgctattcttgtttttcttcctggagttgcagagattgacttgttgattgatagattatctgctttagttagatttggaggggcatcatctgattggatccttcctttacattcactgcttggaccctctgatcaaaggaaagtgttccagtctccaccagataacttccgcaaggttattattgccacagacatagcagagaccagcattacaattgatgatgtagtatatgtagttgatactggaaagcacaaggagaaccgttataatccacacaagaaaatgtcaagcatagtagaagattggatttctcgtgcaaatgcaaaacagagacggggtagggctggtcgtgtgaagcctggtttatgtttctgtctgtatacaaggcatcggtttgaaaacgtcatgcgtccatttcaggtgcctgagatgttacggatgcctttgactgagctgtgcctgcaaataaaatcacttcatcttgatgacatcaaatccttcctgctaaaggcagtagagccccctaatgaagaagctatttcctctgcagttgacttgttatacaaggttggagcttttgaaggacatgaagagttgtcacctcttgggtatcatctggcgaaactgcctgttgatgttttgattggaaagatgatgctttatggtgctatctttggttgtttatcaccaattctgtccgttgctgctttcctgagttataaatctccatttctctctccaaaagatgagaagcaaaatgtggagaaagcaaaagccacattattgaatgagaaccttgatggatctagttctgtaacagataataaacaatccgatcacctgctaatggtaattgcatacgacaaatggtcccgcatactgctacagaatggtgataaatctgctcgtcagttttgccattcattctacttgaatagtactgtgatgcacatgatcagggacatgcgtcttcagtttggtaccttgttagcagacattggacttatagatcttcctaaagatactctgaggcacaaggtgggcagtagaaaaaataatctcgagagctggttttctaatatgtctcttccattcaatgcctatgctcgctgcacctcggttattaagtcggtgatgtgtgcaggtctataccctaatgtggcagcatctctagagggtgttgatcctggagctctaggtggaagaaagccatctgatgttctgttcagtaaggaccgtcctcgatggtatgatggaaggcgagaagttcatatacatccatcatctgttaatcacagcttgaaagctgttcaatatccatttttggtgtttcttgaaaaggttgagacaaccaaggtgttcttacgtgatactagcgtcgtttccccctactcacttcttttgtttggtggttccatggtaatccaacatcagacaggagtggttgttatagatggatggttgaggctgtctgctgctgcacagactgctgttttattcaagcaacttcggatgactcttgatgctgttctaaaagaactgacaagaaaaccagagatggcaacttttgttgacaacgaagtggtcaggtccatcattcatttattgttagaagaagacaaggctcgataagcatgaattcatggcaatcctatcgatactaattttttagtaaaaacactatcggtccctaaaattttttagtaaaaacactgtcggtccctaaacttttaagtgtatcatccggttcctacactcctaaaatgcacatcgagctttctttggtagggaaacttgtatgattgctcgtttgaatcattctactgcatatcactaataaaatata

SEQ ID NO: 199714 - DNA, 4687 bp, Zea Mays
ccgccgtcgcggaattccgaaagcccgccgtcgccggagacgatcgcgcacacttcgcacgggcacgactgtggccaaatggcgccgaagaagaagcagccggactcgaagcagaggcagaagcccaagtcctcgtcctcctcatccgcagccaccgccgcgccgcgcctccagatctcgtcggagaacgagcgccgcctccgccgcctcctccttaactcctccgcaccatccccgtcacctgccaacgtctcggaagtccgcggcgagtcgagggagcagaaggcgcggcggctgcgtggcgtgtacgacaagctcgctctcgagggcttctcttccgcgcaaatcgagcaggcgctctccgcgatacccgattcggcgacgtttgaatcggcgttggactggctatgttttaatctgcctggcgatgagctccccctcaagttctccagcgctggcgacagcaccatgtcgtctctcacaggagctgaaggttctgttaaagtactgtccacagccaaggacaattgggtgccacagagtcgtgaacctgaggaggtgaaggtgagcaccgaggggttggaagttagaattggtgggcggagagatgagaatgtgtcactggatgatgggcgattgtcacaagctgcatggattcgtcaatacatggaacaacaagaggaggaagaggatgcaaattccaatgattcctctacatgggaggatcactgcttacaaagttttgaagttgtcgaagcaaagccaagtaggcggaagagcaaggctgcaaaaaagaattccaagcatggaaacttgaaggaacagataagctatcctaccaattctgtatcttcaaattctgaaactgcaaatgttgagggtgttcagaatgatttagaggcaagtgaggaaagatctgagagtctaggcaatattgatgaaggatctgatttgaaaaaggaaattcctaaggatattgataaaacttgtgcaaaggaggtagacgaagaggtgatagagcttgataacatgttctttgaagactcatctgcttgggaagcagtggctccagaaatcttgaaacagcaacaaatagagaaattatcacatgatggttatggccatcttattggaaacatagatgatatatggaagaagggagattctggtaaaatgccgaaagctgttctacaaaagttttgtcaaaaacttggttgggaagcaccaaagtataataaaatatctgagagagatggcaaatttgtatattctgttaatgtgttgcggggagctactggccgtggtaagagtcggaaggctggaggcttgacgataatccagttacctaaactacatgaagaatatggatctgttcaggaagcacaaagtcgagttgcagcttttgctctatatcaattttttgctgaccttccactacgtcaactgcttactgagccatactcatcacttattttaagatggcaagaaggtgaattgtcatctacatcaagggtgctggttacggaggataggcgaagatctggctttgtagatatgttattgaatatagatgcagatacaattccttcatctgaaatagaaaattctgatactgatgtcatatctatggattctgggaatactgaaggcagcaaatctgtgaatgagaagagacagactaccatgacgagttgtatgggattgaaatcagcagagcgtgcagagagtgcaattttgaaaaagcagttggaagataaaaggaagctaccaaattacttgaaaatgctggaagcaagagcttctctaccaatagctagacagaggcaacacttcctacagttgctgaaagagaacgatgtagttgttgttagtggagaaactggatgtgggaaaacaactcaggtgccacagtttattttggatgacatgattgaatctgaacttggaggttcttgcaatatagtttgcacacagccccggcggatagcggctatttctgtggccgaaagagtatctgatgaaaggtgtgaaccatcacctggatcgaatgattcactggtcggataccaagttcgtctcgacagtgcacggaatgagaggacaaagcttttgttctgtactactggtatccttctcagaaagttatctggaaacagagacttaagtgatgttacccatgttgttgtggatgaagtacatgaacgtacaattttgagtgacttcctgcttattgttcttaagaatcttgttgagaaacgctccaatcaacaaggaaggaagttgaaagtgattctcatgtctgcaacggttgattcaagcctatttgcacgatattttggagaatgccccgtgatcagtgttgaaggaagaacacatccagtgtcaactcattttcttgaggatgtttatgagaaaatggagtactgtcttgcattggattctcctgcatcaggagcttactttgcgcagcatggggaaaagtggaagcatgctagcagctcagtgaacaaccgacgaggaaaaaagaaccttgtcttatcctcatggggtgatgagtcaacgctttccgaaggctatgttaaccctcactatatttctgattactataggtcatataatgagagaaccaaccaaaatctaaaacgcttgaatgaagatgtcatcgattttgatctattggaagacttgatatgctatattgatgagaactgtcctcagggtgctattcttgtttttcttcctggagttgcagagattgacttgttgattgatagattatctgctttagttagatttggaggggcatcatctgattggatccttcctttacattcactgcttggaccctctgatcaaaggaaagtgttccagtctccaccagataacttccgcaaggttattattgccacagacatagcagagaccagcattacaattgatgatgtagtatatgtagttgatactggaaagcacaaggagaaccgttataatccacacaagaaaatgtcaagcatagtagaagattggatttctcgtgcaaatgcaaaacagagacggggtagggctggtcgtgtgaagcctggtttatgtttctgtctgtatacaaggcatcggtttgaaaacgtcatgcgtccatttcaggtgcctgagatgttacggatgcctttgactgagctgtgcctgcaaataaaatcacttcatcttgatgacatcaaatccttcctgctaaaggcagtagagccccctaatgaagaagctatttcctctgcagttgacttgttatacaaggttggagcttttgaaggacatgaagagttgtcacctcttgggtatcatctggcgaaactgcctgttgatgttttgattggaaagatgatgctttatggtgctatctttggttgtttatcaccaattctgtccgttgctgctttcctgagttataaatctccatttctctctccaaaagatgagaagcaaaatgtggagaaagcaaaagccacattattgaatgagaaccttgatggatctagttctgtaacagataataaacaatccgatcacctgctaatggtaattgcatacgacaaatggtcccgcatactgctacagaatggtgataaatctgctcgtcagttttgccattcattctacttgaatagtactgtgatgcacatgatcagggacatgcgtcttcagtttggtaccttgttagcagacattggacttatagatcttcctaaagatactctgaggcacaaggtgggcagtagaaaaaataatctcgagagctggttttctaatatgtctcttccattcaatgcctatgctcgctgcacctcggttattaagtcggtgatgtgtgcaggtctataccctaatgtggcagcatctctagagggtgttgatcctggagctctaggtggaagaaagccatctgatgttctgttcagtaaggaccgtcctcgatggtatgatggaaggcgagaagttcatatacatccatcatctgttaatcacagcttgaaagctgttcaatatccatttttggtgtttcttgaaaaggttgagacaaccaaggtgttcttacgtgatactagcgtcgtttccccctactcacttcttttgtttggtggttccatggtaatccaacatcagacaggagtggttgttatagatggatggttgaggctgtctgctgctgcacagactgctgttttattcaagcaacttcggatgactcttgatgctgttctaaaagaactgacaagaaaaccagaggcttttgatcagtatcggtttctgccgatgtgcacgttagtctgcacaggattcttattgcacaatgtggctgattgctaatgtggaagctgcaaagcggaaaaggagtttaatatattattcggctggctggttgttttatatggaacaagtttgtgtcggtctagtattagtgtaatacccttgtcctaattttggagcttacgtgcatcaacgtacagagcagataaaactcaaaagcctgaattgccgtcaattttccatctgacactttggacagaaaaaatgaaaaaaaatgaagagggaaaaaccatatacatatatgaaactgtagcaaatactattatagatggcagttagtgatgatgagagttgcattaggattcctgatatttagcgttgcacacct

SEQ ID NO: 199715 - DNA, 4596 bp, Zea Mays
gccgtcgcggaattccgaaagcccgccgtcgccggagacgatcgcgcacacttcgcacgggcacgactgtggccaaatggcgccgaagaagaagcagccggactcgaagcagaggcagaagcccaagtcctcgtcctcctcatccgcagccaccgccgcgccgcgcctccagatctcgtcggagaacgagcgccgcctccgccgcctcctccttaactcctccgcaccatccccgtcacctgccaacgtctcggaagtccgcggcgagtcgagggagcagaaggcgcggcggctgcgtggcgtgtacgacaagctcgctctcgagggcttctcttccgcgcaaatcgagcaggcgctctccgcgatacccgattcggcgacgtttgaatcggcgttggactggctatgttttaatctgcctggcgatgagctccccctcaagttctccagcgctggcgacagcaccatgtcgtctctcacaggagctgaaggttctgttaaagtactgtccacagccaaggacaattgggtgccacagagtcgtgaacctgaggaggtgaaggtgagcaccgaggggttggaagttagaattggtgggcggagagatgagaatgtgtcactggatgatgggcgattgtcacaagctgcatggattcgtcaatacatggaacaacaagaggaggaagaggatgcaaattccaatgattcctctacatgggaggatcactgcttacaaagttttgaagttgtcgaagcaaagccaagtaggcggaagagcaaggctgcaaaaaagaattccaagcatggaaacttgaaggaacagataagctatcctaccaattctgtatcttcaaattctgaaactgcaaatgttgagggtgttcagaatgatttagaggcaagtgaggaaagatctgagagtctaggcaatattgatgaaggatctgatttgaaaaaggaaattcctaaggatattgataaaacttgtgcaaaggaggtagacgaagaggtgatagagcttgataacatgttctttgaagactcatctgcttgggaagcagtggctccagaaatcttgaaacagcaacaaatagagaaattatcacatgatggttatggccatcttattggaaacatagatgatatatggaagaagggagattctggtaaaatgccgaaagctgttctacaaaagttttgtcaaaaacttggttgggaagcaccaaagtataataaaatatctgagagagatggcaaatttgtatattctgttaatgtgttgcggggagctactggccgtggtaagagtcggaaggctggaggcttgacgataatccagttacctaaactacatgaagaatatggatctgttcaggaagcacaaagtcgagttgcagcttttgctctatatcaattttttgctgaccttccactacgtcaactgcttactgagccatactcatcacttattttaagatggcaagaaggtgaattgtcatctacatcaagggtgctggttacggaggataggcgaagatctggctttgtagatatgttattgaatatagatgcagatacaattccttcatctgaaatagaaaattctgatactgatgtcatatctatggattctgggaatactgaaggcagcaaatctgtgaatgagaagagacagactaccatgacgagttgtatgggattgaaatcagcagagcgtgcagagagtgcaattttgaaaaagcagttggaagataaaaggaagctaccaaattacttgaaaatgctggaagcaagagcttctctaccaatagctagacagaggcaacacttcctacagttgctgaaagagaacgatgtagttgttgttagtggagaaactggatgtgggaaaacaactcaggtgccacagtttattttggatgacatgattgaatctgaacttggaggttcttgcaatatagtttgcacacagccccggcggatagcggctatttctgtggccgaaagagtatctgatgaaaggtgtgaaccatcacctggatcgaatgattcactggtcggataccaagttcgtctcgacagtgcacggaatgagaggacaaagcttttgttctgtactactggtatccttctcagaaagttatctggaaacagagacttaagtgatgttacccatgttgttgtggatgaagtacatgaacgtacaattttgagtgacttcctgcttattgttcttaagaatcttgttgagaaacgctccaatcaacaaggaaggaagttgaaagtgattctcatgtctgcaacggttgattcaagcctatttgcacgatattttggagaatgccccgtgatcagtgttgaaggaagaacacatccagtgtcaactcattttcttgaggatgtttatgagaaaatggagtactgtcttgcattggattctcctgcatcaggagcttactttgcgcagcatggggaaaagtggaagcatgctagcagctcagtgaacaaccgacgaggaaaaaagaaccttgtcttatcctcatggggtgatgagtcaacgctttccgaaggctatgttaaccctcactatatttctgattactataggtcatataatgagagaaccaaccaaaatctaaaacgcttgaatgaagatgtcatcgattttgatctattggaagacttgatatgctatattgatgagaactgtcctcagggtgctattcttgtttttcttcctggagttgcagagattgacttgttgattgatagattatctgctttagttagatttggaggggcatcatctgattggatccttcctttacattcactgcttggaccctctgatcaaaggaaagtgttccagtctccaccagataacttccgcaaggttattattgccacagacatagcagagaccagcattacaattgatgatgtagtatatgtagttgatactggaaagcacaaggagaaccgttataatccacacaagaaaatgtcaagcatagtagaagattggatttctcgtgcaaatgcaaaacagagacggggtagggctggtcgtgtgaagcctggtttatgtttctgtctgtatacaaggcatcggtttgaaaacgtcatgcgtccatttcaggtgcctgagatgttacggatgcctttgactgagctgtgcctgcaaataaaatcacttcatcttgatgacatcaaatccttcctgctaaaggcagtagagccccctaatgaagaagctatttcctctgcagttgacttgttatacaaggttggagcttttgaaggacatgaagagttgtcacctcttgggtatcatctggcgaaactgcctgttgatgttttgattggaaagatgatgctttatggtgctatctttggttgtttatcaccaattctgtccgttgctgctttcctgagttataaatctccatttctctctccaaaagatgagaagcaaaatgtggagaaagcaaaagccacattattgaatgagaaccttgatggatctagttctgtaacagataataaacaatccgatcacctgctaatggtaattgcatacgacaaatggtcccgcatactgctacaggtttctaataagctggtttttttaatttcagaatggtgataaatctgctcgtcagttttgccattcattctacttgaatagtactgtgatgcacatgatcagggacatgcgtcttcagtttggtaccttgttagcagacattggacttatagatcttcctaaagatactctgaggcacaaggtgggcagtagaaaaaataatctcgagagctggttttctaatatgtctcttccattcaatgcctatgctcgctgcacctcggttattaagtcggtgatgtgtgcaggtctataccctaatgtggcagcatctctagagggtgttgatcctggagctctaggtggaagaaagccatctgatgttctgttcagtaaggaccgtcctcgatggtatgatggaaggcgagaagttcatatacatccatcatctgttaatcacagcttgaaagctgttcaatatccatttttggtgtttcttgaaaaggttgagacaaccaaggtgttcttacgtgatactagcgtcgtttccccctactcacttcttttgtttggtggttccatggtaatccaacatcagacaggagtggttgttatagatggatggttgaggctgtctgctgctgcacagactgctgttttattcaagcaacttcggatgactcttgatgctgttctaaaagaactgacaagaaaaccagagatggcaacttttgttgacaacgaagtggtcaggtccatcattcatttattgttagaagaagacaaggctcgataagcatgaattcatggcaatcctatcgatactaattttttagtaaaaacactatcggtccctaaaattttttagtaaaaacactgtcggtccctaaacttttaagtgtatcatccggttcctacactcctaaaatgcacatcgagctttctttggtagggaaacttgtatgattgctcgtttgaatcattctactgcatatcactaataaaatata

SEQ ID NO: 199716 - DNA, 2505 bp, Zea Mays
tcttcccgtccgccgccagagcggggaacacctgcaccgccttcaccagcacttgccggagaggacgtgacctctcccgccgacaaatcggtcctcttcgtccgggcgtttatcaaggtattcaagttttgtatcaccaagatggtgcagtacaattttaagaagatcacggttgtccctcctgggaaggacttcattgacataatcctgtcccgcacccaaaggcagacaccgacagttgtccacaagggatatgctatctcccgcattcgtcagttttatatgcgcaaggttaggtattcccagcagaacttctatgaaaagctctcgaccatcatagatgagtttcctcgactggatgacatccaccctttctatggtgatctcctccatgtgctctacaacaaggatcactacaagcttgccctgggtcagattaacacagctaggaacatcattgcaaagatatccaaggactacttgaggttgctcaagtatggagactctctttaccggtgcaagtgtctgaaggtggctgcactaggtcgcatgtgcactgtcgttaagaggatcagtcctagtttggcttacttagagcagatccgacagcacatggctaggcttccatccatagacccaaacacccgtactgtgctgatttgtggatatccaaatgtggggaagagttctttcatgaacaaggttacaagggcagatgtggatgtccagccgtatgcctttacaacgaaatccctgtttgttggtcatacagattacaagtacctgcgctaccaagtgattgacacaccgggtatacttgatcggccttttgaagataggaacatcatagaaatgtgcagcatcactgctctggcacacttgagggctgcagtgttgttctttctggacatctctggatcttgtggatacagtattgctcagcaagctgctctcttccacagtataaagtctctgttcatgaataagcctttggtcattgtgtgcaacaagactgacttgcagccacttgaagggctttctgaggatgacatgaagctagtcatggagatgaaggcagaggctttgaagactataatccaagctggtggtcctaatgatgagggtgttttgttgactatgagcactttaactgatgatggtgtaatggctgtcaaaaatgctgcatgcgagaggcttcttgaacagagggtggatgtaaagatgaagtcaaaaaagatgatggattgcttgaatagatttcatgttgctctgccaaagcctcgtgacaacaaggagaggcctgtttgcatccctctggctgttctggaagctagggctaatgctgctgcaaaggaaaagaagcttgagaaggacattgagaatgagaatggaggtgctggggtctattctgcaagtctcaagaaacattatattttggccaatgatgaatggaaggaggatattcttccagagatactggatggtcacaatgttgccgattttctggatccagatatccttgtaaggtgtgaagagttggaaagggaggaagggcttcgtctggaagaacaagctgcagaagatgctttccagattgatggtcatgaactaactcaggaacagaaggagattttggctcagattaggaagaagaaggcattacttatccaagaacatagaatgaagaagagaactgcagaaagccgtcctattgtccctagaaagtttgacaaagataggaaattcacaactgataggatgggacgccagctttcatccatgggtatggatcctagtgctgccatgaatagaattcgcagtcagtctaggggtcgcaagcgtgagaggtcagtgagcagagctgcagcggatggtgacggtatggagatagatggccagcaaagcaacaagaaattgcgtcggacatcaaggtctaggtctaggtctaggtcacgtgctcctgaggaagtccttcctggagaaggattcaaggactctgagcagaagaaaaaggctatcaagaaagcaaaggccgctactaggaacaggaacaaggaagctcgtcgtggagaggctgaccgtgttattcccactttaaaaccaaagcatttgttttctgggaaacgcactcttggaaagacaagcaggcgataagctcagtacctcactggatctggtagtaaaggactggtgcaattttggtgtgagcaatttgatgaaacgggagcttttatgtctagcacttatgtatgctacttatttatgaaatgtcttgctgttgctgtatcatggtcctctttaagacagttttactagtttatacatgtattacttcgaattggttgggttactatatattagctttctggtgtttgattctcttaatggtacgaagttattcaactctcctacttaaaaatgtttgtaatgcatctgttggatctcaccatcggttcttccctccgcagctttgaggcaggaacttctcataatgattagttgctt

SEQ ID NO: 199717 - DNA, 2207 bp, Zea Mays
tcttcccgtccgccgccagagcggggaacacctgcaccgccttcaccagcacttgccggagaggacgtgacctctcccgccgacaaatcggtcctcttcgtccgggcgtttatcaaggaataggtattcaagttttgtatcaccaagatggtgcagtacaattttaagaagatcacggttgtccctcctgggaaggacttcattgacataatcctgtcccgcacccaaaggcagacaccgacagttgtccacaagggatatgctatctcccgcattcgtcagttttatatgcgcaaggttaggtattcccagcagaacttctatgaaaagctctcgaccatcatagatgagtttcctcgactggatgacatccaccctttctatggtgatctcctccatgtgctctacaacaaggatcactacaagcttgccctgggtcagattaacacagctaggaacatcattgcaaagatatccaaggactacttgaggttgctcaagtatggagactctctttaccggtgcaagtgtctgaaggtggctgcactaggtcgcatgtgcactgtcgttaagaggatcagtcctagtttggcttacttagagcagatccgacagcacatggctaggcttccatccatagacccaaacacccgtactgtgctgatttgtggatatccaaatgtggggaagagttctttcatgaacaaggttacaagggcagatgtggatgtccagccgtatgcctttacaacgaaatccctgtttgttggtcatacagattacaagtacctgcgctaccaagtgattgacacaccgggtatacttgatcggccttttgaagataggaacatcatagaaatgtgcagcatcactgctctggcacacttgagggctgcagtgttgttctttctggacatctctggatcttgtggatacagtattgctcagcaagctgctctcttccacagtataaagtctctgttcatgaataagcctttggtcattgtgtgcaacaagactgacttgcagccacttgaagggctttctgaggatgacatgaagctagtcatggagatgaaggcagaggctttgaagactataatccaagctggtggtcctaatgatgagggtgttttgttgactatgagcactttaactgatgatggtgtaatggctgtcaaaaatgctgcatgcgagaggcttcttgaacagagggtggatgtaaagatgaagtcaaaaaagatgatggattgcttgaatagatttcatgttgctctgccaaagcctcgtgacaacaaggagaggcctgtttgcatccctctggctgttctggaagctagggctaatgctgctgcaaaggaaaagaagcttgagaaggacattgagaatgagaatggaggtgctggggtctattctgcaagtctcaagaaacattatattttggccaatgatgaatggaaggaggatattcttccagagatactggatggtcacaatgttgccgattttctggatccagatatccttgtaaggtgtgaagagttggaaagggaggaagggcttcgtctggaagaacaagctgcagaagatgctttccagattgatggtcatgaactaactcaggaacagaaggagattttggctcagattaggaagaagaaggcattacttatccaagaacatagaatgaagaagagaactgcagaaagccgtcctattgtccctagaaagtttgacaaagataggaaattcacaactgataggatgggacgccagctttcatccatgggtatggatcctagtgctgccatgaatagaattcgcagtcagtctaggggtcgcaagcgtgagaggtcagtgagcagagctgcagcggatggtgacggtatggagatagatggccagcaaagcaacaagaaattgcgtcggacatcaaggtctaggtctaggtctaggtcacgtgctcctgaggaagtccttcctggagaaggattcaaggactctgagcagaagaaaaaggctatcaagaaagcaaaggccgctactaggaacaggaacaaggaagctcgtcgtggagaggctgaccgtgttattcccactttaaaaccaaagcatttgttttctgggaaacgcactcttggaaagacaagcaggcgataagctcagtacctcactggatctgagttatcctgttttttacaattgca

SEQ ID NO: 199718 - DNA, 3056 bp, Zea Mays
tgaccaccttctcctcctgtacacagctcagcacttcagcagcagcatcgcatcatatcgccctcgtctccagttctcctctctctcggtcttaaaaatccagcgccaacgcggccgccggacgcgcattgctctccctccctgcctcgtctcctcacctcattctcgccacatcttcctctgctcccctcctcccaggtggcgttcttggagctccagctcctcgagctgcgtctgtctacgccgccgcggttgtcgcttgggtggcggcagcccgcaatggggaggagcagccgcgcctgctcccttctcggttccgcccagctgctcctcctgctgctgctctcgctcggctccgcggccgcccagaagggctccacatggaagaccctgagcggcaaggctccagtaatcgttgctaagggcgggttctccggtctatttcctgattccagtgattttgcttatcggattcttgggaccattagctcccctgacacagtcatgtggtgtgatgttcggttgacaaaggatggcgatggtatctgcctaccgagcataaacatggataactgcacaatgatagacaatgtttttccagaagggaagaagacctacaatgttaatggtgtatctacggtgggatggttctccgtggactatacgagcactgatctgctgccaaacgtgacactgaagcaatcggtcctatctcgtacccctgtttatgatggttccatgttgataaattctgttgaaaatgttttcacctcatttaacgcctctgcagtttggttaaatgtccagcaagacagtttctacagccagtttaagcttagcatgcgaaactatatcctgtctttatcgaaacaattcattactgattacatctcatcgcctgaagtgaacttcctcaccagtatatctggaagagttagcaagaagacaaagcttgtgttccgctttcttgacgaaggctctattgagccatcgacaaaccagacatatgggtccatgttgaaaaatctaacatttgtcaagacttttgcctctggaatacttgttcccaaaagctatatctggcctgttacaccagataattacctactgccttatacttcagttgttgatgatgctcacaaagcggggctagaaatctatgctgctgattttgcaaatgactttactatcagctataactacagctttgatccattagcggaatatctttccttcattggtaacagtgccttctctgtcgatggtgtgttgactgatttcccgattactccttcagaagcagttggttgctttagtaacctgaacaacagcaagatcgaccatgctaaacctctggttatctctcataatggtgctagcggtgactacccagactgcactgaccaagcttatgaaaaggcagttgccgatggtgcagatgtcattgactgtcctgttcaagtgaccaaagatggcatactgatatgcatgagttctgttgacctaatggatgttactactgttggaaaatcatcatttacttcgcaagtaactaccatcaacgatctgaaggctggtcctggagtcttcaccttcaaccttacttgggatgatatttctaagaacctacagcgtaagttgatttgataccatttcgcctactttttgtaaacctgaatgtttgctatgcaaaatagatgccaaatgtttagatatcctcatgtatatatagttatgctaagtcatcttttttgtgcaattcataactcgtgaatagttaatgtgtaatttttactgcactggtcacacatttgcttcaaaactaacaattttattggcagccatgatatcgaacccaatgagcacctataaactgtacagaaatcccagaaacaagaatgcaggaaatttcatgagattatcagactttttgacgtttgcaaagggaaaggatttgtcaggaatcatgataactgttgagcatgctgcattcatggcagagaagcttggatttggagtggtagacgcagtggtcaaagcacttgatgactctggttatagcaaacagactgcccagaatgttatgattcagtcaaccaacagctcggtgctaaagaagttcaagcaggaaaccaagtacagccttgtctacatgattgaagaaggtgtcagagatgccgcaccttcatcccttgcagacattaagaagtttgctaatgccgtctctgttagcaccacatctgttttaccacagacccattattatttgacaaaccagaccaataagcttgtcacgtcccttcagtctgcgggcctccaagtttacgtctatgtgctcatgaatgagtttgcatctcagccgaatgacttcttcgcagacgccacttcacagattaatgcttatgtgcaaggtgctaaggtggacgggatcatcactgatttccctgggactgctcacagatacaaattgaactcctgcacgagcatgggaaacagcgcaccactatttatgcagcctccgcaaccagaaccagccctacctccagtcagtaacaccacaacagctgcatctccttcgcatgccgccctcagaatgcgaaccgatgtctcgatcctcatcgcattgctgatgctatgtgcttccctcctcatctgaaggtagtcctgcacaacatcatatgcggcgtggtgcattagagctgaggatttcacattgagctgctaatagcaattctttccaccatttatgtagcgatttttttttcttgttctgtccggtgttttgaaggatggatggatgttcagcttgatacctcaacggtgacacttgtgtgtgctgccgctgcctctaggtatattttggtacatatatgtggtgatacattgttcaggtcatcttttctactgccaaaccctggcccggagggcaaaaatattcactgcaaactgttgtaactgatgttaggcatacacaaattcatctcaaacataaacacaatcttattgatagtctagaacacccagagaaggtcatacagtggcatgggagctagtgc

SEQ ID NO: 199719 - DNA, 3336 bp, Zea Mays
tgaccaccttctcctcctgtacacagctcagcacttcagcagcagcatcgcatcatatcgccctcgtctccagttctcctctctctcggtcttaaaaatccagcgccaacgcggccgccggacgcgcattgctctccctccctgcctcgtctcctcacctcattctcgccacatcttcctctgctcccctcctcccaggtggcgttcttggagctccagctcctcgagctgcgtctgtctacgccgccgcggttgtcgcttgggtggcggcagcccgcaatggggaggagcagccgcgcctgctcccttctcggttccgcccagctgctcctcctgctgctgctctcgctcggctccgcggccgcccagaagggctccacatggaagaccctgagcggcaaggctccagtaatcgttgctaagggcgggttctccggtctatttcctgattccagtgattttgcttatcggattcttgggaccattagctcccctgacacagtcatgtggtgtgatgttcggttgacaaaggatggcgatggtatctgcctaccgagcataaacatggataactgcacaatgatagacaatgtttttccagaagggaagaagacctacaatgttaatggtgtatctacggtgggatggttctccgtggactatacgagcactgatctgctgccaaacgtgacacgtaagtgcagttacaaatttgtgcttcactgtggccttcagcattttgatattgtgaactgtgatggtattctttatatgtacggaaagaaacatgttcaaatatctgtgccttgaatcttataccacttaacaaatgcacatgacatgcttcgctaaccctgtttgatattttcagtgaagcaatcggtcctatctcgtacccctgtttatgatggttccatgttgataaattctgttgaaaatgttttcacctcatttaacgcctctgcagtttggttaaatgtccaggtagggataacaataactaacttcgaactacacatttggtgattttcctctcacctgaacatttgttttcttttcaaattgcagcaagacagtttctacagccagtttaagcttagcatgcgaaactatatcctgtctttatcgaaacaattcattactgattacatctcatcgcctgaagtgaacttcctcaccagtatatctggaagagttagcaagaagacaaagcttgtgttccgctttcttgacgaaggctctattgagccatcgacaaaccagacatatgggtccatgttgaaaaatctaacatttgtcaagacttttgcctctggaatacttgttcccaaaagctatatctggcctgttacaccagataattacctactgccttatacttcagttgttgatgatgctcacaaagcggggctagaaatctatgctgctgattttgcaaatgactttactatcagctataactacagctttgatccattagcggaatatctttccttcattggtaacagtgccttctctgtcgatggtgtgttgactgatttcccgattactccttcagaagcagttggtgagtccacctatcctttttttttcatgatgctatgcataagtatctgttcaagaattctatgcactcaagatgccagtgggtcagtgtgaacttttatttagaatagttgttaacttatggaatcatggttcagttatttttatcttttggcacaagttttctaacaagttggaagatgtagcatggatcacggcccttgatttgttcttcttcttcccctgcaggttgctttagtaacctgaacaacagcaagatcgaccatgctaaacctctggttatctctcataatggtgctagcggtgactacccagactgcactgaccaagcttatgaaaaggcagttgccgatggtgcagatgtcattgactgtcctgttcaagtgaccaaagatggcatactgatatgcatgagttctgttgacctaatggatgttactactgttggaaaatcatcatttacttcgcaagtaactaccatcaacgatctgaaggctggtcctggagtcttcaccttcaaccttacttgggatgatatttctaagaacctacagcccatgatatcgaacccaatgagcacctataaactgtacagaaatcccagaaacaagaatgcaggaaatttcatgagattatcagactttttgacgtttgcaaagggaaaggatttgtcaggaatcatgataactgttgagcatgctgcattcatggcagagaagcttggatttggagtggtagacgcagtggtcaaagcacttgatgactctggttatagcaaacagactgcccagaatgttatgattcagtcaaccaacagctcggtgctaaagaagttcaagcaggaaaccaagtacagccttgtctacatgattgaagaaggtgtcagagatgccgcaccttcatcccttgcagacattaagaagtttgctaatgccgtctctgttagcaccacatctgttttaccacagacccattattatttgacaaaccagaccaataagcttgtcacgtcccttcagtctgcgggcctccaagtttacgtctatgtgctcatgaatgagtttgcatctcagccgaatgacttcttcgcagacgccacttcacagattaatgcttatgtgcaaggtgctaaggtggacgggatcatcactgatttccctgggactgctcacagatacaaattgaactcctgcacgagcatgggaaacagcgcaccactatttatgcagcctccgcaaccagaaccagccctacctccagtcagtaacaccacaacagctgcatctccttcgcatgccgccctcagaatgcgaaccgatgtctcgatcctcatcgcattgctgatgctatgtgcttccctcctcatctgaaggtagtcctgcacaacatcatatgcggcgtggtgcattagagctgaggatttcacattgagctgctaatagcaattctttccaccatttatgtagcgatttttttttcttgttctgtccggtgttttgaaggatggatggatgttcagcttgatacctcaacggtgacacttgtgtgtgctgccgctgcctctaggtatattttggtacatatatgtggtgatacattgttcaggtcatcttttctactgccaaaccctggcccggagggcaaaaatattcactgcaaactgttgtaactgatgttaggcatacacaaattcatctcaaacataaacacaatcttattgatagtctagaacacccagagaaggtcatacagtggcatgggagctagtgc

SEQ ID NO: 199720 - DNA, 3441 bp, Zea Mays
tgaccaccttctcctcctgtacacagctcagcacttcagcagcagcatcgcatcatatcgccctcgtctccagttctcctctctctcggtcttaaaaatccagcgccaacgcggccgccggacgcgcattgctctccctccctgcctcgtctcctcacctcattctcgccacatcttcctctgctcccctcctcccaggtggcgttcttggagctccagctcctcgagctgcgtctgtctacgccgccgcggttgtcgcttgggtggcggcagcccgcaatggggaggagcagccgcgcctgctcccttctcggttccgcccagctgctcctcctgctgctgctctcgctcggctccgcggccgcccagaagggctccacatggaagaccctgagcggcaaggctccagtaatcgttgctaagggcgggttctccggtctatttcctgattccagtgattttgcttatcggattcttgggaccattagctcccctgacacagtcatgtggtgtgatgttcggttgacaaaggatggcgatggtatctgcctaccgagcataaacatggataactgcacaatgatagacaatgtttttccagaagggaagaagacctacaatgttaatggtgtatctacggtgggatggttctccgtggactatacgagcactgatctgctgccaaacgtgacacgtaagtgcagttacaaatttgtgcttcactgtggccttcagcattttgatattgtgaactgtgatggtattctttatatgtacggaaagaaacatgttcaaatatctgtgccttgaatcttataccacttaacaaatgcacatgacatgcttcgctaaccctgtttgatattttcagtgaagcaatcggtcctatctcgtacccctgtttatgatggttccatgttgataaattctgttgaaaatgttttcacctcatttaacgcctctgcagtttggttaaatgtccaggtagggataacaataactaacttcgaactacacatttggtgattttcctctcacctgaacatttgttttcttttcaaattgcagcaagacagtttctacagccagtttaagcttagcatgcgaaactatatcctgtctttatcgaaacaattcattactgattacatctcatcgcctgaagtgaacttcctcaccagtatatctggaagagttagcaagaagacaaagcttgtgttccgctttcttgacgaaggctctattgagccatcgacaaaccagacatatgggtccatgttgaaaaatctaacatttgtcaagacttttgcctctggaatacttgttcccaaaagctatatctggcctgttacaccagataattacctactgccttatacttcagttgttgatgatgctcacaaagcggggctagaaatctatgctgctgattttgcaaatgactttactatcagctataactacagctttgatccattagcggaatatctttccttcattggtaacagtgccttctctgtcgatggtgtgttgactgatttcccgattactccttcagaagcagttggtgagtccacctatcctttttttttcatgatgctatgcataagtatctgttcaagaattctatgcactcaagatgccagtgggtcagtgtgaacttttatttagaatagttgttaacttatggaatcatggttcagttatttttatcttttggcacaagttttctaacaagttggaagatgtagcatggatcacggcccttgatttgttcttcttcttcccctgcaggttgctttagtaacctgaacaacagcaagatcgaccatgctgtcctgttcaagtgaccaaagatggcatactgatatgcatgagttctgttgacctaatggatgttactactgttggaaaatcatcatttacttcgcaagtaactaccatcaacgatctgaaggctggtcctggagtcttcaccttcaaccttacttgggatgatatttctaagaacctacagcgtaagttgatttgataccatttcgcctactttttgtaaacctgaatgtttgctatgcaaaatagatgccaaatgtttagatatcctcatgtatatatagttatgctaagtcatcttttttgtgcaattcataactcgtgaatagttaatgtgtaatttttactgcactggtcacacatttgcttcaaaactaacaattttattggcagccatgatatcgaacccaatgagcacctataaactgtacagaaatcccagaaacaagaatgcaggaaatttcatgagattatcagactttttgacgtttgcaaagggaaaggatttgtcaggaatcatgataactgttgagcatgctgcattcatggcagagaagcttggatttggagtggtagacgcagtggtcaaagcacttgatgactctggttatagcaaacagactgcccagaatgttatgattcagtcaaccaacagctcggtgctaaagaagttcaagcaggaaaccaagtacagccttgtctacatgattgaagaaggtgtcagagatgccgcaccttcatcccttgcagacattaagaagtttgctaatgccgtctctgttagcaccacatctgttttaccacagacccattattatttgacaaaccagaccaataagcttgtcacgtcccttcagtctgcgggcctccaagtttacgtctatgtgctcatgaatgagtttgcatctcagccgaatgacttcttcgcagacgccacttcacagattaatgcttatgtgcaaggtgctaaggtggacgggatcatcactgatttccctgggactgctcacagatacaaattgaactcctgcacgagcatgggaaacagcgcaccactatttatgcagcctccgcaaccagaaccagccctacctccagtcagtaacaccacaacagctgcatctccttcgcatgccgccctcagaatgcgaaccgatgtctcgatcctcatcgcattgctgatgctatgtgcttccctcctcatctgaaggtagtcctgcacaacatcatatgcggcgtggtgcattagagctgaggatttcacattgagctgctaatagcaattctttccaccatttatgtagcgatttttttttcttgttctgtccggtgttttgaaggatggatggatgttcagcttgatacctcaacggtgacacttgtgtgtgctgccgctgcctctaggtatattttggtacatatatgtggtgatacattgttcaggtcatcttttctactgccaaaccctggcccggagggcaaaaatattcactgcaaactgttgtaactgatgttaggcatacacaaattcatctcaaacataaacacaatcttattgatagtctagaacacccagagaaggtcatacagtggcatgggagctagtgc

SEQ ID NO: 199721 - DNA, 3367 bp, Zea Mays
tgaccaccttctcctcctgtacacagctcagcacttcagcagcagcatcgcatcatatcgccctcgtctccagttctcctctctctcggtcttaaaaatccagcgccaacgcggccgccggacgcgcattgctctccctccctgcctcgtctcctcacctcattctcgccacatcttcctctgctcccctcctcccaggtggcgttcttggagctccagctcctcgagctgcgtctgtctacgccgccgcggttgtcgcttgggtggcggcagcccgcaatggggaggagcagccgcgcctgctcccttctcggttccgcccagctgctcctcctgctgctgctctcgctcggctccgcggccgcccagaagggctccacatggaagaccctgagcggcaaggctccagtaatcgttgctaagggcgggttctccggtctatttcctgattccagtgattttgcttatcggattcttgggaccattagctcccctgacacagtcatgtggtgtgatgttcggttgacaaaggatggcgatggtatctgcctaccgagcataaacatggataactgcacaatgatagacaatgtttttccagaagggaagaagacctacaatgttaatggtgtatctacggtgggatggttctccgtggactatacgagcactgatctgctgccaaacgtgacactgaagcaatcggtcctatctcgtacccctgtttatgatggttccatgttgataaattctgttgaaaatgttttcacctcatttaacgcctctgcagtttggttaaatgtccaggtagggataacaataactaacttcgaactacacatttggtgattttcctctcacctgaacatttgttttcttttcaaattgcagcaagacagtttctacagccagtttaagcttagcatgcgaaactatatcctgtctttatcgaaacaattcattactgattacatctcatcgcctgaagtgaacttcctcaccagtatatctggaagagttagcaagaagacaaagcttgtgttccgctttcttgacgaaggctctattgagccatcgacaaaccagacatatgggtccatgttgaaaaatctaacatttgtcaagacttttgcctctggaatacttgttcccaaaagctatatctggcctgttacaccagataattacctactgccttatacttcagttgttgatgatgctcacaaagcggggctagaaatctatgctgctgattttgcaaatgactttactatcagctataactacagctttgatccattagcggaatatctttccttcattggtaacagtgccttctctgtcgatggtgtgttgactgatttcccgattactccttcagaagcagttggtgagtccacctatcctttttttttcatgatgctatgcataagtatctgttcaagaattctatgcactcaagatgccagtgggtcagtgtgaacttttatttagaatagttgttaacttatggaatcatggttcagttatttttatcttttggcacaagttttctaacaagttggaagatgtagcatggatcacggcccttgatttgttcttcttcttcccctgcaggttgctttagtaacctgaacaacagcaagatcgaccatgctaaacctctggttatctctcataatggtgctagcggtgactacccagactgcactgaccaagcttatgaaaaggcagttgccgatggtgcagatgtcattgactgtcctgttcaagtgaccaaagatggcatactgatatgcatgagttctgttgacctaatggatgttactactgttggaaaatcatcatttacttcgcaagtaactaccatcaacgatctgaaggctggtcctggagtcttcaccttcaaccttacttgggatgatatttctaagaacctacagcgtaagttgatttgataccatttcgcctactttttgtaaacctgaatgtttgctatgcaaaatagatgccaaatgtttagatatcctcatgtatatatagttatgctaagtcatcttttttgtgcaattcataactcgtgaatagttaatgtgtaatttttactgcactggtcacacatttgcttcaaaactaacaattttattggcagccatgatatcgaacccaatgagcacctataaactgtacagaaatcccagaaacaagaatgcaggaaatttcatgagattatcagactttttgacgtttgcaaagggaaaggatttgtcaggaatcatgataactgttgagcatgctgcattcatggcagagaagcttggatttggagtggtagacgcagtggtcaaagcacttgatgactctggttatagcaaacagactgcccagaatgttatgattcagtcaaccaacagctcggtgctaaagaagttcaagcaggaaaccaagtacagccttgtctacatgattgaagaaggtgtcagagatgccgcaccttcatcccttgcagacattaagaagtttgctaatgccgtctctgttagcaccacatctgttttaccacagacccattattatttgacaaaccagaccaataagcttgtcacgtcccttcagtctgcgggcctccaagtttacgtctatgtgctcatgaatgagtttgcatctcagccgaatgacttcttcgcagacgccacttcacagattaatgcttatgtgcaaggtgctaaggtggacgggatcatcactgatttccctgggactgctcacagatacaaattgaactcctgcacgagcatgggaaacagcgcaccactatttatgcagcctccgcaaccagaaccagccctacctccagtcagtaacaccacaacagctgcatctccttcgcatgccgccctcagaatgcgaaccgatgtctcgatcctcatcgcattgctgatgctatgtgcttccctcctcatctgaaggtagtcctgcacaacatcatatgcggcgtggtgcattagagctgaggatttcacattgagctgctaatagcaattctttccaccatttatgtagcgatttttttttcttgttctgtccggtgttttgaaggatggatggatgttcagcttgatacctcaacggtgacacttgtgtgtgctgccgctgcctctaggtatattttggtacatatatgtggtgatacattgttcaggtcatcttttctactgccaaaccctggcccggagggcaaaaatattcactgcaaactgttgtaactgatgttaggcatacacaaattcatctcaaacataaacacaatcttattgatagtctagaacacccagagaaggtcatacagtggcatgggagctagtgc

SEQ ID NO: 199722 - DNA, 2453 bp, Zea Mays
taccagttttatgtccgtccggcaaggctccagtaatcgttgctaagggcgggttctccggtctatttcctgattccagtgattttgcttatcggattcttgggaccattagctcccctgacacagtcatgtggtgtgatgttcggttgacaaaggatggcgatggtatctgcctaccgagcataaacatggataactgcacaatgatagacaatgtttttccagaagggaagaagacctacaatgttaatggtgtatctacggtgggatggttctccgtggactatacgagcactgatctgctgccaaacgtgacactgaagcaatcggtcctatctcgtacccctgtttatgatggttccatgttgataaattctgttgaaaatgttttcacctcatttaacgcctctgcagtttggttaaatgtccagcaagacagtttctacagccagtttaagcttagcatgcgaaactatatcctgtctttatcgaaacaattcattactgattacatctcatcgcctgaagtgaacttcctcaccagtatatctggaagagttagcaagaagacaaagcttgtgttccgctttcttgacgaaggctctattgagccatcgacaaaccagacatatgggtccatgttgaaaaatctaacatttgtcaagacttttgcctctggaatacttgttcccaaaagctatatctggcctgttacaccagataattacctactgccttatacttcagttgttgatgatgctcacaaagcggggctagaaatctatgctgctgattttgcaaatgactttactatcagctataactacagctttgatccattagcggaatatctttccttcattggtaacagtgccttctctgtcgatggtgtgttgactgatttcccgattactccttcagaagcagttggttgctttagtaacctgaacaacagcaagatcgaccatgctgtcctgttcaagtgaccaaagatggcatactgatatgcatgagttctgttgacctaatggatgttactactgttggaaaatcatcatttacttcgcaagtaactaccatcaacgatctgaaggctggtcctggagtcttcaccttcaaccttacttgggatgatatttctaagaacctacagcccatgatatcgaacccaatgagcacctataaactgtacagaaatcccagaaacaagaatgcaggaaatttcatgagattatcagactttttgacgtttgcaaagggaaaggatttgtcaggaatcatgataactgttgagcatgctgcattcatggcagagaagcttggatttggagtggtagacgcagtggtcaaagcacttgatgactctggttatagcaaacagactgcccagaatgttatgattcagtcaaccaacagctcggtgctaaagaagttcaagcaggaaaccaagtacagccttgtctacatgattgaagaaggtgtcagagatgccgcaccttcatcccttgcagacattaagaagtttgctaatgccgtctctgttagcaccacatctgttttaccacagacccattattatttgacaaaccagaccaataagcttgtcacgtcccttcagtctgcgggcctccaagtttacgtctatgtgctcatgaatgagtttgcatctcagccgaatgacttcttcgcagacgccacttcacagattaatgcttatgtgcaaggtgctaaggtggacgggatcatcactgatttccctgggactgctcacagatacaaattgaactcctgcacgagcatgggaaacagcgcaccactatttatgcagcctccgcaaccaggtagcctccttttaaccatggccccagatgtacagccaccagcagcggcgccaatgccgctcttgacggacgctgacgttgcagaaccagccctacctccagtcagtaacaccacaacagctgcatctccttcgcatgccgccctcagaatgcgaaccgatgtctcgatcctcatcgcattgctgatgctatgtgcttccctcctcatctgaaggtagtcctgcacaacatcatatgcggcgtggtgcattagagctgaggatttcacattgagctgctaatagcaattctttccaccatttatgtagcgatttttttttcttgttctgtccggtgttttgaaggatggatggatgttcagcttgatacctcaacggtgacacttgtgtgtgctgccgctgcctctaggtatattttggtacatatatgtggtgatacattgttcaggtcatcttttctactgccaaaccctggcccggagggcaaaaatattcactgcaaactgttgtaactgatgttaggcatacacaaattcatctcaaacataaacacaatcttattgatagtctagaacacccagagaaggtcatacagtggcatgggagctagtgc

SEQ ID NO: 199723 - DNA, 2762 bp, Zea Mays
cctgccctcagacttcctctttcttccccttctcagcctttccctctcttctctgctctttgcatctctctcttgttcctcccttcctctctctaaaaaagggttctgatccctttctagaagctcctgggtttctgttgccgacccgagctccccaggggcgctcaggaggcgccgagccggcgaccgctccggcggatctgaggagccgccgcggtcgctttgcctccggttccttgtaaactattgattgggaaacactctgaagaagagtttgttggctgcataacatctcctgaagctggtttgaagtttgctgataggaaagatcatgggcgctctctgtgatttctgtggggagcataggtctatggtttactgccgatcagatgcagcatccttgtgtttatcatgtgaccgtaatgtgcattcagctaatgctctttctcggcgtcatacaaggacacttttatgtgaccggtgtgcttcacagcctgctatggtccgctgtctagcagaaaatgcctcgctttgccaaaattgtgattggaatggccacattgcaggatcctcatctgccggacacaaaaggcagactataaattgctattcaggatgtccatcgtctgcagaactttctagaatatggtccttcgtttcagatattcctaatgtagcacctgagccaaactgtgagcaaggaataagcatgatgagcatcagcgacagtggtgtcagtaatcaagataatgctgcaggggacagtattttgttagatatagctagtgcaacacttgtaagtgatattggtacttgtgacaagcttttggtaggttcctcttcaggagctggagtgaacctacttccactggctactggtcaaacagaaacagctggatctgtggattccacaccagataaggttccctatacgccagataaagatatgttcagtaaggacagcatatatgaagatttttgtgtggatgacgctgaccttgctttcgaaaattatgaagaactctttggtacctctcatattcaaacagaacaactctttgatgatgctggaatagacatttactttgaaatgaaggaagcacctgctgggaattccactgaggtttgtagtttgctaatgaatatttttttcttaatccgttacaatcattcacatccatgtgcacatgcacttctcatagtgttggtgttctctttgctatgccaattaactgaaccaattctgtagtcctcccaatttgtgtaacttataagccgttcattttcctgttaactcatcaaaattgaactgtgtgataagtttttccaggtgcagtttaatttttagtttgggaagggcaggcctggtgcagtgtccaagctgaagcaacctgcaaatagcaatgcggtatctgccgactctgggatgtcgaaccctggagtgaaaggtgattccagtgtttgtacccctttgaggcaggctaggtctagtctgtctctttcctttgctggtttgactggtgagagtagtgcgggagaccaccaagattgtgtggtatcatcattgcttcttatgggtgagcctccttggcagcctcctggccccgagggctcaattgctggaggtagtagagacagtgcactcacacgatacaaggagaagaaaatgagaagaaagttcgacaagaaaatcaggtacgcttctcgtaaggctagagcagatgtgcgaaagagggtaaagggtcggtttgttaaggctggtgaagcatatgactatgatcctctctgccaaacgaggagttactgaagcatatgatctttatccagttttaaattagcaaactgcaaccaaggctcgttgcagctagaacaaaagcactggcaatccaagctattgggccaaactgtgccttcgaaaagaaaaaaaaaggagaaagctgtcggcatgataaaatatagagaaatatttggatgttgcagaagtttttgagtgaggatcctcctttttcctcctgtacagtggttggaagcggtttgagtctctccatcttttgtgaattagcctgaatccagctaaacagacttgttgcattttgatctccattctgcatttctgctgactgccatcagtctacgtacacgggctggcggctgcggtgtttttggaggtgttcgtccagattagacaagatggctagatgtgatctgtgaaatatccttctattataataatgtaaaatttgctgggacctggatgtttctgctattatcaatgtgcaaataccaggtcgtagccaaactggtcgtcagtttgttctttttaagttggtgatggaacccatccaactggacagtggacaccaactttctgtgctcattctgtccaaaccaacctccaaactgactcgatgttagtactatttgtattatgtgactcctgagcaagtgagcttgtgctcaaacctcaaatacgtcctcttgtaccaaaccacgatattggagggtaaatttttgacctgttcctttgttgttgaaacttctggttattttggaaaaaacaaatgtggaacactgctttgtggcttttctgttctgcactgttgtactcagtcttgcaaattagaagacgatgtggcatttttagacatagttatgtatttagatatatactatgtctaaatacctggtgaaagaaatgtatctagaaaaatcaaaacatgttataatttagaatataatagagaatagagtgagtatttgac

SEQ ID NO: 199724 - DNA, 632 bp, Zea Mays
ggcttcctgctgcactgctgcttgactcaggggcagacctaggtttttttattgggtgcattggcaaaacttggagctactgtagtcacctatccattgctagtcgtgaagtcaaggttgcaggcaaaacaagaaattggcagcaatgtgatgtccagatacacgggtacaatagatgcgataataaagatggttcgctacgaaggactacacgggttttacaaaggaatgggcacaaaaattgtacaaagtgtctttgctgcctcggttctctttatggttaaagaggaattggtcaagttagcagtgcttttagttgcgagtagtaggactatgcttattactacatccaagaaacaataggtggtggtgtatttgggagaaaagctcatttttttgcctcaacttgtaatgtatagggtcccattatacatatcctgttcaagatcaatatgaaattctttactggttactagagaaaaccttaaagcctctcaaaagccataccttccccttattaatgaaggataaaatcatctaaaagatattacatgttttgggtttaactgatatacaaaattaagggtatgtttgttttagcttcttgaactagatctggtgccaaaaatctg

SEQ ID NO: 199725 - DNA, 985 bp, Zea Mays
tgctatctcattcagtcctgagttctgatcctctccgtctctccctcctccctctccatccaaagtgtagtgtagacagtaacccacatctcgtttcctcgccgcggccacggcgccgactgagcgaggtcttcatctgcgcttcaccagcgacgattatccactaggtaggggatcatccgatcatgtcgagcgcggcggtgaacgggctgtccggcgccggcggcggcatcatcgcgcagatcatcacctaccctctccaaaccgtgaacacccggcagcagacggagaggtcaacgaagaagaggaaggccaggagcggcgccagcgccaccccagcctccaccatgtaccagatgctccagctgattcaaaccgaaggatggagtgggttgtacagcggcctcaagccctctctcatcggcactgccgcgtcgcagggaatctattactacttctaccagatcctcaagaacaaggtggaagatatagcggttgctcgtagcaagaagggccttggggatggtactgtcgggatgctttcttggcttggtattgcagctgttgctgggtcaatcaatgttcttctaaccaatccaatatgggttcttgtgacacgtatgcagacacatactcaagcgaaaagaaaaatattggagtctaagagggagcttttactgaaagaaatgtctagggcgaattcgttggaggttgcagttctgaaggataggctggttaaattggagtcagaaaaagctcgtccatatggtactcttcaagcgatccaggaggtttaccatgagtctggtgtaagaggattttggaaagggcttattccaacattaatcatggtatgtaatccatcgattcagttcatgatctatgaaacattggcaaagcgtctgcagtcaaagcgttctggaaagcagctaccaaaaaggcacctcacagctatggagttccaggatacaagcgccggtggggg

SEQ ID NO: 199726 - DNA, 944 bp, Zea Mays
gcattataaacctaatctcattggtggttgctgaaagagcgcttttcatgtggaacaatgatcacattgtcagcttgatagcacaaaaccgccaagtgatcatgtctcttgttgttccagcgctagagcagaacattcagaatcactggaaccaagcggtcctgaatctggctgtgaatgtcaagaaaatgttttctgagatggatggtgaccatttctcgtcgtgcctggccaggtacaaggaggaagaagaaagacttgtgtcgctagaagcgaagcgtaaacttacctgggagaagcttgagtcagctgcagccttccagccagtgactggccaaacagccgtcctagtaggccaccagccgtcagcaaatatgatcgccaacctgatcttctagcccatgcatgccgaacaagcaaatgtgctcttccccccttttggtgaagcgcagcaagtgtaggtgttccctaattttctcatgcttttttttttgcatttgttggtgcgagtaatcagtgtagtaagctgtaactatttctggatggttatgttcatcaggcaagaatacctgtaatgtgagactgctgagtgctggcactccttacatgtatctttgccaatttgtggatgaacaaattgtcctacagttgaatttcacctcagcttgcctattatgattggctgacgcagaatcatcaagtgctatttttatttccaaaatgtctgaagctttggtttgaattcaatccattctcacagcttaccactgcgattcaattttgaaatggacatgttgttagactgtttgtgtgttctgggcctagagtccacttagggcttgttcgtttccgtcggattgcacccggaatcgttccagctaatcaaagtttatataaattagagaagcaatccgattaggaatcgttccgacccaccaatccgg

SEQ ID NO: 199727 - DNA, 2544 bp, Zea Mays
atcaatcgccacgccactaccgagctcaggcaaggcctgagagcaaatcaccctggcctcacatcgcacccggcagcagcagcaaacgaggccgaggccgaaggaaccaagcggaacgaagaccaaaatcacatcacgtagctacagctcctccgtcagcagccggggagcccagcccagcagcactttgtcccttgcaccgatcgttcctccgtcctcctcgcgtcctcgccttgcgcgagcactgcaccagcaagttagttctcccgttggttgatttgtgtactggggcatattggattggaggagccagaaaacttgaaaacccagagaattactttgaacttatatttatgtcctgatttatggaatcccatttctaagagatgccatcatcgataccaccaccgccacaaaattttctcccactgccatcaccaggggttgggcagagcactcgtattaaccttggggaaatcaagctaaaactagttaagaggattggtctagagcgagcaaagaggtactttgagcacctgcagaggtttttgtctttgaagctgagcaagagtctatttgacaagttctgcctcacaatacttggtgatgataacattcagcttcataaccacctcgtttgctcaattctccacaatgcttgccaagcaagtgggccatcgacagtcagtacacctaaatcaattggagttgccaagaattcaaatcatgtcttaagtcctacagtccctttctctgacattggtgatgttctgcatcatcatgtcaaggaccactatccacgaagcagaaatgcacatgtcgtccaggagaatggtgttgtgcgtttgtccaaactgaagagatttccgcagcctcacagtgaacttgtggaactactgtccaaacgatcacgtgtggagaatgcatattcaaatttatcagaccccataaatagcaactgtcctggtgtctctggtagagaatatgtggaagctgttgcacagcatgctcgaggtccaataattgccccactaggggttgccttctgttctggtcatttcggtgggaattcaaaaaccttgacacttccctctggtgctagcagtgatgactctatttgttgttatgaccttggtcagctgtgtgatacttcatcactgagacagcgtatggggagaatagcagaaacagaagggttggatgctgtgtcattagaatgtgctaattcattgaataatggagttgatttttacttgaaataccttattggatcatgtattgagctagtaagagcaagatctcagcatgatcgaataaatcatatggcactaaaacaacagttaagtcaaaagctaataaatggtgtgcagctccaaaatcaggtgcatggtcaaagtgccactacatgtccgcaaatcagctcggtttcattgcaagacttcaaggctctatcagagacaattcctcagctgcttggagtcaatgcatcactggtacttgaaaaaataaattcatataactaatcaattcggatgcaaatggatcaatgcttccgcagagtttaatctttgcctatcagacaatagaattgaaagctcaaaattgtatctttgtcacatgcaccatcaggcaatgctgaagtgtttcttcctgtttcatctctattgccttgcgaagtccaagcctgcctccatacacttattgcagctgaggcaatggaagatgctgatgaacattgttcaatatcctgttctggtgaaatccacagctcactatcaagactgctccatcaaaataagttcagatctcataacttctagagaatgttgattatacaaagacatcaatttgtcattatgtgcaccagtgaggagtcaagtcaaggctgtacacagaaacatggtgatgctaggtgcaaaacagatttagaacaggacttccaatacaaaaagaagttgatctttccatctaagagagaaggcaaacaactgtggaaaattgaccgcaaagcacaaaaggaggatggataggaaggaaatggcatggttcaaagtattctgccaaggaagaggcatacctgtgctgacctccgagctgttcacacggactccaaaagccgatcaatctctgcgatccatggtcaccaatggaatatagaaggaaggggaatgcttgcattgatgtgccccactttctatggcctgcctccttcacctcgagagtctaggcggtcgctgtgttcaaatagtctggctgaaaagacttcgagaatgtttggcccttgtgcttccttttttttttgtattcggtgggcggtctataaatagtgagcagagacttccctccattgatgattcatggtgtgtggagggcactccgctattcttggggatccgccgttttgtgtctttcaagcctattaacggcaggcagccgggcacggttacttgcgtgcctgcgtatgaactgccagctttgctgcacatgttgcatgtttgacaagagattgttgtatacggtgtaacttgaatagcattaactgag

SEQ ID NO: 199728 - DNA, 1448 bp, Zea Mays
ccacgcaccacgatgctctatcgcttagccatgtccaccatgcattatactatgctctgtagctaagctagctgactagctctatctctctctcgctccctagcccagcaagtggacctcgtataaaggggaggccagctgagctcaaggaatcaaactagctagcaataagctacagagcactgcctgttgtttcttcttcctcctctctcccctctcgatcgatcgatccaacaagctaagcttggtccttgctttctagctgcctggtacggtctagcgaccgatcgatcgatcgatcgaccatgtcgtccttgctatgtattagccgcaggaacaacaagaaggacagcgatggcgatggagagtacggtggcgagcagatcatcatcagcacgggcggcgcggccatgaggaagggcccgtggacggacgaggaggacgagcagctggtctgaggcgcaccggcaagagctgccgcctccggtgggtgaactacctccacccggggctccggcgcggccgcatcacggccgatgaggagcgccgcatcgtggagctccacgcgcagtggggcagccggtggtcgcgcatcgccaggagcctgcccgggcgcaccgacaacgagatcaagaacttctggaggacgcggaccaggaagaaggcgctcgaggagaggagggctgccgcagcagcaacgtcgacggcggcggagtcggcgtcctcggtgatgacggtgtcgtcgtcgtccgagtgccgccgcccgcccgtatcgtcgtcgtcgtcgtcgtcttcgctacggcgggacgaagcgcggcgcagcggcgacgagaccgaggaggcgtccacgcccaccgcggcgccggcgaccaagcacgatgaggaaccccagccgcagccgcaggagtgctacgacttccccatggaccagctgtggaacgagatcgcggcagccgatgcggcggcgatgagctaccttgtcgtggacgcctgctggggcggagctgctgttggtggtcactgttattactacggcgccgccgcagcctcagccgcctcgccgccgccgccggcctcgccgccgtgggagtactgcggctccgatttttcgctgtggaggatcgacgaccaagagtactacaagaagatgctcgactcctcctcctgatcccggcccgcgactcatatcgtttggcgaggacacacgtacatacgcgctctgtgaatttgctagctcatatatattatccaggcgaggcgaggaacgagctgagatcatggtggtgagatgagatgagatgagatgagagagtagtgtgtattaatggtggttcagatcgagtagtgtgataaattaacagaatatatataataatttacgcttctctccgaatccatatatcgatagatgatcgaccgatacttatatattctgtagcatctacacg

SEQ ID NO: 199729 - DNA, 4352 bp, Zea Mays
ccactcacttcccgcccgaacatccgaactgcccgccgccgacttccgctccggcgatgtcggcgaccatggcctctgccagtcagccctcctcgcagcaacctccacctccaccgctcactgccgaaatcgttctccgcctcgcctcgcgcgacccctccaccgcggtgcccctcctcccggagctcccgcccgacgatctcgccgatatcgttgcctcgctcaccgccacctcccccgcgggccacctctcccttctccccgcgatcctcgctctcttaccctccccatcctctgcctcctccgcgttcgccgctctcctctccgcgcccagctggccctcctccacgctcctcgccgtcgccacactactccgcgacctcccgccggcctaccgcacccgcatccccgccttcctcgggaagatcatctctctccttccaagtgcggatgcccaggacctccctgctctctcctaccagctcctcctgctcgcgtccaagccgctctacccgcgcgtcgtcctcgcgggactcctgcgcttcttcggcggccgccgcggcgcccgcgttcgcgcgccgccgtctatcgcgcggcaggtcgagagcaccgcgctgatgaacgtctcgttcgcggtcaagcaggaccccgcgctggcgagggaggtcctggccgccatcaaggctgacgccgcgggcgctctcagtggatttgcggtggcagtgatgctgttcgtggccagggtgccgaggttcaacgagggtgccgtgagtgtgctccgggatgcggtcgtggtgtcccgccgggattaccgaatgtcaaggcggtgcaagtggttgccggattgtatggaaggggaatatgcacgggccactcaatgtgtcgagaagggaatactaaaatctgtcgacgagagcattgttggcagggagcatgttgtgccaagcattgttcaggtggcttttcgcctgttagaagtctcagaaggtgatcaaggtgaggaagctggcttaggtgaaggagtaatgagcaccgaagaaataggcattaatatgctcaaatcattgtttgaggtccatgaaatggcacggactgagataattgaacagtgcaagttccggattctctcggcaaagcctcagcaaagtgtgccagttctcaggttgattggatgcttgattttgagtcatccatttccaatgctggaattcattgcacatttaaaggagttgttggattatttttcttttatgaatgacaagatatcaactgctttgatcagttgcatcttgccactcacaaagttcagccgtgatctgaaggattacgtaatactggttgtaagaaaggcgatgttcaagagggaggacatggttcgaattgctgctacaaatgctataattgagctgattattgcagaaaacaagaaaaatgaagccaatccttttgaagattcaacaagtcagccaagctctagccaacagcctgaaacacatctagagtttggtaggtgtctctttcaggaactaagtgggttgcttcggagatgtctctcacatcaggccagtgtcaaagaggtcttgtacgagggtcttatacgtactgctatctctgatccagctgtttctgacaatatccttgattttctctggcctcacttccaaaactattactcagaggatgcagaatgtcctcttaaaattggttcatgcttcaaagtagagcatgccaaactatgcattgtggaacctttagattgtctgctgtcatgtatctcaagaattctgcaaattaagcaacatagtaaatgtgaacgaccacgtgatgcatattggaagtgctttggttttgctgcttcacaagataatgaggttggacgagcatcatcaagtgatttattcgtgaaagctttatcaagcatccaaaagtatttgaggatatccctcacagagaggacaaagccaagaagctggatctctttcttcaccatcagagatggctcattgtcataactttgctatgcttggaatcattgaggtttttattgatttttctgcttcaaaactggagaaagcctctggcaaatcgaaggaaatgatagaaaaagaaatcgtggagcttgttgatgcgcacagtggctttgagaaaaaaattagcagtggtagggaaaggatagcacggagaagagcaaatgctggtgatgctacagataagcacaccaacgaacccagggagaattctaatgcttcattgcagaaacatcatggaaacaggggtaaatttgctgattcgagtttgtatgaactttcggtaatgtgtgtcaagcagtgccatgctgataactacaacaatgttagtcaacattctagccaaactaaattgaaccagagctccaatttgacatcctttgtactgaaagcctttcttgaattgttgaaatcacttgcatcaaagcacagtagggacttcacaataaagctgcatggagattttaaaaagttaagccagccaataatgcagctagtatggtgttttctgttagacccaattcaagaaaatggtggaagcaagaagaacatgacccaaggaaagaaaaacactgagtgcaaaaaggatcagttatatttggctctgacatgcctaaaaaaattccttgagccaagtgtttcaggagaacactctagtgatatcattgattttctaatatctttggctccacctaatatagaggatacaatgggtactggggatcttgacaataatgataccactatggttgaagatagaagcacaagaaatgtccatgtgattttgaacatactgaagacgttatatgccagacttcttacccaatcagttttacgtgaatctgaggctgtaattgaattgattctgggtatttcaagaaaactgcaacttgaacgaaggcatcttgttggaaaatgggctacagatctatgtagaaagaaaaccatgcaaagtcctagaatggcacgagagatgttaaaactagctatacatcttacaccagctccagatgacatgattcttgtttatgaggtgtctactgagttgatgaatttaatgacctctggagatgatggagattcttctgatacatttcatatcattaactgtaaaacaaagagctcactcgctgctctctctcttcaaatggttgagtcatctcttactgaattggattggggctttggaaagcttaaagcaatgcttacattaggttatgattgtgctaacattgatgaagatcaaccagcagatgaaataatgctaaggttggctttggagaaagcactctactcgagatcaacattagtagttcaagtgctctcttcctttgcacatatgagccctatggatactcaagcagaacattttctgaaattgactgtcaagttctacaagcttttaactcgcatgtcaaagtcccagattgtacctaaaggctacagacaatccattccaagcctcaagtttcagaaactggcagaagtaacttgcaaaatgctcaccgctcccctttatgattttgtgtttcaacagaatcagcaaatacccataaagggaaacctcgccaaaattagaagagaaaccaaatgtatccctgatcttatttttcagattgaggattatgagaagtatttaatacagctaagcaaactaactaaggtaaaccttttgaggcatgccaaacgcagtgtagcaagagacttccagataaaagataaatctgggggacaacaggaagatgatcacattccagacaatgctgcagcatctgataacgaggctgataaggacgcaatgggtccaaacgcaccagttgaatcatgtgctgacgatgctcaaaaatcatatgctgacgaaaatgcatcatgtgaaagtgggcatgatgaggatgcaggaggtccaaacactccagcagaagcagatgctgatgaaatcattaggtctagcattccatatggtagtccagtccaggagtctgaatctgatagagaagaggaagaattattagcacggacgaagagagctaagacaaaacaagttgtgcaggattctgatgaggatgcagatgagtaggtttttaaacattatcaatagttcaattttcgaagcgtctattgtgggcaacatcatgccaaggtgtatatacataagtttttatgggttatcttgctgattatagacgatgaacacaagagatgtaaaatatatggttttgcaaaaattcttgtgggccatcatgttgattatagaccatgcacagaacatatgtaaaatactttattgtaaattataagttattctaattttctttaagtgaaaac

SEQ ID NO: 199730 - DNA, 4303 bp, Zea Mays
ctccactcacttcccgcccgaacatccgaactgcccgccgccgacttccgctccggcgatgtcggcgaccatggcctctgccagtcagccctcctcgcagcaacctccacctccaccgctcactgccgaaatcgttctccgcctcgcctcgcgcgacccctccaccgcggtgcccctcctcccggagctcccgcccgacgatctcgccgatatcgttgcctcgctcaccgccacctcccccgcgggccacctctcccttctccccgcgatcctcgctctcttaccctccccatcctctgcctcctccgcgttcgccgctctcctctccgcgcccagctggccctcctccacgctcctcgccgtcgccacactactccgcgacctcccgccggcctaccgcacccgcatccccgccttcctcgggaagatcatctctctccttccaagtgcggatgcccaggacctccctgctctctcctaccagctcctcctgctcgcgtccaagccgctctacccgcgcgtcgtcctcgcgggactcctgcgcttcttcggcggccgccgcggcgcccgcgttcgcgcgccgccgtctatcgcgcggcaggtcgagagcaccgcgctgatgaacgtctcgttcgcggtcaagcaggaccccgcgctggcgagggaggtcctggccgccatcaaggctgacgccgcgggcgctctcagtggatttgcggtggcagtgatgctgttcgtggccagggtgccgaggttcaacgagggtgccgtgagtgtgctccgggatgcggtcgtggtgtcccgccgggattaccgaatgtcaaggcggtgcaagtggttgccggattgtatggaaggggaatatgcacgggccactcaatgtgtcgagaagggaatactaaaatctgtcgacgagagcattgttggcagggagcatgttgtgccaagcattgttcaggtggcttttcgcctgttagaagtctcagaaggtgatcaaggtgaggaagctggcttaggtgaaggagtaatgagcaccgaagaaataggcattaatatgctcaaatcattgtttgaggtccatgaaatggcacggactgagataattgaacagtgcaagttccggattctctcggcaaagcctcagcaaagtgtgccagttctcaggttgattggatgcttgattttgagtcatccatttccaatgctggaattcattgcacatttaaaggagttgttggattatttttcttttatgaatgacaagatatcaactgctttgatcagttgcatcttgccactcacaaagttcagccgtgatctgaaggattacgtaatactggttgtaagaaaggcgatgttcaagagggaggacatggttcgaattgctgctacaaatgctataattgagctgattattgcagaaaacaagaaaaatgaagccaatccttttgaagattcaacaagtcagccaagctctagccaacagcctgaaacacatctagagtttggccagtgtcaaagaggtcttgtacgagggtcttatacgtactgctatctctgatccagctgtttctgacaatatccttgattttctctggcctcacttccaaaactattactcagaggatgcagaatgtcctcttaaaattggttcatgcttcaaagtagagcatgccaaactatgcattgtggaacctttagattgtctgctgtcatgtatctcaagaattctgcaaattaagcaacatagtaaatgtgaacgaccacgtgatgcatattggaagtgctttggttttgctgcttcacaagataatgaggttggacgagcatcatcaagtgatttattcgtgaaagctttatcaagcatccaaaagtatttgaggatatccctcacagagcagagaggacaaagccaagaagctggatctctttcttcaccatcagagatggctcattgtcataactttgctatgcttggaatcattgaggtttttattgatttttctgcttcaaaactggagaaagcctctggcaaatcgaaggaaatgatagaaaaagaaatcgtggagcttgttgatgcgcacagtggctttgagaaaaaaattagcagtggtagggaaaggatagcacggagaagagcaaatgctggtgatgctacagataagcacaccaacgaacccagggagaattctaatgcttcattgcagaaacatcatggaaacaggggtaaatttgctgattcgagtttgtatgaactttcggtaatgtgtgtcaagcagtgccatgctgataactacaacaatgttagtcaacattctagccaaactaaattgaaccagagctccaatttgacatcctttgtactgaaagcctttcttgaattgttgaaatcacttgcatcaaagcacagtagggacttcacaataaagctgcatggagattttaaaaagttaagccagccaataatgcagctagtatggtgttttctgttagacccaattcaagaaaatggtggaagcaagaagaacatgacccaaggaaagaaaaacactgagtgcaaaaaggatcagttatatttggctctgacatgcctaaaaaaattccttgagccaagtgtttcaggagaacactctagtgatatcattgattttctaatatctttggctccacctaatatagaggatacaatgggtactggggatcttgacaataatgataccactatggttgaagatagaagcacaagaaatgtccatgtgattttgaacatactgaagacgttatatgccagacttcttacccaatcagttttacgtgaatctgaggctgtaattgaattgattctgggtatttcaagaaaactgcaacttgaacgaaggcatcttgttggaaaatgggctacagatctatgtagaaagaaaaccatgcaaagtcctagaatggcacgagagatgttaaaactagctatacatcttacaccagctccagatgacatgattcttgtttatgaggtgtctactgagttgatgaatttaatgacctctggagatgatggagattcttctgatacatttcatatcattaactgtaaaacaaagagctcactcgctgctctctctcttcaaatggttgagtcatctcttactgaattggattggggctttggaaagcttaaagcaatgcttacattaggttatgattgtgctaacattgatgaagatcaaccagcagatgaaataatgctaaggttggctttggagaaagcactctactcgagatcaacattagtagttcaagtgctctcttcctttgcacatatgagccctatggatactcaagcagaacattttctgaaattgactgtcaagttctacaagcttttaactcgcatgtcaaagtcccagattgtacctaaaggctacagacaatccattccaagcctcaagtttcagaaactggcagaagtaacttgcaaaatgctcaccgctcccctttatgattttgtgtttcaacagaatcagcaaatacccataaagggaaacctcgccaaaattagaagagaaaccaaatgtatccctgatcttatttttcagattgaggattatgagaagtatttaatacagctaagcaaactaactaaggtaaaccttttgaggcatgccaaacgcagtgtagcaagagacttccagataaaagataaatctgggggacaacaggaagatgatcacattccagacaatgctgcagcatctgataacgaggctgataaggacgcaatgggtccaaacgcaccagttgaatcatgtgctgacgatgctcaaaaatcatatgctgacgaaaatgcatcatgtgaaagtgggcatgatgaggatgcaggaggtccaaacactccagcagaagcagatgctgatgaaatcattaggtctagcattccatatggtagtccagtccaggagtctgaatctgatagagaagaggaagaattattagcacggacgaagagagctaagacaaaacaagttgtgcaggattctgatgaggatgcagatgagtaggtttttaaacattatcaatagttcaattttcgaagcgtctattgtgggcaacatcatgccaaggtgtatatacataagtttttatgggttatcttgctgattatagacgatgaacacaagagatgtaaaatatatggttttgcaaaaattcttgtgggccatcatgttgattatagaccatgcacagaacatatgtaaaatactttattgtaaattataagttattctaattttctttaagtgaaaac

SEQ ID NO: 199731 - DNA, 895 bp, Zea Mays
atagctttaagttaatcaaatagaaggcatgataaactattgcgatgaaggagcttagagcgcgcaagatacccttcacgatcagacggtacctacctgatggaaggttggtggagactgaagatgctgatctacttggcatggaaaggatgtgtagttacaggtcttcgttgcctctgagtggatgctgaacagtgaatgaaccaagacgaaacgatgctatgctagatgttaccttgacgtctgtggttgccttggaactctggaaccgtgatggctggtggacggtggttgagttatgcttgttcgtttcagtttcagacatgctgtgcagatgattcgtaaactgactcgtctttcattcatttggaagggtttatcgtatcttgctatcttttgtaatgagttgtatgctacatccggcatgagaccatgttgctgttgcttgtttcattaaactccaacggtttccataggagaggagcaaatccagatgggtagttcacagcatagctgagcggaaagtatgcagaccagagcatggcgtatttggtgtgttccatgctactgctctgtttaagactgttttgtatcagagtttgcaaagatggataccatgtatccagatcatcttgctcattgatgcgtttttactgtggtattctggctaaatacaggtatgcttcatgtatcacatgatgacaaacttgacagacatttgtgtggatcacgtttgctgctgctgcctccctccctcggattgagatggagctccttcatcattcctcggaatcagactcgagggggcaggagccgtcgtcgacggtggccagcgggtcgaacatgtcggagctggggtccgtgcatccgctcacgatgtccagcttgcaccgat

SEQ ID NO: 199732 - DNA, 847 bp, Zea Mays
accaatctttaaagatgtgtgattattgcgatgaaggagcttagagcgcgcaagatacccttcacgatcagacggtacctacctgatggaagttatgaagactggggagtagacgagctcattgtggaggactcctggaaacgccagtgaatgaaccaagacgaaacgatgctatgctagatgttaccttgacgtctgtggttgccttggaactctggaaccgtgatggctggtggacggtggttgagttatgcttgttcgtttcagtttcagacatgctgtgcagatgattcgtaaactgactcgtctttcattcatttggaagggtttatcgtatcttgctatcttttgtaatgagttgtatgctacatccggcatgagaccatgttgctgttgcttgtttcattaaactccaacggtttccataggagaggagcaaatccagatgggtagttcacagcatagctgagcggaaagtatgcagaccagagcatggcgtatttggtgtgttccatgctactgctctgtttaagactgttttgtatcagagtttgcaaagatggataccatgtatccagatcatcttgctcattgatgcgtttttactgtggtattctggctaaatacaggtatgcttcatgtatcacatgatgacaaacttgacagacatttgtgtggatcacgtttgctgctgctgcctccctccctcggattgagatggagctccttcatcattcctcggaatcagactcgagggggcaggagccgtcgtcgacggtggccagcgggtcgaacatgtcggagctggggtccgtgcatccgctcacgatgtccagcttgcaccgat

SEQ ID NO: 199733 - DNA, 1081 bp, Zea Mays
ttcgaactgtgacagcaatgcaagctatgaggatgagcctccagaacctgagattgaggaaggggccgaagaagagcttgagaacaacgaagatgcccctgatgatgtcataggtggagagggtgaagataaggaacaggaaaagaccaagcgtgagcgcaaaacaacaaaatatatgacgaagtatgaacgtgcgcgcattcttgcatgaatgctccagtcatggttgagcttgagggagaaactgaccctcttgagattgcgatgaaggagcttagagcgcgcaagatacccttcacgatcagacggtacctacctgatggaagttatgaagactggggagtagacgagctcattgtggaggactcctggaaacgccagtgaatgaaccaagacgaaacgatgctatgctagatgttaccttgacgtctgtggttgccttggaactctggaaccgtgatggctggtggacggtggttgagttatgcttgttcgtttcagtttcagacatgctgtgcagatgattcgtaaactgactcgtctttcattcatttggaagggtttatcgtatcttgctatcttttgtaatgagttgtatgctacatccggcatgagaccatgttgctgttgcttgtttcattaaactccaacggtttccataggagaggagcaaatccagatgggtagttcacagcatagctgagcggaaagtatgcagaccagagcatggcgtatttggtgtgttccatgctactgctctgtttaagactgttttgtatcagagtttgcaaagatggataccatgtatccagatcatcttgctcattgatgcgtttttactgtggtattctggctaaatacaggtatgcttcatgtatcacatgatgacaaacttgacagacatttgtgtggatcacgtttgctgctgctgcctccctccctcggattgagatggagctccttcatcattcctcggaatcagactcgagggggcaggagccgtcgtcgacggtggccagcgggtcgaacatgtcggagctggggtccgtgcatccgctcacgatgtccagcttgcaccgat

SEQ ID NO: 199734 - DNA, 1444 bp, Zea Mays
ccgttatgcgcatagactctgtttatggatctatcttgctgtttctaaaatccgtttattctagctctgcaacttgattgtgtatgcgagtcctgttgatgcgctcaagtttcttaaggatcaccaaagagatactgattttgcgttagtggaagtcaacatgaaagagatgcatggttttcagttccttgacatgtccaggaagttgcacaaaagccttcaagtgatcatgatgtcagctgatacgacatggcccacgatgaagagaagtgtcgagcttggtgcacgtttcttgattaaaaagcctcttgatgcaaatacgatgaataacctgtggcagcatcttgacctaaaatttcaacggaccgacaagatcaaggccttattcccaggttggagctactgtgacatgttttctttttccttttgaaaaacgcggtggcacttgttgaactccgtagacaacagcaaaaggtattgaagggaaaacggggaatgcatttgaggaagggaccaacaagcagaagggaactcacctgatgtggactccattcctgcagaggaagtttttgcaagctgttgaactacttggggaagacgcatctccgaagaagatacagttgctcatgaatgtgaactccgttagtcgcaaacagatctctgctcatcttcagaaacaccgaaagaaggtcgagaaagaactacgtaattcaaatgcaaacaactccagccatggcattggcggcgcctcgaattcacggccttcgaggatttttgaaataagccatggcagattccagtacaatcgtcccgacgtccaaccagaacatagatctgatgaatccgtatccgtggagcagacagaaaccatcgaggaaacacaaagcaacaggttgtatgaagcgatgcgaagagccttgcagcttgggagtgttttcgaggaaccacagttgcccaatgatcctcctgctggtaaagatgcaagagaagttgaagaagtcgaaatgacgatgagggatggtaattatcgagatgctggcacagatgcatttggtgataagaatgaggcatctggaactcacagttcagatggtaataacgcgaaggtcaagagcaaggatgattctgctgacaagctggtttcttgtcacgatgagctgcgaccagttgtgacgcttgtgacctattcagactcggaagatggtgaaacgctctaggttaactgagcaacggattgcgtaggtggaggtacttgtaaactgccagcagaaatgatgccagcatgaatggatgcccatgaatagacagtttttgtatcttcttaataactaagttcagtacatcaagcgtatacaaagtcttgcctaacttttggcttctattgaagacacaaacccacttcaaggaaaagaaaagaaaaacaccaaacacgctctagtggcct

SEQ ID NO: 199735 - DNA, 1976 bp, Zea Mays
tgtatacactcttcaatcagtgtaggtattagtatgtggtaaggattaaagatagccacaaggactgaaaaggaaggggacacacacacgctcccagcagcatctttaattatttacacagggaaaagaaaaaaggttgtcaatctagctagctactccagttagctacaaaagctaaccatagcagtgtgtgcagtggtctctctcttgctcgccggccagtataattgatccgtggtgcggccggccggcgtcgtacgtcgtccatggccatccaccacccgcacctcctcgacttctcgccgcctccgaacacggtggccatggaggaggcgccgcccccaccccacttcgaccacggcctcctcgggctccatgtcgatggcatgcctcatcgcgtcctcgccgacgacgcgccggtggcggcatgggcgccgcaggccgtggtctcccactccctgtacggatacgataacacagcagcgggggcgtcgtcgctgtttggccaccatgaggcatcagaggcccagttctccgtgcttccgccggcagcgtcgtcgtttgcactactacctaaccaccaccaccagcagcagctgccgacgacgacggcggcgtcgagcatgcagcagccgttccagctgaggagctccaagtacctgggtcctgcgcaggagctgctcgccgagttctgcagcctggaaggggacctgctgcacgccacgaacaagcagggagcttccggagcagcagcaggtaacagcaggtgggacgacgtggagacgtcgtcgtcttcttctgctggcctctgggggcacctgtccctgagctccatggatctcctggagctcgagaggaggaaggccaggctcttgtccatggttgaagaggtggaccggcggtaccggcgataccgcgagcagatgaggtcagtggaggtgtcgttcgaggcggtggccggagccggcgcgtcgcaggtgtacacgcggctggcgctgcgggccatgtcgcggcacttccggtgcctgcgggatgcgctggtggcgcaggtgcgcgctctgcggaaggccatgggggagagggacggcggcccagctggtgcggcggcgggcgccaccaagggcgacacgcccaggctcaaggtgttggaccagtgcctgcggcagcagcgggcgttccagcacccgggcaccatcgacaactacccgtggcggccccagcgcggcctgccggagcgcgccgtcgccgtcctccgagcctggctcttcgaacacttcctccacccgtatccgaacgatgtggacaagcacattctagcgcgccagacaggactgtcaagaagccagggtgaggctgtggaagccgatgatagaggagatgtacacggaagaagtgaacccgaaaccggccgacgacacaagccaaaaccctagcgccggtggcggcgtcggcgtcggcgtcgccatcaaacctgagcagcaggtgagcacagctgcggcgggagccaccatcggaggcggcggcggcgaccatctgttcggtcctagttatcccagcatgtacgggagccacggcggcgccgtgtcgcttaccctagggctccagcagcagccgtttgcgtcgacgatgatgcaccagcgacgaccactgatgacgtttcaaggtgacgagcaagagccggcgctgccgtacagagaccttatgggctctcagttgctgcatcatttcgctgggtagcttgttacctacacatgcttgctagctagctaggagggtgggtatacggtggctaaatttttatatatattaaagacaaggtaaattttgtttaaatttcttgtcgactaaacgatcgatatatataccaaattaagcacacagattgtttaaatgctggtgtagccatgttttattcatacctggcctccaaaacaacaaagttcaaaagcaggggcaaatcacaattacaaatgaag

SEQ ID NO: 199736 - DNA, 1123 bp, Zea Mays
cagaattcttcttcattaattcctttatcaaattgcggtggaccggcggtaccggcgataccgcgagcagatgaggtcagtggaggtgtcgttcgaggcggtggccggagccggcgcgtcgcaggtgtacacgcggctggcgctgcgggccatgtcgcggcacttccggtgcctgcgggatgcgctggtggcgcaggtgcgcgctctgcggaaggccatgggggagagggacggcggcccagctggtgcggcggcgggcgccaccaagggcgacacgcccaggctcaaggtgttggaccagtgcctgcggcagcagcgggcgttccagcacccgggcaccatcgacaactacccgtggcggccccagcgcggcctgccggagcgcgccgtcgccgtcctccgagcctggctcttcgaacacttcctccacccgtatccgaacgatgtggacaagcacattctagcgcgccagacaggactgtcaagaagccagggtgaggctgtggaagccgatgatagaggagatgtacacggaagaagtgaacccgaaaccggccgacgacacaagccaaaaccctagcgccggtggcggcgtcggcgtcggcgtcgccatcaaacctgagcagcaggtgagcacagctgcggcgggagccaccatcggaggcggcggcggcgaccatctgttcggtcctagttatcccagcatgtacgggagccacggcggcgccgtgtcgcttaccctagggctccagcagcagccgtttgcgtcgacgatgatgcaccagcgacgaccactgatgacgtttcaaggtgacgagcaagagccggcgctgccgtacagagaccttatgggctctcagttgctgcatcatttcgctgggtagcttgttacctacacatgcttgctagctagctaggagggtgggtatacggtggctaaatttttatatatattaaagacaaggtaaattttgtttaaatttcttgtcgactaaacgatcgatatatataccaaattaagcacacagattgtttaaatgctggtgtagccatgttttattcatacctggcctccaaaacaacaaagttcaaaagcaggggcaaatcacaattacaaatgaag

SEQ ID NO: 199737 - DNA, 2519 bp, Zea Mays
gtctcaaccacccacgcctcatctagagttgacacgcgccatgtactggacgattggccgctggagacgacgcacgctcggccatggcgctcgctctcctatccccctccacgccatcccatcgtatactgcttcgtcctattccatttccatctctgccagtcgcgcgcgccactagtgccggtagcttcggcctcgcgttcttctgccccctctctcgcggttcctcctcgctgcagaggaccggcgcggcaggcggcgttattgatagtgccggagagggctcatcggaagaaccggtcgctggatggctcagcgcagacctgctcaggcggatatcaggcgcggcggacgcggaccgggtcctggacattgttgccgagtcagttgaaggcgcgggtgccgctctgggcgcgcccgagtgcaacgcgatcgtctccgccgcttttgaccgtggcaacatcgcgctcgctctctcggtcttcgaagccatgcggtccggtttcgcgggagttggaggctggaggtgggcaaggcctgatgtgaggacttatgcgttgcttgtacagcggttggcggccgccccgcgtgttgctgatgcaatcatgataattgattatgtgtctcgcgcaggtgcttcttctatggatgaggttcctttcggaatcattgttcgctgtccaacctgcatgatagcagttgctgttgtgcagcctcaggatggaactcaggttgtttcctgttcaaagtgtcgatatcaatatgaattattttctggagacattacgagtattgaatccgaagaagttagcatggatatttcagccctggagaaagccttgagatttattaatatgaggaaagatggtattccagctgctgtccactctattgtgatccgctcaccttcaggaacagcacgtacttacagatttgctacccagaatgtaactcttcctgctcaagaaggagaaagggttaccatttccttggcggccccagttaacgtttaccgtgacatgggacccctcaaggttgctgcgcgctcacaaggatttaaacctggagaacctatgtgtctcactaatcacatcaatgggcaagtctcgaagttgctaagagctccatcaaagaacaagggaacatttttccttagcccatatttattgcaactgccattgcatcagctgccataggaacaacactaaatggagtggtcctgccaaaaattcaaaagcttccagaaaaagcagtggatatagttgctgtacagcaaaagcttttgtctcagtatgatattcttcagagtcgtcttaaggaactgaaacagtttgctcaaaaagaggtgtggatgcttgcgcggatgtgtcagttggataacaagatagtagcagttggtgaaccatcttatcgtactagacgagatagagtaaagagggttcgggaaagcttggaaagcacactcctggcaaggattgagctaatggaaagttatgcaaaactgtgctcaatgatcgaaattgaagttgagatggactctgatgttatagctgctgaagcggcaagcagtgcagagagaatatctgagcagatacaacaattaatggagatcgatagtcttgaagagcaatggcgtatacaagctgaggctaatgatgaagcagaaaggcttcttagttcagattcctcagaaacatatcctgctggacgtgtaatttgaattgagaggcatcccagttcatccctggtacatggcgactctggaaactctccttgtcgaatggtgtgttcaaggaagttgcctggtgctccagcccaaaatccattccaaagaggcttgatctcaagattttggaaccattgatgatattgctgcggagggtctgcgtctgcgctgttcattatccaatccaataatagtaacgtcagtaaatatcttcgatcggccaggagatcaaccgttccccccttcaacactccgtagaaggacgacggtgaccgaagtaaacagcgaagatgtcggcgatccagaagaacgacccttgctggcgtcccatttgaaggctgtgcggctgggcccgtgtcagcggaccacctcggttgcagcgggcgggtcgaccgggttgccggttcatgcgcagttaactaacagaggggcggattacttgtggggcatggacatcccgggtcatcaaggcatatgcttgcttaatgggtcgtctagaaggccccctgatcatttgattggtgagccaactggaatggagcggttccattccagtttctaagaattaagtcatttcattctgtgtttggtaagcagaatggaactgttccattttttgtttggttgaagaatagaatagagcagagccgctccgtttattgtttggttggagagccatatgactgttaagtagaggagaggaatgagagcgctcgtgtccgcgagagcgctcgcgtccgatcgttttggtggagtgagagcatcccaaatatttactatttatagactgcag

SEQ ID NO: 199738 - DNA, 2555 bp, Zea Mays
gtctcaaccacccacgcctcatctagagttgacacgcgccatgtactggacgattggccgctggagacgacgcacgctcggccatggcgctcgctctcctatccccctccacgccatcccatcgtatactgcttcgtcctattccatttccatctctgccagtcgcgcgcgccactagtgccggtagcttcggcctcgcgttcttctgccccctctctcgcggttcctcctcgctgcagaggaccggcgcggcaggcggcgttattgatagtgccggagagggctcatcggaagaaccggtcgctggatggctcagcgcagacctgctcaggcggatatcaggcgcggcggacgcggaccgggtcctggacattgttgccgagtcagttgaaggcgcgggtgccgctctgggcgcgcccgagtgcaacgcgatcgtctccgccgcttttgaccgtggcaacatcgcgctcgctctctcggtcttcgaagccatgcggtccggtttcgcgggagttggaggctggaggtgggcaaggcctgatgtgaggacttatgcgttgcttgtacagcggttggcggccgccccgcgtgttgctgatgcaatcatgataattgattatgtgtctcgcgcaggtgcttcttctatggatgaggttcctttcggaatcattgttcgctgtccaacctgcatgatagcagttgctgttgtgcagcctcaggatggaactcaggttgtttcctgttcaaagtgtcgatatcaatatgaattattttctggagacattacgagtattgaatccgaagaagttagcatggatatttcagccctggagaaagccttgagatttattaatatgaggaaagatggtattccagctgctgtccactctattgtgatccgctcaccttcaggaacagcacgtacttacagatttgctacccagaatgtaactcttcctgctcaagaaggagaaagggttaccatttccttggcggccccagttaacgtttaccgtgacatgggacccctcaaggttgctgcgcgctcacaaggatttaaacctggagaacctatgtgtctcactaatcacatcaatggatgctgcttccgcattcattgacccaagtcttcctagacttgttacagcaactgccattgcatcagctgccataggaacaacactaaatggagtggtcctgccaaaaattcaaaagcttccagaaaaagcagtggatatagttgctgtacagcaaaagcttttgtctcagtatgatattcttcagagtcgtcttaaggaactgaaacagtttgctcaaaaagaggtgtggatgcttgcgcggatgtgtcagttggataacaagatagtagcagttggtgaaccatcttatcgtactagacgagatagagtaaagagggttcgggaaagcttggaaagcacactcctggcaaggattgagctaatggaaagttatgcaaaactgtgctcaatgatcgaaattgaagttgagatggactctgatgttatagctgctgaagcggcaagcagtgcagagagaatatctgagcagatacaacaattaatggagatcgatagtcttgaagagcaatggcgtatacaagctgaggctaatgatgaagcagaaaggcttcttagttcagattcctcagaaacatatcctgctggacgtgtaatgtcctaagtgaaattgttggaaatactaaggtcatgtttgtttacccttaattcgaagttgaattgagaggcatcccagttcatccctggtacatggcgactctggaaactctccttgtcgaatggtgtgttcaaggaagttgcctggtgctccagcccaaaatccattccaaagaggcttgatctcaagattttggaaccattgatgatattgctgcggagggtctgcgtctgcgctgttcattatccaatccaataatagtaacgtcagtaaatatcttcgatcggccaggagatcaaccgttccccccttcaacactccgtagaaggacgacggtgaccgaagtaaacagcgaagatgtcggcgatccagaagaacgacccttgctggcgtcccatttgaaggctgtgcggctgggcccgtgtcagcggaccacctcggttgcagcgggcgggtcgaccgggttgccggttcatgcgcagttaactaacagaggggcggattacttgtggggcatggacatcccgggtcatcaaggcatatgcttgcttaatgggtcgtctagaaggccccctgatcatttgattggtgagccaactggaatggagcggttccattccagtttctaagaattaagtcatttcattctgtgtttggtaagcagaatggaactgttccattttttgtttggttgaagaatagaatagagcagagccgctccgtttattgtttggttggagagccatatgactgttaagtagaggagaggaatgagagcgctcgtgtccgcgagagcgctcgcgtccgatcgttttggtggagtgagagcatcccaaatatttactatttatagactgcag

SEQ ID NO: 199739 - DNA, 3263 bp, Zea Mays
gtctcaaccacccacgcctcatctagagttgacacgcgccatgtactggacgattggccgctggagacgacgcacgctcggccatggcgctcgctctcctatccccctccacgccatcccatcgtatactgcttcgtcctattccatttccatctctgccagtcgcgcgcgccactagtgccggtagcttcggcctcgcgttcttctgccccctctctcgcggttcctcctcgctgcagaggaccggcgcggcaggcggcgttattgatagtgccggagagggctcatcggaagaaccggtcgctggatggctcagcgcagacctgctcaggcggatatcaggcgcggcggacgcggaccgggtcctggacattgttgccgagtcagttgaaggcgcgggtgccgctctgggcgcgcccgagtgcaacgcgatcgtctccgccgcttttgaccgtggcaacatcgcgctcgctctctcggtcttcgaagccatgcggtccggtttcgcgggagttggaggctggaggtgggcaaggcctgatgtgaggacttatgcgttgcttgtacagcggttggcggccgccccgcgtgttgctgatgcaatcatgataattgattatgtgtctcgcgcaggtgcttcttctatggatgaggttcctttcggaatcattgttcgctgtccaacctgcatgatagcagttgctgttgtgcagcctcaggatggaactcaggttgtttcctgttcaaagtgtcgatatcaatatgaattattttctggagacattacgagtattgaatccgaagaagttagcatggatatttcagccctggagaaagccttgagatttattaatatgaggaaagatggtattccagctgctgtccactctattgtgatccgctcaccttcaggaacagcacgtacttacagatttgctacccagaatgtaactcttcctgctcaagaaggagaaagggttaccatttccttggcggccccagttaacgtttaccgtgacatgggacccctcaaggttgctgcgcgctcacaaggatttaaacctggagaacctatgtgtctcactaatcacatcaatgggcaagtctcgaagttgctaagagctccatcaaagaacaagggaacatttttccttagcccatatttattggtcggtgctcttgccttccttgcatctacagatgctgcttccgcattcattgacccaagtcttcctagacttgttacagcaactgccattgcatcagctgccataggaacaacactaaatggagtggtcctgccaaaaattcaaaagcttccagaaaaagcagtggatatagttgctgtacagcaaaagcttttgtctcagtatgatattcttcagagtcgtcttaaggaactgaaacagtttgctcaaaaagaggtgtggatgcttgcgcggatgtgtcagttggataacaagatagtagcagttggtgaaccatcttatcgctgtgctcaatgatcgaaattgaagttgagatggactctgatgttatagctgctgaagcggcaagcagtgcagagagaatatctgagcagatacaacaattaatggagatcgatagtcttgaagagcaatggcgtatacaagctgaggctaatgatgaagcagaaaggcttcttagttcagattcctcagaaacatatcctgctggacgtgtaatgtaatataactctgttagtgcgcaggcattattctttattttctatttagttgtttatctctcttcaatttaaatgttctccctaccaaagtacaaacaaaacctctagttagacttgtcaaggaaaataatgccagaaaattagaaaaatagtggaacaacatgataatagatagatcatatcattactacacaaaatagagtgtcacattcgttaataatggcaggctaccactagagacaagtgcccgccgagataagtggttgtccgcgttaatggttaacagaggaggtcaagttaattaagaaaattgtcttatttttctgcacataaagaaataaggtcccgtttgtttcttttcattttgaggaattagaatcttactaatagaatatgctattttttaagaatgtgacatttcaccactttctaaagttatcatataagcttatctcaaattcatgagtgagagatgaaaattgattctatagatttgcatgctatttttccgatgtacaacttataacacattcttatacttgcttcgctataacataaatgtagtatataactacctctctcatataatttagaataatatacaaatatattacatatataaatatatgaatttaattagttttgtctaaataataattattaaaatggaatttaattccaacgaaataaacaggtcctaagtgaaattgttggaaatactaaggtcatgtttgtttacccttaattcgaagttgaattgagaggcatcccagttcatccctggtacatggcgactctggaaactctccttgtcgaatggtgtgttcaaggaagttgcctggtgctccagcccaaaatccattccaaagaggcttgatctcaagattttggaaccattgatgatattgctgcggagggtctgcgtctgcgctgttcattatccaatccaataatagtaacgtcagtaaatatcttcgatcggccaggagatcaaccgttccccccttcaacactccgtagaaggacgacggtgaccgaagtaaacagcgaagatgtcggcgatccagaagaacgacccttgctggcgtcccatttgaaggctgtgcggctgggcccgtgtcagcggaccacctcggttgcagcgggcgggtcgaccgggttgccggttcatgcgcagttaactaacagaggggcggattacttgtggggcatggacatcccgggtcatcaaggcatatgcttgcttaatgggtcgtctagaaggccccctgatcatttgattggtgagccaactggaatggagcggttccattccagtttctaagaattaagtcatttcattctgtgtttggtaagcagaatggaactgttccattttttgtttggttgaagaatagaatagagcagagccgctccgtttattgtttggttggagagccatatgactgttaagtagaggagaggaatgagagcgctcgtgtccgcgagagcgctcgcgtccgatcgttttggtggagtgagagcatcccaaatatttactatttatagactgcag

SEQ ID NO: 199740 - DNA, 3305 bp, Zea Mays
gtctcaaccacccacgcctcatctagagttgacacgcgccatgtactggacgattggccgctggagacgacgcacgctcggccatggcgctcgctctcctatccccctccacgccatcccatcgtatactgcttcgtcctattccatttccatctctgccagtcgcgcgcgccactagtgccggtagcttcggcctcgcgttcttctgccccctctctcgcggttcctcctcgctgcagaggaccggcgcggcaggcggcgttattgatagtgccggagagggctcatcggaagaaccggtcgctggatggctcagcgcagacctgctcaggcggatatcaggcgcggcggacgcggaccgggtcctggacattgttgccgagtcagttgaaggcgcgggtgccgctctgggcgcgcccgagtgcaacgcgatcgtctccgccgcttttgaccgtggcaacatcgcgctcgctctctcggtcttcgaagccatgcggtccggtttcgcgggagttggaggctggaggtgggcaaggcctgatgtgaggacttatgcgttgcttgtacagcggttggcggccgccccgcgtgttgctgatgcaatcatgataattgattatgtgtctcgcgcaggtgcttcttctatggatgaggttcctttcggaatcattgttcgctgtccaacctgcatgatagcagttgctgttgtgcagcctcaggatggaactcaggttgtttcctgttcaaagtgtcgatatcaatatgaattattttctggagacattacgagtattgaatccgaagaagttaggatctcctcctgccgaacgcagcatggatatttcagccctggagaaagccttgagatttattaatatgaggaaagatggtattccagctgctgtccactctattgtgatccgctcaccttcaggaacagcacgtacttacagatttgctacccagaatgtaactcttcctgctcaagaaggagaaagggttaccatttccttggcggccccagttaacgtttaccgtgacatgggacccctcaaggttgctgcgcgctcacaaggatttaaacctggagaacctatgtgtctcactaatcacatcaatgggcaagtctcgaagttgctaagagctccatcaaagaacaagggaacatttttccttagcccatatttattgacttgttacagcaactgccattgcatcagctgccataggaacaacactaaatggagtggtcctgccaaaaattcaaaagcttccagaaaaagcagtggatatagttgctgtacagcaaaagcttttgtctcagtatgatattcttcagagtcgtcttaaggaactgaaacagtttgctcaaaaagaggtgtggatgcttgcgcggatgtgtcagttggataacaagatagtagcagttggtgaaccatcttatcgtactagacgagatagagtaaagagggttcgggaaagcttggaaagcacactcctggcaaggattgagctaatggaaagttatgcaaaactgtgctcaatgatcgaaattgaagttgagatggactctgatgttatagctgctgaagcggcaagcagtgcagagagaatatctgagcagatacaacaattaatggagatcgatagtcttgaagagcaatggcgtatacaagctgaggctaatgatgaagcagaaaggcttcttagttcagattcctcagaaacatatcctgctggacgtgtaatgtaatataactctgttagtgcgcaggcattattctttattttctatttagttgtttatctctcttcaatttaaatgttctccctaccaaagtacaaacaaaacctctagttagacttgtcaaggaaaataatgccagaaaattagaaaaatagtggaacaacatgataatagatagatcatatcattactacacaaaatagagtgtcacattcgttaataatggcaggctaccactagagacaagtgcccgccgagataagtggttgtccgcgttaatggttaacagaggaggtcaagttaattaagaaaattgtcttatttttctgcacataaagaaataaggtcccgtttgtttcttttcattttgaggaattagaatcttactaatagaatatgctattttttaagaatgtgacatttcaccactttctaaagttatcatataagcttatctcaaattcatgagtgagagatgaaaattgattctatagatttgcatgctatttttccgatgtacaacttataacacattcttatacttgcttcgctataacataaatgtagtatataactacctctctcatataatttagaataatatacaaatatattacatatataaatatatgaatttaattagttttgtctaaataataattattaaaatggaatttaattccaacgaaataaacaggtcctaagtgaaattgttggaaatactaaggtcatgtttgtttacccttaattcgaagttgaattgagaggcatcccagttcatccctggtacatggcgactctggaaactctccttgtcgaatggtgtgttcaaggaagttgcctggtgctccagcccaaaatccattccaaagaggcttgatctcaagattttggaaccattgatgatattgctgcggagggtctgcgtctgcgctgttcattatccaatccaataatagtaacgtcagtaaatatcttcgatcggccaggagatcaaccgttccccccttcaacactccgtagaaggacgacggtgaccgaagtaaacagcgaagatgtcggcgatccagaagaacgacccttgctggcgtcccatttgaaggctgtgcggctgggcccgtgtcagcggaccacctcggttgcagcgggcgggtcgaccgggttgccggttcatgcgcagttaactaacagaggggcggattacttgtggggcatggacatcccgggtcatcaaggcatatgcttgcttaatgggtcgtctagaaggccccctgatcatttgattggtgagccaactggaatggagcggttccattccagtttctaagaattaagtcatttcattctgtgtttggtaagcagaatggaactgttccattttttgtttggttgaagaatagaatagagcagagccgctccgtttattgtttggttggagagccatatgactgttaagtagaggagaggaatgagagcgctcgtgtccgcgagagcgctcgcgtccgatcgttttggtggagtgagagcatcccaaatatttactatttatagactgcag

SEQ ID NO: 199741 - DNA, 718 bp, Zea Mays
ctcacgcctcgcgcctcgttgcttcttatcctttatttttttccccaacccgtcgtcggctgccggctgcggcactctgggaggaaggccccaagcccttgccgccggagacgaaccgaaacgatggtgggcgccaatgaagtgggcgggctggagtgcgagcggaagccgctggcggaggtggtcggcgactgcgtccagcgctggttccaggacgcgtacaaggaggcgcgcaaaggcgacgtcgccaaccaagtgcttgtagcgcagatgttcttctcgggttatggaacccccaagaacgagtataagggaaaacaatggatggatagggcgtcaaggttcaggtcttcagctttgaaggttggcatgaaacgtccaggatacaatgcaagtgactcggactccgatgatgcaaatgatgatgccaaccaatgacagtcagttacaaattgagttattattagttaggagattcacaggtcacggctgcaggtagcagaagacgctggaggcaggaaggccttgaatgccgcagtgcatgtgaacgaagagctttcctttgcaagttacgtttggctgctgacgggtgtgtgtccggaggtcgcggctgacaccacacgcacgtctgctggtcagctgcagctacatctatgggtccatagacgatcccgcaagtggttgaaaagaagcgtgatccggcccagaggagattccg

SEQ ID NO: 199742 - DNA, 544 bp, Zea Mays
ctcacgcctcgcgcctcgttgcttcttatcctttatttttttccccaacccgtcgtcggctgccggctgcggcactctgggaggaaggccccaagcccttgccgccggagacgaaccgaaacgatggtgggcgccaatgaagtgggcgggctggagtgcgagcggaagccgctggcggaggtggtcggcgactgcgtccagcgctggttccaggacgcgtacaaggaggcgcgcaaaggcgacgtcgccaaccaagtgcttgtagcgcagatgttcttctcgggttatggaacccccaagaacgagtataagggaaaacaatggatggatagggcgtcaaggttcaggtcttcagctttgaaggttggcatgaaacgtccaggatacaatgcaagtgactcggactccgatgatgcaaatgatgatgccaaccaatgacagtcagttacaaattgagttattattagttaggagattcacagggtgtttaatgacagaactgaatttatattttgatgtaattacaaggttgtggttactatag

SEQ ID NO: 199743 - DNA, 341 bp, Zea Mays
ctcacgcctcgcgcctcgttgcttcttatcctttatttttttccccaacccgtcgtcggctgccggctgcggcactctgggaggaaggccccaagcccttgccgccggagacgaaccgaaacgatggtgggcgccaatgaagtgggcgggctggagtgcgagcggaagccgctggcggaggtggtcggcgactgcgtccagcgctggttccaggacgcgtacaaggaggcgcgcaaaggcgacgtcgccaaccaagtgcttgtagcgcagatgttcttctcgggttatggaacccccaagaacgagtataagggatgatttttctgtttggacgatcttaa

SEQ ID NO: 199744 - DNA, 428 bp, Zea Mays
cgggacacgacgctcaccgctcgctgtcgctgaggcatacaagagtggagaactgcaggaaactctagagaaagcaatgtgttcgtagaaaaaaaatgaacaataagcagatggcatacaattaatcaaaatgttatagtatttgctgtacaattcaggcttgtcatcaactggagatgcaagttgtggataattcatgtccaaatgttcagtgcactttcgactggaaatacatctttctgcagtttgtgactagtcatccagtttgaaccccgatcatatattgtacgatttgtgactaccagattgctccgttttcagctgcaactaccgcgtccgcccgcgtgcaattccatgaccgtgtcggtagagccgtgggcctgtttggttcaggttttttctgaccagcttttctgagaatttggctg

SEQ ID NO: 199745 - DNA, 650 bp, Zea Mays
cttcctttcctccgtcgtgctctccccagtcccctccgcctccggtctccataacctagccgtccctctcctcggtgcagcggtgcccggacgctggagcgacctcaagtgctcgacaggcgtcacgggacacgacgctcaccgctcgctgtcgctggtggactacggacgactggaactggattgctgtggagaactggattgctgactgctgtggagaatttggactttgaagcctgaagtctaaaccatctaggcatacaagagtggagaactgcaggaaactctagagaaagcaatgtgttcgtagaaaaaaaatgaacaataagcagatggcatacaattaatcaaaatgttatagtatttgctgtacaattcaggcttgtcatcaactggagatgcaagttgtggataattcatgtccaaatgttcagtgcactttcgactggaaatacatctttctgcagtttgtgactagtcatccagtttgaaccccgatcatatattgtacgatttgtgactaccagattgctccgttttcagctgcaactaccgcgtccgcccgcgtgcaattccatgaccgtgtcggtagagccgtgggcctgtttggttcaggttttttctgaccagcttttctgagaatttggctg

SEQ ID NO: 199746 - DNA, 821 bp, Zea Mays
atttccaatgccgcttcctttcctccgtcgtgctctccccagtcccctccgcctccggtctccataacctagccgtccctctcctcggtgcagcggtgcccggacgctggagcgacctcaagtgctcgacaggcgtcacgggacacgacgctcaccgctcgctgtcgctggtggactacggacgactggaactggattgctgtggagaactggattgctgactgctgtggagaatttggactttgaagcctgaagtctaaaccatctgtgaagttcgaactatattttcttgtgaatttgtgatgcaatgcaatggcacttggcggctgtcactgacaggcagcaccgaagcaggcttaatgccttgcagccttgcacttttgtatcatgttgtcatcgagtactcagtacattagtattagtagaggcatacaagagtggagaactgcaggaaactctagagaaagcaatgtgttcgtagaaaaaaaatgaacaataagcagatggcatacaattaatcaaaatgttatagtatttgctgtacaattcaggcttgtcatcaactggagatgcaagttgtggataattcatgtccaaatgttcagtgcactttcgactggaaatacatctttctgcagtttgtgactagtcatccagtttgaaccccgatcatatattgtacgatttgtgactaccagattgctccgttttcagctgcaactaccgcgtccgcccgcgtgcaattccatgaccgtgtcggtagagccgtgggcctgtttggttcaggttttttctgaccagcttttctgagaatttggctg

SEQ ID NO: 199747 - DNA, 678 bp, Zea Mays
gttttgtctgtctgccatcctaatccactaacacgacacgtttggagtctctcactaataatatgatagatttcacagatgatcggtacaagctccatacatggttagctaatttcaagcgtatcacagtatgcttttgctgaaggcatactgacaagcgcatattctatctcactaacgatttggttggaaaactctggttgccggtatagacaggggtggagccaaaaacatcttgaggaaggccgagaacatctaacaaatgaactgatgtcagagatgaggcatacaagagtggagaactgcaggaaactctagagaaagcaatgtgttcgtagaaaaaaaatgaacaataagcagatggcatacaattaatcaaaatgttatagtatttgctgtacaattcaggcttgtcatcaactggagatgcaagttgtggataattcatgtccaaatgttcagtgcactttcgactggaaatacatctttctgcagtttgtgactagtcatccagtttgaaccccgatcatatattgtacgatttgtgactaccagattgctccgttttcagctgcaactaccgcgtccgcccgcgtgcaattccatgaccgtgtcggtagagccgtgggcctgtttggttcaggttttttctgaccagcttttctgagaatttggctg

SEQ ID NO: 199748 - DNA, 1274 bp, Zea Mays
ttccgatgcgtccgtccatcgtcgtcgatggggttctgctccttccgcggcctcgcctcccctttcgtcggatatcacctgtcgcgcgccctactagaatactaatccggaccccgatgctgcagtgtcccccctcgcccgcctcctaacactcgctgaaccgagttcgttccataatctcgacgcaccagtgtgcagctcatggtgaagaaacggaggttggggtcgattacgtggcgttgctccgcaacggatgaatcaatcagtggggagacaggtgcttgctcccggttcctggtagcggcggaactcggaggttcgcccggtgggcgtctacagaaagctaggtgatctcttgaatcgattcaggaaatatggagttttcttttctgctgatacaatgctgaaggtggggtcaatgtcactgcagtgacttgggtgacctataagcactgctcatattgtgaggttctcttggatattcaggaaggagccgcagatgttcccgccaagatctgggaatgtggcacacccagacagaggattcaccttgcccctggaatcgatgctgacggggtacttgagcaggtggcccttcatctcggtcacatggctggagatgaatttctcccagttctgctgtccgatgtgacgcacctgcctcgtgcactctaggctctccggtctggtgaagctctcctcaatggctccaatgtgctctgcccatagagacatcctgtacccgaaaatctgcagaaaatatgatatacaaaacaaggtagcaatgtgacagtactgcaataccaagttaccaacttatcagaactgaggcatattacctgtccacgaggagcagaaagcatatttgcccatgtatgctggggttggtatgcagccattgcaatctctgtatctctagttccttccatggatctctggttgatgttagcggatccaattatcacatattcatcatccacaatcatgcctttcgagtgcacatacaccatgaatctcctattcttccgagcttggtcctgattggatatccaagttgcagcataattgtattttttggggaaatcagtacgtccttcagttttgggcatttctaaagtgtaccggaatcagcagcagaaaacagaacaatagtctgcagtctaacctgtgggttactggctgagaatggtccactagatgtgcaagtagtgtcctcagcttcacggttaccaaggcagaagaaattcagttaaatgaagagccaaggaagtact

SEQ ID NO: 199749 - DNA, 2965 bp, Zea Mays
ccatcgtcgtcgatggggttctgctccttccgcggcctcgcctcccctttcgtcggatatcacctgtcgcgcgccctactagaatactaatccggaccccgatgctgcagtgtcccccctcgcccgcctcctaacactcgctgaaccgagttcgttccataatctcgacgcaccagtgtgcagctcatggtgaagaaacggaggttggggtcgattacgtggcgttgctccgcaacggatgaatcaatcagtggggagacaggtgcttgctcccggttcctggtagcggcggaactcggaggttcgcccggtgggcgtctacagaaagctaggtgatctcttgaatcgattcaggaaatatggagttttcttttctgctgatacaatgctgaaggaaggagccgcagatgttcccgccaagatctgggaatgtggcacacccagacagaggattcaccttgcccctggaatcgatgctgacggggtacttgagcaggtggcccttcatctcggtcacatggctggagatgaatttctcccagttctgctgtccgatgtgacgcacctgcctcgtgcactctaggctctccggtctggtgaagctctcctcaatggctccaatgtgctctgcccatagagacatcctgtacccgaaaatctgcagaaaatatgatatacaaaacaaggtagcaatgtgacagtactgcaataccaagttaccaacttatcagaactgaggcatattacctgtccacgaggagcagaaagcatatttgcccatgtatgctggggttggtatgcagccattgcaatctctgtatctctagttccttccatggatctctggttgatgttagcggatccaattatcacatattcatcatccacaatcatgcctttcgagtgcacatacaccatgaatctcctattcttccgagcttggtcctgattggatatccaagttgcagcataattgtattttttggggaaatcagtacgtccttcagttttgggcatttctaaagtgtaccggaatcagcagcagaaaacagaacaatagtctgcagtctaacctgtgggttactggctgagaatggtccactagatgtgcaagtagtgtcctcagcttcacggttaccaaggcagaagaaattcaggtgaaatttgctcagggctcgaccatgaatgtcagaattatttattttgcagtgagttatggagccctttggtagacttacctgcacgtcccatctctctggatcatcgtcgtttgaatagatttcgtcgtcaatagcgataatatcagtttttcaggacatcgtatgctgctggaccgtcgatcttggaatgcaagtcatgccatggctctcttgggccgcgagcatcttcaacctgagagtaaattatcggcacatgaggatctaacaaaatcgcgacaagcttcctgtctcctaataaaggaaaaacaaaatggaacgaagttccagaacaacaaggatggaattctttttgtggccattgcataaggttcttagtaaattcagtttgatacggtaaatgtggaaaaactactctcaccgcaaaatttgggttgtagtagtcttccttgtgaaatgtctgaagagttcgaaatagagtgtgctttggtgtatcatatcggcctccacatagatcaagtcctcccacaaaagcaacaatcttccttctatgattcccagcatcagcatccaagatcactgtcttctggtgatgagtaaagatagtgcctgtttcctggaaacgatggttattaccatcagtgcagattccagatggcagtgtgcttatgtggttgtcagatatcacaatagtttaagctgaagtataagacctgttgcttcacccagctgtgcctcttccctgcagatcgtgggcaaagcagtatctggaccgaagagtgcttgaaaaatctccgggtctcctcatcccttgtgcccatgtaaccttcctacaggcaagaatccaataagcaaacagtgttgtacaacagcatgggtactacggcgtgtaccatcttgatgccaaggagtctccgggacgtgggatcgtcccacacgagcagcagcacccgcacgccctcctgcgacttcctcctgagcaggtcgccgagcgccatgtcgtcgtggccgtcgcgcaccaggtggatggtgtggaacacggaccacccggtgatgtagatgagcctccgggcctggcatatggcgtcgtagacgtcgcgccagcactggccgtgccggtagcagtcgccgttgccgagccttacctccggcagcgttccgtcgggcacgtgcgcgtcctggtacagcgtgaccttcccgccccggcgcagcgggaagtaggtcctgggcacgccggcgaagtccgggcccggggtgacgccgtggtggtacatggtgagcctcgccacgggcacgtactgcacggacagccggagcacggcccccggcgcgcactccttgccgttgcgctccaggaccgggtacgcgccctcgaccatgtccccggcctgcagctggtcggcgcggacggcgacgacgccgatgagctccgcgcccacgacgtcgctgtccttgacgacgaagttgacggtggcggcctcgtgcgcgacgggcaccaggaactgctgcgcccacacggggttctcgtcgtcggggatgacgaaggtgcgcgccaccaccgcggaggcgacctgcaccgtcacgtacgggtcgctggtcatgccctccgacggcttgcacagcaggtcccgcatcctcttggacaggatgtccttgttgggaaggttcctcgcctcgtggatccagatgtccaggctgccgtgcagcagcaccgccggcgcgtccccggcggagccatgcaccaaccaagagacgctctcgtcgtcgtcctgcacgggcatcgtctgcctcgatccgatggcacgggg

SEQ ID NO: 199750 - DNA, 2394 bp, Zea Mays
atccgcccagtttattccgcccggtgtccacgtccactccctcgtcttcaacattccgcccagtttattccgcatcgatccggagattagggtttccgctcgccgccgatgaaaggcggccgcctgcaccgaccggagccgccgcagacccacctcgccatggcggcggcggccgcggcgcctcccatccccgcccctaaccccaccgatgactgggtggacggctcgtggacggtggactgttcctgcggcgtcacgttcgacgacggcgaggagatggtcagctgcgacgagtgcagcgtgtgggtgcacacgcggtgcgcacgctatgtccgcggcgttcacacatccttctcgtgccacaaatgccggaggtccaagcgcgtgccttcctccgctgacgaggccgaggttgctgagctcctcgccgagctgccaacccaccgcccgcctccgctgtaccgccgctgggccgaggtcccgctcccagcccgcgtccacgtccacgggcttcctggcgggggcgacggcgctcttttccgcggcgccccggccttttccgccgccctgtggcgctgcaccggctacgtccccaagagatttggcttccgctactgcgagttcccctcctgggccgacgataatgatggggctgatgctctttttgcgctggccagagagaagcccagggagatgacggatgatgttttgataagtactgaaccgaagaaggagaagcattatgtccgaagcctgagttgtcgtggcaagaagattgacagcaatcaacaagcaatgactcctctaaccaaggctaagaagagagagcctgatagttggaagaatgagtgtcagcagagtgagggctgtgggatacaagattccatttgcgatgatggtcacgctgaaactaatatggtcagttctgatttgctaactgctaaaaccaagaagaagatggaggaatccttggagccaagtggggagaataataactgtgagcaagttgagatttcgagtaaggatggcaaaaaggtgcccatgaagttggaggtctcatctggagttcaaactacatcatccattgtggaacaagaagtgcactcagggtttgttggggtagaggttacaatgtataagcaacagccagaagaggatcacattgtgtgctcaaggcctgacataacaagttcaggtcccatcaaagtgcaagacatacagggccttccaaagcaaccaaatcaagcttcaaatctgcaggttgttgctggtgtaccagatttacttattggtcagccaaaaccacagactattaaaactgagcctagttctcaggaaaacaaggcagctcactgtgtcgatttagtgagtgatgaccatgaaagcaataagcaaggcctaggggatgctgcagttctttcaatcgtccaaaaagattcatccaatttaaaatatggttcagtatcccatgaacatctgaaatcggaagcacaaaatccgaggcacacagttgctgagaatcctaactcaactttgggttctgcaaaagcgaacaggggaaagcaactcattgttacctgacgtaccggacgcagagaacataagaactggacctgatagggattcagaggggagtgctgatttgcatcaggataatctacctaggggcaaacgtaagtgtcggaaacgcaggcgacttgagctcaaaggtaggagagtcagggatacaaggaagagatccagcattgattcttcctcagaagatgctgctgcccccttgtctgattccagtagtgacagaaatagtaatcccagggacgacgagagcaaagaagataattctgttgcccaagaaattggcggttacatagacgctaagggtgcagcttcaagtacataatattcaactggtggtatatgcatatgactagaactgaatcttgtggtgaattttcaagttggtcagtgttcgatggatttctttatccatctacaaatctaggaccaaaaagaaaaatgggtactgcagtccgcatcaccaccagtcctttgaaagagcaggaaatggaggagtttgtctaacaaatctgttatgttcaacaatggtgtatatattattagtcagaatttagccttgcgctattatgatagaattagttgcctggtaaacagtggtaacaatgttgttttgtttatttaatgtatcgatggaccatcttatgtatgagtgaattaagtagacattttcgtgtcgagtatgataaattgttagattgctaggttaaataaatctgttcttgtttttgaccacttgtctattcgataaggcatgtaacctgtaatatgcaatccactagtattcaattgctgtggctcgttttcattcatctcgtt

SEQ ID NO: 199751 - DNA, 3435 bp, Zea Mays
atccgcccagtttattccgcccggtgtccacgtccactccctcgtcttcaacattccgcccagtttattccgcatcgatccggagattagggtttccgctcgccgccgatgaaaggcggccgcctgcaccgaccggagccgccgcagacccacctcgccatggcggcggcggccgcggcgcctcccatccccgcccctaaccccaccgatgactgggtggacggctcgtggacggtggactgttcctgcggcgtcacgttcgacgacggcgaggagatggtcagctgcgacgagtgcagcgtgtgggtgcacacgcggtgcgcacgctatgtccgcggcgttcacacatccttctcgtgccacaaatgccggaggtccaagcgcgtgccttcctccgctgacgaggccgaggttgctgagctcctcgccgagctgccaacccaccgcccgcctccgctgtaccgccgctgggccgaggtcccgctcccagcccgcgtccacgtccacgggcttcctggcgggggcgacggcgctcttttccgcggcgccccggccttttccgccgccctgtggcgctgcaccggctacgtccccaagagatttggcttccgctactgcgagttcccctcctgggccgacgataatgatggggctgatgctctttttgcgctggccagagagaagcccagggagatgacggatgatgttttgataagtactgaaccgaagaaggagaagcattatgtccgaagcctgagttgtcgtggcaagaagattgacagcaatcaacaagcaatgactcctctaaccaaggctaagaagagagagcctgatagttggaagaatgagtgtcagcagagtgagggctgtgggatacaagattccatttgcgatgatggtcacgctgaaactaatatggtcagttctgatttgctaactgctaaaaccaagaagaagatggaggaatccttggagccaagtggggagaataataactgtgagcaagttgagatttcgagtaaggatggcaaaaaggtgcccatgaagttggaggtctcatctggagttcaaactacatcatccattgtggaacaagaagtgcactcagggtttgttggggtagaggttacaatgtataagcaacagccagaagaggatcacattgtgtgctcaaggcctgacataacaagttcaggtcccatcaaagtgcaagacatacagggccttccaaagcaaccaaatcaagcttcaaatctgcaggttgttgctggtgtaccagatttacttattggtcagccaaaaccacagactattaaaactgagcctagttctcaggaaaacaaggcagctcactgtgtcgatttagtgagtgatgaccatgaaagcaataagcaaggcctaggggatgctgcagttctttcaatcgtccaaaaagattcatccaatttaaaatatggttcagtatcccatgaacatctgaaatcggaagcacaaaatccgaggcacacagttgctgagaatcctaactcaactttgggttctgcaaaagtttgtacatcgttttctggttctgtctctacaccacctgagttatcacactctctggcatctaaagaaccatcatcagggaatagtgattgttcaaagaaagaggagttgctctcaccaactgtcagcaaacatgatcccgtgaaattttctgaagatagttcccaggaagtgacaagatactctgagaaagttcaactaaaagactcacaaccttctgcaccaaaatcatctcaagctagtagaatacatctgtctacagtcaaacatagattaccggtgtcaaaggagcaatcacagaagatagccctcactggaggcacctcagcaagatcattccatggagaggtgccatcacttcagtctcgtaataaggcagcagcttgtagttcttcccagaaaaaggacaagatctaccagcgcatcattaatgtcacgcaagatagttccaataattcagcaccaaccgagctgcgtgcatctgattcggctgccccattgagtgatgagcagcttgcattattgttgcatcaacaattgaacagctcccccagagtaccgagggtgccacgttgccatcaagcagctggtgcacagatgcttcattcaactggatcatctgttttttctaagcggtattcatcacatggaggaagggatcatgcagcggttataaaaaagagaaacagagaagattcattaaaagatagcgaggacactaagaggacagaaaaaaggcatagagtttctagcacggagcatgctcctgtgaaaaactcgtgcagatcagctgaaaatatagcatcagaacagaaaattcgtggcatatgtccaactggagccaatgctggtttatcaaaggatgatttgatggatactattgtttcacacaatttacctgcattttagggactcaaggaaatcgaatgggggagattctttgtatcgcagttatgcggatgccatcaaaggttgccttaggaagaggagggagtgggctcacctttttgaccaagcttcaaaaatgaattcaaataaaaggcgaacaggggaaagcaactcattgttacctgacgtaccggacgcagagaacataagaactggacctgatagggattcagaggggagtgctgatttgcatcaggataatctacctaggggcaaacgtaagtgtcggaaacgcaggcgacttgagctcaaaggtaggagagtcagggatacaaggaagagatccagcattgattcttcctcagaagatgctgctgcccccttgtctgattccagtagtgacagaaatagtaatcccagggacgacgagagcaaagaagataattctgttgcccaagaaattggcggttacatagacgctaagggtgcagcttcaagtacataatattcaactggtggtatatgcatatgactagaactgaatcttgtggtgaattttcaagttggtcagtgttcgatggatttctttatccatctacaaatctaggaccaaaaagaaaaatgggtactgcagtccgcatcaccaccagtcctttgaaagagcaggaaatggaggagtttgtctaacaaatctgttatgttcaacaatggtgtatatattattagtcagaatttagccttgcgctattatgatagaattagttgcctggtaaacagtggtaacaatgttgttttgtttatttaatgtatcgatggaccatcttatgtatgagtgaattaagtagacattttcgtgtcgagtatgataaattgttagattgctaggttaaataaatctgttcttgtttttgaccacttgtctattcgataaggcatgtaacctgtaatatgcaatccactagtattcaattgctgtggctcgttttcattcatctcgtt

SEQ ID NO: 199752 - DNA, 1552 bp, Zea Mays
gcttcgctcggctaacctcgcccgcctcccatgccgctgctggcgaggagcacgaccgcggggcctcggcggcgcgccttcgtcctcgctctcctcctgctgcccccgctgtttcttattctgctccaccgcacctcatcgccctcgcttcggcccctccccgcgccccgcaagccctcttcccggtcccagtcctgcgactactccgccggcgagtgggtgcgcgaccccctcgcgggctcctcgctccgctacgacaacacctgcaaggagatcttcaagggatggaactgcatcgccaatggcaagcccaacgcccgcgacctgctcagctggcggtggaggcccgtcgggcccgggtgcgagctcccccgcctcgacccgcgccggttcctggagcacctcagggacaccagtatcggatttgtgggtgattcgttgaaccgcaacatgtttgcctcattagtatgcatgcttaggggagtaagtggtgaggttcgcaaatggcgtcctgcagaggcagaccgtggcttcaccttcctgcgctataacctcactgtggcataccacaggacaaatctcttggtacattatggtggtcagcaaatccaaatggaggtactctagaatctcttgggtataagcatggttacagagttgatgtggatattcctgaccaaacatgggtagaggcatgtagcttccatgatgttcttattttcaacactgggcattggtggtgggcaccctcgaaatttgatccaatacggtcaccaatgctgttctttgagaaggggaggccaattgtgcctcctttactgccacctgctggactggatttggctcttcaaaacatgttaatgtttgcgaacaaagcaatgagaccaaacacagtgaaattcttccgtactcaatctcctagacatttcgaaggtggtgactggaatgaaggtggatcttgccaacgtaaccagcccttgtcgtcagaagaggtggaagaaattttctctttggacaataacagcaccaacgtggaggcacgcttggtaaaccaacacctggtgaaggctcttgaacagcagtctagttttagagttctggacatcactcgcatgagtgaattcagagcggatgctcacccttcaacaactggcggcaaaaagcacgatgattgcatgcattggtgtttgccaggaccaactgacacatggaacgatttgctagcgtccagtcttgaagtggttgagagctagtctgagaataaaactcaagggctcacctgagaaagttacccctagcttcactccccccccccccccccccccccacacccccccatgaatccacttgtagaatcgagttttgctgagagttcgttgtagggctcttcgctgcagcttgttttatatgtggagtggagcatttccccggcttgtattcttgaccctgtatatatttgaccattgtagggtttcactgtataataataggtcgaattcattttgtttgtttgaaaactaagtcgcgtgtatgaacgaccagcagatcgatg

SEQ ID NO: 199753 - DNA, 3320 bp, Zea Mays
tataaaagtagaaagcacactgtatctttcagtcagtcaacgaccctagacacttgttccttttttttgaattgccaaattatacattacgtacaaaattttttttggtgtactacatccgtcccaaaaacaagtgctttggtaaccttctgttggacgctcagtcgttcacacacacatcttgtgtgaatctgaaccatccgcagtacagggagtcggtcgcgcgaggtgcaatgcaaccaatgcgaaattttgcatgatctccgagttgagttgagcaaccagcgaccaaaatcttgggcaaaaacatacgcatgcttcctctctgcaatgcgggttggacatgcagaatactcgcggaatacgatacaccaccaatcgtcgacaatgcctctagcacgatcttgtctgcacctgctgctcctcttctccagcatcgcagcggcggcctctgcggcgacagagcggatcccgaactccaccacgtggccgtcgtcgtgcccgtcgtaccggtgcggccacgccgtggacatccggtacccgttctggatcgacgacgccagcaacgcctcgtcgtcgtcgtcgtcgtcgtcgtcctcggactgcgggtacccgagcctgcggctggagtgccggcgcgagacgccggtgctgccgctcccgtcgggggactacgccgtgacgcgcgtcatgtacggcgaccgcaccgtgtcgctcttcgacctcggcgtgttctcgctgtccaacacctgcccgctggtgggccgcaacctgtccctccccgcggggtcgccgctgtcgctcacgccccgggacgccaacctcaccttcttcgtccactgctccttcgcgggcgtccccgcgcgccacctcgtggcgtgcctcgagggcgacggcaggcaccactcgtacgtgttctgcgacggcgacgagctcgcgccctacgcctacgcggggctgtgccagagcgtcatcgccatgcccgtgctgcggaggtccctgctcggcaccgggagcaccaccaggagcccgctggacgccatcgtgcccgcgctcaacatggggttcgagctgagctggaggcccgaggcggacggggagtgcggacagtgcgagagtgccggcggcctgtgcgggcgccgtcggctggcggggcagcacggggcctggaccttcgcgtgcttccgcgctgcggcggcggcgaacccagcgttgatttctcctaaaactccaggaccaaaaggcaggacaagtaaggtagtcggaattgtatgtggagtagtagccgtcagtctattggcagcgtgcttcttttttgtctggcacaagcgcaagaggaggaaacaagctagagcaccaaatggcttcatgcatagtgaatcttcattgcaatcatacagcaaagaccttgagttgggtggctctccacagattttcacttatgaggagcttgaagaagctactgatggatttagtgactcgagggaacttggtgatggtggttttggaactgtttacaaagggaaactccaggatgggagagtagttgcggttaagcgcctctacaagaacaactacaaacgggttgaacagttcaaaaatgaggtagacattttgtcccgcctcctccaccagaacctagtcatcctatatggctgcacgtcgcgtagcagccgtgaccttatgctcgtgtacgagttcgtccctaacgggacagtcgcagaccatcttcatggatcccgtgcgtcagaacgcgaccttacatggcctctaagggtgaacattgccatagaaacagctgaagcacttgcatacctccatgcggtcgaaatcatacaccgcgatgtcaagaccaacaacatactgctggacaacagcttccacgtcaaagtcgccgactttgggttgtcgcgtctgtgccctcctgaagtcacacacgtatcaactgtcccgcagggcacaccaggctatgttgacccggtgtaccaccagtgctacaagctaactgagaagagcgacgtgtacagcttcggcgttgtgttggtggagctcatctcctctaaaccagctgttgacatgagcaggacccacagcgatatcaacctggccaacatggctctcaacagaatccagaaccacgaagttgatcggctggttgaccctgagcttggatatgagactgacgatggaacaaagaaatcgatagatctcgtcatggagttggcatttcagtgtttgcagttagaaagggattcaaggccgtcaatgaaggaagtagtggtggccctgaactgtatcaagaatggggattccccagagaataagatggacaggagctcctcatctcctaaggaagacgcacacttgctgaccaatagcatacagtattcgcctgactctgtaatccacagattccatagccaatcgactacgcactcggcagcatcaaatgctagtggatgagataccttgtatatatactgatcctgaagaaataaagccccatcggacgaattgtaaacagtatagagatttgttagtgaactgattcatctgggtaagttgtttcttctttgttaactggctcgtagtacaaagccgggttgtatgtgaccacagcaggagcttggcataatcttaaacattagggaaagtagtagaatcagtctcaggccaaaaaatctacaagctttttttttcattttgacaaaagaaggggggggggggctgccgatgacagtaatggagcaacacgaaacaaacaaatcaagctcgtactcattggctgacagtccagttccagtatttggtctatcatgtttaagttatcttgaccatgcactttgtggtcttttaggcgtgatcacttccattttatattaccacattcgcacttacccctgcagtcaatttttgtgagtggacatgattttcgggatgtgtatgagtgatgttggcgtccctgggtttgcgacactgctcttatccctggcaatttaagacatcttctagttttgctatcagtgtggaaattatcaggcatatatcttctgatggaagttcaggcctgaaccgctgtactcctagtcctaggcaatacaaggaagtaaattgcatatgcgtacctgaatgagcagacggcaaccagccgggtctccgctctcgccaggcgaggcggcagcttgtgcgacgccacagccacgatgggcaatcgcctcctcgccgccgtcagacggtagtccagttcgcggttgccggttgctgtcaggctcccggccccgaatcccgaacggattcgccctcctcgccctaggccgttt

SEQ ID NO: 199754 - DNA, 4385 bp, Zea Mays
ccgctcaatccacatggattgagagctaaccgaacaagccctaagcgtcgtctcgccatgtggggttttcttttcacccaggcacgacgcctgatttgttcttgttctagtaatcccaaaaattccacgtacgtactcagctccagtcttcactcgtttgtgctgacatagtgctaatggtagttggtaacacatactcgctccgtccgaatttttacaatttagaccccttttgtttttaaaagattttacgtttgacttatttgacctcttaaacgacttaatgtcgtttttagaccctttgtttggcgcgtagaccatgatgtattcagtagatctggccaatactccggttttggtacgacgggacataggagctcagcgccataattaatggcaccgagcaacaccacatagacgccaacgcaataggaggagtcctgtgcactatgtacctcggcagcataggctatggcgtcgagcggtattatctcagtgccatggtctatagcgccgagcaaagggtccaaaaacgatattaaatcgttcagggaccaaacatggattttttcaaataaagggctaaattgtaaaaaaaattgtccccaaccacgtgatttagtcgttttaggtttcttaagacaatcactatcaactttgtccggttatatctgatgtttataaacttttacaacataaaaataaagttattaaattcatcgtgacctaaactaccataacatgtaattcatttagtttaaaataagttaatcttatatatatagtattggtcaaagttaaaatagtttgcctgagaataaacctagaacgactgactaaatcatatggacggaggaagtaaagtggatccacgcttaattcacatagtaagggcgtgttcatttacggaaccaaacggttctagctcaatagctcaatagatatttgtattagcattgaatagctggaatagatccggatctcaatccctactaaacaaacaggccctaaaataagggaattgaaggaaatctataggaagaaatcccctttctattcaaatgctcaacgacgtctgactggcctcatcagactcgccctcagtcagcagcttggactagcagacacgtccttctgttcgggtaattaaggtctccggtcgctggctggtggggcccacgaattgtggacccacttgtcgggcctgctcccaccaactgatcagcttcctgctcgaagcctccagcccagcgtctcggactatcgtcaccagaacagacacgtcaaacccggaccggtcagctgattcggcaacatccttcgcggcttccagtcgaatttaaataaccctagtccgatgcatagatacatcagccacggccaccttcttttgcgagttgttcttcccaaatccttctccccgaagtgtttctttctcccctcctgcgtcgccgactcgccgctcgcggcgcaaagatgcacgggtgccgtgttcccgccgctgggctgctgctgctctgcccagccgccatgctactgctcgctcttctactgctagccagccttcctaccaccgccgccgccgtgaacacgtcgacgttgccatgcgagccggcgcagtgcgggaacctaagcatctactacccgttctggctcacgggcacgcaccagcggcactgcggctacaaggcgttccaggtcacctgcgaggagcggaaggtgtacctgaagaactcgtactgggcgtaccaggtcctggacatctcgtacgagaacagctcgttcgtcgtcaccaacgtcaaccttccggaggacggcggctccttctgcgacctcagcctcatcggcaacgcctcctccgacctgagcgccgcgccgttcaagatcagcggcaggaaccgggagctgttcttcctcagcgattgccagggccagggccaggcacggcagccgtcccctccttcttcttgggcgcaaatgaattgtagcgactacggcgacggctcggccgccgccaagtcgttcgcgtggcttgctggcaagtacaggcccgacgacaccttgaagccgccgctgccgctgaactgcacggtgtcgtcattgatgccggtgctgggataccagggggccgggccggccgactacgaccgcctaatgaatcttgggttcctcctcgagcacaacttcacggcggaggactgcgcggcttgcgctagcaccggcgacaggtgctcggtcgaccccgacgacgaccagctggtgtgcaactgctccgacggccagtactggtttttctgcggaccaaaaggcaggacaagtaaggtagtcggaattgtatgtggagtagtagccgtcagtctattggcagcgtgcttcttttttgtctggcacaagcgcaagaggaggaaacaagctagagcaccaaatggcttcatgcatagtgaatcttcattgcaatcatacagcaaagaccttgagttgggtggctctccacagattttcacttatgaggagcttgaagaagctactgatggatttagtgactcgagggaacttggtgatggtggttttggaactgtttacaaagggaaactccaggatgggagagtagttgcggttaagcgcctctacaagaacaactacaaacgggttgaacagttcaaaaatgaggtagacattttgtcccgcctcctccaccagaacctagtcatcctatatggctgcacgtcgcgtagcagccgtgaccttatgctcgtgtacgagttcgtccctaacgggacagtcgcagaccatcttcatggatcccgtgcgtcagaacgcgaccttacatggcctctaagggtgaacattgccatagaaacagctgaagcacttgcatacctccatgcggtcgaaatcatacaccgcgatgtcaagaccaacaacatactgctggacaacagcttccacgtcaaagtcgccgactttgggttgtcgcgtctgtgccctcctgaagtcacacacgtatcaactgtcccgcagggcacaccaggctatgttgacccggtgtaccaccagtgctacaagctaactgagaagagcgacgtgtacagcttcggcgttgtgttggtggagctcatctcctctaaaccagctgttgacatgagcaggacccacagcgatatcaacctggccaacatggctctcaacagaatccagaaccacgaagttgatcggctggttgaccctgagcttggatatgagactgacgatggaacaaagaaatcgatagatctcgtcatggagttggcatttcagtgtttgcagttagaaagggattcaaggccgtcaatgaaggaagtagtggtggccctgaactgtatcaagaatggggattccccagagaataagatggacaggagctcctcatctcctaaggaagacgcacacttgctgaccaatagcatacagtattcgcctgactctgtaatccacagattccatagccaatcgactacgcactcggcagcatcaaatgctagtggatgagataccttgtatatatactgatcctgaagaaataaagccccatcggacgaattgtaaacagtatagagatttgttagtgaactgattcatctgggtaagttgtttcttctttgttaactggctcgtagtacaaagccgggttgtatgtgaccacagcaggagcttggcataatcttaaacattagggaaagtagtagaatcagtctcaggccaaaaaatctacaagctttttttttcattttgacaaaagaaggggggggggggctgccgatgacagtaatggagcaacacgaaacaaacaaatcaagctcgtactcattggctgacagtccagttccagtatttggtctatcatgtttaagttatcttgaccatgcactttgtggtcttttaggcgtgatcacttccattttatattaccacattcgcacttacccctgcagtcaatttttgtgagtggacatgattttcgggatgtgtatgagtgatgttggcgtccctgggtttgcgacactgctcttatccctggcaatttaagacatcttctagttttgctatcagtgtggaaattatcaggcatatatcttctgatggaagttcaggcctgaaccgctgtactcctagtcctaggcaatacaaggaagtaaattgcatatgcgtacctgaatgagcagacggcaaccagccgggtctccgctctcgccaggcgaggcggcagcttgtgcgacgccacagccacgatgggcaatcgcctcctcgccgccgtcagacggtagtccagttcgcggttgccggttgctgtcaggctcccggccccgaatcccgaacggattcgccctcctcgccctaggccgttt

SEQ ID NO: 199755 - DNA, 2114 bp, Zea Mays
aattaatctacactaccttgctccgcaaccaggaactgcccaatgcaaggtcatgtttgaaatattttgagaatggtggggacactatcctgggttatagagcggttcaggttaattggaaagatctggactattgcaatgtttgtgatatggatgaggagtatgaagacaacttattcttgcaatgtgacaagtgtcgtatgatggttcatgctagatgttatggtgaacttaaacaattggatggaggactttggctttgcaacttgtgtcgaccaggtgcacctcgtgtgtctccaaaatgctgtctatgtccagtcacaggtggtgcaatgaaacctacaacagatggccgttgggctcatctcgcatgtgctatatggatccctgaaacatgcttaaaggatgtaaagagaatggaacctattgatggactgagcagaatcaacaaggaccgttggaaacttgtatgcagcatttgcggagtttcatatggagtttgtatacagtgttctcatcctacctgtcgtgttgcgtatcaccctctttgtgcacgtgctgctgacctttgcattgagcttgaaaatgatgacaaaatccatcacatgtatcttgatgaagacgaggatccttgtattcgtttactctcgtactgcaaaaagcatagacagccttctgctgctgaacgtccatctttagaaagtgatcctcctgaacccattcaggtagttcagacagatatggcttcatcatctggttgtgcaaggaccgaaccctataatttacacaggagaaggggccaaaagcagccacaagttgtcgctactgcttctctgaaacgtttatatgtggagaatagacctcatattgtcagtggctactgccaaaacagagtaggcaatacatgcggagaatcaattcaaccgtttggtttgtcagatgctgtgcagcaagaagctattggcaatgtgtcttctatggttgaaaaatatacaatcgtgaaggctacatttaggaagagactaacttttggaaaatcaaaaattcatggatatggtgtctttgccaaggttgcacacaaggccggagatatgatggttgaatacataggggagattgttagaccaccgatatcagacactagagagcggcgaatttacaactcactagtgggtgctgggacatatatgttcaggatagatgatgaacgtgttatagatgccactcgggttggaagtatagcccgtctgatcaatcactcatgcgagcctaattgctattcacgtgccataactattcttggagatgaacacatcatcatttttgcgaaacgggacatagatccatgggaagagctgacatatgattataggtttttttcaagtgatcaacgacttccatgtttttgtggattccccaaatgccgtggagtagttaatgatgttgaggcagaggaacagtcggctaaaatcagagttaagagaagtgaattatttgaaaaaagtgaaaagtaaaggtacatcatattggttgggatatgacatgcttgtgtgatatgcttgccagtgcctaaaggcaaattctaaaaaatggttgagtttcattcttgaatcctgataattcttctcattatttgagtggaagacgaatctaattgtataggtacccaatataggatcggcaatccaatttggggacataagttgaatcaattgtcgtgtaccattgaaatgttagttgttacacatatttcggccatttatcttgttgaacctaccctattttcaaccgttggagctgggaatcggaggggtggtttggttaaatgatttgagatggcctgccatgtgtaatgtaatcgaagtacatggttgcacttttcggtgttgcccatatattatccataacaatatgtagtttcagctgttctgcatttacgaaaatgcattggaagagaaacgtccacttcaactgaatgtattctacgaaatctttatttatgggtatccgtctgttgtgcattctaacctttgtgaatatagagcgtgtatcttatactccttaagtttcaatttacaatttgtttgacttgactgactcgtcttattttttta

SEQ ID NO: 199756 - DNA, 2375 bp, Zea Mays
ccaaaaggaccccaagatacatggtaggatagtatctgactctgaccatttccataacaaaaaggatatatggcctgaaggatatactgctttcagaaagtacatgtcaatagaagacccacatgcagtaacattgtacaaaatggaagtacttaggaactctgatacaaaagcacgcccgttgtttagggtgatctcagaagacggggtgcagattgatggatctaccccaaatgcgtgctggaaagagatataccgcagaataaaggaaaaacagtgcactgaattggaaagaaacgtatgccaaagttctggttcctacatgtttggcttttcaaatccgcagataagacaacttattcaggaactgcccaatgcaaggtcatgtttgaaatattttgagaatggtggggacactatcctgggttatagagcggttcaggttaattggaaagatctggactattgcaatgtttgtgatatggatgaggagtatgaagacaacttattcttgcaatgtgacaagtgtcgtatgatggttcatgctagatgttatggtgaacttaaacaattggatggaggactttggctttgcaacttgtgtcgaccaggtgcacctcgtgtgtctccaaaatgctgtctatgtccagtcacaggtggtgcaatgaaacctacaacagatggccgttgggctcatctcgcatgtgctatatggatccctgaaacatgcttaaaggatgtaaagagaatggaacctattgatggactgagcagaatcaacaaggaccgttggaaacttgtatgcagcatttgcggagtttcatatggagtttgtatacagtgttctcatcctacctgtcgtgttgcgtatcaccctctttgtgcacgtgctgctgacctttgcattgagcttgaaaatgatgacaaaatccatcacatgtatcttgatgaagacgaggatccttgtattcgtttactctcgtactgcaaaaagcatagacagccttctgctgctgaacgtccatctttagaaagtgatcctcctgaacccattcaggtagttcagacagatatggcttcatcatctggttgtgcaaggaccgaaccctataatttacacaggagaaggggccaaaagcagccacaagttgtcgctactgcttctctgaaacgtttatatgtggagaatagacctcatattgtcagtggctactgccaaaacagagtaggcaatacatgcggagaatcaattcaaccgtttggtttgtcagatgctgtgcagcaagaagctattggcaatgtgtcttctatggttgaaaaatatacaatcgtgaaggctacatttaggaagagactaacttttggaaaatcaaaaattcatggatatggtgtctttgccaaggttgcacacaaggccggagatatgatggttgaatacataggggagattgttagaccaccgatatcagacactagagagcggcgaatttacaactcactagtgggtgctgggacatatatgttcaggatagatgatgaacgtgttatagatgccactcgggttggaagtatagcccgtctgatcaatcactcatgcgagcctaattgctattcacgtgccataactattcttggagatgaacacatcatcatttttgcgaaacgggacatagatccatgggaagagctgacatatgattataggtttttttcaagtgatcaacgacttccatgtttttgtggattccccaaatgccgtggagtagttaatgatgttgaggcagaggaacagtcggctaaaatcagagttaagagaagtgaattatttgaaaaaagtgaaaagtaaaggtacatcatattggttgggatatgacatgcttgtgtgatatgcttgccagtgcctaaaggcaaattctaaaaaatggttgagtttcattcttgaatcctgataattcttctcattatttgagtggaagacgaatctaattgtataggtacccaatataggatcggcaatccaatttggggacataagttgaatcaattgtcgtgtaccattgaaatgttagttgttacacatatttcggccatttgagatggcctgccatgtgtaatgtaatcgaagtacatggttgcacttttcggtgttgcccatatattatccataacaatatgtagtttcagctgttctgcatttacgaaaatgcattggaagagaaacgtccacttcaactgaatgtattctacgaaatctttatttatgggtatccgtctgttgtgcattctaacctttgtgaatatagagcgtgtatcttatactccttaagtttcaatttacaatttgtttgacttgactgactcgtcttattttttta

SEQ ID NO: 199757 - DNA, 3879 bp, Zea Mays
atgacccaagtcaggcgcgtatagcagcgtcctccggcgggaaacggtaaataaaaagagatgggatttgagggccccaaaacttccctccccaaatcccccaaaccccatcaccattgtcaccattgctcgccgaaccctagagagggcgcgggggcggataccttagctagccatggtcatcgccgttgagggcaacggcttcgtccacgacgacgaggaggacgacggagaccgccccatccgctaccttcccctcggccatatctactcctcttccacccccgcccccgcaccgcgcccgccggcccagaagaagccccgcttcgacgacggcagaccccccatgaaagtatattaccgccgccgtcgcaagaagctgcgggtcgatgaatcgctgtcgccgccctcgccaacgacggccccactcgcgccgcccgagagggacgagaaggctgggccctcgcgccggaaagactccctcaagcacgagctgctcagcctgggccccgcctcacctgcattggatggggaggagccggaacggcgtctaggacgaacgaggcgctgcggaggggctgaaaagacggtttgcttctcagaacctgagaggcggcggcagccggccaggcccaaggggtcggtcgggaggagatgggtcgagttggatattcagactgcggatcctaatgcctttgtcggattggtgtgcaaggttttctggccgctggatgatgattggtacaagggctccatcgcatggtacaatgaggcaaccaagaagcattcagtaaagtatgatgatggtgaagcagaggaccttagccttgcagatgaaaggataaagtttttcatctcctctgaagagatgaagtctttgaatctgaaacttggaatttccaatcaggataagaaggggcatgatgagttgcttgcacttgctgttagctttcatgactatcagggtctcgacccaggtgaccttgtgtgggcaaaaattacaggtcatgcaatgtggccggcggttgtggtggatgagtcaaatgtacctgcaactcgagctttgaagtcaattcggttggaccaatcaatattggtccaattctttggcactcacgattttgcaaggattaaattgaagcaagctgtgccgtttctgaatggtcttgtttcttctttgcatctcaaatgcaagcaagcaagtttcagtcggagcttagaagaagcaaaagaatttctccacacacagcagcttcctgaaattatgttgcagcttcggaaatctgttcaacatgatgtctctgatgttaattcctatgagggcaaggtagactcttgcagtaatttatcagaagctctagcattgcaaaatggagaggatgctgagatgactcaaatagaactagggaaccttcgtgtgagcaatttaggtaggatagtatctgactctgaccatttccataacaaaaaggatatatggcctgaaggatatactgctttcagaaagtacatgtcaatagaagacccacatgcagtaacattgtacaaaatggaagtacttaggaactctgatacaaaagcacgcccgttgtttagggtgatctcagaagacggggtgcagattgatggatctaccccaaatgcgtgctggaaagagatataccgcagaataaaggaaaaacagtgcactgaattggaaagaaacgtatgccaaagttctggttcctacatgtttggcttttcaaatccgcagataagacaacttattcaggaactgcccaatgcaaggtcatgtttgaaatattttgagaatggtggggacactatcctgggttatagagcggttcaggttaattggaaagatctggactattgcaatgtttgtgatatggatgaggagtatgaagacaacttattcttgcaatgtgacaagtgtcgtatgatggttcatgctagatgttatggtgaacttaaacaattggatggaggactttggctttgcaacttgtgtcgaccaggtgcacctcgtgtgtctccaaaatgctgtctatgtccagtcacaggtggtgcaatgaaacctacaacagatggccgttgggctcatctcgcatgtgctatatggatccctgaaacatgcttaaaggatgtaaagagaatggaacctattgatggactgagcagaatcaacaaggaccgttggaaacttgtatgcagcatttgcggagtttcatatggagtttgtatacagtgttctcatcctacctgtcgtgttgcgtatcaccctctttgtgcacgtgctgctgacctttgcattgagcttgaaaatgatgacaaaatccatcacatgtatcttgatgaagacgaggatccttgtattcgtttactctcgtactgcaaaaagcatagacagccttctgctgctgaacgtccatctttagaaagtgatcctcctgaacccattcaggtagttcagacagatatggcttcatcatctggttgtgcaaggaccgaaccctataatttacacaggagaaggggccaaaagcagccacaagttgtcgctactgcttctctgaaacgtttatatgtggagaatagacctcatattgtcagtggctactgccaaaacagagtaggcaatacatgcggagaatcaattcaaccgtttggtttgtcagatgctgtgcagcaagaagctattggcaatgtgtcttctatggttgaaaaatatacaatcgtgaaggctacatttaggaagagactaacttttggaaaatcaaaaattcatggatatggtgtctttgccaaggttgcacacaaggccggagatatgatggttgaatacataggggagattgttagaccaccgatatcagacactagagagcggcgaatttacaactcactagtgggtgctgggacatatatgttcaggatagatgatgaacgtgttatagatgccactcgggttggaagtatagcccgtctgatcaatcactcatgcgagcctaattgctattcacgtgccataactattcttggagatgaacacatcatcatttttgcgaaacgggacatagatccatgggaagagctgacatatgattataggtttttttcaagtgatcaacgacttccatgtttttgtggattccccaaatgccgtggagtagttaatgatgttgaggcagaggaacagtcggctaaaatcagagttaagagaagtgaattatttgaaaaaagtgaaaagtaaagggtatacgtatgaatcgggatgtgggctctaaagaaatgaacacgatgataaatacaaacttagcgtttgaccatggcaattggtgaaaaaagagtggtacatcatattggttgggatatgacatgcttgtgtgatatgcttgccagtgcctaaaggcaaattctaaaaaatggttgagtttcattcttgaatcctgataattcttctcattatttgagtggaagacgaatctaattgtataggtacccaatataggatcggcaatccaatttggggacataagttgaatcaattgtcgtgtaccattgaaatgttagttgttacacatatttcggccatttgagatggcctgccatgtgtaatgtaatcgaagtacatggttgcacttttcggtgttgcccatatattatccataacaatatgtagtttcagctgttctgcatttacgaaaatgcattggaagagaaacgtccacttcaactgaatgtattctacgaaatctttatttatgggtatccgtctgttgtgcattctaacctttgtgaatatagagcgtgtatcttatactccttaagtttcaatttacaatttgtttgacttgactgactcgtcttattttttta

SEQ ID NO: 199758 - DNA, 1778 bp, Zea Mays
ccccgacagttgttgtgtgtaagaaaaatagggtttcagtggcggcagcctccactcacgccgccgtcgcctccgagccccactgcccgatccagacaaccaccccgcccagatccagatccacctgtactggatctcacagcctccgcttctgctttcctttatgtcgtcgaccgcgatgtcttgggacgggcgccgacgggggagatggagctgccgagcaacgctggcgacggcgaactcctgcccatggaggagcacaaggagcgcgcgctgcggcacctactccgccgatccaagcgcccgctggaggagttcgtggccgccgtggcagacgtcgcggagcagctggtgagcgcgtatctggacctgggcgtcgagtggcgcggcgcagactggcgggagcggttcctggccagtcgtacgatagcgcgagctcgatggccaggcggcacacgtcacaccgggtggcaactggcagggcaatgcccgatcaggtctccgtcgtcgattcgtctgaacagctatcctcatcatattttaatgtctcgagcataatacggagtacatatctgtatttacgtcagcgttattgcaacgctctctctccgtggtctcttctacatactataatagtagtacattagtactaacaatgtggttggccatggcatgcttgcttcgagatcaacatgaacaatggaagcacaagtacgggaatccatgtagaagcgtgaagattttccggtgccaattgccacggaataatgccttctactcagctcaacctccaaagcatgatggctctgacaaaccactctgtccaggagctcctgtatgccactggtgtggtacctggaaaggtgataaaatatgtagtagctgcaagaaagcaaggtactgttatgagaaacatcaggcactgcattggcgtactggtcataaaaatgattgcctccagataataagttctgttgcttcaaattcagttctgccagctgtaggaataggtgattatctttttttatatggctgacaatgatagtatactcagtatcaaagaatatagtttttgaattgtgttttctgctaggtacgacatctattaatttttttgtttgttatatatgttttttctccacaaacattctttagatttgatagccttttaagcgactagttatatgggacctggaagtctttttatgtcttctagtgtacttcactatgcacttatttctatctcaagaattgctgctatgattagtcagcggttagtgacacttgtttttttccccactattgctttttagaggtgatgctgatgtgcaagcatcttcaccttgagttctgccttgccagaatgaatcaagtttattttcccatcctgctccatttgaggcaaattgaacagggatttgtttggcttccaaatggtttgttggtcctaaaatagtcagaatcacatgacatctgtgctatagatatggacctcggtggttttctccacattaggaaagctggaagagccttttgaactcagtttttttgctaacagtggtgttatggtgaaacagagttttgtgtgtatgtaccaacagataaaatgtaaacacgacattatcatagttgagtacaggaataattatctcgtatatcttattgcaaaatctgaaacagttctcctgtagatggttagcttgcattttacgctacattcgttattatgaaacagatggacgatttacgttaaaatttatactcatttacgttgtttt

SEQ ID NO: 199759 - DNA, 1569 bp, Zea Mays
ccccgacagttgttgtgtgtaagaaaaatagggtttcagtggcggcagcctccactcacgccgccgtcgcctccgagccccactgcccgatccagacaaccaccccgcccagatccagatccacctgtactggatctcacagcctccgcttctgctttcctttatgtcgtcgaccgcgatgtcttgggacgggtacggcgggcagatctaccctggaggcggtgttccagcagcctgagacgaccccccttgcaggcgccgacgggggagatggagctgccgagcaacgctggcgacggcgaactcctgcccatggaggagcacaaggagcgcgcgctgcggcacctactccgccgatccaagcgcccgctggaggagttcgtggccgccgtggcagacgtcgcggagcagctggtgagcgcgtatctggacctgggcgtcgagtggcgcggcgcagactggcgggagcggttcctggccagtcgtacgatagcgcgagctcgatggccaggcgtaggtacccaactgtcttcttccccttccttttagattccattgagattcgtcagaacttttatgcgagttccttttttagccgataattatgtcagtatcttgagataagatggatgaattggattcaacacatatatatttgttgtggatgtagccacctttcttgcttcgtgaattatttgttgtggatgtaattccaatggaaaatatatattattgaggttagcttcagctgcgttccagttatatcgcagttactcctgcttttgggattgagctggcgttttggttatttagagtgttaatttgactcttttagttgcattatagggatctgacatcatttaaaataatttaggatgatttcattagtgatatgattctgaaaaatggtaaaggatgctttagtttcgtccagcataatttacctaataattttaggacactaaatttggttgagaattccaaaaatgagcttaaatcatgtgatcggtccgctagcatcacatagttgttgtcttcctgtcgtgcccatgtatgtatcttggaacaagtttgtgtgaccaaataatttgcatcagggcacacgtcacaccgggtggcaactggcagggcaatgcccgatcaggtctccgtcgtcgattcgtctgaacagctatcctcatcatattttaatgtctcgagcataatacggagtacatatctgtatttacgtcagcgttattgcaacgctctctctccgtggtctcttctacatactataatagtagtacattagtactaacaatgtggttggccatggcatgcttgcttcgagatcaacatgaacaatggaagcacaagtacgggaatccatgtagaagcgtgaagattttccggtgccaattgccacggaataatgccttctactcagctcaacctccaaagcatgatggctctgacaaaccactctgtccaggagctcctgtatgccactggtgtggtacctggaaaggtgataaaatatgtagtagctgcaagaaagcaagattgatggctcttgattgctgtttc

SEQ ID NO: 199760 - DNA, 1002 bp, Zea Mays
ccccgacagttgttgtgtgtaagaaaaatagggtttcagtggcggcagcctccactcacgccgccgtcgcctccgagccccactgcccgatccagacaaccaccccgcccagatccagatccacctgtactggatctcacagcctccgcttctgctttcctttatgtcgtcgaccgcgatgtcttgggacgggcgccgacgggggagatggagctgccgagcaacgctggcgacggcgaactcctgcccatggaggagcacaaggagcgcgcgctgcggcacctactccgccgatccaagcgcccgctggaggagttcgtggccgccgtggcagacgtcgcggagcagctggtgagcgcgtatctggacctgggcgtcgagtggcgcggcgcagactggcgggagcggttcctggccagtcgtacgatagcgcgagctcgatggccaggcggcacacgtcacaccgggtggcaactggcagggcaatgcccgatcaggtctccgtcgtcgattcgtctgaacagctatcctcatcatattttaatgtctcgagcataatacggagtacatatctgtatttacgtcagcgttattgcaacgctctctctccgtggtctcttctacatactataatagtagtacattagtactaacaatgtggttggccatggcatgcttgcttcgagatcaacatgaacaatggaagcacaagtacgggaatccatgtagaaggtgatgaaaatcttgtatctgtaatggtttttgttcagatatcttctgattttgatggtttgcagtggattgttttccagcgtgaagattttccggtgccaattgccacggaataatgccttctactcagctcaacctccaaagcatgatggctctgacaaaccactctgtccaggagctcctgtatgccactggtgtggtacctggaaaggtgataaaatatgtagtagctgcaagaaagcaagattgatggctcttgattgctgtttc

SEQ ID NO: 199761 - DNA, 1328 bp, Zea Mays
ccccgacagttgttgtgtgtaagaaaaatagggtttcagtggcggcagcctccactcacgccgccgtcgcctccgagccccactgcccgatccagacaaccaccccgcccagatccagatccacctgtactggatctcacagcctccgcttctgctttcctttatgtcgtcgaccgcgatgtcttgggacgggtacggcgggcagatctaccctggaggcggtgttccagcagcctgagacgaccccccttgcaggcgccgacgggggagatggagctgccgagcaacgctggcgacggcgaactcctgcccatggaggagcacaaggagcgcgcgctgcggcacctactccgccgatccaagcgcccgctggaggagttcgtggccgccgtggcagacgtcgcggagcagctggtgagcgcgtatctggacctgggcgtcgagtggcgcggcgcagactggcgggagcggttcctggccagtcgtacgatagcgcgagctcgatggccaggcgtagggcacacgtcacaccgggtggcaactggcagggcaatgcccgatcaggtctccgtcgtcgattcgtctgaacagctatcctcatcatattttaatgtctcgagcataatacggagtacatatctgtatttacgtcagcgttattgcaacgctctctctccgtggtctcttctacatactataatagtagtacattagtactaacaatgtggttggccatggcatgcttgcttcgagatcaacatgaacaatggaagcacaagtacgggaatccatgtagaagcgtgaagattttccggtgccaattgccacggaataatgccttctactcagctcaacctccaaagcatgatggctctgacaaaccactctgtccaggagctcctgtatgccactggtgtggtacctggaaaggtgataaaatatgtagtagctgcaagaaagcaaggtactgttatgagaaacatcagggatttgtttggcttccaaatggtttgttggtcctaaaatagtcagaatcacatgacatctgtgctatagatatggacctcggtggttttctccacattaggaaagctggaagagccttttgaactcagtttttttgctaacagtggtgttatggtgaaacagagttttgtgtgtatgtaccaacagataaaatgtaaacacgacattatcatagttgagtacaggaataattatctcgtatatcttattgcaaaatctgaaacagttctcctgtagatggttagcttgcattttacgctacattcgttattatgaaacagatggacgatttacgttaaaat

SEQ ID NO: 199762 - DNA, 1775 bp, Zea Mays
ccccgacagttgttgtgtgtaagaaaaatagggtttcagtggcggcagcctccactcacgccgccgtcgcctccgagccccactgcccgatccagacaaccaccccgcccagatccagatccacctgtactggatctcacagcctccgcttctgctttcctttatgtcgtcgaccgcgatgtcttgggacgggcgccgacgggggagatggagctgccgagcaacgctggcgacggcgaactcctgcccatggaggagcacaaggagcgcgcgctgcggcacctactccgccgatccaagcgcccgctggaggagttcgtggccgccgtggcagacgtcgcggagcagctggtgagcgcgtatctggacctgggcgtcgagtggcgcggcgcagactggcgggagcggttcctggccagtcgtacgatagcgcgagctcgatggccaggcgtagggcacacgtcacaccgggtggcaactggcagggcaatgcccgatcaggtctccgtcgtcgattcgtctgaacagctatcctcatcatattttaatgtctcgagcataatacggagtacatatctgtatttacgtcagcgttattgcaacgctctctctccgtggtctcttctacatactataatagtagtacattagtactaacaatgtggttggccatggcatgcttgcttcgagatcaacatgaacaatggaagcacaagtacgggaatccatgtagaagtggattgttttccagcgtgaagattttccggtgccaattgccacggaataatgccttctactcagctcaacctccaaagcatgatggctctgacaaaccactctgtccaggagctcctgtatgccactggtgtggtacctggaaaggtgataaaatatgtagtagctgcaagaaagcaaggtactgttatgagaaacatcaggcactgcattggcgtactggtcataaaaatgattgcctccagataataagttctgttgcttcaaattcagttctgccagctgtaggaataggtgattatctttttttatatggctgacaatgatagtatactcagtatcaaagaatatagtttttgaattgtgttttctgctaggtacgacatctattaatttttttgtttgttatatatgttttttctccacaaacattctttagatttgatagccttttaagcgactagttatatgggacctggaagtctttttatgtcttctagtgtacttcactatgcacttatttctatctcaagaattgctgctatgattagtcagcggttagtgacacttgtttttttccccactattgctttttagaggtgatgctgatgtgcaagcatcttcaccttgagttctgccttgccagaatgaatcaagtttattttcccatcctgctccatttgaggcaaattgaacagggatttgtttggcttccaaatggtttgttggtcctaaaatagtcagaatcacatgacatctgtgctatagatatggacctcggtggttttctccacattaggaaagctggaagagccttttgaactcagtttttttgctaacagtggtgttatggtgaaacagagttttgtgtgtatgtaccaacagataaaatgtaaacacgacattatcatagttgagtacaggaataattatctcgtatatcttattgcaaaatctgaaacagttctcctgtagatggttagcttgcattttacgctacattcgttattatgaaacagatggacgatttacgttaaaat

SEQ ID NO: 199763 - DNA, 1792 bp, Zea Mays
ttttgttgtacataagtttacgtttattttgctataacactatcgtataaaacagatcactctatccaacctccccgacagttgttgtgtgtaagaaaaatagggtttcagtggcggcagcctccactcacgccgccgtcgcctccgagccccactgcccgatccagacaaccaccccgcccagatccagatccacctgtactggatctcacagcctccgcttctgctttcctttatgtcgtcgaccgcgatgtcttgggacgggtacggcgggcagatctaccctggaggcggtgttccagcagcctgagacgaccccccttgcaggcgccgacgggggagatggagctgccgagcaacgctggcgacggcgaactcctgcccatggaggagcacaaggagcgcgcgctgcggcacctactccgccgatccaagcgcccgctggaggagttcgtggccgccgtggcagacgtcgcggagcagctgggcacacgtcacaccgggtggcaactggcagggcaatgcccgatcaggtctccgtcgtcgattcgtctgaacagctatcctcatcatattttaatgtctcgagcataatacggagtacatatctgtatttacgtcagcgttattgcaacgctctctctccgtggtctcttctacatactataatagtagtacattagtactaacaatgtggttggccatggcatgcttgcttcgagatcaacatgaacaatggaagcacaagtacgggaatccatgtagaagcgtgaagattttccggtgccaattgccacggaataatgccttctactcagctcaacctccaaagcatgatggctctgacaaaccactctgtccaggagctcctgtatgccactggtgtggtacctggaaaggtgataaaatatgtagtagctgcaagaaagcaaggtactgttatgagaaacatcaggcactgcattggcgtactggtcataaaaatgattgcctccagataataagttctgttgcttcaaattcagttctgccagctgtaggaataggtgattatctttttttatatggctgacaatgatagtatactcagtatcaaagaatatagtttttgaattgtgttttctgctaggtacgacatctattaatttttttgtttgttatatatgttttttctccacaaacattctttagatttgatagccttttaagcgactagttatatgggacctggaagtctttttatgtcttctagtgtacttcactatgcacttatttctatctcaagaattgctgctatgattagtcagcggttagtgacacttgtttttttccccactattgctttttagaggtgatgctgatgtgcaagcatcttcaccttgagttctgccttgccagaatgaatcaagtttattttcccatcctgctccatttgaggcaaattgaacagggatttgtttggcttccaaatggtttgttggtcctaaaatagtcagaatcacatgacatctgtgctatagatatggacctcggtggttttctccacattaggaaagctggaagagccttttgaactcagtttttttgctaacagtggtgttatggtgaaacagagttttgtgtgtatgtaccaacagataaaatgtaaacacgacattatcatagttgagtacaggaataattatctcgtatatcttattgcaaaatctgaaacagttctcctgtagatggttagcttgcattttacgctacattcgttattatgaaacagatggacgatttacgttaaaat

SEQ ID NO: 199764 - DNA, 1006 bp, Zea Mays
ccccgacagttgttgtgtgtaagaaaaatagggtttcagtggcggcagcctccactcacgccgccgtcgcctccgagccccactgcccgatccagacaaccaccccgcccagatccagatccacctgtactggatctcacagcctccgcttctgctttcctttatgtcgtcgaccgcgatgtcttgggacgggcgccgacgggggagatggagctgccgagcaacgctggcgacggcgaactcctgcccatggaggagcacaaggagcgcgcgctgcggcacctactccgccgatccaagcgcccgctggaggagttcgtggccgccgtggcagacgtcgcggagcagctggtgagcgcgtatctggacctgggcgtcgagtggcgcggcgcagactggcgggagcggttcctggccagtcgtacgatagcgcgagctcgatggccaggcgtagggcacacgtcacaccgggtggcaactggcagggcaatgcccgatcaggtctccgtcgtcgattcgtctgaacagctatcctcatcatattttaatgtctcgagcataatacggagtacatatctgtatttacgtcagcgttattgcaacgctctctctccgtggtctcttctacatactataatagtagtacattagtactaacaatgtggttggccatggcatgcttgcttcgagatcaacatgaacaatggaagcacaagtacgggaatccatgtagaaggtgatgaaaatcttgtatctgtaatggtttttgttcagatatcttctgattttgatggtttgcagtggattgttttccagcgtgaagattttccggtgccaattgccacggaataatgccttctactcagctcaacctccaaagcatgatggctctgacaaaccactctgtccaggagctcctgtatgccactggtgtggtacctggaaaggtgataaaatatgtagtagctgcaagaaagcaagattgatggctcttgattgctgtttc

SEQ ID NO: 199765 - DNA, 966 bp, Zea Mays
ccccgacagttgttgtgtgtaagaaaaatagggtttcagtggcggcagcctccactcacgccgccgtcgcctccgagccccactgcccgatccagacaaccaccccgcccagatccagatccacctgtactggatctcacagcctccgcttctgctttcctttatgtcgtcgaccgcgatgtcttgggacgggtacggcgggcagatctaccctggaggcggtgttccagcagcctgagacgaccccccttgcaggcgccgacgggggagatggagctgccgagcaacgctggcgacggcgaactcctgcccatggaggagcacaaggagcgcgcgctgcggcacctactccgccgatccaagcgcccgctggaggagttcgtggccgccgtggcagacgtcgcggagcagctgggcacacgtcacaccgggtggcaactggcagggcaatgcccgatcaggtctccgtcgtcgattcgtctgaacagctatcctcatcatattttaatgtctcgagcataatacggagtacatatctgtatttacgtcagcgttattgcaacgctctctctccgtggtctcttctacatactataatagtagtacattagtactaacaatgtggttggccatggcatgcttgcttcgagatcaacatgaacaatggaagcacaagtacgggaatccatgtagaaggtgatgaaaatcttgtatctgtaatggtttttgttcagatatcttctgattttgatggtttgcagtggattgttttccagcgtgaagattttccggtgccaattgccacggaataatgccttctactcagctcaacctccaaagcatgatggctctgacaaaccactctgtccaggagctcctgtatgccactggtgtggtacctggaaaggtgataaaatatgtagtagctgcaagaaagcaagattgatggctcttgattgctgtttc

SEQ ID NO: 199766 - DNA, 1286 bp, Zea Mays
ccccactgctgcccattcctctcatcccagcgaacgaccctccagcacgccatccgcttagccgccccggagcattgccatcgtcgccatcgtcgccgccaccttctatcccggtgtggagcgggagagaacccgtctgcactcagaagctggtttaatccgttaattcaagggtatcaagtgcacccttggggcttgtttcttcgttgaatttcaacaggggatgcaagggaaagaacaaaatattcaatgtggatagacacaccaagtatagtacttctttctgttatgcgccaagaaatgccagaatcacaccactagcaactgcatcatttggggatatggctgattcttcaactcctatctttccccgaatccatgtaaaagatccatatcagcgtctcggaatcagcagggaagcatcagaagaagaaattcgagctgctaggaactatctgataagcaagtatgcaggccacaagccaagtgttgatgcaattgagtctgcccatgacaggattatcatgcagagtttctttgataggaaaaaaccaaaaatgaatctcaagaaaaaatttagggaacttagtcagtcacgtgcagtgaaggctattcaaggcagatttcaaacaccacgtagcaaagtcatttggcagacagctattgcttttgtcttgcttggagtgcttacccttgctttccctaccgaagaagggccaaccctccaggtggccatctcttgtgcagcaaatatctatttcatttatcagagggtcaaaagtggatggcgagcattcttttatgggtttggttctttctttgcttcctggttccttggcaccttcttgatggtatctgtaattccccctatactccccggtccaagaaacttggaagtgagcaccgcgtgtgttacttatgtgctccttttcatatcgtcgaccttcttgaagtaagagatctttgtgtttccatgttagcgcaaagtcttgcaggagttataaacatggtatcatgcttcaaatagcttgtacaatccatcggctttttctttgcttgtttcacgtttatggagctggaaatgctagttctttagtgagttgatagtagttttcaggttgcaatgtgagatgtagaacgtttttttgcctaggcccgtgatatcttgagcagggtctaacacctcttgtgggtattttcagttgatgtattaaatacagttgtgttcgaatagatcatatgagataatatctcatcagtcttcttttggatggacatcacgtcac

SEQ ID NO: 199767 - DNA, 1262 bp, Zea Mays
cagcgaacgaccctccagcacgccatccgcttagccgccccggagcattgccatcgtcgccatcgtcgccgccaccttctatcccggtgtggagcgggagagaacccgtctgcactcagaagctggtttaatccggtgttaattcaagggtatcaagtgcacccttggggcttgtttcttcgttgaatttcaacaggggatgcaagggaaagaacaaaatattcaatgtggatagacacaccaagtatagtacttctttctgttatgcgccaagaaatgccagaatcacaccactagcaactgcatcatttggggatatggctgattcttcaactcctatctttccccgaatccatgtaaaagatccatatcagcgtctcggaatcagcagggaagcatcagaagaagaaattcgagctgctaggaactatctgataagcaagtatgcaggccacaagccaagtgttgatgcaattgagtctgcccatgacaggattatcatgcagagtttctttgataggaaaaaaccaaaaatgaatctcaagaaaaaatttagggaacttagtcagtcacgtgcagtgaaggctattcaaggcagatttcaaacaccacgtagcaaagtcatttggcagacagctattgcttttgtcttgcttggagtgcttacccttgctttccctaccgaagaagggccaaccctccaggtggccatctcttgtgcagcaaatatctatttcatttatcagagggtcaaaagtggatggcgagcattcttttatgggtttggttctttctttgcttcctggttccttggcaccttcttgatggtatctgtaattccccctatactccccggtccaagaaacttggaagtgagcaccgcgtgtgttacttatgtgctccttttcatatcgtcgaccttcttgaagtaagagatctttgtgtttccatgttagcgcaaagtcttgcaggagttataaacatggtatcatgcttcaaatagcttgtacaatccatcggctttttctttgcttgtttcacgtttatggagctggaaatgctagttctttagtgagttgatagtagttttcaggttgcaatgtgagatgtagaacgtttttttgcctaggcccgtgatatcttgagcagggtctaacacctcttgtgggtattttcagttgatgtattaaatacagttgtgttcgaatagatcatatgagataatatctcatcagtcttcttttggatggacatcacgtcac

SEQ ID NO: 199768 - DNA, 1219 bp, Zea Mays
tcgatggagcacaagtcgtgtctaaaatattcagattgctaagatgttgggtcatggtctagtaactgatccctcaagaaccttacgatgtccagttaattcaagggtatcaagtgcacccttggggcttgtttcttcgttgaatttcaacaggggatgcaagggaaagaacaaaatattcaatgtggatagacacaccaagtatagtacttctttctgttatgcgccaagaaatgccagaatcacaccactagcaactgcatcatttggggatatggctgattcttcaactcctatctttccccgaatccatgtaaaagatccatatcagcgtctcggaatcagcagggaagcatcagaagaagaaattcgagctgctaggaactatctgataagcaagtatgcaggccacaagccaagtgttgatgcaattgagtctgcccatgacaggattatcatgcagagtttctttgataggaaaaaaccaaaaatgaatctcaagaaaaaatttagggaacttagtcagtcacgtgcagtgaaggctattcaaggcagatttcaaacaccacgtagcaaagtcatttggcagacagctattgcttttgtcttgcttggagtgcttacccttgctttccctaccgaagaagggccaaccctccaggtggccatctcttgtgcagcaaatatctatttcatttatcagagggtcaaaagtggatggcgagcattcttttatgggtttggttctttctttgcttcctggttccttggcaccttcttgatggtatctgtaattccccctatactccccggtccaagaaacttggaagtgagcaccgcgtgtgttacttatgtgctccttttcatatcgtcgaccttcttgaagtaagagatctttgtgtttccatgttagcgcaaagtcttgcaggagttataaacatggtatcatgcttcaaatagcttgtacaatccatcggctttttctttgcttgtttcacgtttatggagctggaaatgctagttctttagtgagttgatagtagttttcaggttgcaatgtgagatgtagaacgtttttttgcctaggcccgtgatatcttgagcagggtctaacacctcttgtgggtattttcagttgatgtattaaatacagttgtgttcgaatagatcatatgagataatatctcatcagtcttcttttggatggacatcacgtcac

SEQ ID NO: 199769 - DNA, 441 bp, Zea Mays
gagcccattacacgtcccggttccaaaacgttccagtccctctcacaatccaccaacagcaaccacgtgtcgtgaatgcttttcccattcacgcacatccacccgccgccacgcatcgcacaaacgcgctcccggtccgaaaggcaaaccagccaccagtcccaccaccaccaccctctgtcttcgcctccgctgccgattcgaaagcacccgtcctgtcccctcgcaaaaccctagctccagccaccatgaagggcaaggctgacacctccaagaaggacgagggcaggctccgggcgggcggcgccgccggaaagcgcaagaaggccgccgcgagcggcaagcccaagcgcccgccctccgccttcttcgtcttcatgtctgaattcaggcaggagtatcaggcgctgcaccctggcaacaagagcgttgcgacctgag

SEQ ID NO: 199770 - DNA, 937 bp, Zea Mays
ccagctataaatttgaatttccaaccccagatgaccgccctgggccaccaatcatcagcttcagtgatgcctcatttggttaccctggagggcctaccttgtttaaaaatttgaattttggtatcgacctggacagccgcatagcaatggttggtcctaatggcattggcaagtccactatactgaaactaatttctggggatctgcagccaacttctggaacagtatttcgctctcccaaggttcgcatggctgtattcaatcagcatcatgttgatggccttgatttgacggtgaatccccttttgtacatgatgaagtgctatccgggtgtgccggagcagaagttgagggcacatctgggttcgtttggtgtttcgggaagccttgccctccaatctatgtacactttatcaggtggtcagaagagtagggttgcattcgcgaaaataaccttcaagaagccgcacatcattctccttgacgagccttctaaccatcttgatctggacgctgttgaggcgctcatccagggtttactcatttttcagggaggggtgctgatggtgagtcacgatgagcatcttatcactggaagcgtggacgagctttgggtggtgtcggaaggcagggtgaccccgttctcgggcactttcaaggactacaagaagatgctcaagtaacaaaaacatgtattatcgaccatagcctatatatctatatgcttgctattatgttgtattaccgtataaattttgggagtaaagcatcgaaattattataacacatacctaatgccgaaaggagaagatttctcacatttttagttcgacccatccgtccatcccataggatcctatttcgttcagcttttttctaattagattttatgagaatttgaatatcgcggagattacacgtggaggaaaataacgat

SEQ ID NO: 199771 - DNA, 2003 bp, Zea Mays
gatcaccacatcatgcaattcttggttcaatatcaaatgcatgttgcggagatggagacacttagggctggaatgcctcctgtttatgtaaaccacagtaatgatggtgggccagctgttagggatatacatatggagaacttcagtgtcactgttggtggtcgtgatctaattcaagaagccactataacacttgcttttgggaggcactatggacttgttggaagaaacgggactgggaagacatcttttctcagagcgatggcattgcatgcaattgatggtattcctaagaactgccagatattgcatgttgagcaagaggtcgtgggtgacgatacgacagctttgcagtgtgttctgaacgccgatgtcgaacgagttcaacttttgcaggaagaagctcgtcttgttcaacaacagaaagatttagagattgaggctgagtttgggcagagctctgacaagggcaaggatggttttgacaaagattctatcagcaagaggcttgaggagatatataaacggcttgagctcattgatgcggatgcagcagaggctcgcgcagcatcaattttggcgggtcttagttttactccagaaatgcaacgcaagcgtacaaaacaattttctggtggatggcgcatgagaatagctctagcacgtgctctgttcattgagcctgatttgctactacttgatgagccgacaaaccatcttgatcttcatgctgtgttatggctagaaacttatctcctgaagtggccaaagacattcattgttgtatcacacgcaagggagtttttgaatacggttgtcaccgatatccttcatctgcatggtagaaaactacatgcttacaaaggtgactatgacacatttgagaggacaagggaagagcaccttaagaatcagcagaaagcctttgaaacaaatgagaaggccagacagcacatgcagacattcattgacaagtttcggtacaatgcaaagagagcatcacttgttcaatcaagaatcaaggcattggagcgaatggaacatgttgatgcagttgtcagcgatccagactataaatttgaatttccaaccccagatgaccgccctgggccaccaatcatcagcttcagtgatgcctcatttggttaccctggagggcctaccttgtttaaaaatttgaattttggtatcgacctggacagccgcatagcaatggttggtcctaatggcattggcaagtccactatactgaaactaatttctggggatctgcagccaacttctggaacagtatttcgctctcccaaggttcgcatggctgtattcaatcagcatcatgttgatggccttgatttgacggtgaatccccttttgtacatgatgaagtgctatccgggtgtgccggagcagaagttgagggcacatctgggttcgtttggtgtttcgggaagccttgccctccaatctatgtacactttatcaggtggtcagaagagtagggttgcattcgcgaaaataaccttcaagaagccgcacatcattctccttgacgagccttctaaccatcttgatctggacgctgttgaggcgctcatccagggtttactcatttttcagggaggggtgctgatggtgagtcacgatgagcatcttatcactggaagcgtggacgagctttgggtggtgtcggaaggcagggtgaccccgttctcgggcactttcaaggactacaagaagatgctcaagtaacaaaaacatgtattatcgaccatagcctatatatctatatgcttgctattatgttgtattaccgtataaattttgggagtaaagcatcgaaattattataacacatacctaatgccgaaaggagaagatttctcacatttttagttcgacccatccgtccatcccataggatcctatttcgttcagcttttttctaattagattttatgagaatttgaatatcgcggagattacacgtggaggaaaataacgat

SEQ ID NO: 199772 - DNA, 2240 bp, Zea Mays
tggactgctcggattctgtggttccttattttttttctttctgtctgcagtaagctttgtgaaaagtttggaaagcatggtctggtgaaaccgaaacaagctatgcgcagccttgtcacaccattacgaatgaatgcggggatggacgatgatgtcgctcccaaaaagccgcagcctgaagtattcgatggaccactgctgtcttcgcgcgataaagccaagattgaacggagaaaaagaaaagaggagaggcaaagagaggttcaatatcaaatgcatgttgcggagatggagacacttagggctggaatgcctcctgtttatgtaaaccacagtaatgatggtgggccagctgttagggatatacatatggagaacttcagtgtcactgttggtggtcgtgatctaattcaagaagccactataacacttgcttttgggaggcactatggacttgttggaagaaacgggactgggaagacatcttttctcagagcgatggcattgcatgcaattgatggtattcctaagaactgccagatattgcatgttgagcaagaggtcgtgggtgacgatacgacagctttgcagtgtgttctgaacgccgatgtcgaacgagttcaacttttgcaggaagaagctcgtcttgttcaacaacagaaagatttagagattgaggctgagtttgggcagagctctgacaagggcaaggatggttttgacaaagattctatcagcaagaggcttgaggagatatataaacggcttgagctcattgatgcggatgcagcagaggctcgcgcagcatcaattttggcgggtcttagttttactccagaaatgcaacgcaagcgtacaaaacaattttctggtggatggcgcatgagaatagctctagcacgtgctctgttcattgagcctgatttgctactacttgatgagccgacaaaccatcttgatcttcatgctgtgttatggctagaaacttatctcctgaagtggccaaagacattcattgttgtatcacacgcaagggagtttttgaatacggttgtcaccgatatccttcatctgcatggtagaaaactacatgcttacaaaggtgactatgacacatttgagaggacaagggaagagcaccttaagaatcagcagaaagcctttgaaacaaatgagaaggccagacagcacatgcagacattcattgacaagtttcggtacaatgcaaagagagcatcacttgttcaatcaagaatcaaggcattggagcgaatggaacatgttgatgcagttgtcagcgatccagactataaatttgaatttccaaccccagatgaccgccctgggccaccaatcatcagcttcagtgatgcctcatttggttaccctggagggcctaccttgtttaaaaatttgaattttggtatcgacctggacagccgcatagcaatggttggtcctaatggcattggcaagtccactatactgaaactaatttctggggatctgcagccaacttctggaacagtatttcgctctcccaaggttcgcatggctgtattcaatcagcatcatgttgatggccttgatttgacggtgaatccccttttgtacatgatgaagtgctatccgggtgtgccggagcagaagttgagggcacatctgggttcgtttggtgtttcgggaagccttgccctccaatctatgtacactttatcaggtggtcagaagagtagggttgcattcgcgaaaataaccttcaagaagccgcacatcattctccttgacgagccttctaaccatcttgatctggacgctgttgaggcgctcatccagggtttactcatttttcagggaggggtgctgatggtgagtcacgatgagcatcttatcactggaagcgtggacgagctttgggtggtgtcggaaggcagggtgaccccgttctcgggcactttcaaggactacaagaagatgctcaagtaacaaaaacatgtattatcgaccatagcctatatatctatatgcttgctattatgttgtattaccgtataaattttgggagtaaagcatcgaaattattataacacatacctaatgccgaaaggagaagatttctcacatttttagttcgacccatccgtccatcccataggatcctatttcgttcagcttttttctaattagattttatgagaatttgaatatcgcggagattacacgtggaggaaaataacgat

SEQ ID NO: 199773 - DNA, 2236 bp, Zea Mays
cttgttgagattgtagatttctgctgtgggtcaaatgattttagccggcttatgaaagaaaaactcgacaaagttcagaaaaagtgccatttcaagaattatgatcttatccaaccacagcatcacttctgctttgaaaagagggattggatgactgtgcaaccaaatgaactgcctcgtggatcccaactaattatggggcttaatcctccttttggagtaaaagcaagtcttgcgaacaaatttattgacaaagcattgacattcaagcctaagctcattgtactaattgtccctaaagaaacaaaaaggttagataagaagaagataccttatgatttgatttgggaagacagtgagtgtcttgctgggaagtccttctatttgcctggttctgtggatcttaatgataatacagttgaagggtggaatgcatccgcgccacccctctatttgtggagtcatcctcattggacaaagaagcacatgcaagtggctgaagagcatggtcacacttgcatggggaagatagcttcccatgttgaaaagagaaatctgtcagatgatctgcccgtgaggaaacaatctgaggctgcaaacaaatggaactccagatcagggaaagagactacatgcaatgacagaaaggacaatctacttgatgatgttactgctaagaagcaagcaggacctgaagaagaaaaggaaactctagggaagatggaccaccatgtgaaaaaggctactataccagatagccttacagtgaagaaacaaactgaagcttccagcaaagctctctctcattgtggaaatgatagaaagattggcaggtacagcagcaggaaatatgatgactggagaagtaagcggacacctgatcacgaagagagcttcccacctgaaaagcaagtggaagttgcatatgaggagacaaaagttattattccaagcaaaaagattactcataacgaacaaagcggtgcttgccgtgaaaatagaaagaattcttgtgtggaggaaaccaagaacgtggagtacaactatgagcagcagactgcagcagggatgaggttcagagagggagaggattctgacatgagtatctcacccccctcgagaccagttgaaccctttgatatgatagctcaccccattggctctctgacaaaagaaccttttgaccctgtgctcaatagaggggctactcatcaggacagttatgcagtaaccaaagaggaatacctgggtcaatttaagaggaaaaacgaccgtacctttactgacattgatgatagctcaaggatgaggggctccagcatcgaagaagtgaccaggccctatattgctgctccaaccagtgatccctacagcttgcggtatagaggagatggcagcttctacaggcatccgagctcagaggatttaaacactacaggcatcagtgcaggatatggacaaattggtggtgacagttacccacaagcaacaggctcgcaaacacataatactagaatgcatggtggaacaagtgatgataattacctgtcggcgagatactcccttggatattcaggttctcgctttagccaaccagcttcaactgttcccgcttttgggctctcaggtgcaagttcacaacgaggctcagtaatagacaagtattcctatgggctctcgggtcccactggaccacaggattctggtattaacagatatgctccaccggacgacggaacgagcacaagatccaagagctccttggctgaacaacagtacccgttcggacaatctggctcttccggtggcgagtggcctcatatctgatcgctggaacttgttgtcgaagtttttttttcaaggcaaaaactgtgggaagttctccacggtacttcattttcatttttagaggggattacatgttatcaaaatcatgcagcttttgacctgacctgggtgtaaattggagtaaaaccacaagcatctatccatgcggggctggtgttaaaaagcaaagttgtttcttataaaactgtctacagcagtctatccatgatttacccaaaattactgttttgtactgtagactgcattgtttgcataatgaagtttgaatatagatgaggatgggtaagagatagactaaggtagtttcatcatacatataagagttgtaatgacatataagtttgaatatagatgaggatggctatccgaggacatgccctttgcacag
